United States Patent Application Publication US 2015/0315605 A1 - sequence listing, part 32

SEQ ID NO: 59155 - protein, 629 aa, Zea Mays
MDGCDCIEPLWQADDLLMKYQYISDFFIALAYFSIPLELIYFVQKSAFFPYRWVLIQFGAFIVLCGATHLINMWTFTTHTKTIAVVLTVAKVATAVVSCITALMLVHIIPDLLSVKLRERFLKAKAEELDREMGIIRTQEETGRHVHMLTHEIRSTLDRHTILRTTLVEMRRTLGLAECAVWMPSRSGTTLQLSHALHTNAPLGSVVPINLPIVATIFNSNRAERIPHTSPLASVKAQKSKYVPPEVVAVRVPLLQLTNFQINGWPELSAKAFAVLVLMLPPDSARKWRPHELELVEVVADQVAVALSHAAILEESMQARDLLLEQNIALDAARREAEMAICARNDFLAVMNHEMRTPMRAIISLSSLLLETKLTAEQRVMIETILKSSDLLETLSNDVLDISKLGDGSLELEIAPFNLHATFTDVVDLIKPVAALKRLSVMVHLAPELPTCAIGDRKRLMQIILNVAGNSVKFTKEGHISVSASIARPDSLRDPYALDLHPVLSDGSFYLAVQVKDTGCGISPQDMPHTFTRFAHQQNATNKLRSGNGLGLALSRRFVALMQGNIWLESEGVGKGCTATFFVKLGLSDANLRRMVPPVQPKHGNADPDVSSIINGDMAILPRCYQSMI

SEQ ID NO: 59156 - protein, 751 aa, Zea Mays
MRPHTHRMENDQRRLPNQGQMSGPSHEFRVVRDNRFQHGVVENRPEPGHKGSADVQMSDRSTVVQSARNLSPATTSDGQITHQNAMQNSQSDITQGKRDGQGTTQKHAKPYLKNSQNEQHFPGSDPAHGSATVRIAGGTVGPTRRHVGVINSSRQFVGRSGSQMHAPGGSSYANIQRGSFTSVGASGRYSAFMSRNIQQNLRADTTFRGRPTGRSFIAQNVNRYHQGPTTNQKVHPIKEWKPKLTKKSPTIDAENSIADAASPSASNCENANTTDVNGLPEKLSQANLHEVEHVIIPEHLRVPEYEQTKLRFGSFTPDLDLEQVPDLTPQDTEQPEHVQEPVQQVSEGDSLDDGHDDMDEQARSSQHLSSSTAEISLSPSEDSDQMSGQVENDDGLGLVQSDTPVGAADGDSTQITSTLTAFSAYGHKDPNIHTTNEAQLYGLVEPNVHPQALASSSQGYPSENPEADNAVQVFRMPDSNVHSQVLPSTSEALNPQIVSNSPVPISSQQQHISQQQAATQMYPQMHVQHFPNFMPYRQLYSPVYPMPMPNYSPNVPYPSNGNSYLQMPSGGSHLTAGSVKYGVSQYKPVPSGNPSGYGNYTHPAGFTMGSPGVIGAAVGVDDVNRMKYKDNIYASTPQVETSDIWIQTAREMPPLQVPSYYNIPGQATPGAFVPNPANASFNATSQSPHAQFPGLYHPQQPPSIVSPHPMVHQQVPSAIGPNVGVGVAAPGPQVGAYQQRQIGHMNWRPSF

SEQ ID NO: 59157 - protein, 119 aa, Zea Mays
MDLRISEGSGTNTTLDDQSIQSPTRRAKVWEYFLQELVEVDGVMKAVCKYCGAKLTSKRNSGTNSLRNHVADTCPKIPVEDRKQFIATMRKRTGEGSFVFDPRKTRECMVKWCISAEVA

SEQ ID NO: 59158 - protein, 129 aa, Zea Mays
MLGWGGHDDKKLMIPATVILRHMFTPAELRADEELLPELEADVREECIKFGPVDNVKVCENHPQGVILVRFKDRKDGAKCIEKMNGRWFAGRQIHASEDDGSVNHALIRDYDAEVSRLDRFGQELEEST

SEQ ID NO: 59159 - protein, 506 aa, Zea Mays
MEIGQYPASGCSKEHQKIYQEWFALADADGDGRITGPDAIKFFGMSKLSRPDLKQVWAIADTRRQGYLGFSEFVTAMQLVSLAQAGNEITQDSLKRDDLSSLNPPVMEGLDALLAKSKHLVKRVDPEMDGYPQEQSPLTNKWFSSKSSKKTSSDFDAKPMVMLLGQYSTGKTTFIKHLLRTSYPGAHIGPEPTTDRFVVVMSGSDERTIPGNTIAVQADMPFSGLTTFGTAFLSKFECSQMRHPLLEHITFVDTPGVLSGEKQRTQRSYDFTGVTSWFAAKCDLILLLFDPHKLDISDEFKRVIGSLRGHDDKIRVVLNKADQVDTQQLMRVYGALMWSLGKVLNTPEVSRVYIGSFNDKPVNESAVGPLGKELFEREQDDLLSDLKDIPKKACDRRINEFVKRARAAKIHAYIIGHLKKEMPTMMGKAKAQQRLIDNLPDEFAKVQREYHLPSGDFPYVEHFKEVLSGYSFDKFEKVKPKMVQAVDDMLGYDIPELLKNFRNPYE

SEQ ID NO: 59160 - protein, 489 aa, Zea Mays
MAARQPPPSSASAPAPAAGLSMKDYLKRYVSGPGTDGDQKRAKKKTKKKPKPAGGVLIVDEDPVWQKPVQVDEEPASSGDDKPLVDEDIEVKRMRRLEAIRAARPYNAIAEDGSGWVTVAAPEEQGGGSTHQRRNDTPLPERGRAPTREDLSPVRRRQRRNTPSPVHGDAAAKDFSPPRRRQRRDTPSPVPDGAAAKDFSPPRRRQRRQDTPSPKDSGAADQDDMSPPRKSRQREDLSPPRKGARHITEEPRDISPRKKRDISPSRKSTKEGASKQVKKSGLMTAEEVKEDIRKIKEAEMIKFASQDPSLVGKGAKAVFRDKEGRRISEEEMCKAKEPEKPKEIHIEWGKGLVQKREAESRLKEIEAEKSKPFARTRDDPELDNMLKERIRWGDPMAHLVKRKDPEFILEDLGDDEKMKESGFIVPQSIPTHSWLKRGVDAPPNRYGIKPGRHWDGVDRSNGFEKDMFKLKNEKQAMEQEAYLWSVSDM

SEQ ID NO: 59161 - protein, 84 aa, Zea Mays
MLSFVSGPTTSFVFGPVFHCITNGPEKETSKRKRKSSLKNSYYCRFVVVRFLFSTMCNSSEYNSHLLLGSDSLFLLNAIHLRHV

SEQ ID NO: 59162 - protein, 57 aa, Zea Mays
MVTTGGTSLKDDIVRLYQPVHLLVGTPGRILDLTKKGVCILNDCSMLIMDEIFLQGE

SEQ ID NO: 59163 - protein, 87 aa, Zea Mays
MVAQVVASPDPARSCVVALSPCFLRASAPPALLELLPRRSSQVATPWLLLLSPSSLQLGASSTPPPAVRPMFWTPTLHPPTLQPWTP

SEQ ID NO: 59164 - protein, 664 aa, Zea Mays
MFPKVLQDAMNKRDEQKRLENFANGMREMLAPFEHLARKNHVCPCCERAFTPDEEDEFVKKQRMQNSSTAERSKALAMESSNAEALFQQLDKLRTIYDAYVKLVEETIPLAEKNLNQHLADESQKAQAFDDLLGVLAHVQMDRDAVEALLQPTDTIDRHVHEIQQLVKEVEDLEYALDSSGRGVKSLEEIQLELNFLQRTRDTLIVEVDDLRDQHRMLNEDMSSAQVRWHNAREEKVKASSILERFQKSEEELVLLAEEKEQLIVEKKLLEESLDPLSKEKESLLQEYNALKQKLDEEYHQLAERKREFQQELDALGRLSMKIKGYLDSKKNEKLKELQGRHVLCHSQLQSCMAKQQRISAELNKSKELLQGQGQLKRNIDDNLKYRKTKADVEQLTRDIESLEERLLSIGSLSAIEADLKRHSQEKERLNSEFNRWQGTLSVYQSNISKHKQELKLSQYKDIEKRYTNQFLQLKTTEMANKDLDRYYTALDKALMRFHSMKMEEINKIIKELWQQTYRGQDIDYISINSDSEGAGTRSYSYRVVMQTGDAELEMRGRCSAGQKVLASLIIRLALAETFCLNCGILALDEPTTNLDGPNAESLAAALLRIMEARKGQENFQLIVITHDERFAHLIGQRQLAEKYYRVSKDENQHSIIESQEIFD

SEQ ID NO: 59165 - protein, 57 aa, Zea Mays
MAQWFQSPFGSSGLAWRVEFARCSCIGTASRPHQQHGNTSTTSMPGSRTFSSRTSWT

SEQ ID NO: 59166 - protein, 57 aa, Zea Mays
MSLLKSPMGLMVGFMVLMVFVMPKMMENIDPEEMKQAQEQMRNNPVSFSGLLARAQG

SEQ ID NO: 59167 - protein, 403 aa, Zea Mays
MVAIPNVMLDTMTDYDTAKEWVRRNVSRYNFDGGVTIKYVAVGNEPFLAAYNGTFDKVTFPALQNIQNALNEAGLGDTVKATVPLNADVYMSPKDNPVPSAGRWCKFPEAKTGAPFTVNHLPRSSPCSETTTSPVDFAFFDGGRRAAGWDPGSGVSYTNVFDANFDTLVAALKSVGHGDMPVVVGEVGWPTDGDKHATNAYAQRFYNGLLRRLAANAGTPARPNQYIEVYLFGLLDEDVKSVAPGNFERHWGILRYDGQPKYPMDLSGQGQNAMLVPARGVEYLPRTWCVVNTNAGNMDKLADNINYACTFADCTALGYGSTCGGMDSNGNASYAFNAFFQVQNQKEEACGFQGLAVPTQTDPSTAACNFTIQIATTSAGHRRPLGVGVLAFALAQLVLLLLH

SEQ ID NO: 59168 - protein, 343 aa, Zea Mays
MEAHLSEFWVFDLHQILEATDNFSEENKLGEGGFGPVYKGQLPEGVEIAVKRLASHSGQGFVEFKNEVQLIAKLQHRNLVRHLGCCSQEEEKILVYEYLPNKSLDLFIFADEDRRSLLDWNNRLAIIEGTAEGLLYLHKHSRLRVIHRDLKPSNILLDSEMNPKISDFGLAKIFSSNDVSSEGGTTTRRVVGTYGYMAPEYASEGLFSVKSDVFSFGVLVLEIISGKRNSGIHECGDFINILGYTWQLYEEGRWRELVDASLLSMQHHSDEIMMVIMRCMNIGLLCVQENAADRPTMLDVVAMLSTKTKVLDKPNHPAYFNVRVGNEEASTTATTMSCSVSMR

SEQ ID NO: 59169 - protein, 206 aa, Zea Mays
MLEKELVIEPVIRWASTSNVTVNVKVQSFEVTVQLEDLHIMLTPRVILKSLVPSFPCFANLCVSLMEKPRIDFGLKLLCGDVMAIPGLYQYVQDQLSKQISNLYHWPKVIQIPILDGASGATKKPVGILHVKVIRALNLLKMDFLGKSDPYVKMRLSGERLPSKKTSVKMSNLNPEWNEHFRFIVKDPDTQVLELHMFDWEKVSSS

SEQ ID NO: 59170 - protein, 69 aa, Zea Mays
MVEESEHVVCCKIMQLVSECTAAVSMLMALCFQQHISVPCQKRWILIRHSGVWTLEWILRIRLHMLCSM

SEQ ID NO: 59171 - protein, 200 aa, Zea Mays
MVGLLLLESLLLLGYFSLFHAGNQAVLRWGKSPTILHKVCDLPFVFFSDPELMPILAAALIAVCYGCDQNLSVVQQEISTDMLRCLLKSCQTSGSNSPDSIAVDGSGNNSTESILDIRNSQGDIPTRSSRKIGRPVIGKGVSGGIRFNRNKVQKDGRGTRAIDDGPLKQRAQEAASNFMLHRKIPASFLDRAEEFFCSET

SEQ ID NO: 59172 - protein, 104 aa, Zea Mays
MAAASPIPADLGPPVMPLRRSSASRLLWMTAELSRPHSTSRLEPSRSLSRCRRVSQRVQPHLHVGSSLIALASVSRRSELACKAPRARASCVLSLASPFAIFAR

SEQ ID NO: 59173 - protein, 259 aa, Zea Mays
MASEAAIARAQCLLRFRRWSPLPLLPLPSPPATTRAASCRRSVRMASSDGSAAALPSATVDVPGAGAPVLVVGAPGLPEADFRNAVESSLFKQWLRNLQSEKGVLTYGRLSLTRVLIQGVDMFGKRVGFLKFKADIVDEETKTKVEEETGIKLNIEDMVDLTALLDPATGGRMLPSPGGCDEEIGLFLYRGRVDEETIRSLQGKETGLRDHGELIKLRVVPYSELWRSTGDAKALSAIALYEMAKREGLLPQPTPSANL

SEQ ID NO: 59174 - protein, 691 aa, Zea Mays
MAKKGAKRKQQPPPAAPTAKKGSKAVPPPKAAKRAPKKQELLESSDDSDTEQQLLEEASHLDVPSDSDAEELSGSDAEADELSGSDADSDGSSSSGDDVEDEEEEEEGDGSDDDPLADDFLAGSDEGSEGGDSGLESDESDDLEAKSRAIDEQKIKAEEDAEEELQTNIRSESDEFRLPTAEELEEEAHRPPNLPNLKRRISEIVRVLSNFSKLRQKDVPRKDYIEQLKTDIISYYGYNDFLVEALIEMFPAVELVELLEAFEKRPPECLRTNTLKTRRRDLAAALIPRGFNLDPIGKWSKKQGASSFLPVMALAPQEKERIVDMAAAPGGKTTYIGALMKNTGIIYANEFNEKRLHGLLGNIHRMGVTNTIVCNYDGKELPKVLGMNSVDRVLLDAPCTGTGTIWKDLQIKTSKDIEDIRSCAFVQKQLLLAAIDLVDANSKTGGYIVYSTCSIMIPENEAVIDYALKKRNVKLVPCGLDFGRPGFIRYREHRFHTSLEKTRRFYPHVNNMDGFFVAKLKKLSNTIPVTSEPSKASEEAAKADGEDEKAISNEQETGVPDKDEKTVEIKNHKNVTNKRTSVTKETGSHKRESNKPGKHLKINKNNATKEIDGPESSETNRDGKEEHRVQTKKMSHKRKFASDRSKKSGPESFSGVKEKRQVSDKKRKKKWQFKLRRDWEAEKKGDKRRKV

SEQ ID NO: 59175 - protein, 201 aa, Zea Mays
MFLSRIVLRDLDSIDSPASMASSKKVVTRDEWELKLRDVKIRKEDMNRLVMNFLVTEGFVDAADKFRIESGTQPEIDLATITDRMEVKRAVQSGNVQEAIEKINDLNPTQTFLEEIEKTVALLVFEDVKNCPYGELLDVSQRLKTASEVNAAILTSQSHEKDPKLPSLLKMLKWTQNQLDEKAAYPRINDFTTAALEDPSI

SEQ ID NO: 59176 - protein, 519 aa, Zea Mays
MALSCMRCPAGAGAASARRAAAQPLAAEAAVSFARCRGFGRSATAATAAWFWRNHAVASQGVKAPMDADVKNAVIPPTSPKVESGSPSEITLDEFEDLSALCKNDDSTVSITVVGASGDLAKKKIFPALFALYYEDCLPKHFTIFGYARSKMTDAELRNMVSKTLTCRIDKRENCSEKMEEFLKRCFYHSGQYDSEEHFIDLDKKLKQHEGSRVSNRLFYLSIPPNIFLDVVKCASKSASSVNGWTRVIVEKPFGRDSESSAALTSGLKQYLVEDQIFRIDHYLGKELVENLSVLRFSNLVFEPLWSRQYIRNVQLIFSEDFGTEGRGGYFDGYGIIRDIMQNHLIQILALFAMETPISLEAEDIRNEKVKVLRSMKPLQLEDVVVGQYKSHTKGGTTYPGYTDDKTVPKDSVTPTFAAAALFINNARWDGVPFLMKAGKALHTKRAEIRVQFRHVPGNLYKGSFGTDLDRATNELVIRVQPDEAIYLKINNKIPGLGMRLDRSNLNLHYAASCTTSPQ

SEQ ID NO: 59177 - protein, 838 aa, Zea Mays
MHIGILAAAAHAAANNSQFTVFYNPRASPSEFVIPFAKYQKAVYSNQLSLGMRFRMMFETEESATRRYMGTITGISDMDPLRWKNSQWRNIQVAWDEAAPSERRTRVSLWEVEPVIAPFFIYPSPLFTAKRPRQPGVTDDDSSEMDNLFKRTMPWFGEEVGKRDLSTQNGLVPGLSLVQWMNMQHNPSLANTVMQPELLNSLAGKPVQTLAAADLSRQISFQPQFLQQNNIQFNTSLLPPQNQQTEQLANVIATPNQLGSVIVPQKAVQNSSSEQKQNLVTQPLQVSQPMVSVAQPQLVHTQLQQPQVVLQAQPQQPQVIVQAQLQQQQPLVQNHTTIQSGLQQIQLLQQQQVQQSVQEQQQIKIQPFQVPNDANMVTQLSDQMKIQLLKALQPQQPLVMEQQKMIFDLQQQAVNSQSTAQQCSQVATQVVGLHSSSTNQYPTQQKTQPLKTFQDFPGNAVSIVKPEIVTSVGARSLHVPGGVQSMKMDEVPSSSTSPSTNNNPVILRSTPSSSKNQCLPTAAKAPQSSVVLGSTLEQGMKPCDSTQHPMVIPKLAEERPATGQDYMNSTQLDYLDTSSSATSVCLSQADGSLQQSFPPSSFNQHQPLREAVPDSEFEVTDAGNNFLFGANIDGHMEPLNEDDLLGTAFEADKYMEQMPGNGISNYISSKDSQQELSSSMISHPFGVADIAFNSIDSSINDIQFLNRNSRAPGPVQQRMRTYTKVHKRGAVGRSIDINRYSGYDELKHDVARMFGIEGQLSDQNRVGWKLVYEDHEKDVLLVGDDPWEDFVNCVRCIRILSPQEERQMRLASDYGDSFLGNQACSSSDGGRPWRVTGD

SEQ ID NO: 59178 - protein, 469 aa, Zea Mays
MAAPAAASAPRRQWRYTWEALTHLPLLRLYLFPRPAFSSSFPSDLRADLRLQGSLLHLSFSLPGDGATIALRVPVPRVLIDPSAPFECRAAAAGDHLELLLALVLPVDHPVVAAAFPPPAGAELPAPLALRDDLKGLSTGDVHLYCRNCSSRLTKQPLSGLHFAPLEMVACSPLGRDFVDMKKAIFDVSDENDHTAGKIKLKNSEEQAKIIATHAQPPTILEEGPSVSSSETIGVSQTNQPVTSQIETDTDVYFEKELDLLLGDLGHCCCVNGSNGKVEDSPSQISLRNRQNMLEIKRDYKLTKTISLGSSFVIKASNLLNDFEWVELFCGRCSSPLGSYPSQSSLVPADGRVRLFKCYTSTEIPVTGSHDVFRGHTLERVFVNLLLEVAEDEISFRTVVRDLKTKRPMLQLVLLSSKAWLSSGWCYENDTNGSHGTTDLQPSVKLLYSDYRNASEADLSRRVGIQIPG

SEQ ID NO: 59179 - protein, 540 aa, Zea Mays
MADSSGRSGGRPTSASPSTATHTSPASFDGGLLLRLLQNPPSAHPREEILAPSPVAPGAHHFFSDPAVAAVGPLFAASAQTQGGDFGWSSTSTTHVQQQPRFSDPRFAPGDPFAALGGRGFGSGDAVRAERPRSGAPPPGFGKPSHPLPAARDARSASGVVLRKEQYNPRPVDFVPALADVRDPVGRMPHGHGEQFYREQQQDRFLSRTPPEINANGQFGRMPIGEQHTLPILGGRRLHVDQYMPPVQEGRAPHGGHGKHESRLTNPLQREQRWQGLREDKGYASRKLPNVNAHYTSGKALVKEVHHLTIPAGSSVPVEITENQASGLEGGRIGKVVLEDGIDEEGVVEASKFEVSYEKSKIRFAGHDEQDDGGDREDAIIEQMAQNLLIDGNGDAKGVVLEKPILRSKDFRSDFSRGHHVSSQRIRFQRRNRPCRYDIDRFTPNFLSIFESLVPSEEEIANQKQLLTSLSRLINTEWPNSKLYLYGSCANSFGFSNSDIDLCLSIDNKEMSKVDIILKLADIFQAGNLQNIQENSYPCA

SEQ ID NO: 59180 - protein, 95 aa, Zea Mays
MKQRGDDGADGAAAFAGCLDCRSSDHCFLREATPPPPPTVTTLLPPSVSNSFDHRFSELFVFWNQGAHLHELDLLATRPYRYKLSSMASDDTAEM

SEQ ID NO: 59181 - protein, 205 aa, Zea Mays
MPHYNVNLKSIDVGGTTLQLPAHVFETGEKKGTIIDSGTTLTYLPELVFKQVMDVVFSKHRDIAFHNLQDFLCFQYSGSVDDGFPTITFHFEDDLALHVYPHEYFFPNGNDIYCVGFQNGALQSKDGKDIVLMGDLVLSNKLVVYDLENQVIGWTDYNCSSSIKIKDDKTGTTYTVESHDISSGWKFHWHKSLVLLLVTMVWSYL

SEQ ID NO: 59182 - protein, 78 aa, Zea Mays
MECHEVWHTFLFLQSFWDRQDKFQAWMVSSDWKNNDWRDEEDHKFTYNCLINRIWWEKVEMVLKTVTPLYSVLRFADQ

SEQ ID NO: 59183 - protein, 403 aa, Zea Mays
MSVNHSMSKSMSISPRRSPMKRSITTTKRSVSRSPVHHNRSGSPVGAPQKSVSRSSARRQSISRSPARSLSKSPPRDASRSPHISRTPVKAHRRSISRSSARSMEQRSLSRSLERIHVRKSVSPRPPLAKPKSITRTPVTSPLRSVSRSPARISRSPLRPSRRSPMRSPRRNIHRSLSRSPARILRSVSRSPVRGGRPRRNISRSPSPLRRALTPPNNGRSRSRSDSPDGSPKRIRRGRGFTQRYSFARQYRSPSADRLHRYGGRNDRDRYMGYRGFRHRSPPRRYRSPSRGRVSSPRYRRRSRSASRSPVHRGRRGGYNKSPVRSRSPPARKRSPSDRARSVSRSHLSRSVSKSPPVHHPSPLDSPSLERASDGKSRSPSPSGGGKKGLVSYGDGTPDSAGK

SEQ ID NO: 59184 - protein, 291 aa, Zea Mays
MVGSVGNGLADLGARAVSMNGAGKALRPAEAAAAAAAAETLPMELDPSEALVAAAVEAKGEKAANGRREIVMGRNVHTSCFAVKEPDADDEETGEREATMASVLALYRRSLVERTKHHLGYPYNLDFDYGALTQLQHFSINNLGDPFIESNYGVHSRQFEVGVLDWFARLWELEKDEYWGYITNCGTEGNLHGILVGREVFPDGILYASRESHYSVFKAARMYRMDCVKVDTLMSGEIDCADFQRKLLQNRDKPAIINVNIGTTVKGAVDDLDLVIKTLEENGFKGTSSDI

SEQ ID NO: 59185 - protein, 1216 aa, Zea Mays
MATAAAMADDDDFASPPLAPRAREEGGGRGVYQVGGVPVEFPYKPYGTQLAFMGRVIATLDRARRQGRSHALLESPTGTGKSLSLLCSALAWQRHYPLRSPPAPDPLLHGGGFVPDDTQPQPTPVVPEKAVKKKNAPIIYYATRTHAQISQVVREYRKTSYRVRMAILASRKHYCVNKFACASDNIDEKCKSLLDKTVQGCPEFKNAQKLSRHPSLQIGGCYEVHDIEDLVRVGQKAKGCPYFAAQHMAEAAQLVFCPYNYLISPVVRRAMDIDISGSIIILDEAHNIEDIARDAGSIDIDEESLCYLKQMLKLIHYGEVLQGELQNLAANEAVAMIYQPLHDIIQALIGWIAEREDNLHNHEFGHPASYWTGEKAMNELQRAGISPMYFPVLQECATKAIKAASDTESDGSHLSGGSAMTLESLFSSLSYFFAQKGRNSCDYQLALQRFVKKEGKDVISSTCTMSLWCLNPAVVFQEIADRTLSVILTSGTLSPMGSFTSELGVQFEACMEAPHVINADSQVFAAVLSSGPTRQILNASYKTADNSSFQDELGASLEEICRIVPGGALVFFPSYKLMDKLQVRWSQTGQWARLNAQKHVFVDTNIDSTWIRNDVQVKLKRRYNDSYKSSKHLLSGSEWYCHQAFRALNQAAGRCIRHKSDYGGIILIDERYQDDRNVLYISKWLRNAIKKYDSFQETMAKLQKFFQNAQEKIKIKDCGIFPKVKLDNEAPQSFSDDKRKLPWPELSSSNHSVSRCNQKVKTECLSQRIPDIDGVAVNQKVVGMCYTSPEVSKISVLVKKENSSSPESFSTVCPLHPCKIRSDSEGVANTGANYGVKTEIIKLEEDDFKPRYAEITILNPLEDRSRQPTLVEGTSAATPVASPSNYAEVNTSVNINNGDQIADMSISPFSTNRNLSSLSTLAATPERTTDKDCHDSFINRSVNSHYEKKRRLSSPMSCTYTTQSSPPSKSFCHTGSVMPGDLNRNSELCCKNIGLSRCENVKFERNYSPEEVSAKKSMQKKLLINCIRCKTALGLEEDGFLVTCTQYYSSKLYLAYLLKHGLSTFGILEDDFSASTPTEVHVVQCEASSLNKNVFGKFSSQGHVWFAKDGCVYNAMTCSLCSSENTSAMVLGVQVLATDRSNQQLVEKVLLFSDRLDVQSEPSKGQISRTRRDASNICQQSVIDLDSFAYKPLKKDPVALNSRRSKVFLGIDELVI

SEQ ID NO: 59186 - protein, 61 aa, Zea Mays
MAMARPPRRAAPLWCAIAGRQTSNTATATQSYHTHSRSIGGGTDPTNRRRASGQNASRSQA

SEQ ID NO: 59187 - protein, 208 aa, Zea Mays
MDPMQSSVRGRRSSLHADAVITIGGVRPAPPPQTSTQHVCQDEAMVSSGDPSWMSGYSTDSCRGGYYTSALNLEGASIRELKLKYQKLKYRNKPNNCNADDHVNAERSPGRKAEEKKVLARKHEDCDDDPFIEEIKKTREAHQEIERDRKARDDKFYELEKIKLDLKRDRLDTMIMQTDTSAMDSEAKQYFKLMKEEILARRFKSRKA

SEQ ID NO: 59188 - protein, 1276 aa, Zea Mays
MSGEMARAEALPEGEAPGFGVDLYAQATKAVSLRTPFEGDEAAPRVPTLPARLVSWAGPGDARKKHKKILPPPPDDAAPEPPPQSPVVTPAKVGLWDQFEAYFRPVTLADVEMLRPKLPFGYSKVDSCMLVPFLGSGNESTTQAETYDVAVAETTLYLGVGGEEVVTNRERGVQSVHLASQKERNDQSIEHDIHDVVVQQMVSDKELNRHRGVQGIHEVSIQLGGRSSGVDQAGSSSGIVLGQFVNEEGTSLNWLLGATGRFVLTSERPNKKRKLLGVDAGLEQLVLLPRVGAEASASCDVCCLGESSMESNRIVNCSNCKVSVHQKCYGLHAVPDGQWLCAWCTYLESTGWSLKEDAGNTQSMPCALCPKEKGALKPVKVESTRNEGIGHQKFVHLYCSLWAPEVFVEDMESMEPVLSLENVQENRMKLTCSICKIKHGACVRCSHGTCRTPFHPICARESKHQMEIWGKSRHPNVELRAFCSKHSAVEYASSVDTSNLASEQNPRKSGPYNTTLNSGKIPVIRFTRKNKDKFISCGTSASSSGNLIRVKTIEQDALANTVRNANSQPIRIWETGTGHPSVSGDHIRSSGDIAVVLRKLIDSGKVSVSDVASEVGISSESLEAALVGETTTFSHGLTLKIIKWLQNSVHMHDDDKGVLVDVPDFAVTEPARTRSKSNSKILKENNATCATGVTIVQNGEKNMVKEDSNPECAAKEFANESTQGFSPSSSKDVLKDEHGILILNDTSGNKESGTSTQIPNEKQGALLGRKNNDLTEVELGPCLEKGVPSHGHCFVQGDNGVDGVGSVENSFNTSNCSHGQPFFNFDDSHSYIHPFIKKKVSHHWDITFNQNKETLNHYIQESSYPSHEKIPTDSLVEVESTADTTVTDQVLKARSSKILEHSPDDEVEGEMVYLQSRLLDNAVVLKHRYEKLIAKVVQNLCRELDAFSKRKWDLIFVNQFLRDVREAKKRGRKEKRHKEAQAVLAAAAAAIASSSRNSTVRKDAKENAPESSPKLVAGSSRVGQRTFSLPRINDSSKSSNNKVSSDNKFGSFHMPISSKENGLYCDVCMRTETLLNRIFVCSRCKAAVHIDCYRNLENSIGPWNCELCEDEDISSEATSTTVSDKSHCNGKLPFAQCGMCHGTSGAFRKTVDGKWVHAFCAEWLLDTKYVRGQDSPVEGMENLVEGKDTCCLCLCNVGMCLRCSSGDCNITFHPTCARSSGLYMNTKGFGTTSQHKAYCDKHSVEQKEADAQQYGPEELRSMKRMRMQELITHCHL

SEQ ID NO: 59189 - protein, 194 aa, Zea Mays
MAGVGLKDMPSGASTTYQICDDNKDMLYSQFTGKAESVDYSKLSTSSKICKVCDGTVHENSCPAHDQHVGLEPEPEQSNKQALGTENHESLRKLPCMPAVDKVPSAQSGTYCLASNQLKREDDPPGPCARPESSGLMPHNSSTEKNYARQQTTTIAARNYPTESTVFAYKKFVELYSFNKLELHPFGLCNLGNR

SEQ ID NO: 59190 - protein, 124 aa, Zea Mays
MSEALQKDKEIGEEEEEEEYVLLELDNCLYSDISPGAQFVLSVGEYDETIGTCYLFSESETEPKPASDELAPSKENTETPLNSSKEAPLKEVNHLASVQKILKFKPINVEHSQHRAYQHKDKEL

SEQ ID NO: 59191 - protein, 238 aa, Zea Mays
MELKRVLVAPTAARRAPTVPPTTSGATALPPAGLGLLPPLPEAIPWPSSGVQTHVAAVEQAVVKDATKLEAPVVVVTGASRGIGKATALALGKAGCKVLVNYARSSKEAEEVSKEIEASGGEAITFGGDVSKEADVESMMKAALDKWGTIDVLVNNAGITRDTLLMRMKKSQWQDVIDLNLTGVCLCTQAATKVMMKKKKGKIINIASVVGLTGNVGQANYSAAKAGVIGFTKTVARE

SEQ ID NO: 59192 - protein, 231 aa, Zea Mays
MVIYMKRNYRFFFMFVSSTTVLCIYVFAFCWVNLRRIMDTHQCKIGRALLKSPISGLLILYTFIAVWFVGGLTSFHIYLISTNQTTYENFRYRYDRRTNPYNLGVGQNFIDVLFSRIPSSKHDFRAKVKADSSTFASSLSMGRVLSPPKTSVDLEMGMKRQAVAAEDFEDLHSQIGSAMGLERCGTEPPHFVGRKGCSEMSPDIEAFAEEFGMEGGLSERKKIERRTNDDS

SEQ ID NO: 59193 - protein, 129 aa, Zea Mays
MFHAEGMTPWEGAQVAALEALTTICYQKWEEIQATSMRLFPAVALSDPLVYHHQARLLESIPIGQDSVESESARVLMVVLELQLTRGHSRQKWQQLYTGSYAAFKMMEMAKNRACTQAQERLEETKVQA

SEQ ID NO: 59194 - protein, 209 aa, Zea Mays
MMDKENIAVPNFRLTLPEVCSECGHQFVMGGPLWSYPIHDKVWAASILSDIHAMREAYPAYPKISAILSSVSEELLEAPLFVSLHNLCAILKCTTPTMVMLQCAIRNAGYQVSGSHVDPLALKTDAPMSVIWDIMRCWVKLHPVKHRPGNHPGNVILSQEPKFQAKFSRVLGASVTRKRARFMPNPEKYWGPGTKAGRNPRTFQMDNRN

SEQ ID NO: 59195 - protein, 406 aa, Zea Mays
MENLAQFLLDGSSGPRMWIVPITADCGSYYTQKKILLKGKSDRLDIRDIASQCGNQEKGGNFWIKLNINQTGFYRVQYDDKLAAALQNALQAKKLSVMDKIGIVEDSLALSMACKQTLTSLLRLLYAYREEADYSVLSHINTASLSIAKISVDATPGLVGDIKQLLIKLLLPPAVKLGWDLKNGESHLDSLLRPVLLVALVKLGHDKSINEGARRFSIFVHDRNTSLLRPDTRKAAYLAAMQNVTASYRSAYNDLLKVYRESDEAEERGRVLSTLCFCKDENIVLESLNLLFTNEFRKQDAYYVLQGLDVETRDTAWVWLKDNWDRVTRKYGDTQAGGFIRYVVTLFTSNEKAAEFSRFFATRKKPEFERTLKQSLENVRISARWIQGIKSEPRLAQTVQELLRRP

SEQ ID NO: 59196 - protein, 376 aa, Zea Mays
MVFLDSRHANIDMDIIKKDLSPLVKDLEPGNPEEEAPIPFMMAGDGVKQRHTLQEVTSEITGPMVVEDVVYENADGDQGSMSEKMFRRLIFGRSSGLVQSEALLIRDPPSDEVDKKNKSAAATSKKRRNHKRGSKNSLRIDHKFLGSSYHSSIISGLSLVASSLSAAASSGEKVSITVVGLGAGCFPMFLRGCLPFVDIEVVELDPLVAELAKKYFGFSMDEQLKVHLGDGIKFIEDSVAANQSVNGSTRNAFKILILDVDSSDLSSGLSCPPENFVEDPFLLIAKEFLLEGGLFVINLVSRSTSVRETVVSRLKAVFEHLYSLQLEEDINEVLFASPSGRYLEINDISAGASKLQDLLKIPVDVESDIQKLQKLQ

SEQ ID NO: 59197 - protein, 496 aa, Zea Mays
MTGGFYDSRRSKLKFVKIIRDNKTAIDRKTGHLESVVNKLKDIDKKITDLVTKQQQMDAERDHAKSELEQFKADIARAMKQRGSLEKALVKKEKSLNNICNQIEQVQSSIAMKNDEMGTELIDQLTSEERDLLSRLNPEITDLKERFLMCKNSRIEIEARKEELETNLSTNLIRRQKELEAIISSADSRTLPLEAEAKEQELKSSKRNLDELTSLLKANVDAINNFTRKMDDLKRKRDDLKAREAILEQTVQDGAKDLEQLMNSRNTYLAKQEECTKKIRDLGLLPADAFEAYKRKNKKQLHKILYDCNEQLKQFSHVNQKALDQYVNFTEQREQLQRRRAELDAGDVKIMELISVLDQRKDESIERTFKGVARHFREVFSELVQGGHGYLVMMKKKDGDAVDDDEEEDGPRDPGPDGRIEKYIGVKVKVSFTGKGETQSMKQLSGGQKTVVALTLIFAIQRCDPAPFYLFDEIDAALDPQYRTAVGSILIVCSSV

SEQ ID NO: 59198 - protein, 96 aa, Zea Mays
MNVPIIHFTTHTLLQSPLRMIHFRKCANSSFSFQQNLFERKLSTHFSRKLLSIWASVSAPFSSLGDPSNMFRVSAIAADIFCMSSTAAITARMMCL

SEQ ID NO: 59199 - protein, 197 aa, Zea Mays
MLGRRENPGEHEAMRKMKNEFMVNWDGLRTREKERVLVLAATNRPFDLDEAVVRRLPRRLMVNLPDASNRRKILSVILAKEDLADDVDLETIANLTEGYSGSDLKNLCVTAAHRPIREILEKEKKERASAEAENRSLPPSHTSNDVRALRTSDFIHAHEQVCASVPSDSSNMSELVQWNDLYGEGGSRKKTTLSYFM

SEQ ID NO: 59200 - protein, 215 aa, Zea Mays
MARALVLCFYSGGGGGGGGVGSLLLYHHLAFASGIFSYLCNVIVGRRREAFLHQWALVRDSFSPPCRSTVKKEVTQTVVVKPGWRKGKQVVLEGMGDERPGCLPGDAILTVSEKRHPAFKRVGDDLVLKAEVPLVGALTGWSFSFRLLGGRKVSCSFQDEVVRPGYEKVIAGEGMPVPGQKGARGDLRVKLDVVFPKELTPEQRAGLAEILRGSC

SEQ ID NO: 59201 - protein, 82 aa, Zea Mays
MELLLELVLNTHSVMQFGLHMFQDLRFSHHTLQKMPEACLKLLLGILILLFSWKMNCFMENLSQFLLKCLILVFAYRLAKLR

SEQ ID NO: 59202 - protein, 539 aa, Zea Mays
MSTEAYRAKHEITIIGNESPAPFMTFQSTCFPSDILREVLQAGFSAPTPIQAQSWPIAMKGRDIVAVAKTGSGKTLGYLLPGFILLKRLHHNSREGPTVLVLSPTRELATQIQDEAIKFGRSSRISSTCLYGGAPKGPQLRELERGADVVVATPGRLNDILEMNKVSLRQVSYLVLDEADRMLDMGFEPQIRKIVKQIPPRRQTLMYTATWPKEVRKIASDLLNNPVQVNIGNTDQLVANKSITQHVEVIPHMEKSRRLDQILRSQDPGSKIIIFCSTKRMCDQLARNLSRQYGASAIHGDKSQAERDSVLNDFRSGRCPVLVATDVAARGLDIKDIRIVVNYDFPTGVEDYVHRIGRTGRAGATGSAYTFFGDQDSKYASELVKILEGANQSVPPQLKEMALRGGYGGRSRRWASSDDSYGSQGYGAKRSTDSFKNSSFGNQAGGGSSFHSSFHNSSSGNQFGDTTSFHASYGNSSQNNQTGDNPSFPPSSSNNQSGDGLSFHERFYGSRGRDESRSNNDGFRARSRSPGKPVEVSNW

SEQ ID NO: 59203 - protein, 574 aa, Zea Mays
MGYEESKKHLLSLSYPELQCLCKRYNLPAKKTHSQLASSLASLLEASPSPAPPPVQLANMKEASTCNHANNKRGPYNGRDDGKPLVHAKHQKGDQTPVDETSKKQGIDTGTSIPPVSMNHGRPEYHGHLSSDLRTAHNLQSQCDVGIATNTTNLEFVGKHDCSPANVIDQICPPIIQKYPSNGNGQASTKFGRMNDNTEKGCRLSDKISANAAAVQFSVMSDEGIDLLVDLNSSSATWAKNFMAEMHITPPSEHGNFSSFISSLSTKDDHSTASPSGNIIVDIQNKGAENIVPSTDSSLASDVGESSRSVLYPVDTTTVNSVSSTSTVAGTPVELSGYQEGAPVVCSSCLTADVQNNVTSDMPGASDNEVLPPEPADVFLQSERITAPAVCGSVQPIGNKCTMSSGDEVRSGSNEDSCPKSSGKQTGDETLMENEPVKAVAVEENIGRDDSLSISYQLACKTVAELPVTDAQSPASSSGHFIAGNFDNTHPTSSATSDNAINSLTSKFGAELAQSHDSTDKKGQNDAEEVEELESMTPAAYSEPPRNIQLSLRSASAKVKPSTLPRRSARLLPK

SEQ ID NO: 59204 - protein, 65 aa, Zea Mays
MEDKLRNLGCKVIGKKTIEVEMDLTKAKSERYLWGNNTAAMNSDKKQQFTLGLAPVSKETSVSNL

SEQ ID NO: 59205 - protein, 1152 aa, Zea Mays
MYAVGKVGSLISRSVYTVSGPFHPFGGAVDIVVVQQQDGSFKSSPWYVRFGKFQGVLKSREKVVDISVNGVDAGFHMYLDSNGEAYFLRNADPNGEEGEFIVSPASSGDEREVPIQEAQLRKSKSTSCDSSTMEADVGEGKILARTTSRRITILERMFGRKSIKNNAHAVDRVSSLERAEVAAELLDTKWSTNLPRSSKPNGSNDEPSKSNNDQMETSKPVFSEHSLDHGKEMDSNDNAHCNSCSPRGGRNSSADETDPCLQATIVKKEVVEIHARESSDFTDNITSITHQQGSESSSNDLGTDKLMQQSVDTQDELLHDVEDVTERETHAEEVISNDIFEIHVVETDITSGKSEVDSEIVTVDPEPDRANQNFTDTNYQNYGTTDISSERHEVSLIPSAQDAVQEKIVILSSSEAVEGSLDAVPEKVVILSSSETVDSSYAVSCILDDTVHDASDISQADGVQHEEHSSISDGSTEKLISEESSLVCYGVPSNKKDLVNIAVQESKAFILKNPASQILEESGPGLDVSTDSVSLSHADSAPDLACQHVSPNVEDTTSYEPGIGPEDVTKNSVVENGACSGELVVSVIQTSAGDGLTKCIAHPAVFSNKIEVEGSPTSAGFSSLISVEVQNTKLEDDTNKSSSVIGDEAGFVPEATAELDEEAEPVISLSEYTEEIQFQFSDAENFADRKATDDMVANKTTGEVEHDESDCDTEKQEEGDVGLVNDLENCSASLKPVSSPVSIPAIDFQSGNSNREAKSLPNLRSHIHDLERSYSFQLSRSLQSTAENNGIDLVKSMNYAFLEQKSEAIGDFSEENNSPPEVTNTVALDGNHADDLKVDAFIPFAELSLCRHLLSEGMGEDAACSAFDSEKVTLEEFRNMKQSLMRNNKLVVRIAGRYFPWDAAAPIVLGMISFSEEQVFEPKGMINVERVEQSAAPGGSWSIWPFSFRRTRTITAIQPVCESIVETSVSTPKELTHFKELDRERNKSRVKRIERKVRSLTPTSDELASLDLREGRNVVTFTFSTAIVGKQQVDCHIYLWRWNTRIVISDVDGTITKSDVLGQFMPLVGVDWSQNGVAHLFSAIKENGYQLLFLSARAISQAHITRQFLFNLKQDGKALPDGPVVISPDGLFPSLYREGEHILICFCYFLFS

SEQ ID NO: 59206 - protein, 69 aa, Zea Mays
MFLILSWGMHQCSGRRLILLLLFLRSHITYCHCSHCGRRNLIFIYIIKINLLSWRAISFIKYNVARDFN

SEQ ID NO: 59207 - protein, 469 aa, Zea Mays
MGGGRRATWPLCGVARMELVPDLASTSQSGRGLRRAGGRIMAFAAVAAGRQEGSALASVIGEGSGAATASGSPPMDRCRKRPDSDPEGCSEPEPPADKRPCTAEPSTSAAAVAAAPPPGARQAEQGGSDMDTSSSGHHGDADVDADDGDGDGDGDGDGDGGSSCESDGDGSPGPRGSGGGRFQRMVDAVADDGAGQDALLAALTELCEALSFCTEDVGGYFPTEAAARALVRRAGGGDGAGTTPDVILLSVRAITYLCDAMPRAADAVVRHGLLPVLCSRLLTIEYVDVAEQCLQAFEKISRRQPTQCLQAGMINAVLAFIDFFAASIQVFPLKKLQVFSEDELERLLCGEQDTWDFAKLVDHIKFDHGYTSSSPPVINLLEIIQEFGSIQRRAFLQFITGSPRLPPGGLAALNPKFTVVRKNNSNDVDHDLPSVMTCANYLKLPPYSSKMREKLLYAITEGQGSFHLS

SEQ ID NO: 59208 - protein, 508 aa, Zea Mays
MPPRRGRRKGKGRAKPRAKATEPEPELEEAADSEIEAGDAKAEESGEAKEDESASDAESMDADANEEAVENGADEMDAEPEAKAEPEAVATEAEAKPDVSDAEDEEAGETCSDREADAKDVDSKAKAEESDGEDEEGATAETDGEDEEGATAETDGESEEEAAETGGENEEDGGDSDTEGDAEESPPPPPSRSRRRKRAATPDDEAEETPTPSRRRRRRKSRQRGDSPPPLPDHLRCRRSDGKKWRCSGRALPTVSFCEYHYARANKGKKLPADGELLAVALQRQKNKRKGRRRINPSTSPQAATSDRQTRDLPNGLMTILPGSSGPAALSTPVTTKVGVEISAPMQRCYRSKNAEPLPVGPVKVVPRAMSMTKAAPRMCHCCGVKKAARVANCKNCDTNFCNSCINKWYSKLSRKDIKARCPACRGLCNCKLCSLGHTKGATHKEPPSGERKILSIKISNHQFYKLLPVKLDREQLDELELEAKIQGTKTSNVRVQVAENGQSESLY

SEQ ID NO: 59209 - protein, 146 aa, Zea Mays
MPPQPNGGKVTPNLAMDAEATRLLNLTVLQRLDPAVEDILITAAHVTLYDFNIDLNQWSRKDVEGSLFVVKRNSQPRFQFIVMNRRNTDNLVEDLLSDFEYELQPPYLLYRNASQEVNGIWFYNQQDCEAVASLFGSQLQSAESRP

SEQ ID NO: 59210 - protein, 363 aa, Zea Mays
MINKRNGKNSTRLVISAVATVGALLLVALMCFWGCFLYKNFGKKDMRGFRVELCGGSSVVMFHGDLPYSSKDILKKLETIDEENIIGAGGFGTVYKLAMDDGNVFALKRIVKTNEGLDRFFDRELEILGSVKHRYLVNLRGYCNSPSSKLLIYDYLQGGSLDEVLHEKSEQLDWDARINIILGAAKGLSYLHHDCSPRIIHRDIKSSNILLDGSFEARVSDFGLAKLLEDEESHITTIVAGTFGYLAPEYMQFGRATEKTDVYSFGVLVLEILSGKRPTDASFIEKGLNIVGWLNFLASENREREIVDLNCEGVQTETLDALLSLAKQCVSSSPEERPTMHRVVHMLESDVITPCPSDFYDSE

SEQ ID NO: 59211 - protein, 1086 aa, Zea Mays
MTTGDPLLLSSSGSADSPSKPARPSVGSLGCLCATDSFSSSLYEDCETASVTLTDEREAQPRHLRELSDVSRVAERFQSADSQFFHRLSVECSQKERQRKVSWGGAMERQHSPSSLEIGMVSSSHEKPNRSQRIRNKSSQFEDPSEQEPRKIYINDPNKTNDRYEFTGNEIRTSKYTLITFLPKNLFIQFHRLAYVYFLVIAALNQLPPLAVFGRTASLFPLLFVLFVTAIKDGYEDWRRHRSDRNENNREALVLQHGDFRSKKWKNICAGEVVKIHANETMPCDMVLLGTSDPNGIAYIQTMNLDGESNLKTRYARQETTSMIYDDTYSGLIECELPNRNIYEFTATMKLDSQRVPLGQSNIVLRGCQLKNTEWVIGVVVYAGQETKAMLNSTISPSKSSNLESYMNRETLWLSAFLLITCSVVATGMGVWLFKNSKNLDALPYYRRKYFTFGRENRKDFKFYGIALEIFFSFLSSVIIFQIMIPISLYITMELVRVGQSYFMIGDTRMYDSNSGSRFQCRSLNINEDLGQIRYIFSDKTGTLTQNKMEFQQASIYGKNYGSSLQVTSDFSHEISTAESLRQSVRKPKVNVDLALTELLNQPLIGEERLSAHDFFLTLAACNTVIPVNTEGSHDLTNEVDEIGAIDYQGESPDEQALVIAASAYGYTLVERTTGHIVIDVLGERLRLDVLGLHEFDSVRKRMSVIVRFPDNNVKVLVKGADTSMLNILKVEIDDELYDSLHVKIREATENHLSAYSSEGLRTLVIGSKNLTDAEFSEWQEMYEEASTSMHERSAKLRQAAGLVECNLTLLGATGIEDKLQDGVPEAIDSLRQAGIKVWVLTGDKQETAISIGLSCRLLTQTMHLIIINGSSEVECRRLLAEAKAKFGIKSADFGRDLQGTEDMYHGDISKLRPSNGHLSETGAQSLELTGVIGGDKSEYSENVTNFDGTELALIIDGSSLVYILEKPLESELFDLATSCKVVICCRVAPLQKAGIVDLIKSRTSDMTLAIGDGANDVSMIQMADVGVGICGQEGRQAVMASDFAMGQFRFLKRLLLVHGHWNYQRIAYMILYNFYRNAVFVLMLF

SEQ ID NO: 59212 - protein, 535 aa, Zea Mays
MASRIASFPSFLAFVVVTVATLFPSSSSQQQPAAAVPQPRGFYISCGSDKDVQVGSIKWAKDEGFTAVGNASAINKPHLLPLLAALRYFPDATARKYCYQLPVVKGTRYLVRTTYFYGGFDGGKEPPVFDQIVDGTLWSAVNTTDNYRRGMSTYFEMVAQGQGKTMSVCLARRPDTASSPFISALEVIDLADSMYNTTDFSRFTMTTVVRSRFGSKGDIVSYPDDPYNRYWAPFADANPMVESHSSISPDDFWNQPPAKALKAGITTSRGKKLAVQWPTTELPAATYYVALYFQDPRTASPFSWRVFDVAVNGNDFFRGLNASAAGVMVYSSMMQLSGKTEILLTPNETSPVGPLINAGEIYQIVPLGGRTATRDVSSCRSRPVSCAVVAMEDLASSLKNLPPDWAGDPCLPQQHSWTGVECSQGSPVRVLSLDLKNHGLSGSLPDSIVHLTGMKTIYLSGNNLSGPIPDLSSMHALTAVRLDSNQFSGTINPSMEKLANLKELHLNNNNLTGKIPDGLKNKAGLDLRTEGNKFE

SEQ ID NO: 59213 - protein, 84 aa, Zea Mays
MARSAAVMAFRAGSAVTPSTLPRVRPPQPAQTCALPSASLAGLLDVRTMEAVGALLLCCPADRSRSNVDPSRGTGYCCMSPDHG

SEQ ID NO: 59214 - protein, 344 aa, Zea Mays
MFRLARGTARKLILALLTCLSSALLYRQIQPLPPKIPGTPGGPPVTATRTRLSDGRYLAYLETGVPREKAKHRLVFVHGSLRKSWAFTCCPSIAPGTPRATRTRPGPRRASPSTSPSSPTTCSWVASSTLLASPWAARSCGAASSTSHTGNYWWPGLPSNVSRDAWYQQLPRDQWAVWVAHHLPWLTYWWNTQKLFPASSVIAYNPALLSQEDEMLMAKFGYRAYMPQIRQQGEHECLHRDMMVGFGKWSWSPLQLENPFADADADDGQGAGKVHLWHGAEDLIVPVSLSRYISQKLPWVVYHELPKSGHLFPIAEGMADIIVKSLLLGDDHLSSSASQPPHSP

SEQ ID NO: 59215 - protein, 360 aa, Zea Mays
MDPAAFARERNMPSDSDRILNEDKCFMSCSMPREHQKFFDVPAASVRELHLQSDAPSTSEANCSRGRMISGDLFAPRTRSLSPIPKGHAFAVSNGNSREFGFSPRSPVRKMDGLRSPPHPLPLPPASGACSPLHPASGACSPLHPASGACSPLLPTHSFCSPLPSSPSSCPPLPASPTNCSQSQSQWKKGKLLGSGTFGQVYLGFNSENGQFCAIKEVQVIMDDPHSKERLKQLNQEIDMLRQLSHPNIVQYHGSELSDESLSICLEYVSGGSIHKLLREYGSFKEPVIRNYTGQILAGLAYLHGRNTVHRDIKGANILVGPNGEVKLADFGMAKHVCSVYFLTLSVYLPVFNAFSYHNI

SEQ ID NO: 59216 - protein, 60 aa, Zea Mays
MCSCCELSSAICNVVRGECVFPVTLDLIRMVAEEVMVACISMVADQGHVCFPPRLNIPAN

SEQ ID NO: 59217 - protein, 630 aa, Zea Mays
MNHNHIPEESLNVFTIANIVEESRKLWVHCSALYVITISACILLFHEYKYISRKRLAHVTGYPPNPGLFTVLVRSIPRFDNELLDDTIRNFFVNYHGSSYLSHQMIFRKGHFQKFVDRAERAYRRFVRVRLSVSERNGRSSMSRCGVCGVRASSFQLYRNKFIEAKKSDLTNPEVVEAQKNCPGALVFFKTRYAAVVASRVFQSSNPMLWVTDLAPEPRDVYWSNLWIPYRQIWLRKLATLAASIVFMFVFIVPVAFVQSMMQLEQLKRMFPSLTGLLNKSFFARVITGYLPSVTLLLSLYTVPPLMMLFSSIEGSISRSGRKRSGCLKILFFNIWNVFFVNVLSGSVLNQLNVFSRPKDMPTMLAELVPKQATFFITYVLTSGWASLCSEILQVFNLVYNFFSRFVCCCHRQNKEYVYSFPYHTEVPKVLLFNLLGFTFSIMAPLILPFLLVYFCLGYLVYRNQILNVYYPKYEMGGKLWPVMHNAIVFSLVLTQVIALGVFTIKRSPVTAGFTILLLVGTVLFNEYCRHRFSRIFEAYSAQDVIELDRDDEQSGRMQEIHQHLLDAYSQTPPGEGSSRGGSQVPIELIMEDPAQEASESSQELCDTVQEVSGAIHDHDHVVEDKAHSV

SEQ ID NO: 59218 - protein, 170 aa, Zea Mays
MYIPSVEDTVLGIVVDTKPDNFLVDIKGPNLAFLPVLSFEGGTRRNIPKFEIGTLIYARVVKANSIMNPELSCMDATGKAAEFGQLKDGYMFDTSTGMSRMLLSSPTCPVLEVLGKKLSFEIAVGLNGRVWVNAPAASTVILVSNAIMRSESLSGIKQRAMVENLLERLS

SEQ ID NO: 59219 - protein, 241 aa, Zea Mays
MTVSFHKYGDLFFPGTGDIKDIGEREGKYYAINIPLKDGIDDTSFTRLFKTIIAKVVETYLPGAIVLQCGADSLARDRLGCFNLSIEGHAECVKFVKKFNIPLLVTGGGGYTKENVARCWAVETGVLLDTELPNEIPKNEYIEYFAPDYTLKVPNLNMDNLNSKTYLSSIKVQVMESLRYIQHAPGVQMQEVPPDFYIPDFDEDELDPDERVDQHTQDKQIHRDDEYYEGDNDNDHDDGTR

SEQ ID NO: 59220 - protein, 776 aa, Zea Mays
MAPFGDGGVGCGDGGEALRGWDPLRSGSAPPTMEGAAAAAAAAERRVFGGGGDGASFFSGIDGLMFGARMDEVSRCRGAAGAQEHFGNSTSLSVGPSGQLFNGAGDWDEWQFGPSTVHSGGAMANYAFDMNLLWTDMNPDNAEYHRNIQNHFMSNIENMNAYGNRDLDASSMFDSDISDALSGLRLSNNSVMDQRNNREELADEILERQRDFSKTVDETRSSLVGNVFHAPRSDVHPSRIYGDGILRRQTSACALDGSNVSRINRHHIKGVDRPSLADQLAIMQSGNFPRGTNLSRNVSVTNMSNPMSNRYNSNTDLDLARSRMTFFKEILAQQYLQEDNLSYNDSRIYHDEPCFPCSRMQRSGSHFYSNSRCILSHGDRQSRLLSLNRKAMGRNIGSHAYHDNTLSNYLDVLSLDNADRNGADSVELIDLVGHVKEISMDQYGSRFIQQKLEIASLDDREKIFPEILSNAIALTTDVFGNYVIQKFFEFATERQLIQLADQLKGHILELSLQMYGCRVVQKVLEVVDKDRKIDIVHELRNHILKCIGDQNGNHVIQKCIECVPEDRIPFVIDPILSQILVLCTHQYGCRVIQRVLEHCHDPVTQSATMNEIVQQTFHLTDDKFGNYVVQHVLKHGKPEERSAIIQKLSGQVVILSKLKYASNVIEKCLEFGTLEERDSLIGEIISSGQTFQELMKDQFGNYVVQKVLKTCDERYLEMILSSIKLHLNELKNYTYGKHIVTRVEKLIVTGEERARMASLSGQRQQQPPNCTAVDAH

SEQ ID NO: 59221 - protein, 85 aa, Zea Mays
MGKRPWRRKRSGGRSWHCSSSCCRSRCSGAGRWAAAVKANTAAAGWRLGCPRTCNMSRTSRLTGSMDSWGCPLNSSPKCPSVLPA

SEQ ID NO: 59222 - protein, 222 aa, Zea Mays
MNTATGAPPDYFDKNGQNWGFPTYNWEEMSKDNYGWWRARLTQMAKYFTAYRIDHILGFFRIWELPDHAATGLVGKFRPSIPLSQEELLSEGLWDFNRMSQPYIRQEILEEKFGSFWTVIAANFLNEYQKQCYEFKEDCNTEKKIIVKIKTSAEKSLWVEKEDNIRRGLFDLLQNIVLIRDPEDSTKFYPRSTWKTHQVLGTLMNTGYARTGVDWIAYPKNA

SEQ ID NO: 59223 - protein, 168 aa, Zea Mays
MRGLLSVEAAGAASSSASASVLNGAVDWWRDVNESPLWQDRIFHALAVLYGIVSAVALVQLIRIECRVPEYGWTTQKVFHFLNFLVNGVRSAVFVLRRNVQLVEPEIIQHVLLDMPGLAFFTTYALLVLFWAEIYYQARAMSTDGLRPTFYWINSVVYAIQVINLSFN

SEQ ID NO: 59224 - protein, 242 aa, Zea Mays
MGSISDAERELQLVEEKIHDAEQEKAHYERVMETKVLGPITATESELTRLQQLHQEYFEKASTICAESEVEALGGVEGSTLEQLSARIKKLKQKFQQESRRYTETIDDLRALHDKKGQKILRKQQMYSGFRDKLNACQKALDLRWKKFQRNAGLLKRQLTWLFNEHLGKKGISGHINVDYKNEVLSVELTMPQDASRDTIRDTRGLSGGERSFSTLCFTLSLHGMAEAPFRAMDEFDVFMVS

SEQ ID NO: 59225 - protein, 306 aa, Zea Mays
MAAAAAPVSLVFLCTRGQQQLVLVDATKPPLPLRSRAFSVRAAQQQQQQQHRARPRPPRRNKPPGPARRPPRVPLDQDEYDGGYDDREEGRFAGGTRAAAMPKPPAGFVLDDQGRCIAAASKRIVTIIDDTNNRPLECIIRRVFRSSQDHDCMLLCPVDMPVQVLKSTNFSGWVDDDQLKQIIPSVAYALARVHMHFVESGFCYTARGGFCFPEEAIQEFHDSGEGVPFEGVEICCFNLDGAHYMIYTPVDPLLFVAIKDKDGVLRIAEDDLMEDPAVLDAVDEETEFTALVEEEEALLETVLGER

SEQ ID NO: 59226 - protein, 117 aa, Zea Mays
MKVDWANKWAVIPYNGSPAYLQGVQVTLPAGAVTELLLLSVESQATPAGQSVDPKVQAVLDQFVEVFEDPVGLPPSRTCDHTIPLVPGTNVCVLPLSSKLSQCQTMLKMTTPSGAAL

SEQ ID NO: 59227 - protein, 503 aa, Zea Mays
MVDTRRSSAAKRRGPSEDSSPSPPTTQADPTTAGLPVEPASPPPSSGSRSGKRAKVAVARAEDPGAPRGKAVDPAAVDVLDSSVANLQGVARPPAANVAASSAVSNSVGRRKRNQSVRAIPTGEGTLWKPRPAGGRAEAWGRLISQSSEYPSIPIYTTHFTIGNGGKCDLKLTETSPGPLICKLKHVKRGAALEIYMNKVVHVNGKALDKAAKVTLIGGDEVMFVSLGTHAYIFQQLLEEKASTPSLCSKCVIQQEQYPVVKDKEIVSSLCKTVGEQSYHPSEENMTFGRHQLLKDDLKKAAISASDISESFDNFPYYLSENTKNVLLSSSYVNLCCKESTKWTKDISSLCKRVLLSGPPGSEIYQELLVKALTKSFGAKLLVIDYSLLSGPSKSKESKPYKKGDRVRYIGPIQSSGFMFEGQRAPDYGSQGEVRLTFAENGSSKVGVRFDKQIPGGIDLGGSCELDHGLFCSVDSLCLDGPGWEDRAKHSFDVVFEKVNRCL

SEQ ID NO: 59228 - protein, 117 aa, Zea Mays
MASGELACTYAALILSDDGIAITAEKIATIVKAANIKVESYWPALFAKLLEKRSVEDLILSVGSGMHPVLLSRYFRVFICRWMVVILVDLPYSVMSLVFFTILILNVFKYCSYYPTL

SEQ ID NO: 59229 - protein, 274 aa, Zea Mays
MEEMTASEREEHNAEGTGVLPRAEIVRDEHPLSLGKTSVWNQYFQESEIVEQIDRDVKRTHPEMEFFNGDSSDSLSNQESLKRILTIFAKLNPGIRYVQGMNEVLAPLYYVFKNDPDQSQAALAEPDAFFCFVELLSGFRDNFCKQLDNSVVGIRSTITTLSQLLRRHDEELWRHLEVVTKVNPQFYAFRWITLLLTQEFQFRDCLSLWDTLLGDPEGPQATLLRVCCAMLILVRRRLLAGDFTANLKLLQNYPPTNIDHILHIANKLRGPLPF

SEQ ID NO: 59230 - protein, 771 aa, Zea Mays
MPLSELYDASRGYLVNDTVVVEAEVAVRRIVDYWTYDSKKETGYVGLKNQGATCYMNSLLQTLYHIPYFRKAVYHMPTTENDIPSGSIPLALQSLFYKLQYSDSSVATKELTKSFGWDTYDSFMQHDVQELNRVLSEKLEDKMKGTVVEGTIEQLFEGHHINYIECINVEHKSNRKESFYDLQLDVKGCRDIYSSFDKYVEVERLEGDNKYHAENHGLQDAKKGVLFLDFPPVLQLQLKRFEYDYMRDSMVKINDRYEFPLQLDLDRDGGKYIAPNADRSTRNLYTLHRYKFDDERVTKEDAKKALEEQYGGDEELPQINPGFNNAPFKFTKYSNAYMLVYIRESAKEKIMCTVDEKDIAEHLRVRLKKEQEEKEHKKKEKAEAHLYTIIKVARDEDLKEQIGKGIYFDLVDHEKVHNFRIQKQMPFSCFKEEVAKEYGIPVQFQRFWLWAKRQNHTYRPNRPLTVHEETQSVGQLREISNKAHNVELKLFLEVELGLDLRPLPPPEKGKEDILLFFKFYNPEKEELCFMGRLFVKALGKPSEILAKLNEMAGFPPDQEIELFEEIKFEPNVMCETIDKKLTFHYSQLEDGDIICFQKSPGAEYDAPVRYPDVPSFLEYVHNRQVVHFRSLEKPKDDDFSLELSKLHTYDDVVERVARQLELDDPAKIRLTPHNCYSQQPKPQPVKYRGVVHLSDMLIHYNQTSDILYYEVLDIPLPELQFLKTLKVAFHHPTKDEVVIHSIRLPKNSTIADVIYDLKTKHRKMMLAVQVI

SEQ ID NO: 59231 - protein, 74 aa, Zea Mays
MDKIDVSQRRRFNEYKTLTLENDKLRNECLQYEGSEKQLVLKEQKLRSEIAEVEKKYQELLGELRSLDVKKEKQ

SEQ ID NO: 59232 - protein, 82 aa, Zea Mays
MFNSGGAVEQCEVRGGANAAAAVALRVRGCGRFGAYCSRRPARCMLDATEVEFSHDADTGLVTLHIPVPEQEFYRWSLEIEV

SEQ ID NO: 59233 - protein, 99 aa, Zea Mays
MCRRRPILLRDAAASAALLPAPLHGRVQSSVLCTLPENFTWYRNRDQRRRCSGEEAEECLRPRRKKAADGEEDQLGAWRGVAVVHEEEEPALAGGRRSM

SEQ ID NO: 59234 - protein, 344 aa, Zea Mays
MANVHAALARLGLDGAVKVSSPIALTALASSYPSSAGAFREDLAQAVMKPMLDFLAQTGSYLMVNAYPFFAYSGNAGDISLDYALFRPNAGVLDAGNGLKYYSLLDAQLDAVFAAVSRLGEGYNGVRVVVSETGWPSKGDANEAGASAANAAAYNGNLARRVLSGNAGTPRRPDADIDVYLFALFNENQKPGPTSERNYGVFYPNQQKVYDVEFVLGGGGASQGNGGLGWQENGGGASSTSTNPPSGVKVTTGEAWCVANAMAGEHRLQAALDYACGPGGADCKAIQPGAACFEPNTMVAHASYAFNDYYQRKGRSIGTCDFAGAAYVVNQAPKMGKCDLPSTV

SEQ ID NO: 59235 - protein, 502 aa, Zea Mays
MLTLGDMWSASTIDIYLHRRYYDCIGQNGILKKGREVMLTGCCLRTAMEGSGHARILPTEYMVILLDEEQDEDALLLAAQFCNYSFSSLILEESRNNVPYSFYARIEKIESLEPFRCAERMQIILEDNDNAKMKLVLWGEQTSLANLCSVGSMLALDRPFIANFIDNNHEDSQELCLEYGSATQVYMVPIAQQEEQVPFTPTQVKSQGPRLSCVLTDNVASQVTLPRDLYGSVDFSKYPFRAYVSDLHDKMVGISLFGTVTSVCKVSTSGTTFYLELEDTTGVVLMKLIFVGPWSLGRVGVGHMVYISGLTCALSSTNILEVSWREKEPGSLFVNLSLLPALLNSSCLHNLSPLSDLPRSTNRTHISHVRLDGIDCDSLKVSLFHNICGSVVNEHSGVLQCSFCKCACESVCARGFQLHLTIADDSADVLAWCVGQTAVEFLQISPDEYLELPEDERAMYLYTLQNESFVVAIANTRKRVDGCAVGDEAVPAWEITRAQKCE

SEQ ID NO: 59236 - protein, 575 aa, Zea Mays
MEMAETLHVLPDDGNGSAAVQTEPYCHEDAIEDMESFLDEVNDRVHVSGIVTGAIIKGILSDVRQEAASQIALKDAEISSLNQKLQQPVNGSLSLSEGRDKRHDEFYSLRQQLDSISKSLLNSEWGLSGSQHNFEDSENASKQQDKENSSRNGVAKTIHPGDSKEEVFGDPKLLDHMDKVALIAHFNKSMNEMKRQHDSVLYQRTEEIFKLKREILKKDGSNPFHLRNNKELEQTRKKIEEVISKLDVLLLENKRASVRIKSNAIPGQQDKNNVLGSEIEQLESGASNNEDYHCSIPTHSSHFASREADHELNIVRPQFDVEDARIAATFREEIERIIIKEFISEINIELHGYEIEGGMKQEVCSIIHNEAIARAMSNIDSLLLKYEEKKGHAEEESLHKQKIEKLKLIVDSFTEVLSEKEKFVSQIGLEAMQTRVESMCCELDLLRDKVAKQDSYLSEKNREFDAIMCRLEQAQQHVQHNDVTLVELNDRLRTISNSLKDLEKQNQALHYAMEEKEKMLTSAVSKDNDMREFMENLVKSIKDFEIVMMNQQAVVANKVDHHESRWICLVMRLRP

SEQ ID NO: 59237 - protein, 98 aa, Zea Mays
MLNSRVRVIHQYLVAMQKGDIPMDNSLLRQVSSLVRRLPATESQKFQDDFLMEYNDTLLMTYLAMFTNCSSTMNELVEKINTSYERPTTRRGGRGAFM

SEQ ID NO: 59238 - protein, 718 aa, Zea Mays
MRHTRSSDEGRVTRCAVRVSEEARLLHLATGDRTINSSARLRFVTRRRRPPPVPVDACSCELLIYRIEGGGGGGSIAAPTYLVVWHWLESSSVSQCSCCLLPHLGPLPSFSCSCELLIYRIEEGKMDDEDYSWVRRTRFSQSVVRSSSGRERYGAFIIDPFGRGAKLRQDGLGTGPGVSSSARRLPIPKARPAVARSERKLKHASSEGQLNRARNGDRSSQGSPAKQSREGVGLSLDIPQLHDVAVRPPKESPDAALDFSFHSDEHSQRLQRVCSSPSPFFLQDATVTADDGSRVRSASTKVSKPPPKPKRRAKSPIPKRVISDVFKEAKAATKRFSSPQRQRKPMSPRSPDDSPPLGFASLRAPSKLKINTRASSWPRTNLDSGPARVAAPEILERWTVDRSELLIGHRFASGAYSRLFHGIYKDQPVAVKFIRQPDDGEDDELSAKLDKQFTSEVTILARLQHRNVIKLVGACNCPTVFCVITEFLSGGSLRAFLRKLERETLPLEKVISIALDIARGLEYIHLQGIVHRDIKPENILFDGEFCAKVVDFGVACEEKYCNLLGDDPGTYRWMAPEMYKHKPYGRKVDVYSFGLVLWELVTGSLPYQDMTPLQAAFAVVNKNLRPAIPLSCPAALKLLIEQCWSWQPERRPEFQQIVSVLENLKTVLERDGTLDKIPGSICQALEPNDQNKKKAGNWIQRLSYAQPAFSGPPPPKLL

SEQ ID NO: 59239 - protein, 823 aa, Zea Mays
MAACVLGLAPTLVSMWPLRCATACSAATEASTTAAHASRRGVGAVSSALSGLRGRHSLSSAQFMDGLRSNLQVERNLTLSPKSPMSRSDDSAITCKGFCTILWNLKADLQDGCLIFITGDPLTLGCWESNMAVQLAPSVESNNIWTAEIKVPYGVHFKYSYFVREEMSSSSDIIWRPGPVYSLSIPSDGQKKQVIIVKDLWMKTSLPGLPTPTWGSWLMEADSLEGELFDGGNNQNIVKDHSVRDTRNQGLSVGDHIILKLGNGTPLHAKLLSDNQSTIMHNCVTEIPNASYISQYGRPQVVEEPWILESIVSAKKPVAKVKDKKGQKKLVNYKHTLSGVSKNMHEQYQPVEEPWLFQSILELNETIVLADGKVEARDIIRKLRKIEKPLTPLDESKPTGGEPSSRVILMNSSVCTMQRIAVLEDGKLVELLLEPIKNNVQCDSIYLGVVTKLVPHMGGAFVDIGISRPSLMSIKQNRDPFVYPQVFKNRGTDHVGDYCNEENLPAYENDDDMSDDEFADEEAHDGSSFPVENVTDNNVDDDEVDSISVYDVDKDEENDHMEDEYSEGILQGYQSEISNDLKTLSSIQHALRESNDDTNGSRWSQVRKGTKVMVQVVKEGLGTKGPTLSPFPCLRSRFWILVSRGNKVGVSKKITGIERTRLKGITKLLRPPGFTLTARTVAAGHSWEELQKDLDGLLSTWKGITEHAQSAALAADEGVEGAVPVMLHRAKGQTLSVVQDDFNEKVKRLVVDSPRTYHEVTSYLEEVAPELYSRVELYEKRKPIFDEYNIEKEIDNILCKRCYFIVSILFHSSCWWIFSLVFF

SEQ ID NO: 59240 - protein, 2374 aa, Zea Mays
MGERDALPPLPLALGPPHLIPPAPTRDPRAIAFLPDLVGFHWVAYAAGSFLVVSHLPSPCRDDNNNDSCSPFFRQVIDLRAPVSAVAWCRRGSGEVAAATDNSIHIFQPAPASSPGSFGWLLRWSITETFAIVAVSWTGCGNGIVAVGAGVSMWARLESSWQLAWRSTPQVPQALVSTTCSMQGPVATVAALAPAEGSVPVLVFLNDARRGLEQAELVHPQPVCMIQWRSCSLYPHDLSEIRREILMTCCFDGTVRLWSKDEVSRSKKQRGLLISFSVIAVIEVNNTLNGVLGVDIIVRWSMESGSVVSRDEQGRFKLFSGDLRESQVGKCEWLVSLGPGPCISFWAIHCLDDVFPPRYPRITLWKQSKLQGWGDSYVKSGPLKSMEQSIFVEAVISRRLCSGPPATCFLLHLLVDDSFAWSTVSTKLLADSGNHALSDSAKNILCCLTKPVKQDGHKGSIRQVSVHPYSCEIELAVSMDSNRMIFFWSLSTFSTLIPTMHAPMYPLWKLLCKFDLRNISEDFEYSCLCWAPSVTRDNRFLVLGWESGVDCFVVRIQKEEVLSCQKIFTIPFLAESNTEGPPDSIHTIPLASKCSSSLSTTNQGAHACFSNEMFSAVVYEGSSVFPSGLEGEYTTCISVMPLNNTVLPIQQHDPYRTVPGYHIATGCSDGTVKLWKMTCAEDSLQTKKERHIWELVGMFGAHQGPIDIVSLSGCGRVITVGRNLKKNSTSIHIWEATKIRGDGNFLLGDTLMLQDHIVGLDGLSLGDGRFLLAVYLANELRIYSHKHPSFQNVLHTKNSKEEHLWSCIVLSHSHHDIVGFLWGPKATVVLVHENHLSLFSSWLVTGDNEYMTQIHSCPVVHEMLPCTNNFNEATFGKLKLPENFNSGNIDSNNVLLTDQHSHYSHGLWSLLHIAHRLSGPLASYHPRALIQYLYSGEWKRADAALHHLVRSMKVSETSKGVSNYSTCHSIPELPLSEYFAATVSNNISTKGFMWGENRSNTTFNLLSPSTSFLYEDGNLGINTTTSASEKPDIVELLDKSFSKYGISDSEKNQILAISDLMAGITDQSHSSPYKNLDEAGRRFWVAVQFEQFHALRRSADSSKPTWPEMRKLGIGLWYTNVSQLRTRMEKLARLQYLKSKDPKDCALLYIALNRIKVLVGLFKISRDEKDKRLYEFLSRNFQEERHKAAALKNAYVLMGRHQWELAIAFFLLGDDTSSAVNVCAKNLQDEQLAIVICRLIEGSGGPLERNLISNVLLPDAVERGDNWLSSLLEWMLGNYCQSVNRIFGCHPKLLIDQNVLADPELGHYCAILSAKSSFRNSVGEAVSAKLSKLSFAVAACALNKCGLPLEALECLSTNSSIDGKDSIIAHGDGDHKIFYGILSPVSASKNWLSSSVISGIESNLKLTMASKYLSSLLRKHSLCSQLNAPLSEEKVLNEYNNHQIEKLTCDITTVISIFDKRFSLKFADIAEKILIFCSHDGLLFLAYVLLWGTRSPDVATDNYILECHPLCPIDYLLLFSFKESCKFFSRYVVLSSMCSVLNMEDTNSTAWALKERHKYIVISLSNYLNVSRLLLKHDKSGNYILDDRSAMLAVMDLFEYIIEFSFSWLYYDIKSLLIMINPVLATSVNGDSFQVLLDQLMHAICHKNHDISSSTGGMPHAALSKTQLKKSVNSNLLADEKWHLIGASVWVRLISVLEHRLREFFEKEGLEHEAGVSGSEFRGLITSVAAKFVMDSIHFVSSSLVPLHASFLRKNLPMNSSSSLLFWLESKLPQQLPVSDSYDHLSRISQLSNSENMEALFNILWEISVNPVDVCNAFVSEGVNCFSLSNTNVTRSWKDIRCPVVECDKIITERSGEEHEHRLGSKRLGQGFAEKASYNGEVLYETKRRELIIQKEFQSPREILRRSGELLEAVCLNSVNEKQAAIATNRKGLVFFNWSDKQHNKSFSEYVWSGSDWPLDGWAGCQSTPTPTSISPGVDLGRKKGSQLGSVGATTGLSSLAKPGRDLTGGGAFGIPGYAGIGASGFGWGEPEEFEDFIDPPATLENIHSRALSRHPSLPLFLVGSSNTHVYLWEFGKASAMATYGVLPAANIPPPYALASISSVQFDCYGQRFATAALDGTICTWQVEVGGRSNVYPTESSICFDSHASDVAYVSASRSVIASAGYSSNGSNVVIWDTLSPPATSQTSIMCHEGGARSISVFDSDRGYGSISPLVVTGGKNGDIALHDCRFLSTGKSKHHRVTTEHGVEASSMHDIKSSTFGGTDSGMVWHIPKAHLGSVTKVTTIPNTSLFLTGSKDGDVKLWDAKNSQLVFHWTKMHERHTFFQPTSRGFGGVVRAAVTDLQVLPNGFVSCGGDGSVKLVQIKDDLAAAYQR

SEQ ID NO: 59241 - protein, 888 aa, Zea Mays
MDHGRYAPQHGWENNSAPNGYGVINEPDFRSGGSYNARRSVDEGFPRDSYGRGAFYHDTHDRNMYASPPSAGGMWSQPRRNHDEDYATARDHRRHDTDYRNDGKHHEFDSYRGVDRLHDNYRATDNYYESGSHRDFGADRSKRIGSRERAEFHGEFEDRYRSSHQSREDSYERDHEYGRYGYDSDYERGKRDSSWRRRDSCDSERERSGLSREREESPYTRHSRSRSHGRDDRSRSRSRSRSPRPRSHGRNQRDGLYYDNRFDRRREYDWDDRGHGDSVAPSATVVVKGLSLKTNDDDLYKILAQWGPLRSVRVIRERNSGMSRGFAFIDFPTVEAARRMMEATGENGLEIDGRNVFFQYRTAAAPCDWICTICGCMNFARRTSCFQCNEPRTEDALPADATGSASHFGRRGSELGPTHVLVVRGLDENADEEMLRYEFAKHAPIKDIRLVRDKFTHVSRGFAFVHFHSVEDATKALEATNGITLEKNGQVLRVAYAKSTHGPASGGSQSNSLAAAAIEAASFAQQYDAIGWAPKEYNPDDKQNNNSESQKDGSTAQSGFVWDEKSGYYYDSASGFYYDGTTGLYYDSNSGVWYSYDQQTQQYVPCNDQSNTKAAGEAASENTKTSDSNSGKKVVISAPAATIKQSEKTSLPDAVQAAANAALAAEKREKEKAKEIKLASKNSLIANKKMSNVLAMWKQRNQEGQAARIVLDDKEPANSDDKFSHSRSGTGFSLKSKPNSDLENAMGNSLGQGMTSTQTLDSVVKPRPVSNSLGTTVMGVIRGSARGVIKSDTTFHALSDAGSTDSRTTITTRASGLMTSSEALITPAPFKTDVSALVSNTPSGVSGSGKRRFSEAPGQSQYRDRAAERRNLYGSSHGTDTVGLDSMR

SEQ ID NO: 59242 - protein, 1464 aa, Zea Mays
MDPTADFFAEPTRAKNETEQHGHVIRRRRASKTNFVEVRTFLHMFRSFDRMWAFFILGFQAMVIIAWSPSGSLSSIFEPNVFKNVLTIFITAAFLNFLQATLELILNWKAWKSLECSQRIRYILKFAVAVAWLIILPTTYSSSIQNPTGLVKFLSNWIQNLQNESIYNYAVALYMLPNIFSALFFMFLPIRRALERSNSRIIRFLLWWTQPKLYVARGMYEDTCSLLKYTTFWILLLICKLAFSYYVEIAPLVEPTRIIMSLERPPYEWHEFFPNLRHNLGVVVTVWAPIVMVYFMDTQIWYAIFSTICGGVYGAFSRLGEIRTLGMLRSRFEAIPRAFGKKLVPDHGSHLKGDEEDKNPPFDKFADIWNAFINSLREEDLLNNREKDLLVVPSSGGQTSVFQWPPFLLASKIPIALDMAKSVKKKDDELMKRIKQDPYTEYAVIECYDTLLDILYSIIVVQSDKKVVDRIRESIKDSIHRKSLVKEFRLDELPQLSAKFDKLLNLLKEYDENDPVNRNTHIANLLQDIMEIITQDIMKNGKGILKDEGQKQQLFAKLNLDSLKHVAWREKCIRLQLLLTTKESAIYVPTNLEARRRITFFANSLFMRMPRAPPVRSMMSFSVLTPYFKEEVLFSPEDLHRKNEDGISILFYLRKIYPDEFRNFLQRIDFEVKDEEELKDKMDEICNWASYRGQTLTRTVRGMMYYRKALEIQCLQDMTDPAKVDRDRSIGSYQELQYDIEMAQAIADIKFTYVVSCQVYGMQKKSKDLNEKRRYQNILNLMIMNPSLRVAFIEEIEGLTRNGATEKTYCSVLVKGGEKYDEEIYRIKLPGNPTDIGEGKPENQNHAIIFTRGEALQAIDMNQDNYIEEAFKMRNVLEEFESRKYGKSKPTILGLREHIFTGSVSSLAWFMSNQETSFVTIGQRVLANPLKVRFHYGHPDIFDRLFHITRGGISKASKTINLSEDIFSGFNSTMRGGNVTHHEYMQVGKGRDVGMNQISSFEAKVANGNGEQTLSRDIYRLGRRFDFYRMLSFYFTTVTVLTVYVFLYGRLYLVMSGLEKSIMLDPRNQQNVKALENALASQSIFQLGLLLVLPMVMEVGLEKGFRTALGEFVIMQLQLASVFFTFQLGTKTHYYGRTILHGGAKYRPTGRGFVVYHAKFAENYRMYSRSHFVKGLELLILLVVYLVYGSSYRSSNIYLFVTCSIWFLVASWLFAPFIFNPSCFEWQKTVEDWTDWRKWMDNRGGIGMSVEQSWEAWWVTEQDHLRKTSIRAFVLEIILSLRFLIYQYGIVYHLNIADHHKSIMVYGVSWVVMLLVLVVLKMVSIGRQKFGTDLQLMFRILKGLLFLGFVSVMAVLFVVLHLTISDVFASILGYLPTGWCLLLIGQACSPLIRRTLLWDSIMELGRSYENIMGLVLFLPIGFLSWFPFVSEFQTRLLFNQAFSRGLQISRILAGQKDVSEFEFK

SEQ ID NO: 59243 - protein, 214 aa, Zea Mays
MDAGQQDAWDWDWEVLLPDHRSSSSVRHHHGSNNNTLDDQEEAEELDLLLPAPGGDDVVDAHDDECKDIGVVPDDEAKKSSSVAPSAAAGDPTMASSEGAVEAKEPFQSPDDAKATADDGGKFAAQQQEEEEGEDEEEDAGKENDDDDKAARAPQCVVFSVGKLKVNGIGALCSFGVAAATLCVFLVGGRQHHRRQEQREETIQLQFYGDDKVR

SEQ ID NO: 59244 - protein, 368 aa, Zea Mays
MASVAGSGGGASAGAGGLKTYFKTPEGRHKLQYEKTHSPAVVHYNHNGKTVAQMTVAYLKEKPAGQGSTPSTPSAGSGMRSAAARLLGTGNGSRTLSFGSNGTSRAVSGSSRMGGGIGVSTSASGSQGMANYDGKGSYIIFNTADTLFISDLNSHDKDPIKSIHFSSSNPLCHAFDPEAKDGHDLLIGVFSGDVYSMSLRHQLQDPGKKPVSYQHFVNKDKDKDKDPSQGGAASSQCTCVAWVPEREGIFVVSHADGNLYVYDKFKDGNTDWTFPTVKDQSQVLISHAKSSKGNPIARWHICQGAINGISFSPDGAYLATVGRDGYLRVFDFTKEQLIFGGKSYYGALLCCSWRLYTFLTCVVLMTDE

SEQ ID NO: 59245 - protein, 128 aa, Zea Mays
MAASPALVSLTPAVSRHPHLLFCSPCPPPRHIRLAPPTATPASDGNGLGPGPGPGVFLSPRALSQLDELAAFRYEHAFPHGLLTVPPRPPRARSARRGARGVLPPRRRRRRRRQRQRRPGGRRRGGWG

SEQ ID NO: 59246 - protein, 368 aa, Zea Mays
MPGRTEVEQLHKIFKLCGSPSEEFWANLKLSRATIFKPQHPYRRCVNDVYKDFPTTALTLLDHLLAVEPGNRGTAASALDSEFFTTKPYACDPSSLPKYPPSKEYDAKLRDEEARRQRAAAKGQEAEAGRRKQPPAPDGNSGLQHRRVQMNPKSSSYKFTPKEDAVSGFPIDPPARAAADNGYPQRVPLMQAGRSSSTLGRSSGMDPKAQRFHTSQIVTTEMSGQSTASGQRGNAPKMSNLGESARRQYLREHRSSSRYSQLTAADPSDRPEWNHQFQERPSSSHRKDDAVANKEHTVVNGTKKNRIHYSGPLMPPGVNMDEILREHERQIQQAVRRARLDKGKGKHSGERDQSESLLCTTGNLRADR

SEQ ID NO: 59247 - protein, 778 aa, Zea Mays
MLEKIGLPPKPSMRGATWVVDASHCQGCSVQFSLFTRKHHCQRCGGLFCSSCTQQRMVLRGQGDSPVRICDPCKKLEEEARHELRYGHKNRATRATTKSASKPEDEILSEILGGGERIQSLDSLLPGRTTSSASTSRRTSSNLSTDAKGDESLSAEAHNYELNNTASIFTPEELRQHAVEEKKRYKTLKSEGKPEEALRAFKHGKELEKQAAALELELRRTRRMATKATNISSAVGTSMTAGSDEVETKRSSTGKKIKKEKNDLASELRDLGWSDADLRDETKAAPMSLEGELTQILREVAPKPLEGKRTGGIDKSQVNALKRQALLLKREGRLAEAKEELKKAKILEKQLEEQEILGEAENSDDDLAAIIRNMDDDKNDDIFIDDSKFPAFNFEQIMVASNDLATDGHFDVTDDDMNDPDMAAALKSFGWSEEDDKQLENLEPVSSNQEGLKEQVLSLKREAVANRRSGNVVEAMSLLKKAKLLEKDLKTEEPDSKVPSLERQKTTHAEDATYAGTNVRPIPTPKSKLAIQRELLALKKKALALRREGKVDESEEELRKGSVLEKQLEELENSSKPPVAKETRSFPSNPPYKVEPPNINLADEVYEPEVTDKDMQDPALLSVLKNMGWEDAGSDSVETTDKASFSAHVVHHKSSKTKGQLQKELLGIKRKALALRRGGKNTEAEEELEKAKVLEQQLAEMEESNNLSASQGVTTAGGDEILLVHASESGTPVVTLCGSPSKPQIETTNPNQGDVGEESRAGRSPALSQPAFTDPLGS

SEQ ID NO: 59248 - protein, 138 aa, Zea Mays
MADDDYNEIDMGYEDEPPEPEIEEGAEEELENNEDAPDDVIGGEGEDKEQEKTKRERKTTKYMTKYERARILGTRALQISMNAPVMVELEGETDPLEIAMKELRARKIPFTIRRYLPDGSYEDWGVDELIVEDSWKRQ

SEQ ID NO: 59249 - protein, 654 aa, Zea Mays
MLYGHMSYGRGGDPNGAPQAFQLNPNVPLLTNGQMVDDIPPEQHALVPSFMGGGGKRIHPLPYADPSLPVQPRSMDPSKDLAAYGYGSVAWKERMENWKQRQERMHQTGNDGGGDDGDDADLPLMDEARQQLSRKIPLPSSQINPYRMIIIIRLVVLGFFFHYRVMHPVNDAFALWLISVICEIWFAMSWILDQFPKWFPIERETYLDRLSLRFDKEGQPSQLAPIDFFVSTVDPLKEPPLVTTNTVLSILSVDYPVDKVSCYVSDDGAAMLTFEALSETSEFAKKWVPFCKRYNIEPRAPEWYFQQKIDYLKDKVAANFVRERRAMKREYEEFKVRINALVAKAQKVPEEGWTMQDGTPWPGNNVRDHPGMIQVFLGQSGGLDCEGNELPRLVYVSREKRPGYNHHKKAGAMNALVRVSAVLTNAPYLLNLDCDHYINNSKAIKEAMCFMMDPLLGKKVCYVQFPQRFDGIDRHDRYANRNVVFFDINMKGLDGIQGPIYVGTGCVFRRQALYGYDAPKTKKPPSRTCNCWPKWCFCCCCFGNRKQKKTTKPKTEKKKLLFFKKEENQSPAYALGEIDEAAPGAENEKAGIVNQQKLEKKFGQSSVFVTSTLLENGGTLKSASPASLLKEAIHVISCGYEDKTDWGKELQKIF

SEQ ID NO: 59250 - protein, 317 aa, Zea Mays
MDYRPSRMAVVAKHAEAFIREFFDQNPLSHVGLVTIKDGIAHRLTEIGGSPESQIKALMGKLECSGDSSLQNALDLVHGYLDQVPSYGHKEVLILYSALNTFDPGDITETIAKCKKSKIRCSVIGLAAEIFICKHLCEETGGSYTVALDESHFKELLLEHAPPPPAIAEYAAANLIKMGFPQRGAEELISICSCHKKIKSGAEGYICPRCKVNVCELPTECRTCGLTLVSSPHLARSYHHLFPVPPFDEVTPVPNRIQRGGQICFSCQQSLYNPDGQSNLHVRCPKCNQHFCLDCDIYIHESLHNCPGCESQRSIAS

SEQ ID NO: 59251 - protein, 1183 aa, Zea Mays
MGDLVVGLAKSVVEGVLTKAQSAIEEESKLRQSAQRDLVFITGEFEMMHSFLNVANEERAKNNVVRTWVRQVRDLAYDVEDCIEFVVHLDNRPHWWRRFIPSCMPASALPVDAVVAEIEKIKVRVEDVSKRNSRYSLISDSGSKPVMQQQPATGPAIGTTTLDMFVESRDATKKQQGLGDITQLITKENIDLGVISLWGTGGDLGKTSIIRKAYQDQEICENFGCRGWIKLTYPFNPHKFLQSLVTQFYTNSCLQQGTTLDVAQLKRMVAKRGIIEEFTKQVDGKRYLLVLENMCTMGEWDAIRACLPHRNKGNWIIVSTEHHEIASLCVGHSYQVLELKQYSAEYPVCVFFKESKKTGRVISSSGEILEDEMSHRGGLTYGRIPTSRKALASSWMDQSTLVGRESQMNELRKYQTTARFKDWQVMSVWGIAGVGKSDLVKNLYYERMLKEDPMFDKYGWVHVSHPFNLRDFSRNLLLDFHSDAVGIRDPIQECHKLLKEHQCLVVIDDLQSVEEWDLIRPALVSRHSKSVIIVITTDEKIATYCADDEEVVFNVKCLEAEASFDLFKKEVQKKSQTSPLMNSNNKELEQLILKCGRLPKVIVAVAKFLAPKTVTCMDSTKTLNHRFMQELESNPEFSVLQDLFAWMHSYFRACPDFLRPCIFYMSIFPGSQIIRRRRLVMRWVAEGYSRDTKDITAEEKGEMFFSMLVNLSMIQPPTCRVITDMKMVLCQVSAFFHEYIISRPVEENIIFALEVFALKGRCLPTTGRTGRHLVIERCWDRDRIVFESIDFSRLRSLTVFGQWESFFISKSMKVLRVLDLENATGVTDKDLEQMVKLLPRLKFLSLRGSTGICHLPSSLGELRQLETLDIRGTFIAKLPASITKLKKLQYMRAGTISLAKESSTSYSSASRLPNLCKSCKLVGVEMPSGIDELTPLHTLGVVNAGIGGGKATLKELKKITQLRKLGVSGVNKKNNKEFCAAISCHVRLESLSVWLSKGNQGLNEISSQDKPLQNLQSLKLYGLGSEVPAWMKDLPKLTKLDLHMTISAEVDIIKVLGEIKELCTLRLCVKPLQDGDGKLDFCVWVNGIQQRCYLNLKILEITCSSKLNISFGSEAMQNLELLRARCCSGSTLKFMEIKNLSKQKLKEVQLIGSHDTALKDDMEKQLKEHPRKPPLKLEEPEGC

SEQ ID NO: 59252 - protein, 74 aa, Zea Mays
MLKFIRGKRTCPHLHICIYLSLKKKTKNKRFSAPQPASVPLFFFCLTPRPQVIRTLHLYYVKHVVPSHPSPRIK

SEQ ID NO: 59253 - protein, 1105 aa, Zea Mays
MSKMCHACASEETTMNEANIDLACSTSCCKMCDYGEGSSIVTSEINWLAMDSSPYSTPYGTPVFSRENSFSSFASCFSSLGDSLTDSDSEEEIELQDTGQFYHDTILIKDFMEQEESFVRVEECQFKDIADDCAIFSIPINQYISSAEQQLERHEDSNKGNFDTINISLDSDISYEQRKDILSDDKHVRTKCAVPVEDIDHKESGAIVVEQITSLPMPGGDIFPLNEQVMDGLSSTLENTIVYNNILNTEPEMKHGTHFENENECLYPLALPSFEADPLIWLPPEPENNEDDFDTVSNDDDESGNNSTGWGRSSFKVNLAERNKESRDDQLQKVMSEVMNGQFKILVSRFLAAEGLSLSDGGTDKNWLDIVASLSWDAALRVKPEANSGNAMDPGSYVKVKCLASGSYQQSEVINGLVFKKSAAHKQMRANVKHPKLLLLQGALGHSSTGLSSINSMKQENDQLERTLYEVIVKCQLDVILVEKAVSRNVNEYIQKQGVTVSVLMKPSLIKQCESLHFEKFVEEHNITGEDGKKSCKTFLFLEGFPRPLGCTILLKGATREELKKIKRVLHFTVFAAYHLILETSFFADQKLFTTDKTTTGKEKCFKTNQQLLGSCYDNSKNSDTMNNTPTCDDQYPNQEKLIHTEKSVPLHLHDSKTMASEDSAGEEHIDSKGIQSYSSLPVSDPSTNFMQDMPSPDCAESKISGGFDGSTFTDTSKEVQKKELSSDNFQGTFDVICAESGAALNTQDILVSMSSQHIRNQAVCEQSHLSRITYYGYFDTSLGRYLQDTLLNEKHSCLSCGESPESHMYSYTHHNGTLTVLVKRLPLELTLSGETQGRIWMWTRCLRCNAKPTHRVIISSSARNLSFGKFLELSFSTHSATKKLPTCGHLLHRDCLRFFGFGSRVAMFIYSSVEIYSACKPPLSLEFNNRNKNDWLDIEVKNVLLKWKQLFTTIENVIQDLRSRYSSQAMGEDTNVSVDEDEGLLLEVSRMLTQEKNKVEVSLREFSRIAIPESFAHGILGLNWLYQQLLLGFYIWDLRLLHILQYTKVNTASSDNSIHESTAKNEPKSSASIAIQDTPSLKEIGTERKEATINSSGNFDDPFG

SEQ ID NO: 59254 - protein, 206 aa, Zea Mays
MAPSVAVENLNPKVLKCEYAVRGEIVIHAQRLQQQLQTQPGSLPFDEILFCNIGNPQSLGQQPVTFFREVLALCDHPCLLEKEETKSLFSADAISRAKQILATIPGRATGAYSHSQGIKGLRDAIAAGITSRDGFPANADDIFITDGASPGVPYYLDEKTGWGLEISDLKKQLEDARSKGIDVRALVVINPGNPTGQVYTDHFSSC

SEQ ID NO: 59255 - protein, 714 aa, Zea Mays
MLNDSRVVFPDGIGALIVESDERFLRSAALMLSLLNYRVATCERPTSVVKLITGRLKDADVVFIDALRAATCGFDFRRIVESHLCIPVVYFLSRDYGVTGDVSEALQRTVWAATYVVRKPLDAGELSRLWKVIKWSKFLLRRAWPEWPRGSRVRPAVVGALLPGSSTVDGRWEDDDDDGREHFRAVRAGRGRRRKLGDRQYHGGRSSGRGGGGGVAVGIGIGRRQPTERLEQMNLTGWQQENDDDDGVFPIHQQPAQQNRPGVQTMDDVQNQQHGRSLFMQPGPQTLNVPHNNPMISPDAGWPSSSNVAAFAGASNTTGPTLLQGVYQAPAARGARAASPAPHAVYAPPAPGLRPPVYQQQQQPMAPLYDFGDMVAPPAAVPLPIPTMAATSGHQPQFTLNHHHQQQQEEEMFAPRRQGGWMGSRRRRETGPIMLSFQQPQAADPFTPMAGSGTAFGASSPTGATDAGAYGAAAVAQAQLQSPNAGAQPADSSFDDVLRAMMEMDYYANNCSAEALMAPATDELAGMQAAAALGSSGNYNAGPFMVTDANGGNGTPFMALALAPQDPAAPTGNQNQVQVELGAPDIYGGSLLVGSHQGGGTSAMFNGDGDMAPMFPSNEYGATANAMFSLDALLDFDDGVPTYPEGHQVAAADSTTASNATGIMSNGGESGGSGPSWNMGAAAADEGLDMLEEFLMEDNESGFLLPQDMNNGLQ

SEQ ID NO: 59256 - protein, 300 aa, Zea Mays
MGAYATTGMQMIATRPSIPAYRQILGSTSALSAFGRSICSRTGFAISSKATSAGPLVSSNCKRVVVRAMSQRGAQGLPIDLTGKRAFIAGVADDNGYGWAIAKALAAAGAEILVGTWVPALNIFETSLRRGKFDESRKLPDGSLMEIAKVYPLDAVYDTPEDVPEDVKANKRYAGASNWTVKEVVETVKNDFGSIDILVHSLANGPEVTKSLLETSRRGYLAAISASSYSYVSLLQHFLPIMNPGASISLTYIASERIIPGYGGGMSSAKAALESDTRVLAYEAGRKGKIRVNTISAGPL

SEQ ID NO: 59257 - protein, 1950 aa, Zea Mays
MASKGPRSRLDHDTRARRQKALEAPREPRRPKVHWDHVLAEMLWLAKEFDSERKWKLSMAKKIAQRANKSIVDQAAKGERKQKGKQVVYKHQLELEERKKKALDKQLDFLLGQTERYSTMLAENLVDMPYSQNLETETSQINQPSHQEVVAEENLNATIPDDLDNMEVDDDYGSSLDEEPEDDEHTIDEDEAQITEAERNEELAALEAEADLPLDVILKMYTKTKVTPNQANGCDHELAHSSSDEGNSSEEVDDGHSYAEFVKKNHGKSNGNISSINDQEDEDYIAAEEVKDDEATLSEEEQLAKKEDPDHLEEIKLLQKESEIPLEELLARYREDGCADHETAELENSPHFVEEVNTDKSLNDQSVNILEAKSDIFVDHQSRDVLETEHTTLQSEIASEPCAQQNFVEENNLTDVKTVNEDKSDDVIADAAAAARSAQPTGNTFLTTKVRTKFPFLLKHSLREYQHIGLDWLVAMYEKRLNGILADEMGLGKTIMTISLLAHLACEKGIWGPHLIVVPTSVMLNWETEFLKWCPAFKILTYFGSAKERKQKRQGWMKPNYFHVCITTYRLVIQDSKVFKRKKWKYLILDEAHLIKNWKSQRWQTLLNFNSKRRILLTGTPLQNDLMELWSLMHFLMPHVFQSHQEFKDWFCNPISGMVEGQDKVNKEVIDRLHNVLRPFILRRLKRDVEKQLPKKHEHVIYCRLSRRQRNLYEEFVASSETQATLASGNYFGMISIIMQLRKVCNHPDLFEGRPIISSFDMAGINMQLSYSVCMLLDKSPFSQVDLSDMNFVFTQNEFSMSSWEADEVISAFPSSITSRDCDLDIFCSNKDHQGSNLTNIFEDIQKALQEERIKESRERAASVAWWNRVRCQKRPVYGTNMRHVLTVKHPVSNILNKRNNPLCHMDYSSRLADLVLPSVERFQKMLYFVESFTFAIPAARAPPPVCWCSKGKSPVFIDPAYREKCMYKFSPILSPIRSAIVRRQVYFPDRRLIQFDCGKLQELAILLRRLKSEGHRALIFTQMTKMLDVLEEFINLYGYTYLRLDGSTPPEERQTLMQRFNTNPKFFLFILSTRSGGVGINLVGADTVIFYDSDWNPAMDQQAQDRCHRIGQTREVHIYRLISESTIEENILKKANQKRALDDLVIQRGSYNTEFFKKLDPMEFFSGHTSLRVEGQEKNCSTSVGASNDVDLALSIADVEAAIRQAEDEADYMALKKLEEEEAVDNQEFSEEVAGRPEEDELVNEEDGKPDEHINEDHKYYSSDVEKEKHITLSTNRLNNEKALTLAVGDEDTDMLADVKQMAAAAAAAGQACSSFENQLRPIDRYAMRFMELWDPVIDKAAVNHQVNVEEEEWELDRIEKLKEDLEAEIDEDQEPLSYQSWDVDFATTAYRQHVEALTQKQLLEEQERQAQEAAKELEENNDNMSHRRKSNKNKKKTGKFKSQKRPRLSSESEVILEETSVDTMSIDDNAPSPELISDESPHHYSNKRKKIMSATEEDSNSRSLKKFKKTKSSFISELSPRPKEDLNDSDPKSVARTKSDGRLSIPCMPVKRVIVIKPERLKKKGIWSRDCASDSWTSEEDAVLCGTVHEYGPLWELASDFLHSLPGGSSYRGRYHHPLHCCERYRELFCKYAISATDNSNSEKAPSGTGKAVLRVSEDQAQMLVNVTSELPNNELLLQKHFMAVISSVWRSKCCRHPCCFRNKPGGSSENWPMVNFRPSVNLVREALAAGQAKFTLTVIPPPSRNQEYSRNYLELELDFLKDQHAYEEDFPSVLNVSILEPESSKQAPEPVEQSLLSELSCRQAENRLRIASEACYDGESFHWASSSFHINDAARHKSGLKSIGKHKAASESGRPPKSKVQKITELHQEGPIAMSNFLCMPAQLLPSTADFHISDSLSDFGINDYEFNYSEDLLQEFDALEFFPDQGDSGLLGIEELEPLSDFTDIG

SEQ ID NO: 59258 - protein, 179 aa, Zea Mays
MGSLWVLHPFPFAYSNLAGPLCDCVQPRAIDHCSQQRRASLTLTPNITRTCTRAPHRSARQTLPRQRLAKLSDPSSSLVESQACTPSTPCSPRFVVIVHYLRPHRLPHRFSRPTGHRARRVFLRADSHVPFTPSASRVVEKITLSMDQSSTGVISWRLVITLKTCGKLFLLGTCSQMLS

SEQ ID NO: 59259 - protein, 662 aa, Zea Mays
MQFWNIYAAFTVCTKSADKPSLGDELDTSGPSKEHQNDLITEKQKIPDLKRRKHGRLSNSLQKKAERLKYLESRKAVKVGKQRDIKKVLPLHSILKKYTKHTSVKMVKEKHGNSKGTGVIQLCRKSVKRVKFSETDDAKKQCSKRPPLESIRELLSAISSSSSSSIEMSSEEEHVIAESSSSHMTEKAVTMASEANENTNHDNQYELSSTRLSTGLLDLNQALPEPTDLNNPYVPNSEVSNLEQAQVGTWNLDQQVLGNGRKNIDSSFDLHGQEQLRHSTELDTTSKGKSPCTLSNGFQDSVHLQQNWSSMTLHHGVSQLSTGGEPSSFEVRESNISHSEKRNFSSETNVEQELRPSAGQTLRLMGHDLTVSDTRVDYLSDAAQNHTNNTADHLTTKVVLELPRQGQPFLALQTQSIPSVSASSARTAQAHFGYRTTHNISHPLLAANVFSGDPSVYEDRCRDFTNLQSHRNSILGYPPLSNHGSAAFLQNSPPWRYYSDHSTRRDSLSAPFTPTVMQHVATPSDYRANLPHQSYGVYSGSSTVRPLNSASFTCTNQIVQAVDSRATANLPSRSPTTGTTRTHHNSNTSSSSRLVLRSGPVKLSAGAKHILIPNENTEDDNSAPMYSCVSFGSSGGNVSAAYQNKGAGSHRHQNKGAGSRRF

SEQ ID NO: 59260 - protein, 619 aa, Zea Mays
MGMWSGEHTERSEATANESASLNGLVGDMVDDDVSHQLHAGIMKSARRVLIDEIFSSILPDLIVSKKTEKQLAAKLKNQVTKSGSVSNKKDSTAKVKVNTLSTIPKKGNSYNTSQVDCLAEIQSTAVHGKFADIVSAVWQTVYHESMNNVWDEILSERVMDYCDVWLQRNCILNLPSTSISVISDDNIKAQGSHELSPKDLDATECDMDFPPGFGPCWKSPESSLSPSLLEVNGSAKLDGKSESSTTLFSGPLAVVQRMLANELYISSKQSLFHYFEEVIADDITNCLCFGLESNIDQEQIGTPIHAPESPISAETSMHETANSIEMTGGDVLNIVEIATSTRTSPLEMTVDEKLNTVEATRTSRTEPTSVETSTVAEMATDKMTTYHVEEHLSMSYARVFEKMNICKTAELDEKFDEVPPGMETGLVPLPLMDKNIYQPSKSVNSIPLISRYITLALCRQKLHENVVREWTYLFSDTISKCLGSWYTRRNAVPKSADGSSKLKEKTYYRKRKFEKTCQAKSSKRPVEISMDEQLSKPLCQLVDRKIYVKNIQEPNKSLTSKRVSFVDKPSEKGAKTVANDAYDLNIQQDLTLLSSEVPKEPGHLIQLRSIWLLTGHLR

SEQ ID NO: 59261 - protein, 544 aa, Zea Mays
MSSWLRSAVSRAVEAGGRSGVARAVKGYADTVAHHAGQAVADILHDRMGVQNYKSFKKTVARLEEAAVSCRGGERVELLKRWLGALQDVDAENGSSDLKVSEANDPSGEMDTLKAQTVLFYDADIDGAPMNFCDVFLYSQALEGITLSMILEPPSEEEVSLLLEIFSICLTGGKEVNKEIMSNVQDLAKAFSEYKDEVLVKREELLEYAQSIISGLKRNADIVRIDAETLELQRKLDEKQKSRGQSPEYQDKTSDKIAAANLEVFKEALGELRLCSRVEELLLKKKSITLGDSLEIHSQKVDKLKVLADSLACSSSKAEQRILEHRRQKEDALNFRVKKENEVSVSEKELLDEITELEKQRDELEAQLKKVNISLNAAAGRLKQTREERDQFDEANNQIIFSLKKKEDDLSKSIALCNVESNVVKIWIGFLEDSWKLQSSYNEQKDNKTCDELEKCVSDFLKLTKHHLSAFKEVLSQLIENIETYVGNLAVLTSREEEKEHGDDEASERTDPRKSLEEEYLETEKKVILSHLTLTWSHTWFLKR

SEQ ID NO: 59262 - protein, 445 aa, Zea Mays
MWLEEVRRRERGELRARRFEAAARACRTASLALSNRKEFVTPHHGAVNSLQVDLTEGRYLLSGASDGSAAVFDVWNATEYETGFIAKHRNILLVDKQHQNGHKFAISAAVWYPVDTGLFVTASFDQFVKVWDTNSTQVVMEFKMPGKVYTAAMSPIATTHVLIATGSADVQVRLCDIASGAFTHTLSGHRDGIMSLEWSASSEWILMSGGCDGAIRFWDIRRAGCFRVLDQSRSQLGKRPLVKSALYKDHTDSLGPSPSARRRTGISKKSSSALRKIQNPTHGHMQQRLHPGLSSSQNRATAHYGAVTGLRTTADGMYLLSSGSDSRLRLWDIDSGCNTLVNFEAMRLQTGKPLQLAVTEDPSLVFVPCMASIKAYNLWSGKTFQTFRGHYELVSCCYYSEQDQELYTGSNDRQILVWSPSTPAFTKMEDDDKILSAADEDNWSD

SEQ ID NO: 59263 - protein, 307 aa, Zea Mays
MDESHPHLLRVLQTWPDAQKMISALDCLAVVTFVGATDLAETQLSLKAIWDVIHPKSGSNVGVVRKPKPPLLAAAVSAWAFLLTTIGSSRRNTDSWKEPITFLCSLLEAEDRAVRIAAGEALALCFELRMFDVSSSDEADVDSYTGEAGGSKHQLFLNMQALKAKLSGLVYSLSMEAGGRGADKKNLNDQRDLFQRISDFIKSGECPEESLRISGKNGILRVTSWRESIQLNYMRRFLGRGFLKHSQDNDLLHEVFDIKIDRTENMSATEKKMFRSGEEKGRALKLNKERRLAQERKQQNILNEQYG

SEQ ID NO: 59264 - protein, 786 aa, Zea Mays
MSSAAAVDEMELDGIERHRDKERRERHRREEKDHNGSGRRDREKEKDDRRRDKDDGKHRDRDRDRERDRDKDSKYRDRDKEPERERNRDRDRGKDREREPDRQRDKDRSKDRDKEAERDKERERRDRDKERSRNRDKDKDRTQREDRDHEKSRVKGRGEDEADLSKGDKGVQKQRVDASGDAEQPAADELRERIARAKEERLKEKKEGGILDGNDGASEILSWVGKSRKLDEKRQAEKEKALRLARALEEQDNILAENGDDDDDDKEEDTQVGDHLSGVKVLHGLDKVLEGGAVVMTLKDQSILANGDINEDADMLENIEIGEQKQRDEAYKASKKKGTYDDKFNNDSSSKKSILSHYDDQMEDEGVTLDEGGRFTGEAEKKLEELRKRIEGGYVQKKTEDLTSTTKISTDYFTPDEMLKFKKPKKKKSLRKKEKLDLDALEAEAIASGLGAADRGSRNDGKRQSAREEEQAADAEKRSSGYQTAIAKAEEASRALRGEKTAPAKPAEELVFGDDYEDLQKSLEQARKLALRKQEEASASGPRSIVELATATKSQEETEATEGDSEQNKVVITEMEEFVWGLQLNQGTRKPEDDVFMDEDDDAMPSDNVAKDDTNGLAEMEEDALTEIPAKVEEDEVKPDEVIHEVAVGKGLAGALKILKERGSLNEGTDWGGRTTDKKKSKLIGVEDGPKDIRIERIDEFGRVMTPKEAFRHLSHKFHGKGPGKMKQEKRQKKYHDELKTKHMKSSDTPLLAAEKMREAQSRNQTPYLILSGNAKTGFMIIYMNM

SEQ ID NO: 59265 - protein, 180 aa, Zea Mays
MAQGGVTLLSMTASDAEDPQTLRMVAGAIANLCGNADKLQTRLRVEGGIKALLGMVRCGHPDVLAQVARGIANFAKCESRAATQGNKMGKSLLIDDGALPWIVKNANNEAAPIRRHIELALCHLAQHEVNSKDIINEGALWELVRISRDCSREDIRNLAYRTLTSSPTLEAEMRRLGIKM

SEQ ID NO: 59266 - protein, 263 aa, Zea Mays
MFGQRAMKVENMVKLKEEFDYKSLCRKLDIELDKLIAENERQRKHFDDEVERIRAEAQCRIAEAERECKITLENEKMKYHEEYLDSIRILEEKWKVHQQSPKKQNKEAESTSNDTGEVHNLLQNEKMLRQSAEDEASDLKNQISHWKKLEATATAEIIKLQKMLDAEASQKEKLEEEIGVLRSQLLQMSMEADETRSLDKGDGPGKIFPGFRFIGCLRLEVSQPREQGQLDRSNRLPNSLNKLGYKRYCHCLNLKNLMSAFMQ

SEQ ID NO: 59267 - protein, 1582 aa, Zea Mays
MLRSQDRRPFRPPDRAPRPPHPHRDQHNHNEHRYQPLSHPHIDRRYSNEHRYQPRGQHQRGCHVQPPLRPSQFELDLEKKTLESEKEFVDSKIAEYKEAMWSIQRAMLRGSGDKEEGVDLFAAVDDGEVDFVKVHMMLLRECRRLKEGLPIYAYRRRILNHIFANQAELMEKGHDLIGETGSGKSTQLVQFLADSGVAGGGSIICTQPRKLAAISLAHRVDEESKGCYGDSSVLSYSTLLSSQGFGTKIIFTTDSCLLHYCMSDVNLDGISYIIIDEAHERSLNTDLLLAMIKKKLLDRLDLRLIIMSATADADRLAEYFYGCQIFHVRGRTFPVEIKYVPDVSAEASLNSVPSISSVASSTASYVTDVVQMVNIIHKNEEEGAILAFLTSQLEVEWACETFSDPNAVVLPMHGKLSSLEQNLVFKSYPGKRKIIFCTNIAETSLTIKDVKYVVDCGLAKEYRFVPTSGLNVLKVNWISQSSANQRAGRAGRTGAGKCYRLYPESDFGMMEVHQEPEIRKVHLGTAVLRILALGVTDVKCFEFIDAPDPEAIAMAVNNLEQLGAIECLVLASVMANASSIFCRVGTNEEKYKADRLKVPFCHPDGDLFTSLAVYKKWETGYGNKNTWCWQNSINAKTLRRCQETISELEKCLKHELNIIVPSYWSWNPEKPTMHDTSLKKIILSSLRGNLAMFSGHENLGYKVISAGQRVQLHPSCSLFIYGSKPEWVVFSEILSAVNQYLVCVTAVGLNEVLTVHPMSFIKQLEESKLQRKVITGIGNKSLRRFCGKSGQNLQNIISLLRKDCRDDHIMVDLDFSSSEVLLFAKEHDMEKVFCKVNYALELEAKLLRDECDERRPGSSTIALFGSGAEIKHLELGKRYLTVEILHQNARVIDEKELVCLVDSLVPGIANFHKTGNFQTNLDETKWGRFTFLKPDYAEDAISKLNGIEFHGSLLKVSPVSIYSHSGLPFPAVRAKVSWPRKASRGVALVTCASGEAEFIVKDCFALGVGGRYVNCEVSNRYANCVFVTGIPLHVTEPELYDAFHSTTTRRILDIRLLRGQPTASSSVSECTEALMRAISLFMPNRNFPCQKFRVQVFPPEEKDLMMKATITFDGSFHREAARALDHLQGSVLPCCLPWQIIQCEHVFHSTVSCPMRIYNVISQDVGALLESFRSQKGVAYNLEKNENGNFRVKLTANATKTIADLRRPLELLMKGKIINHPDLMLSTVQLLWSRDGMEQLRSVERETGTYILYDRQSLNIKIFGSTDNVAAAEEKLVHALVQLHEKKPLEVCLRGRNLPPNLMKEVIVKFGADLEGLKNEVPAVDLQLNTRRQTLYVRGSKEDKQRVEGMISELITSSDHNAQLSSENACPICLCELEDPFKLESCGHMFCLACLVDQCESAMKSQDGFPLRCLESGCNKLFLLADLRSLLPDKLDELFRASLNAFVASSAGLYRFCPTPDCTSIYQVAAAGAQGDRPFVCGACSVETCTKCHLEYHPFISCEAYKEYKADPDATMLEWRKGKENVKNCPSCGFTIEKSEGCNHVECRCGSHICWNCLENFKSSEECYGHLRSVHLSYADLM

SEQ ID NO: 59268 - protein, 320 aa, Zea Mays
MEEDKRAEEARRAKEAGNDAYRKSFLETAVEHYTRGALLDPRDISFLTNRAAAYFHMGKYKECVRDCEGAVERGRDLSAANKLIAKALLRKASALLELATCSGDYAPAIRALQQSLTEHYSEETHEKLNKAVVVKKELEEQERLDQETADQHRERGNELFKQKQYHEAATHYTRAMKMNPKDPRAFSNRAQCHIYLGAFPQGLEDAEKCVELDPTFIKGYVRKAKVQFLMENYENAMATYLEGLTYDPNNLEVLDGLRRCAACIKRANGGDVELEDLKDMLGNFQSENNLLKFRKATEQAAILKKEASDERLKRIESERM

SEQ ID NO: 59269 - protein, 635 aa, Zea Mays
MSSISILHRSCLRLGLLPFSPLRARATTLRLPLPLPQPRRHLHLPRRSAMSSAASRLSHIAAATGGGGGAAGESNESPPAASAATQEDDGLSSGDMGYRLPPKEIQDIVDAPPLPVLSFSPNKDKILFLKRRALPPLSDIAKPEEKLAGLRIDGNSNTRSRMSFYTGISIHKLLDDGTLGPEKEVHGYPVGARINFVTWSQDGRHISFSIRVDEEDSKSGKLRVWIADVESGEARPLFKSPEIYLNAIFDSFVWVNDCTLLVCTIPATRGDPPHKPSVPSGPKIQSNESKNVVQARTFQDLLKDEYDAKLFDYYATSQLVLASLDGTVKPIGPPAIYTSVDPSPDDKYIMLSSIHRPYSYIVPCGRFPKKVELWTVDGKFIRELCDLPLAEDIPITMSSVRKGKRSINWRPDKPSMLYWVETQDGGDAKVEVSPRDIVYMENAEPINGEHPEILHKLDLRYAGTSWCDESLALVYESWFKTRKIRTWVLSPDKKDVSPRVLFDRSSEDVYSDPGSPMMRRTVMGTYVIAKIKKEDGNIYVLLNGMGATPEGNIPFLDLFDINTGSKERIWESDREKYYETVVALMSDKTDGELLLDQLKILTSKESKTENTQYYLQTWPEKNQGMIHQKMDLCHV

SEQ ID NO: 59270 - protein, 162 aa, Zea Mays
MSCLMSQVEGLMMDVTAAEEEIKRWKMAAEEEAEAGRSIEQEFQIQISSLRKELDEANRAMVELENKLKFKEETAAAAMAARDAAEKSLKLADTRSSRLRERLEELNKQLEESDTRTESVNRNGHRYMCWPWQWLGLNYVQLPLAETDQTSNEMELSEPLII

SEQ ID NO: 59271 - protein, 638 aa, Zea Mays
MAVGATATKLLPSAAAAARRPSMLHLAAVAVLCSLSYLLGIWHHGGFSAGPAAGDSSSSVSIATAVSCATPAPTTASSSPPAGPLDFAAHHTAEGVEAEGALRHRNYEACPAKYSEYTPCEDVERSLRFPRDRLVYRERHCPAAGERLRCLVPAPKGYRNPFPWPASRDVAWFANVPHKELSVEKAVQNWIRVDGDKFRFPGGGTMFPRGAGAYIDDIGKLIPLHDGSIRTALDTGCGVASWGAYLLSRNILAMSFAPRDSHEAQVQFALERGVPAMIGVLASNQLTYPARSFDMAHCSRCLIPWQLYDGLYLIEVDRILRPGGYWILSGPPINWKKHWKGWDRTKEDLDAEQKAIEAVARSLCWKKIKEEGDIAIWQKPTNHIHCKAIHKVIKSPPFCSNKNPDAAWYDKMEACITPLPEVSDLKEVAGGSLKKWPERLTAVPPRIASGSIEGVTEEMFVEDTELWKKRVGHYKSVIAQLGQKGRYRNLLDMNAKFGGFAAALVNDPLWVMNMVPTVGNSTTLGVIYERGLIGSYQDWCEGMSTYPRTYDLIHADTVFTLYNGRCEAENILLEMDRILRPEGTVIIRDDVDLLVKIKSMADGMRWNSQIVDHEDGPLVREKLLLVVKTYWTLDGSEQ

SEQ ID NO: 59272 - protein, 704 aa, Zea Mays
MSLRIGKKQSSAGKQQAKDGTHHVKGEESKLSEDSDDEFYDVDKVDLSQEAQSSDTRNADVGSRNQEENYISREELECLVHGGLPMVLRGELWQAFVGTGARRIEGYYDSLAAEGELDNKSSPTSEGVQEKWIGQIDKDLPRTFPGHPALDEDGRNALRRLLIAYAKHNPSVGYCQAMNFFAGLLLLLMPEENAFWTLVGIMEDYFDGYFSEEMIESQVDQLVLEELVREKFPKLANHLDYLGLQVAWVTGPWFLSIFTNVLPWESVLRVWDVLLFDGNRVMLFRTALALLEFYGPALVTTKDAGDAVTLLQSLAGSTFDSSQLVLTARMGYQSVNETILQELSNKHRPSVMSAMEERAKGLGVWTDTNGLASKLYNFKRDPEPLVSLSNSADQLSDVGDGDANQESDPVNMDDEYVGVTVKSEIDSLPDPKDQVAWLKLELCQLLEERRSAVLRADELETALMEMVKQDNRRQLSAKVEQFEQEISEFREALSDKQEQEQAMFQVLMRVEQELKIAEEARISAEQDAAAQRYAANVLQEKYEEAMASLAQMENRAVMAETMLEATLQYQSSQQKALSPCPSPRPSMLDASPSQASQNSSQVFQPRRKNLLGPFSLSWRDKNKEKPNNVEDSANTKFTNSDEMVDEKQMETLDLDNEQRAESTKEDGKMRAETPQKDDDLVRVQLTTDHLNGHHEQMQEIKLDW

SEQ ID NO: 59273 - protein, 308 aa, Zea Mays
MKYMKLGSKPDVLQTEGSNIRFVATDLATDVVILIGDVKFYLHKFPLLSKSSRLQRLVASINEEKNDEVDISDIPGGPSAFEICAKFCYGMIVTLNAYNVLAARCAAEYLEMFETIDKGNLIYKIDVFLTSSVFRTWKDSIIVLQSTRSLVPWCEDLKVISHCIDSIASKASIDPSEVEWSYTYNRKKLPSENGIDSHWNGVRMQPMVPTDWWVEDLCELEVDSYKRVIMSIKAKGSTPAVVVGEALRAYAYRRLLGSLEDAVSNGVDCAKPRAVLDAIVSLLPAEEGSVSCGFLLKLLGAACLLESA

SEQ ID NO: 59274 - protein, 94 aa, Zea Mays
MQAGRMYGGVCSALKVLQQEGLLEDKTVTAHHAVASELTCQVIDQPNVVIDGNLITGKGLGTVVDFALAIIRKFFGHGRAKAVANGIVFEYPKS

SEQ ID NO: 59275 - protein, 174 aa, Zea Mays
MVDAEKRLLANALEDVDNQVFILLSDSCVPLHSFDYVYNYLMGTNVSFIDCFKDPGPHGSGRYSIEMYPEIDERDFRKGAQWFAVTRRHALMILADSLYYKKFKLYCKPAEGRNCIADEHYLPTLFNMVDPGGISNWSVTHVDWSEGKWHPRSYSADDVTYDLLKNITLMRTSM

SEQ ID NO: 59276 - protein, 132 aa, Zea Mays
MTLSLLAVAVVFYIKDNISHDSDMHNILSMVSLVGVVAYVIAFCFGMGAIPWIIMSEILPVSIKSVAGSFATLANWLTSFGITMTANLLLSWSAAGTFASYMVVSAFTLMFVILWVPETKGRTLEEIQWSFQ

SEQ ID NO: 59277 - protein, 559 aa, Zea Mays
MFFSFVWRYVLSDLPSDIVVHVDDARFYLHKFPLLSKSGLLQRLIVEASQNGSDEVAIQDVPGGAKTFEICAKFCYGMVVTLNAYNVVAARCAAEYLGMTEDVEKSNLVFKIEVFLSSGIFRSWKDSIIALQTTDALLPWSEELKLVGRCVDSVAAKATVSASNVVWSYTYNRKSASSDEIVEARRSSQAVPKDWWVEDLCELDVDLYRRVMVAVKSRGRIPSDAIGEALKAYAARWLPECCDALVDDAYSGAYKHLLETIVWLLPSDKGSSGISCRFFLKLLKFTVLVGAGELLKEELMDRTVLQLHKASVSDLLIPSRPPAQTVYDVQLVQTLIGRYMSHAGVSQGGIFLNDLDQEMFETNVDGESLLALCKLVDRYLAEVASDPNLSVSSFVDLATSMPETARPTHDGLYTAIDVYLKLHPGLPKMEKRKISNLMDVRKLSKGACIHAAQNDRLPLRVVVQVLFFEQLRAAGAAAAAGTPSASVANQSSRMSLSSRSRRIFDRLWVGGAKLPGEAAAAGKGSSDTSGSSQSPRSSAKPPESKSSSSSSRNRRYSVS

SEQ ID NO: 59278 - protein, 857 aa, Zea Mays
MTAKQEQNSWKWEQLKCSSRRFHKMHSNMWVKKITPHGSDEPAYRYFAAQALSSLVCNGSRGTLLAVANSGAAIGLISLLGCADVDIADLLELSEEFMLVPNPDQIALERLFRVDDIRVGATSRKSIPLLVDLLKPIPERPGAPFLALGLLTQLAVDCPPNMLLMAEAGILEALTKYLSLSPQDATEEATTELLGILFSSPEIRHHESALGVVNQLVAVLRLGGRNSRYSAAKALESLFCADHVRNSESTRQAIQPLVEILSTGMEREQHAAISALVRLLSDNPSRALAVADVEMNAVDVMCRILSSDCSVELKGNAAELCCVLFTNTRIRSTMAAARCVEPLVGLLVSEANPAQLSVVRALDRLLDDEQLAELVAANGAVIPLVGLLYGKNYMLHEAVARALVKLGKDRPACKLEMVKAGVIESILDILHDAPDFLCIALAEMLRILTNNATIAKGPSSAKVVQPLFSLLSKADMGPEGQYSTLQVLVNILEHPECRADYNLTPRQTIEPVITLLNSSPPAVQQLAAELLSHLLLEDHLQKDTVTEQAITPLIQVLSSGLPNLQQRAIKALANLAIAWPNTIAKEGGVFELSKVLLQSDPPLPHVVWESAASVLSSILQYSTEFFLEVPVAVLVQLLRSGTESTVVGALNALLVLESDDSTSAEAMAESGAVEALLDLLRSHQCEETAARLIEALLNNVRIREAKAAKNAIAPLSMYLLDPQTQSQQGRLLAALALGDLFQNEGLARSTDAVAACRALVNLLEDQPTEEMKVVAICALQNLVMYSRANKRAVAESGGVQVLLDLISSSNPDTSVQAAMFVKLLFNNHTIQEYATSETVRVITGKQYPFLVLSYSFA

SEQ ID NO: 59279 - protein, 63 aa, Zea Mays
MHGGSAGERRRRAAREGEIGEWLRLAARRAPVEVRRRRRGEGERTAALAAESGERLRLAVGLS

SEQ ID NO: 59280 - protein, 412 aa, Zea Mays
MRFYLIKTKDHYMIALEKRGSAVTTEMEILAHMGLIHMNSSMLSLVVPTNFLGIVWGLGDFIIVQKQRTIGHLTSESILGGKREINVFRHETCGTCHGTGAKCSNDITECTRCRGQGRLMKTQRTPFGIVSQISSCLNCEGSGKVITEHCTECYGSGRVQIERIIKVDIPGGIDDGSTIRISGGGNVDKQRGASGDLYIFVRVNKKQGIHRDGLNLYSDASVDYTDVILGTTVKVETIEGLKDLHIPPGTQPGENLKFSQLGVPDIKKPNVRGDHYFMIKVKIPKSISGQERLLVEELAALKKAQNISVPEPTKIENFRERNHHPSAKRRSFWGRVWNFFRDDKGDKRFASISVQPIIPGWNSCRGTDTAVPLLLKGFLMTAIFLFVIRSKLRYTGKRIDRPTQAEIPVEPE

SEQ ID NO: 59281 - protein, 656 aa, Zea Mays
MSMDFGAPADDPKAFRNICRDRILKDLLKPDKDKETKSSWKVLIMDKFTVKIMAYACKMAEITDAGISLVEDLFKRREPMPSMDAIYFLQPLKENVIMLLSDMSGRCPLYRKAYIFFSSPIPKDLVTYIKNDSSVIPRIGALREMNLEFFTIDMQGFVTDHDTALIDLYGPSEQNSKKFNDTISTMATRIATTFASLKEFPCVRYRAPKGDASTTTKFDMVPKWLATAVWEIVSKYKSTIPEFPQKETCELLIVDRPIDQIAPVIHEWTYDAMCHDLLEMDGNKYIYEVSKMGSEPEKKESLLEDHDPLWLELRHAHIADASERLYEKMNNFVAKNKAAQLSRDGGEVSTRDLQKIVQALPQYSDQVEKLTLHIEIAGKMNRCIREYGLRDIGQLEQDLVFGDAGAKEVISILRSKQDMSPENKMRLLIIYAIVYPEKFEGDKGEKLMQLAKLPHDDMDIINCLGYLDGSNTKKSSRTGTFSLKFDAQKKKNAARTDKQDGEETWALSRFFPLIEELIEKLSKGELPLKEYPSMSEPSSASASQDATQTASSTARPAQNPQPMSMRSRRTPTWAKSRNSDDSSSDSSVLRHASGDFKRLGNRIFVFMIGGATRSELRTVHKLTMKMKREIVLGSSSIDDPPQFISKLKSIGSATKT

SEQ ID NO: 59282 - protein, 928 aa, Zea Mays
MHDPRFLQEALARYKAFLYLIKMNQEKGLQRFRVPTYDVDLLWHTHQLHPITYRNDMVKLLGKVLEHDDTDADRSEGKKLDVGFTETTEQFESTFGVRYWKAGCMYRGNVPSPVTSTPQTFSAEVGTGSYICKAQKDLNALDVTVVELYLQIVDIKNLPSAVQKENVYVRFAKNQSDMFISDGGRLDISTVTGKNTGVCLQCEPTGELILAVMVDQLSKKPEPIGKVSFPLHDLTGPDSKLSFEKWFELKAHGGHAASPPVSLRVAASATVPSSAQKVFTMVRMEPFSLKSCLLPHSIKDQNTGSWTRFVNDCGTELIRLQIREHKAKNSMAVVRELVGVLKSTKKQIQLAEFKENKWTLKDSNLPISHGTDGSLLDLKGDNHLIKLYRGRKLEYERKCCSAHSEDVSAVTAVKFCAEHPYGKAVALLDTEAQLIMVNEDWLLLPWISISVLFMDGDGGTKLGGGAMVQKGTVFGSDTSMVLETQTVGAGSVASNLAQCGTCSAVFGGDDKEMANCKVEHASSGASRTVVASGENGHTETAGCGGGCGSNCGPMMAEDPKAGNAKSGGCGSGCGGGCGGAGGCGTMANEGQSRSGGVGTLLSSNAMGGEGQQAHSAGCGSGCGGGCGSGMVIEGSKVNNVNAMSGGCGSGCGGGCGSGMVIEGSKANNAMSGGCGSGCGGGCGSGMLIEGSKANKAMSGGCGSGCGGGCGSGMVIECSKANNTMSGGCGSGCGGGCGSGMVIEGSKANNAMSGGCGSGCGGGCGSGMVNEGSKAANTMSGGCGSGCGGGCGALFNASTAAGEGLHNKSAGCGGGGCGSGCGGGGGCGSGMAIEGFKANHAKSGGCGSGCGGGGCGTLFSSSAAASQGQSRSGGCGSGCGGGGCGTGSMVAEGSNGGNAKSGGCGGGCGGGGGCGGGGCGGGCGAVFNA

SEQ ID NO: 59283 - protein, 187 aa, Zea Mays
MAARTPPSLSDVTGCEVRAWTRRHLRVVLAPPPRDTRSQCSGVRARRREVRLAPLDPPRQPLAMSSLSRQSPGRTPSRLLHRPPTASRLSSSSRLPTHPRCALGPGSGPTNNESLSRAQRHSRRSQWQPPSQTIEPHRCCRPWNGADCRRVEPLVEWNWQPPPPPPPPAVATSKCTTPMTLRGTGRI

SEQ ID NO: 59284 - protein, 105 aa, Zea Mays
MVMSIGWNPYFDNTEKTVEPWLLHNFGEDFYGEEVRLAIVGYIRPEANFPSLESLIERIHEDGRVAEKALDLPMYAKYKDSPYLRNPSKHGSSTTGGTQSEMDSK

SEQ ID NO: 59285 - protein, 383 aa, Zea Mays
MAMETQTPETIVPPTTIPPLLTPYKMGAFELEHRVVLAPLTRQRSYGNVPQPHGAVYYAQRATRGGLLITEATGVSDTAQGYTDTPGVWTPDQVAAWRPIVDAVHAKGAVFFCQLWHVGRVSTTALQPGGAAPISSTDRAVAPQLSFDGHLEKFSPPRRLEAREIPAIVDDFRRAARNALLAGFDGVEVHGANGYLIEQFLKDSANDRDDEYGGSLENRCRFALEVVRAVAGEVGPGRVGVRLSPFTDYMDCHDSDPEALAGYLVRSLSDVGVLYCHMIEPRMAIVDGRRQIPHRLRPFREAFRGTFIAAGGYDRAEGDKVVEEGYTDLVAYGRLFLANPDLPRRFRLPDAPLNKYDRTTFYTSDPVIGYTDYPFLADADADK

SEQ ID NO: 59286 - protein, 516 aa, Zea Mays
MRKPLYLLVSAIMLMTMSCLFLMGTVSYLFKGRSLSQADHHSESYLDQRWHLDEVLVLAGMFLYVISLGSSSFVEEEQYTWHFLTSTLYLIFLAKAVQSMLKGSNPTLGHKAEGNSFDRSSFFYATSYELTPGKRNGYKLCTILVVLVAGRVIRAWHQGGINWVHFPDISKLLAQADPSVVKSLQIISVLAVVVLFSISLTLLRARPEFVIGVWLTHISCGFLVLLHVWGNHIGTSLPINHTTASVARQFYVIASVSVSVTVLASPWVFPIFSREAKSPSSGSSPVKAIHGIRKSLVLTGMTYTAFWGLLQLLLQQPINAIPLFLILLQTVSSAVHFSLDKTLHKQWVQVVAMHFLGMAGHFGLGNTNSLASIDVAGAFIGISSYSTVLSGILMFMITYASPLMLYLGLVLHASVKDVDDASNLRQLKWSYILDKIVTLPCLFPLLINSLALTSYTIVLLAMRNHLFVWSVFSPKYLYACAATVCTYVGVSIIAMTALYSCAVFKFRARSYRDKSL

SEQ ID NO: 59287 - protein, 2204 aa, Zea Mays
MHDSSLTLIIHTTSARLMLNLVEPIYQKGVDQQSMDEARVLLGRILDAFVGKFRTLKRTIPQLLEEGEEGKEQPNLRMKLEVPLQTVLNLQQPLEYTKEINDYKSLIKTLAVGMKTIIWSITHAHWPRPQVRKTSGVLKSGVHCLALFKEKDDDREILQSFSQMLAIMEARDIMDMFSFCMSDLFDSMITNNQLLHIFSTLLQAPKVLRPFTDVLINFLVSSKLEALKQPDSPAAKLVLQLFRFLFIAAAKAPESCERTLQPHVPVIMEVCMRSATEVEKPLGYMHLLRNMFRALNSAKFDSLMRDLIPSLQPCLNMLLSMLDEVILALWSHLRPPPYTWGTKSLELLGKLGGRNRRFLREPLALESKENPEHGLRLVLTFEPATPFLVPLDRCIHQAVGAVMQGNGLEAFYRKKALQFIRVCLDSLLNLRENVPGEGVSPGVLGTLLISNLDPSRRRNDASDMKGDLGVKTKTQLLAEKSVFKTLLVAIIAANADTSLHDEKDDYVVDICRHFAMLFHVDSPSSSQSGFMHPIGSSLPSIIMGSRSRCNTSSNLRELDPLIFLDALVEVLSSENRQHAKAALSALNIFAETLIFLARMKHTGMLRGGPSTPMLVSSPSLNPVYSPPPSVRVAVFEELLPRLLHCCYSSTWQAQMGGVMGLGALVGKVSVDTLCIFQVRVVRGLLFVLKRLPVHANKEQEETNHVLTQVLRVVNNADEANSEPRRQSFQGVVEFLAQELFNPNASMVVRKNVQACLSLLASRTGSEVSELLEPLYLPLLQPLISRPLRSKNIEQQVGTVTALNFCLALRPPLLKLSPELVNFLQEALQIAEADETIWVTRMMNAKVVLTWNKLRTACIELLCTAMAWGDLKAQNHTELRAKIISMFFKSLTCRTTEIVNVAKEGLRQVVQQQRMPKDLLQSSLRPILVNLANTKSLSMPLLQGLARLLELLSNWFNVTLGAKLLDHLKKWLEPEKLVQTQKSWKAGDEPKIAAAMIELFHLLPPAASKFLDDLVTLVIDLERALPEDQFYSEINSPYRAPLAKFLNRYVLEAVDYFLARLSHPKYFRRFMYIICSDTGDLRDALARSPQKILASAFSQFYSQSEASAAQLSSVKDEALTGAVSESITVQSSSNMVTTSESYFNGLELVSALVKLMPEWLRNNRVVFDTLLLAWKSPARLARLQNEQDLSLPQVMESKRLIKCFLNYLRHDRTEVGALFDMLSVFLYRSRIDYSFLKEFYVIEVAEGYSPNLKKTILNHFLNIFQSKQYGQDHLVVTMQILILPMLAHSFQNGQSWEVVDPTIIKTIVEKLLDPPEEVSAEYDEPLRIELLQLATLLLKYLQTDLVHHRKELIKFGWNHLKREDNSSKQWAFVNVCHFLEAYQAPEKIILQLKLIVRHADLFYSCRAHFVPQMVNSLSRLGLPYNTTAENRRLAIELAGLVVAWERQRQSEMKVAQESESQNQLGDMLNPSVIGGDPKRSSDVPSFADDLSLPDEEYKPNAAMEEMIITFLIRVSLVIEPKDKESSSMYKQALDLLTQALEVWPNANVKFNYLEKLLGNLSPTPQSKDPASALAQGLDVMNKVLEKQPRLFIRNNINHISQILEPCFGNKMLDAGKSLCSLLKMVFSAFPLEAATTPQDIKLLHQRVQELIHKNLAAVTTQQIALELNNAHSIISFSLFVLNALAEVQKNFIDPFIGLLFRVLQRLARDMGSSAGSHIRQGQRPELDSSVNSRSTIDSTVISNMKTVLKLISERVMSSSDHRKSMGQILQALLSEKGTDSSILLCMLDMIKTWIEEDCRLASSTGSVSSLNPKEIITYLHKLSLVDRKSFPPAAQEEWDAKYLQLLYSLCADSTKYPLSFRQEFFHKIERQYMLGLRAKDPEMRKRFFKLYHDTVGKTLFSRLQFIIQLQDWEAVSDVFWLKQGLDLVLAILVENEPITLAANSARVPTLMIAGPVPDRITMPQQVPDAQESMDGTTLSFDSLAARHAQFLNDANKLVVADIMAPLKELAFADPNVAYHLWVLVFPIVWVTLHKEEQVALAKPIIALLSKDYHKRQQGCRPNVAQALLEGLHLSHPQPRMPSELIKYIGKTCNVWYIAIALLESHIVHMNEAKCSESLAELYRLLNEDDMRCGLWKRKSITAETRAGLSLAQHGYWQQAQNLFYQAMIKATQGTYNNTVPKAEMCLWEEQWLSCASHLGQWEVLA

SEQ ID NO: 59288 - protein, 563 aa, Zea Mays
MRGYVYETNGYHQEVEDEYGDEYYDQDEYEEEGSGAGDGYAEEEEPTEGQKEILELRERLKEQIRRKAKAAAACTAGRSSSSQIPQARDKFGSFFGPSKPVISRRVIEERKSLKELHSTVAREPRPSGVHKDIPSSSKVQSRVNGHQHKQKIVNQVKKKAEALKDNRDYSFLLSDDADLSSSPKEKPAARSSLTQRADREVTQSTVKRKAPTSQPARLSNGYGPKNTMSTQRHAEGKVNSMRREDFSNTERVVSRDNERMYERVVSRDNERMHSIARNGSNQASTSKTTIQKHPSRGPIANKQPSKDSNDATLRKSSVASKHHPLEIDRPKSSQSQRMQSAGQRPQHSSHGQTPHQSMQHRTQQSLQSRRPQQMTQGQKPQQSLQSQRTQQSLQNRRPQQSSHIQKSQSSQAHRPQSLSNRSQALQGQRPLSSQGQYPEQRRVHASDRVKQAERQIRPPSKSMPSRPVSSNGIRDDHAKRKQVAKRRFDEDDEDPLAMIRNMFGYAGRDEDVSDMEADFATIEMEEKRSARIARQEDEEQLRLIEEEERREQERKRRKMARGR

SEQ ID NO: 59289 - protein, 738 aa, Zea Mays
MVEASTNQLAEQQGTPLYNLPWKIPCKLMNIELKVEPDTDEVYAQLTLLPDKKQDENTSTTVEEEEVVVPPALPATNEGPHIHSFCKTLTASDTSTHGGFSVLRRHADECLPPLDMSQHPPNQELVAKDLHGAEWRFRHIFRGQPRRHLLQSGWSVFVSAKRLVAGDAFIFLRTSPAEFVVSRDRYYESLKRNYSIGMRFKMRFEGEEAAEQRFTGTIVGIGASDPSGWADSKWRSLKVRWDEPSSISRPERVSPWQIEPSVSPCHVNPLPVRFKRSRSSVNALPSDVSTVTREVMADSQQNSLTRALHNQGRTQLTVRYHDNSDVKTTQDLTVWSSGTEQQRNNIAAQTKLCLEGWTPTRSPEGYNQIFSAFKPLKDIHNPLGPFPSQISGTHSNSWDTADARYPVQQANYSMLPGTWSLRPHNSGFRMNQQNYLVMPEGANFTGKSAFTSLQDHGTDKCSTGCFGHIESSSHTDHASSSLIRPQPLVLGNGVQKSKGTSFKLFGIPLGSPEKSEPLVSPPSVAYDGKLQTSPSEKGNQLDVVEVDNCSHPSKTVKPLDGPQSDSITENNQPSPEATLNIQNKVQSSSTRSCKKGYGVPRLLLHRTPLKCEPPVHKQGSALGRSIDLTKFACYDELIAELDQMFDFDGELKSPCKSWLVVYTDNEGDIMLVGDDPWNEFCDMVHKIFIYTREEVERMNPGALNSRSEDSLSDSLGRGVASRDPRGGGSTSALDSENC

SEQ ID NO: 59290 - protein, 126 aa, Zea Mays
MATSPLSYVRQHETVVVFIEFVNALLPIRLSSLLRASPLPARVCRRAVETVLARDFVVARAYANLLNHTSSARSRHNLIVVPRVSKKSQESGEDEASSAIFPKRSTNCLDQKITTDLADSSQLLKQ

SEQ ID NO: 59291 - protein, 123 aa, Zea Mays
MVWHLLSQIPNMLRRRLPHWNSCAPLAFLLPFNPQAFPGSIAQLGDVRRYLHIGNDRFRFSGDAWSGSRINQNKCEISVKFERLLNFQIRYQPKKVTLLTAYCVGKACQCDNRETNGELCSFC

SEQ ID NO: 59292 - protein, 301 aa, Zea Mays
MVGFFGASAASDHCRLLTTNGSVHHELIRRHHGRPRSAIRCCSSTARGRTRDYYYQVLGIAIQSTPQQIKEAYRKLQKQHHPDIAGYKGHDYTLLLNEAYKVLMRDVSSSRHADGRGRSRVGSGAGYTGDGYSSWEGPVRSQALFVDENKCIGCRECVHHAARTFAMDDVLGSAHVEVQFGDLEQQIQLAVESCPVDCIHWVESHDLPVLEFLSRPQPKEGHGVFGGGWERPGNVFAAAKNFARRLEREKQREELERDQPSGGLDGREAETEAQAEARRSAWEELRWKPLLDAWNGLIGGR

SEQ ID NO: 59293 - protein, 203 aa, Zea Mays
MGLPLLKDVVQSMEEAIIAREENRADGTFEKARLRFAHAETVVPFSCLLGLFLEGPEIEKIQREEALDLPPLPPQGRNWKGSVVAPFAGNNMLVLYQCPSKISDGSTISGGRNNSYLVQVLHNEVPVSMPGCGNKDFCPFEEFKEKIVKPHLKHDYNMICKVKSPAASEEPASFASRVSSFFLGLLSQKGYRGVGAEGVKTEL

SEQ ID NO: 59294 - protein, 371 aa, Zea Mays
MPLIACLWSHWNLKLFSRDNQSVRTQIIISKQGHLVSLLMKMNLVGNNTSMLQNNSMKQGHTKLSQQTSGFEIFVDEDVPNGSYQNGTQNRNSSKEQSGFEIFVDEDCANGNNQNAGQNRNCRKENTKLNQERNKSELFVKEDEANDTVQNALCHKSNRYPPRPLLSDSSRHQGESDFQKPFVGGFAILPDDEEPCEKSYGGANINCRTVQPTHNTNNLLCPVQDDSGTRNREGPHSVTSGLQEDTVIRRFVASSIDDEPKVENAWHHGLVDPTVNLKEAMDDINSMFGKPLNFKGEKTKRKTNAHSDGKAAPISGFSILADDDLKEGCTSKASQSNSFKFGDENGLFEPTITTRDVMAEINDMFGMPLDL

SEQ ID NO: 59295 - protein, 831 aa, Zea Mays
MEKNVVAVIGPQSSGIGHAISQVVNELHVPLLSFAATDPTLSASEYPYFLRTTTSDYFQMNAVASIVDYYQWKRVTAVYIDDEYGRGGVSALGDALALKRAQVSYKATIPPNSNTDVIRDVLFKANMMESRVMVVHVNPDTGLRVFSAAKKLQMMASGYVWIVTDWLAAVLDSSASRNPKYMSNIQGVIVLRQHTPDSDAKNKFISRWNNVARNRSMTPGLNSYGFYAYDSVWAVARSVDQFLNAGNQINFSTDPRLHDPNGTTLRLSTLKIFDGGDQMLQQLLLTNFTGLTGAVKFDSGGNLLHPAYDILNVGRSGTHLIGYWSNYSGLSVAAPEILYQMSPNASTSTHQLNSVVWPGDSTDIPRGWVFPNDGQPLRVGVPVKPSFKALVSGSTPDSVRGYCIDVFKSAIKLLPYPVPYQFIPIGDGTKNPSYVSIVGMVASNTLDAAVGDFAIVRNGTRLAEYTQPYIDSGLVIVAPVKHITSSAWAFLKPFTWEMWFITGALFILVGIVVWLLEHRSNPEFRGPPCNQVITIFWFSFSTMFFSHQENTRTALGRFVLIIWMFVVLIITSSYTASLTSILTVQQLATGITGLDSLISSSLPIGYQTGKFTKKYLMLNLNVPESRLVQLNTIEEYADALNRGPKNGGVAAIIDEKPYIDIFLSHYCNFKIVGQQFTREGWGFAFQKDSPLAADMSTAILQLSESGQLQSIHDEWFTQPSCATNDESNVGATRLGLGSFWGLFLICALICLFAVVVFFIRVCWQYKQYSNSEDADESNEAGADGAGKRQRKLSRLGSFQEILKFFDMKEEEVMKSSMKRRPGEKDNHAAGF

SEQ ID NO: 59296 - protein, 316 aa, Zea Mays
MAVATESRGSEDRASAHANQEKRWVLSDFEVGKPLGRGKFGHVYLAREKRSSEIVALKVLFKSQLKQSQVEHQLRREVEIQSHLRHPNILRLYGYFYDQTRVYLILEYAAKGELYKELTRCKHFSERRTATYVASLARALIYLHGKHVIHRDIKPENLLVGVQGEIKIADFGWSVHTFNRRRTMCGTLDYLPPEMVEKAEHDYHVDIWSLGVLCYEFLYGVPPFEAKEHSETYRRIVKVDLKFPLKPFVSPAAKDLISQMLVKSSAQRLPLHKVLEHPWIVQNADPSGVYREGRTPLNSSVLTSMPTTLETPYISY

SEQ ID NO: 59297 - protein, 300 aa, Zea Mays
MRECISIHIGQAGIQVGNACWELYCLEHGIQADGQMPGDKTIGGGDDAFNTFFSETGAGKHVPRAVFVDLEPTVIDEAIYDICRRSLDIERPTYTNLNRLVSQVISSLTASLRFDGALNVDVNEFQTNLVPYPRIHFMLSSYAPVISAEKAYHEQLSVAEITNSAFEPSSMMVPKDVNAAVATIKTKRTIQFVDWCPTGFKCGINYQPPSVVPGGDLAKVQRAVCMISNSTSVVEVFSRIDHKFDLMYAKRAFVHWYVGEGMEEGEFSEAREDLAALEKDYEEVGAEFDEGEDGDEGDEY

SEQ ID NO: 59298 - protein, 322 aa, Zea Mays
MAAVEAMQEASAAESIVRCLSSYAEVSSSAEEQNPQQAVEQFLALHGAISRATIVTESLTKATTTVSTATSPDQSAAGDASTADEETMAVAAERRRRAASWVGAGLATDLSAFSLYNLKPAPASVISPLAVVLVDESAKPAAAKAVPPAKSRLSPAKGRLKAGSAAAAAAAAAAAAAAVPPPEWERGGGAEERGELARRLGDEARAWFLAFVERFLDADVAAAAPWDRDRAARMLPQLKRVNDWLSEIGKSAEMAPHPPPEADGEAAAPTANGGAASGVPEETIERLRKKIYEYLLTNVDSAAAVLGGCEMAPAPVANGKKG

SEQ ID NO: 59299 - protein, 236 aa, Zea Mays
MKLIFICWLVLPYFNGAAYVYQNYVRPAFIKNQMVNIWYVPQKKGLLGKSDDFLTALDKFIEENGTDALKKLANKAGKPFKQSGKSSKDQKETKSSKDSKEPKPSKDAKQPKPSKDTKEPKPPKVSKSPKDSKEQKKATLKDPKKAPKDSKGLKKALKDPKEQESLEDPKEHTAKKAGKRVTFAEVEPEKELKASNSDWHPSSDFHAAYPEQNPWASGFMIFEDENSYWNRGPLDC

SEQ ID NO: 59300 - protein, 498 aa, Zea Mays
MATEEELPEAAAAPAPAGGGGGDDAEMPDAAVPSGSHSDSSDSDSDDEAATAAAELRIQALEKTLQEQPLDYETHVQYIQCLRKAGNIEKLRVAREEMNKYFPLTPKMWQEWAKDEISLSSSEESFGDIEKIYGHGVQEYLSIKLWRDYLDYVEEHDHSVSQCTPSGLSKMRNLFESAITAGGLHVTEGSKLWAAYREYEMAILITIADANDEEREKQVQRIRMLFHRQLSVPLADMESTLAEYKSWEAEQGNANDPGADFDGVPSNVVSAYKKANDMYNERKQYEDQLSNAGTFEGDKLQQFMKYIKFEEASGDPARVQVLYERAVSELPVSSDIWMGYTSYLDRTLKVPSVVRSVYYRATRNCTWVGELWVHYLLSLERIRASEEELQHVFERAIQCTFSTIQEYFNIYLTRVHGLRRRISDGLDFQLIRQTLTDAAEFLSSQLSTKELLRLYAYWAKLELSLGKDLSAARGVWENAIKKSLGAVHFNGDKNGPCT

SEQ ID NO: 59301 - protein, 255 aa, Zea Mays
MDRKDVGILAMDIYFPPSCVQQEALEAHDGASKGKYTIGLGQDCMAFCSEVEDVISMSLTVVNSLLKKYKIDPKLIGRLEVGSETVIDKSKSIKTWLMQIFEESGNSDIEGVDSSNACYGGTAALLNCVNWVESNSWDGRYGLVVCTDSAVYAEGPARPTGGAAAIAMLIGPNAPISFESKYRASHMAHVYDFYKPDLASEYPVVDGKLSQTCYLMALDSCYRQFCNKYEKIAGKQFSICDAEYFVFHSPYNKLC

SEQ ID NO: 59302 - protein, 74 aa, Zea Mays
MHVGAIERPGERVLITDDLVATGGTLCAAIRLLERAEADVVECACLIGLPKFKDFYKLNGKPVYVLVESRESDK

SEQ ID NO: 59303 - protein, 193 aa, Zea Mays
MVVGGDPLLELLAVDWFKVNERFDSVALHPKSLVQSEAAKKLPFILVINLQVPAKPNYNLVMYYAAERPVNKDSLLGRFIDGTDAYRDARFKLIPSIVEGYWMVKRAVGTKACLLGKAVTCNYLRQDNFLEIDVDIGSSSVARSIIGLVLGYVTSIVVDLAILIEAKEEKELPEYILGTVRLNRVNPDSAVSI

SEQ ID NO: 59304 - protein, 186 aa, Zea Mays
MSFFFRAASRQRPLPQEIARSLKDSLVALDTKTGAKALEDAEKNILTLRHTLAGDGEVEPNQEQVLQIALEICKEGVLSLFVQNLPSLGWEARKDLVHCWCILLRQKVDESYCCVQYIENHFDLLDFLVVCYKNLEVALNCGNMLRECIKYPTLANALSDIYWSQAASSCFSSMLNCQTSILHLML

SEQ ID NO: 59305 - protein, 65 aa, Zea Mays
MWNADHNAIINTFVGHSNTVTCGDFTPDGKLICTGSDDASLRIWDPRSAQSRHVIRGHGYHTVMD

SEQ ID NO: 59306 - protein, 53 aa, Zea Mays
MCKPSKADCWMGLAKVCLNKDHLKAWSPWLLVVVCPGGRQFESPAGSGGCNMY

SEQ ID NO: 59307 - protein, 246 aa, Zea Mays
MLMYRYFSHLLHFFTRLELYVLRGTVVHLTFLDLIESSVSCLLQRIVSNVPVSAACERSTAACISSSKMFSAAGGNMILMGTRQVQVVASWVFGEDKAWQRWICRKASRVGGGTGSNPGRGSLHALVRWSSPGTGSRDARQSHCTTTALRVKALAWCDSHHVLYRVPSLSLTPLPFGLAWTHGFPWMLGFTVPTHRPVGDKGEKPSLVAYRAMEQSALGSGGGLSGVRTNGPGVGPYASVHDNEST

SEQ ID NO: 59308 - protein, 53 aa, Zea Mays
MIQLTPHVITHMCTFPKVLHVTLARSRSPVDTDGEDARRWLKPFAYVGRGVWL

SEQ ID NO: 59309 - protein, 771 aa, Zea Mays
MEDPVAVPSSSLTDPAAAAAARVPGAVAAAPGVTSAPSALAPTQPPATAAAVSEAATPCQRQLFTVELRPGETTIVSWKKLLKEAGHTAAAPPVAVEPAFAAHAGPSGPAHPAENDPKDPTQPNRFNAVIEKIERLYMGKHSSDEEDLNDVPDDDQYDTEDSFIDDAELDEYFEVDNLKTKHDGYFVNKGKLEQIEPGTAANVAPKKRRRKDASSSYLESNHLGPIDYFDIGDVPEKSSARGTVQTGKQLVSSNVSSYGQYHEDNRVVKNKISGPGGAPKRKSSEFSGDAAARAKIIKDVSHAPLELRDMEKHKAAALPVDYAHKSKISETFDYAYPAYRDKGTSGQLDFQQRKISRENQGPSNRTYRKEKHGTNEYPGIAMATAVYSTQTMHPVVGREGSGTKPKGTRLERAIRDLQKIVAEYRPPTIDINEVDPNGQVAVKRRLPPEIKQKLAKVAKANNGKIQEHELMNRLMGIVGHLVQRRTLKRNMKEMVESGISAKLEKADRFQRVKLEINEMIKERMATKSKVNEQDGSADDFQVANDERRALKTKYTMDTALEDKMCDLYDMYVEGMDEDKGPQSRKLYVELAELWPHGCMDNVGIKDAIYRSKERRRLLYSQQKVRSEERMKRKRLAATAKLPDGLAVAMQSGVAPQVAQPPITNPITYHTADYGQNPGLKYFDRARETSSSAIPDDGNRIAGEVKKKKRKPEYDPVDTQANLPRAPMPHGSEKQKPSKPADEASAGSLPSMATTQTVLGLPSVLGHNQQPS

SEQ ID NO: 59310 - protein, 364 aa, Zea Mays
MPEAEWNDEHTRIVCELFEEQVRAGNRPNTHLNNIGYRQVAAKFQQRTELLYTKLQLKNKWDKFKNDYITWRKLLVVGKGLPWDTAKGTFVADEEWWKKINKELPGARKFRHGGLHHEDKLNVMFDYITSNGVDPSPPAPESPKNGVNHSPPAATGLPSAPDCALNGVDHSPVTAHGLPSGPYSPMNGMDQLPLPAHDLRSVQEIPMNGVNLDGLDNNTEDNDDIYQEPVFQYTSNRKKRPISFSATKKNKKNKAETALLMQAHLYRITELAQKAQDTFKKFSSQADLVPWPSIQDVMTLVWECGARCGSNEHFIATELFVSREQREMFLTMETAEERFQWLRRKYIVKYLSGAGPWVGIARCT

SEQ ID NO: 59311 - protein, 128 aa, Zea Mays
MGTEMFWLGHQRKSGIGFASRYNTDKMVGTLQVASTGIVALSYVQKISEKVSLASDFMYNHMSRDVTASFGYDYLLRQCRLRGKIDSNGVVAAYLEERLNMGVNFLLSAEIDHCKKNYKFGFGMTVGE

SEQ ID NO: 59312 - protein, 458 aa, Zea Mays
MLVMEDYFATVTAKNWNGLSPKYMLISYLHACSMNEELFWQTDELFYPRYIQRNLAKLIENSPPAIMLLFEPKGRPEDEDNEFYIQSKKNICVGCGEKSHYIRYRIIPSCYRMHFPEHLKSHRSHDIVLLCVDCHEIAHSAAEKYKRRIAEEFGIPLFVQKIMNSGDISLITNTSVSEDKLNGTGVSPLQLRTAAMALLRHGSTMPLKRCEELMQIVKSYYGGRDVTPEDLEMALLVGMSPHERRRLEKKKGYSFRAQAQTIIRKSSSNTISEDSGHGSENCHALSARFPEVGTGSNGQQEFDETGNQNQLENLTLSQGSSSLPVSMEDTTSDHDTVTLETDTEQQARGACTPGNSHDDKEQSICDNSSQVISKNAEKISLLGHGHHGKQVVELLFSNGGEEFVNQFCQRWRQIFVEAVHPRYLPSGWNINHSGRRDFGDFSVYKPPRKDPQSATARD

SEQ ID NO: 59313 - protein, 180 aa, Zea Mays
MGSEELETALMEMVEHDNRRMLSAKVEKLETEAYELRKAFSDKQEQEQVMLQILLRMEQEQKVAEDARIAAERDAAEQKHAAHLLQEKYEAAMTALSQMEKRAVMAETMLEATKQYQVGQVKANQSFTSSSPRADHVPAKINQEPNQTAPIRRIGLLSRGLGWLDKGKQGRQNSNETSGA

SEQ ID NO: 59314 - protein, 133 aa, Zea Mays
MGRGKVVLQRIENKISRQVTFAKRRNGLLKKAYELSILCDAEVALVLFSHAGRLYQFSSSSNLLKTLERYQRYIYASADAAVPSSDQMQVRGLSILLLLQTFIINIVHSSGLTKIVHSSDQIIPLFFYHVYFS

SEQ ID NO: 59315 - protein, 70 aa, Zea Mays
MWKQLYKLTFISKASLSYFITAQTKGECRVVILYKPREAQTPPDKFNKQKILSGGPSPPALQSCFSSFGT

SEQ ID NO: 59316 - protein, 338 aa, Zea Mays
MHSNNQAKSSVYQSKGINLKESGRSWHSSEKLKARSKLNGHGDSESNENNHTDNSKYSLSSQSDVVGLSSVGDANASIPSPVVIRKTAYNLSDFVTKYEQALFFVIKSYSEDDIHKSIKYNVWASTPNGNKRLDNAYRLAQERMAEKGTKCPVFLFFSVNASGQFCGVAEMVGPVDFNRNMNFWQQDKWNGFFSVKWHIIKDVPNPQFRHIILENNENKPVTNSRDTQEVKFSQGTEMLNIFKNFTCKASILDDFDFYENRQKVMQDRRGKPLTSFGHPLPKAEKTAEVKRQTQLISATEVGRADTTKENEEKSSSVPEILNAACSNKEKPNKIATDG

SEQ ID NO: 59317 - protein, 78 aa, Zea Mays
MGCHRCSVVRVTTARPPRAPSSIALRIRELPAPRLRFGNHRRRTSKSGVTPQNFILGTFQDNTNILKQNIFNRIFLTL

SEQ ID NO: 59318 - protein, 565 aa, Zea Mays
MVYLAFLQDDASCHGEETQSLLEANLGSQLKSKCSDWRAPALILGLECLESMAFNGIATNLVVYLRSVLHGGIASSAATVSLWYGTSFFVPILGAAIADTCLGNYKTILISLIMYLFGIVLITVATFMPSTSVLCDVSSCLSSNGTQTVIFFAGLYLTAVGCGGVRSALLPFGANQFNNENSLDIKKRRNFFSLFYICVIFGVITSGTIIVWVQENVSWAIGYGVATTCIGLALIGFLVGTPIFQEDEPCGSPVKSIFQVIVASFRNMSLEVPADSCLLYEVGSNHIQRTKLAHSDDFRFLDKAAVISDPSLVYGGCRSSWSICTVTEVEELKVLIRLLPIWVTGIFFGAAISQMHTTFIQQGTVMDTKIGSLSIPPASLYSFEVICVTLWVLAVNKVLVPAIRTYFANGVELTQLQRIGIGRFLMIFAMAMAALLETKRLHIVQEGELLSIVWQLPQYFVIAGAECFGIITQLEFFRGQAPDSMKSILTAFALLTTALGNYLSSAIITLIAGVTRVWHSPGWIPDDLNKGHLDYYYWCLTTLSLVNFVVYLYFASKYKLKKVVC

SEQ ID NO: 59319 - protein, 2266 aa, Zea Mays
MSHPGKFVSVNLNRSYGQSAPSSHHGGGGRPSRPAGAGSSAGGGMVVLSRPRGASSLAKPQAPKLSVPPPLNLPSLRKEHERFDGSAAAAGGGVASAPPRSGGPAAGWTKPASASEKPPGSAALPGGVPRPPSYGFAEKAGVLRGEDFPSLKAAVAPPTPPQPAQRQKDADGVRVVTPEARPGSLGMRPQVTTSRTTETLASGVSLGPGGRTSAERVQKPDLGPLPMVRLRYDSDWADDERDTGLSLPERDSRERGFGRTEAMLPGRDLYVSMRDPFKKEMFGRDVAATNKEGGQDRLWRSPVSNQHDRERTDGRPYSGGRGSSGQSYRENIAASGSKDVWSNGKEPPMSAYGQNGVEAASERYGDSSNNWPRLNSFQNNVGSKVQPFGGNKGPLNNDPVAKFGREKRLTGSPAKPLIDDSGFDSISAVNLTAIKKKKEAAKPADFHDPARESFEAELDRILRVQEQERQRVMEEQERAREVARKQEEEQERMIREEEERQRLAEEQAKQAAWQAEQERLEAARRAEEQRIAREEERKRIAMEEERRREAAHQKLLELEARIAKREAKTNIDSTRAVNDEFIPGDVKDRDLSHSANFGDRKDIDKMNERINTSTPLESSSINRFSETVPRVRTLTDGRPSFIDRETAHYSSRPAFPEQENVHHRPQHDPFASKRGNFPKKDLNDGFGSVSVRQSSTGRTTDSSWALEDFHHEKVPRWDAPREIDRFSKQSEFDNEFFNSDRFGDTAWLPSSSHGSLNAQQGDRMFQSPDVNELSSFTRPRYSMRQPRVPPPPIVTSVHRSSIGASAQRFNSSFVDGGNRECSGRDDVQIMQGQYGSVYQEASRQHGIRSDHISVNEQQIVDRKSPVLGSQSSLSVSSPPSSPPHVSHDEMDVSGDSPVLPTSADGEHTALSDNHHAALTVDADNTSRIAASGVPHLEEDEWSSVNNDDRRKQDEYDEDNDSYQEDEMNEADDENIDLDDEFLEGQDTPVELEPVILGFDEGVQVEIPPNSQLELASVRSTERTVGVHLNSGVAEQENVSGSVVHSDPVTEAEKALQALTLDGVNGLTEDSNGEPSNSSRTPASSSQLPQASSVGPIFSSASTVVGQNEVPVSLQFGLFTGPPLIPTPVPAIQIGSIQMPIHLHNQFNPSLPHMHPSTTPLYQFGQLRYVRPIAPSVRSLPSQATRPAHSSISAQHTLNQNVSSVLPELMDGGTNQNIPAQASSSTFINKSAAPTTKVPLGMDNSNSQYLNAPANNQMAGVDGFSSQVDREFAEGTTPSGRNQGLSLKRNYRPTSNNVESSQYGLEGRAMGDPKALGVVSDRRGRRYGYAVKDINMRSTGSIVEPSHKDSKGGFQRRARRNVRRTEFRVRENIEKNQNETSESFCHGEQDEITSSNGTRDIPARNTNRRELDMSKASRINGASDQSLSFRSTHNVPYERSHGGNKKSRTGAVPDGDTTSLQAGAVRVVKQQGIEVPVDADGFIEVRSKRQIMSVRREQREKENRSKIRMAKAPRKQHSISLQSSVGPSVNKRAAPSSGEVTKKVSSGSAITVEGRIVDYAESSIPLMGDTASMNLIGPPSTNAETHTNCFANQPIQIQASSDLVTSSPAKLVSGLSDGDNKGPSISTPFNMVSWDNSQINQQVMPLTQTQLEEAMGPAKFEQQAGPGFSLESNNALSPTVITEKVLPSSASPINSLLAGEKIQFVTSPTMLPPVSRTVSSGLGAPGSSRPDMKIDRGLPSDNSGPDKANSKELCPSTEDAEAEAEAAASAVAVAAISTDEGSPADATTASAPDKSFTSKDLSGLTSGGARTGQAGQSSTEEPLAVALPADLSVDTPSMSLWPPIASPQASGPMLSQFHGAQPSHFSCFDMNSMLGGHIFAFGPSDESAGSQGQHPQRSNALPSAPLGAWPQCHSGVDSFYRPPTGYAGPFITPGGIPGVQAPPHMVVYNHFAPVGQFGQMGLGFMGATYIPGDKQPDWKQSQGPPIVGVSQSDPNSQNMVSGQVNAPSVPAPVPHLRPTSIMPIPSPLTMFDIAPFQTSTDIQMQTCWPHMPVPPLHSVPLSVALKQHPVEGTATQQFVHNVPIDKSGTNNRFQESSASAGPSDGNKTFPNAAVSQYRDELGLVEQPASTSSSSQTVQPSFGQAGLISNEVPTSAKAMVRVTPSKVNPGIAAGAAGSTNAPQVTSIPSKTHQSSSSSSDPQYQHLVNNQDRRARATQKAGTGNEWQRRSGYQGRNQGSGSDRSSGTGRMKQIYVAKPSATSGHASSG

SEQ ID NO: 59320 - protein, 320 aa, Zea Mays
MSCLAAPPAAPPKAGERMLRAAAPLRSPSPCRGLHYAVRGTGGREAGCGRRQLALLRCSPAGESRASGDGGLSSFCIIEGPETIEDFAQMQSQEIEDNIMSRRNKIFLLMEEVRRLRVQQRIRTSESKDANTEGNEMPEIPSTIPFMPDASPKTMKQLYMTSFSVISGIIIFGGLIAPVLELKLGLGGTSYEDFIRTLHLPLQLSQVDPIVASFSGGAVGVISALMLVEVRNVRQQEKKRCTYCHGTGYLPCARCSASGMLLNTKQFSLLGHNMWSMKGRCQNCSGAGKVMCPTCLCTGMAMATNNNATLMGNRSMVAVQ

SEQ ID NO: 59321 - protein, 119 aa, Zea Mays
MLQTELQLLQDPLVLQIPVQPKLLHLQPPELLRLQPLRQLQEMLVMPQRLQAKLWLFQRAMLQLRGMLLVLKLFQLLRLFQVLQVLQPVWVLLLQAVLQVPVLVLQGGVVLLQMPVVVL

SEQ ID NO: 59322 - protein, 78 aa, Zea Mays
MFWADWNQPSKATYWDLAIAKKDEAVFCQLDFDKFKDVVEKFRVKALPTFLLIKEGEEQRRVVGAKVEELNMALSDIG

SEQ ID NO: 59323 - protein, 199 aa, Zea Mays
MPRRIGCVVSGLGFAAYGLASAEGPVNNNIDSTESAMSSTNLSHGKEVHTDYSVTGIPGDGRCLFRSVVHGAYIRSRKPIPNEDHQRRLADELRTKVADEFIKRRAETEWFVEGDFDTYVSQIRKPHVWGGEPELLMASHVLQMPITVYMHDKAAGGLIAIAEYGQEHGTEAPVQVLYHGYGHYDALQIPGEGGPRSRL

SEQ ID NO: 59324 - protein, 78 aa, Zea Mays
MQDSIVNKLQLGNIIYYITSPDSLCKAVNILYKTWITKKMRQQLAIHLCSSYKLPASEPTYNWVIQGEGINYQQRKLE

SEQ ID NO: 59325 - protein, 75 aa, Zea Mays
MNGLPLVNCQLCFVVNLRSVFVMRLLGWQVASGLLFSKALNGLNRLHHRVGNSVPNGFLPFRISGLFCYFGIRYF

SEQ ID NO: 59326 - protein, 2233 aa, Zea Mays
MEAAAPDGAGKASPAPEEPDWPPELRLLAPPPAAGTDDPQFLSSIIGDAAAPPPPMPPLAQKRKRGRPPKRKDGAGAVVPARPARRREDEEEVVCFICFDGGNLVVCDRRGCPKVYHPACIKRDEAFFQSRSKWNCGWHICSSCEKAVHYMCYTCTYSLCKVCIKQGKFFSVRGTKGFCDTCYGTILLIESKDESAIKVDFDDILSWEYLFKLYWLDLKGKLSLTLEELTIAKTRWNVPSTSARKEKDESSDDLYDANNDDDAGTDCSSGKRRRTNSRKKGQKCRKVNKDCSVPAKKVELPITNTESVPTEVTNERVPLPVDTKVPNGWVPLPVDTKVPNESVPLPANTKWASPELLEFVGHMRDGDQSFISQFDVQTLLLDYIKKNNLRDPQRKSQIICDLRLHRLFRKARVAHFEMLKLLEMHFLMNETSTVTDSRQVTIDLNSAYVDTNGYNDMAAKFSPDKRRKIHRKMERDTQVNLEDYAAIDMHNINLIFMRRSLMEDLVDDAKFSDKIHGGFVRIKISDVYQKQDIYRLVKVTGTHKVPEKYSIGKKMTNFALEILNLNKKEIITMDTISNHDFTEEECKRLRQSMKCGVISRLKVGDILEKAKILQSVKVNDWFENEKQRLGHLRDRASETGRRKELREYVEKLQLLNDSEERTRRINEVLEVHVDSHMDPNYESAEETDEKRTVGKSVDRTRPDTTISRRISRYLSTMQNHPQKVSDCSHHPKNLSTESTICGSGARSLENSTANRTMYEAGSFSSSGVTMSNDTEPEKVWHYKDPSGNVQGPFTLLQLSKWTSYFPRDLRVWLTFESEERSLLLTEVLSKQQKDFTQAASHTSSKATLVGTGHTRNNPSVDQTNAFSPAGHSVVSSSGITVQYNKYSVPERESVYSPDDSLSLSTSSVPPKDACTVNSQTHCQNKHSVFIQSPGSAYGHTDLNHDGIQGGCSGESNHHHSSGALWSPTVVQVSCGHGNVESHQSQHVSWSQSQHESKNSSQRPVKDLNSRRDLSKNLPTQRIGKDVSSPLFACAWSPAESRTASSQHDGSCLSSTTNPNFLDELHYSIASAKPKSCAPATPIEDRGSSSPSGMLSHAERVPICSPQSTPLASAFDMCKMEEIMNQQRTLEPDTSNASINQSPESKIFPVSSPDNHDIDREFPSPVPRSENKDIAVDSSGLTPASPENITTNLPGSDTCKMEVMSQQQVTEAVVSNSSDNHSPQSKVSPVSSPNNEDMKHQYPSSTRRSENKIPAVDNLLSTSAARENLTTTSAHDSDTCKMVELVNQPKTPEVDASNAPLCQSPHSHTSQVPSDNQDIERECPGPTPRSDSKEPLVNNSATTSASASDTIKMEEFVNQQKTVEADASNAPLNQSHSHIFPVPSDSQDIEHECPGPTPRSDTKEPLLNNSVLTLAASEILTTTSAASDTCKMEDSVNQQKTLEADALNAPLNHHPHSHVLPVSFDNQDIQHEYPSPTPKSDSKEPLVDNSVLTSVGPEMLATTSVSDTCKTEEFVNQQKAVEADASNASLNQPHISAVPSDKQDIECECSSPTPRSDCKEPLMDNSVLTSAVPEILATSSASDKCKMEEFVNQQRPIEVDASNASLNQYSRCHIFNVSSDNQYVERECSSTTPRSDCEEPLMDNSILTSAVPEILATSSASASDKCKMEEFVNQQRPIEADASNASLNQPHRCHIFTVSSDNQDIECECPSPTSRSDSKESLVDNLVLTSAVPENLPTSFAVASDSCKMEILNKKRTLEADASNASLDQPSHSSVFTSSSNDNQGNACERPSPNPRPEGEQPLMDNSGLTSPVPQNLTSASDICKMGEILNENRTLEANPSNGSITQSHQSKVFLVPSIDILERECSSETPRPQFKEPVVDSSGLTSAAPESLTAKQHVHSPDAFIPPKHGAPTGELGDAKSDFKGEEIIQKEQYCEREPIVATRENLLIDLSCGAESIDVSDVLESLMEERSVTSYVPVSIEDFLAASAVEEPQYSSPIALSPWGEPSYYQGDAGDSALWGIQDSINDMWSLLSPRPMLQASSGIGTEGKETFDINEVAVTHVNSDFFQRGSMLGEENMNQANLSVAADRMLLPEQVPSIPNGMSTSSVDEGTRVIGSQASINQSLDWGTTWRTSQNLSVYSNEIAGPSSKSYWEESRKQEATNSGVSISGEAIRNKRLNPPDNAIRGSHHHRGRYSQISESWLLSSNHSRSSSAKFGSGGSSRSTSKGQTRG

SEQ ID NO: 59327 - protein, 485 aa, Zea Mays
MERHRCQWLHTRERQRGEGRLGRLAMAPKAHVLVLPMPCQGHVTPLMELSHLLVDQGFEVTFVNTDVDRAAVVAALEASGGVAALGGGIHLASIPDGLADDEDRKDISKLVDAYTRHMPGYLERLLADMEAAGRPRAKWLVADTNMGWSFEVAKKLGIRVVSFWPAATACLAFMLKIPKLIQDGLLDDKGLPVRQETFQLAPGMPPLHSSQLSWNNAGEPEGQHIIFELVTRNNKLNDELAEMVVSNSFYEAEAGAFKLFPGILPIGPLSADGAFRKPVGHYLPEDERCVKWLDAHPDASSVVYVAFGSITIFSARQFEELAEGLELTGRPFLWVVRPDFTPGLSKAWLHEFQRRVAGRGMIVSWCSQQQVLAHRAVACFVSHCGWNSTMEGLRNGVPFLCWPYFCDQYLNRSYIVNVWRTGLAVTPDADGIVGREELRSKVEQVVGDADIKDRARVLKDEAHRCVAEGGSSNDNFKKLVNLLSE

SEQ ID NO: 59328 - protein, 886 aa, Zea Mays
MELFWYSIPVIPILILLMNNFPVLVTKSTMKSSVDTELREMVAYIANTLIFILSGVVIADGVLQNNGHFERHGSSWGFLLLLYVFVQISRVIVVGVLYPMLRHFGYGLDLKEAMILVWSGLRGAVALSLSLSVKRTSDSVQPYLKPEVGTMFVFFTGGIVFLTLIFNGSTTQFLLHILGMDKLLPTKLRILKYTRYEMLKKALEAFGELRDDEELGPADWVTVKKYITCLNDLDYEPEHPHDVGDEDDCMHIMNLTDIRVRLLNGVQAAYWGMLEEGRITQVTANILMRSVDEAMDLVSGQTLCDWKGLKSNVQFPNYYRFLQRSRLPRKLVTYFTVERLESGCYICAAFLRAHRIARRQLHDFLGDSEVARTVIDESNAEGEEARKFLEDVRVTFPQVLRVLKTRQVTYSVLTHLSEYIQNLQKTGLLEEKEMVHLDDALQTDLKKLQRNPPIVKMPRVSDLLNTHPLVGALPAAVRDTLLSNTKETLRGQGTTLYREGSRPTGIWLVSIGVVKWTSQRLSRRHSLDPILSHGSTLGLYEVLIGKPYICDMTTDSMVQCFFIETEKIEELLHSDPSIEIFLWQESALVLARLLVPHRFEKMGMHEMRVLVAERSTMNIYIKGEDLEVEQNCIGILLEGFLKIENLTLITPPALLLPWNADLSLFGLESSDYCHTARRYQVEARARIIFFDEAEAAHLHVQTSASLPQGEPARSMSKEHSGLLSWPESFRRSRGSLGLAAEMLPGGLSSRALQLSMYGGSVVSLSSGQQGHRRQRPRHRVQAATTMTNQKKHSSSYPRMPSISKERHLLSVQSEGSNMKRVAALPEVAATAPAPAGAAQGQRRAMNLQEEYNSSEDSAGEEVIVRVDSPSMLSFRESTAVPPPQEQ

SEQ ID NO: 59329 - protein, 544 aa, Zea Mays
MSPLSELVWSPDEGLSIKIAASSLSTRKASLRWNADTLSILISSPQRSGSGPGEKNGDTINDNLEVSEKMPSQLRIRSDSSVRVTVDSPNSTNVDALQFTSMRSQEQDSSSASRKKVVPSISENQACCATTFCNERSWETNAWRARLVKAVCQKESILPTNTENPILPSSIGISCDAVEFSGKLVGSQGKFQSLGVSSNALEIHSHDNCQDPVLHESHKDEPVIARGESASGVNIVARCESVPGVDSSNFVRGKEKVMYNDSNCGNNTREGDDSNESIESCTSTKAPKRKHAQCCAATMPSSGNKRFRREDNESSCSGLLQKCGTSFFNWMSSLTNGLPMLDGATAAVPLEQKFSASTGDGSAAPSQPLQNNRSVPMQFFGFNSLFQSLYTRNVMITSGDNCRQPESNCAGHVFNRLTLELNDSNSMLNKEIGMGRETLDLATQTSAAEGFQMISGGCRGNVQSQIDIFQMRPERNMKLPSSSKFSSRSLEEKQNQCTAACSNDATQNKGGLRESLWVTRLLPKASVELMEGTPCNVENAVSPQ

SEQ ID NO: 59330 - protein, 72 aa, Zea Mays
MADPRSIVRGAGTNYLFFSSYSSFFSLILFFLPLPFPSSSFLFFPPPLSSPFLLCVRRHMGEGGWSPLNPPL

SEQ ID NO: 59331 - protein, 414 aa, Zea Mays
MEGRGAEQAPEAAAEVKNPRCFMDVTIGGEMEGRIVVELYASVVPRTAENFRALCTGEKGIGAASGKPLHFKGSCFHRVIKGFMIQGGDTTAGDGTGGESIYGSKFEDENFVLKHERKGMLSMANSGPNTNGSQFFITTTRTPHLDGKHVVFGRVMKGMGVVRSIEHVSVGEADCPTLEVKIVDCGELPEGADDGVVNFFKDGDTYPDWPNDLEEKPAEVSWWMDAVESAKAYGNDNFKKQDYKAALRKYRKALRYLDLCWEKEEIDEDKSTALRKTKSIILTNSSACKLKLGDSSGALLDADFALREREGNAKAFFRQGQAHIALNDIDAAVESFKQALELEPNDGLFSLVPLKFIDLTDDLMGFSLTPLAGIKRELAAAKKKIADRRDQERKAFARIFQSSGKSDKSNEENN

SEQ ID NO: 59332 - protein, 300 aa, Zea Mays
MEDKENHKRIAPLLRFFSSQSNDELISLDEYVENMKPEQKDIYFIAADSLSSAKNTPFLERLTEKEYEVLLFVDPMDEMAIQNLSSYKDKKFVDISREDLDLGDSNEEREEIKQQFSQTCDWIKNRLGDKVARVDISNRLRSSPCVLVAAKFGWSANMERLMRAQTMGDTTTLDFMRSRKVFEINPEHEIIKALNAACRNNPDDPEALKALDVLFETAMISSGLSPDNPAELSGKIYEMITTAIAGKWSSQSQAQPDNTTLQHAAPGRSDEPLEGEVVEPEPVEADQHKDDISARIVLIT

SEQ ID NO: 59333 - protein, 712 aa, Zea Mays
MMSLRIEKKQSSASKQQAKDVIHPVKVEEGKLSEDSDDEFYDVDKVDPSQEVQPSDTGNADVGSRSQEENYISKEELECLVHGGLPMALRGELWQAFVGTGARRVEGYYDNLAAEGELDNKRSDSRTSEGVHEKWIGQIEKDLPRTFPGHPALDEDGRNALRRLLIAYAKHNPSVGYCQAMNFFAGLLLLLMPEENAFWTLVGIMDDYFDGYFSEEMIESQVDQLVLEELVREKFPKLANHLDYLGLQVAWVTGPWFLSIFTNVLPWESVLRVWDVLLFDGNRVMLFRTALALLEFYGPALVTTKDAGDAVTLLQSLAGSTFDSSQLVLTARMGYQSVNETILQELSNKHRPPVISAMEERAKGLGVWTDTNGLASKLYNFKRDPEPLVSLSDSTDQLSDVGDGDTNQESDLGNMDDEYGGVIVNSEIDSLPDPKDQVAWLKLELCRLIEERRSAVLRADELETALMEMVKQDNRRQLSAKVEQFEQEISELRQALSDKQEQEQAMFQVLMRVEQELKIAEEARISAEQDAAAQRYAANVLQEKYEEAMASLAQMENRAVMAETMLEATLQYQSSQQKAMSPCPSPRPSMLDASPSQSSQNSSQEFQPRRKNLLGPFSLSWRDKNKEKPNNADDSTNTKSTNNDEMVETSNTNDEKHRETLDLNSEQRAESPKADVKMRAETPEKDNDLPGVQLVTDDLNGHHEQMQEIKLD

SEQ ID NO: 59334 - protein, 420 aa, Zea Mays
MPSIAQNRASTDKSPRFRSKAAPGAAGLAKTTPYLNCSFCFILVKQTKEALCSASHSHTPCTTGRPGRLVSSPLSSLRPLHLAMCCRRQRGPDGTPVDGGRRRRRGCGAVLAVLALAAAAVVAFLESTAGGVSYTGDGWLHECAKWDAEGGRFLASTFFGGGVAEVRAGEGEERVVVADPDAAGRVALGLAVDAPRRRLLLVYCDRPPRFGYAALAAYDLGSWRRLFLTRLDVPGESTFPDDVAADEEGNAYVTDASGNKIWKVSPSGVLLGVIKNSTFVQRPGLRHNLVGLNGIVYHPNGYLLVVHTFGGDLFKVDPKTEAVHAVKVQGSLGRGDGMELLSPTRLVVAGTPSSRLVESSDDWETARVTGQYVGPVHRVGSSATVKDGDVYINHIVGFGLGKKKTHVLARAVFSPLAAES

SEQ ID NO: 59335 - protein, 313 aa, Zea Mays
MLSLCGDQALRELSSPGKSGSFFYLTSNDQYMIKTMKKSEVKIFLKMIRAYYNHVRAFESTLVTKFFGLHCVKLAGANQKKVRFVIMGNLFCSDYSIHRRFDLKGSSLGRTTDKPQTEIDEYTTLKDLDLNFVFRLQKHWYQEFQRQVDRDCEFLEQENIMDYSLLVGVHFRDTRDRLLTGVCCRINELLEGSFDSDCSRGSSPHLSRGDTDPNRLAKIKLGSNMPTRAERTIRKGDCEVQIMGEPTGELYDVILYFGIIDILQDYDISKKLEHAYKSFQYDPTSISAVDPKQYSRRFRDFVFKAFQEDRFDL

SEQ ID NO: 59336 - protein, 324 aa, Zea Mays
MENVLIHLWRFYFACGQVKSYERAIISVEQLNAILRQASKTKEKEDLRKIDNWQYISCVTLWVRFLCCHYKDYNLHPLFSQVLQLLFDCLELREVSQKEQTQRTKINFSSLLKVPKNLLKPRDFQEECILSAIQILSAHFAQWSYHVSFLEVATIPLVLLKRLHEQTTVESLRHPIKCLIDQVTENKDFIERKREVVSFSPNDKASVDSFLQSIASHLLFNIWPAEFAEKHITVECRRRSPHRMSDRDAVAPAGGGDRKAAKLGSWSSMSSNYGNKKRKSSSSSFGRRSTSTCEERQGVFRMLMSWNQESRFSNKIKTTTSKER

SEQ ID NO: 59337 - protein, 68 aa, Zea Mays
MDEDGDVADEFLDEIIPESSVNNAKSPVGRFQVKYNTKRTALALRKHVIAVDGEIRHSLEHQGQLRWV

SEQ ID NO: 59338 - protein, 180 aa, Zea Mays
MSDYDPRLVAPTCLYLASKVEESTVQARLLVFYIKKMCGSDDKYRFEIKDILEMEMKLLEALDYYLVVFHPYRPLLQLLQDAGITDLTQFAWGLVNDTYKMDLILIYPPYMIALACIYIASVLKDKDTTAWFEELRVDMNIVKNISMEILDFYDTYKIDPQRGIPEDKISPVMNKLPAKA

SEQ ID NO: 59339 - protein, 152 aa, Zea Mays
MKVECLSGSPPMAISYVSKVPWTSPFHTLWRFMELLKTARPSVLKFAQILVPTLIPRFLMSCASWRVAGSSTCSCRDNHRMEDLQPTEACLKLNVSALNLRFGYMFLHCMEDLQYPVTRHYWTSISMYKQRRTANTSKICHVVEEPMVFFYL

SEQ ID NO: 59340 - protein, 644 aa, Zea Mays
MSEFLDLELQDGIRMPWNVIPGTKQETVNYTCMIEEEIGYLKSALAQAVELLPDNSLVGFITFGTYVQVHELGFGLLPKSYVFKGTKEVTKEQILEQMCFFAGKKMPTTGVIAGTRDGLSSESISRFLLPASECEFVLNSVIEEIQKDPWPVPADQRASRCTGAALSVAANLLGVCVPGSGARIMAFVGGPSTEGPGPIVSKSLSEPIRSHKDLDKDSAPLYDKAVKFYDQIAKQLVHQGHVLDLFACAVDQVGVAEMKVAIEKTGGIVVLAESFGHSVFKDSLLRIFQSTDDNLGLSFNGILEINCSKDVKVQGIIGPCSSLEKKSPLSSDTVIGQGNTSAWKMCGLDRKTSLCLVYDIAKKDGPDSIAQSANNQFYFQFLTYYQHNEGQMRLRSTTISRRWVSGDNHVEELVAGFDQEAAAAVMARLVSFKMETEVDFDPVRWLDRALIRLCSKFGDYQKETPSSFSLSPRLSIFPQFIFNLRRSQFVQVFNNSPDETAYFRMMLDRENVTNTVVMIQPSLISYSFQSGPEPVLLDATAIASDKILLLDSYFTVVIFHGVTIAQWRNAGYQDQEGHEVFAQLLKAPHEEANLIIKERFPVPRLVVCDQYGSQARFLLAKLNPSVTYNSDNPSPGGDVIFTDD

SEQ ID NO: 59341 - protein, 464 aa, Zea Mays
MITLRAAAKLPSLEDVSPLYPNSDDEKLGAYVLKSESRNTLKFSLKSNSSKPPPDTPEQEKVVFKSSGSNKKPSKKKGGQGNKTNDGHDEIFLERRHDVKSSNSRLGDQSIDGNHDMSPFKNDDNAYISSSTRSSEKNLKSPSMKAVTNNADMIPKVKIKGSKVSSLHYKDGEENTSKADTGKATKLVIHLGSRHKTRSGSPKSELSNYQREQDLGSIHGRKLDVTSQLKGSRSEVKERSVMKLVRETGVQQRNSLLGDLGTSKKHATGKRSNALISGMENGNETGTRNRPFAQKQSHSSQVDENQGTADSPDNLKPSLLKLKFKRPHYEQLNTQASQPEEPTSWVSQQEDQFNVAKGQRSKRKRPSMEKADGLDGTTPAKRHHQSTDDEVMDANWILRKLGKDAIGKRIEVHLTSDGKWHQGMVSNVMGGTLCIQLDNGRSENVELGKQAIRLIASRSKGRKR

SEQ ID NO: 59342 - protein, 354 aa, Zea Mays
MRGSMSNYYDDYDDIDEIEDDYDMDDPADDMVDEQRGVRDSDAEDNDYGQPNDKIPDTSSADARNGRDIQGIPWEQLNITRKKYRQSRLEQYKNYENVPNSGEEAMKDCKPTEKGGMYYEFRRNTRSIKSTILHFQLRNLVWATSKHDIYLVSHYSIRHWSALSGVDTELINVQGHVAPREKHAGSLSEGFYQTQVSTLAVKDNLLVAGGFQGELICKHLDREGISFCCRTTYDDNAITNAVEIFNTSSGAVHFIASNNDSGVRYYDMERFQLFKHLQFEWPVNVGSFGFLAISVTFMFYIWIFLLVLSLQGTSFYTCCLQMKFRIDFIAYFICPIVVLVLSTYSSFLGMFLTY

SEQ ID NO: 59343 - protein, 79 aa, Zea Mays
MLLALIRDRQDQGGVPGREGRPRSTCPTNTAENFDPARAACFRSVHGPSDAVVPEVLFVWIQKHFLDQRYGVLNFSVPC

SEQ ID NO: 59344 - protein, 1063 aa, Zea Mays
MAEKLRDLSQPVDVTLLDATVAAFYGTGSKEERSAADQILRDLQNNPDMWLQVVHILQNSQNLNTKFFALQILESVIKYRWNALPVDQRDGIKNYISDVIVQLSSNEVTFRQERLYVNKLNIILVQVLKHEWPARWSSFIPDLVAAAKSSETLCENCMAILKLLSEEIFDFSRGEMTQQKIKELKSSLNSEFRLIHELCLYVLSATQRPELIRATLATLHAFLSWIPVGFIFESPLLETLLKFFPMAAYRNLTLQCLTEVAALQFGDFYNVQYVKTYTFFIIQLQAILPPEKIPDVYANGSTEEQAFIQNLALFFTSFFKNHMRILETTQENIAALLMGLEYLIGISYVDDTEVFKVSLDYWNVFVLELFEAHNQMEPAVTAQMVPGMVDGGTAVKQRRQLYSGPLSKLRMLMICRMAKPEEVLIVEDENGNIVRETMKDNDVLVQYKIMRETLIYLSHLDHEDTEQQMLKKLSKQLNGEDWSWNNLNTLCWAIGSISGSMVEEQENRFLVMVIRDLLNLCEITKGKDNKAVIASNIMYVVGQYPRFLRAHWKFLKTVVNKLFEFMHEMHPGVQDMACDTFLKIVQKCKRKFVTQQVGENEPFVSELLSNLATTIADLEPHQIHTFYESVGHMIQAESDNTNRDEYLKRLMSLPNQKWAEIIGQASQSIDILKNQDVIRSVLNILQTNTSVASSLGPHFFPQISLIFLDMLTVYRMYSELVSSTIAEGGPFASRTSFVKLLRSVKRETLKLIETFVDKAEDLPHIGKQFVPPMMDPVLGDYARNVPDARESEVLSLFATIINKYKGEMLEDVPRIFEAVFQCTLEMITKNFEDYPEHRLKFFSLLRAIGTHCFQALIQLSSQQLKLVIDSINWAFRHTERNIAETGLSLLLEILKKFQASGFQNQFYKTYFLTIEQEIFAVLTDTFHKPGFKLHVSVLQHLFCAVDGLTEPLWDASSVPYQYTDNAMFVRDYTIKLLGTSFPNMTVTEVTKFVDGLLSSKLDLPSFKNHIRDFLVQSKEFSVQDNKDLYAEEAAAQRERERQRMLAIPGLIAPSELQDEMVDS

SEQ ID NO: 59345 - protein, 319 aa, Zea Mays
MTVVRVDENPAPDGENSPLDDEYVSADDEHVDDEDKETDSIDDYENPSGTPQMKKGPWSPEEDKRLKDYVEVHGAGNWNKVQQNARLNRCGKSCRLRWTNHLRPDLKKEPFNAEEEEKIIKLHIRRGPKWSMMASYLPGRTDNEIKNFWNTRKRRKQRCGSPLYPEYMLSQVSHKDMDFETLGESHGKKRSNECSKEKVVDVQELVDELIVFEHLDYGKDIVFPIRPLKCHASTGSVQISGDIRKTFCPTDLNYVMTKNQSVPVGSAIGSGYPLSVPLNMMPVLKLKLQTYVQVQMLFSTPANVIQLLVFLILGSRIHH

SEQ ID NO: 59346 - protein, 316 aa, Zea Mays
MDYMFDAWFSLIHQLQERVVIFSDAGPDTRWVGDEAGVAGYTCWSPFNKSSVTIGHTTAEYSSSGDPFGQDWVPAECDVSIRPGWFWHASEKPKNVTTLLDIYYKSVGRNCLLILNVPPNSSGLIADEDIQVLQEFTEIRRAIFSQNFAANATVTANSVRGEQDNLQFAPSKVLEDGIYSYWAPQEGQTCWEMLFDLGQSTSFNLLQLQEPIQLGQRVIEFHVAILVDELWQTIVEGTTIGYKRLLLFPVTESRYLKLTIDSARADPLISFFGVFMDPFSSIHSLQNHVKPPRTNSNEVTMLRMAHASVNKSIDAM

SEQ ID NO: 59347 - protein, 254 aa, Zea Mays
MLRKVPAFETKHGLAPCMVAPTKIIAGLGLSLGIDILEAPGATGDYRTLLTSKAKAIAKALSSPMGTPPRVFVPGEDEYKAGKENGYDFGFLHIKAIDDAGHDKAVKLKVRGLEAVDRAFGQLARLLWEAENAGHYQYFLCVTGDHSTPVEYGDHSFEPVPFAICRLRDYAGAVGVDNIINTQLDAFPLPSVKSGEDLLDNIESLDHKPDQLKAFSGDTVCEFNEIATARGCLGRFPGSEMMGIIKKFIKAKND

SEQ ID NO: 59348 - protein, 1083 aa, Zea Mays
MVRKKRTGPGGSGETSGESSGASGQGSSQQPERTQQPGGGRGWVPQQGGHGGGQHQGRDRHYQGRGGPGPHHLGSGAPEYHPREYQGRGGEYQGHGGEYQGRGGDYQGRGGGRSRGGMPQPYYGGHRGGNVGRNVPPGPSRTVPELHQAPYVQYPAPVVSPSPSGPGSSSQPMAEVSSGQVQQQFQQLADRGQSSTSQEIQVAPASSKSVRFPLRPGKGTYGDRCIVKANHFFAELPDKDLHQYDVSITPEVTSRGVNRAVMGELVTIYRQSHLGGRLPAYDGRKSLYTAGPLPFTSMAFEITLQDEEDSLGGRQGGHRRERVFRVVIKFAARADLHHLAMFLAGRQADAPQEALQVLDIVLRELPTARYSPVGRSFYSPNLGRRQKLGEGLESWRGFYQSIRPTQMGLSLNIDMSSTAFIEPLPVIDFVAQLLNRDISVRPLSDSDRVKIKKALRGVKVEVTHRGNMRRKYRISGLTSQATRELSFPVDDRGTVKTVVQYFMETYGFSIQHTTLPCLQVGNQQRPNYLPMEVCKIVEGQRYSKRLNEKQITALLKVTCQRPQERELDILQTVHHNAYYEDPYALEFGIRIDERLAAVEARVLPPPRLKYHDSGREKDVLPRVGQWNMMNKKMVNGGRVSNWACINFSRNVQDSAARGFSHELAVMCQISGMDFALEPVLPPVTARPEHVERALKARYQDAMNILRPQGRELDLLIVILPDNNGSLYGDLKRICETELGLVSQCCLTKHVFKMSKQYLANVALKINVKVGGRNTVLLDALSRRIPLVSDRPTIIFGADVTHPHPGEDSSPSIAAVVASQDWPEVTKYAGLVSAQAHRQELIQDLFKVWQDPQRRTGTSHFFQEGNWTEAPEDHILQFLSFRDGVSEGQFYQVLLYELDAIRKACASLEPNYQPPVTFVVVQKRHHTRLFANNHSDQRTVDRSGNILPGTVVDSKICHPTEFDFYLCSHAGIQGTSRPAHYHVLWDENKFTADELQTLTNNLCYTYARCTRSVSIVPPAYYAHLAAFRARFYMEPDTSDSGSLASGARGPPPGAARSSTRGAGSVEVRPLPALKENVKRVMFYC

SEQ ID NO: 59349 - protein, 206 aa, Zea Mays
MKNRSPYPFLNLRTKSERIKGTNADNFPSNLRKTISLPATVLSSRRHYSRRTALHSASPWPRSPGTSSCAPPRHRSAAGAPCRPTPPRARSSSSSSRRRRRSRPPRAAWRWPRPRRWRPRPRCPTCASGSSSPSSPRRRRPRASARPPRACARCGPCSRPCPGSTCSSTCASSPSTSASTSPPPWPASPRAAALTTSASPTSSSTT

SEQ ID NO: 59350 - protein, 171 aa, Zea Mays
MDFFMQLYEGFIRDNVDQFCREGIRLHLIGDSPGLPASLLRAAREANQLATQSESEMVLMLAMGYSGRRDILRACQELATEVQRNLLRPEDIDEALIAGKLGTSIAGGELSYPDLVIRTSGELRLSNFLLWQSAFAELFFSDVMWPDFGEDEYLGALRSYQTRQRRFGQRK

SEQ ID NO: 59351 - protein, 128 aa, Zea Mays
MLCQIKGDEVTLARAVNLLHANKDDYIAVLFYASWCPFSQECKPNFETLAYLFPAIRHFAFEESAIRPRFVLYSANKNYFLLQHIYFWWNANLMLELQHNFEIRHPWFPNTLSLELDHESTISWTKDC

SEQ ID NO: 59352 - protein, 880 aa, Zea Mays
MEEPGREGDSPGPPWAPSESSAFRAFVTAVGERAVASPSGSDNGDSVCSSNLRAVRKRPFVARLTTYIIQTFEKCNPEFKYSESLNPKRFLTNPAVPVHNHGLDNANSDLILYVNLELLNKKSSRRYVVQEMLGQGTFGQVAKCWDAETNSYVAVKVIKNQPAFYQQAIMEVSLLRLILDALIIMKDAGIIHCDLKPENILIAPTVKTAVGVKVIDFGSVCMEGKTIYSYIQSRYYRSPEVLLGYPYTTAIDMWSFGCIVAELYIGLPLFPGASEYDVLCRMIEIIGGQPPDDLLREAKNTGKFFKHVGSIYPSSEARNGASSAYRILSEDEIEARDSKKPKVGRWYFPRGRLDRLIYTYPWKNLSEGNLPETEKADCLALVDFLRGLVEFDPNKRWSPLQASYHPFITGEAFTGPYEPVQETPRIPVGRAAVVDHNPGGGHLLGAGLSPQVGSINRCLRFNNALQPNMPFSYGSSCGSFGSHGSFNDNAGFSYGSYDFNSVDIYNSPMDPSGFNLRSQLGGSFLGSSPHIRRRPHLSHGGGIRLSPGGPGHMSLGASPSQFTPPNSQMQIPTGPNGRYGASPSRGGHGSSLGKVAVVGQYNRRRNQGYPPMPMPPHEHTSQLIQGHQGDGVSTARFGAYAQGNSTYLHNALPNSSHYSWRSQRGSGSGLPLDPSSSRGSFPPTNYYGFPLHSDASADTLPSTSSVSDPADWDLNSSDKSLLQEDRTLSAGLSDLRLIDASGQTNRSSRLAPFQSHDILSSNPSTMNQRNGHLFHASSLGESTHTPGHVTLDGYEHTTYSQRSFPIYRGQPFQQYNNMTSSYIRPMRAHHNGQPVWSNYRLTEPPPTTMGDGMLWGGRGGHSFAASGLPPTLRKDFGRIF

SEQ ID NO: 59353 - protein, 139 aa, Zea Mays
MHCREGFGHTVGKKGFRVFDTRSLGLSAGGYGTLEELLEVITWAQLGIHKKPVGLLNVDGFYDPLLSFIDMAVNEGFIKEDARRIVISAPTAKELVLKLEEYVPEYEVGLVWEDQMPPSAAAAHGFAPELVEPGITSSS

SEQ ID NO: 59354 - protein, 676 aa, Zea Mays
MPEGQQVSEKESKTLQPYKPGISKETQALSSLESSLDIDFSTIPSAWNDDDIVVSDGMPKGSDENQVPNKNGELTHPASKSLVLSKKDIEMNITSKNPSDFLSSLAISKLDVSTSDGDHSDTNITPKSLTSNAVECQSCHAAGEKMLEDIGSKDIDMEKISSQISSVTLGGNDKIQSMAGNQQPDVMPCTSIDVPMDQNFGRDRSHLNLNELLLPSENKDSSLSCQYSSDKRLAWSLKMQNCSVTPLNDTIDSAMLTDKPYSILLEGSEKPSYPPFVEFPSTWDTSLWNDTKNNAASTIDTITSSQMQTGFSSIDNTYALLNGGQDGLGTVYTHDNVSVYTRGRGNVSGHPGMGSHQHRAMGSVRTDSIGSFDKTISVNKDESRIISDTLSEFNPWDDSYSTANNFVRMLRESENNDVQCTAPSWKSGTGSKQSRFSFARQDNQGNLLDSSLRNCGIGTEQNFSLLPQNSRRNIYQNGLAFQSLENEFSNSNFPGLLDMATTGTSMSKISAPPGFSAPTRVPPPGFSTAFPSQDSLNPTPGFPSGILSHDGSIPLSRFPSFSSGVSAQEVSKLPTRLPSPFSSRFSSQDGPDPPSRFPFSSGFTSQDGSNQLYGSTNPGLFPVPYFPRTSLISHHSFCGALQKIFSGVLFWVSTVIIINLSLEGTQVTWSLMILLY

SEQ ID NO: 59355 - protein, 442 aa, Zea Mays
MADSGGISADNAAAANDDDDTNTAPFPDTVQVGGSPEYKVERKLGKGGFGHVFLGRRLTAAHAARSAASAAQEVAIKFEHTSSKGCTYGPPAEWQIYTALGGTHGVPKVHYKGRQGDYYVMIMDMLGPSLWDSWNSLGQSMPSEMVACIAMESISILESMHSKGYVHGDVKPENFLLGQPSTPHEKKLYLVDLGLATKWRDTANGQHVSYDQRPDAFRGTVRYASVHAHLGRTASRRDDLESLAYTLVFLHRGRLPWQGYQGDNKSFLVCKRKMSTSPEALCGICPQPFKEFLEAVVNMKFDEEPNYSKLISLFDSLIGPIPSIRPINTDGAQKVGQKRARLLNDDDDHVKKKIRLGAPATQWISVYNSRQPMKQRLMLFLKLISSCRLYILFRVSIQSYIIVVCSVSFFLLKVNSHFFAIWYKNLIHSLKGTKLTTWQYCL

SEQ ID NO: 59356 - protein, 494 aa, Zea Mays
MDQQLHQVPSTVTHSVVSRIKNNTSGWLNNVSNVAASASGKLSVPSGAVTAVFHNSIYQGSLPVPSKANALEHLLVYSPSGHVIQHELLPSSGSESSGSSPRVGSGPNLQLQDDEMHVTAEPIQWWDVCRRTNWPERDENIANIVLYNQRSSMMAMGASDCEDSEHSDSTASNDGISGKEIMRIRERSSWYLSNAEVQINSWRIPIWQKSKICFYVMGYPAAELVESVSSGGGEIEIEKLPLHEVEIRRRELLPVFKQFQYSDRHSSDRNIANGGFQNALSHISNAQNSSVKDNGEYETKPVALSGFYADTRKTANTNGLARQTFSAVNLQQVGKCNSIESLNTAIVSGKTENGNNGYISTPPETKASIRSLSSYSLLDGHVDGMLSPNSASHKPETTNNSVLSNAASTDVQNGCLTTVDSGQQEASHSHSSVEFTQYFQEGYCKISELDDCRELTEAVTDADSSSSHCEREKPEEDGDNDDLLGGVFAFSEEG

SEQ ID NO: 59357 - protein, 96 aa, Zea Mays
MGLKEQERASRQHDPGSRVGVAPWRPPSTTRTAVSAGSRSRQAEGGKSEHGAERCEPAAGVVAGWWTRLGGIQTRRGGVSRGEEGFACEVRTAPCV

SEQ ID NO: 59358 - protein, 350 aa, Zea Mays
MELTGAALRRYALPSAAPRRKAVEAVARDLGKLRAMGLVAGDAAKEKVLSDATDLLLQELSQMKDAEYKINKVEKEQNAAMKALKKQEKRTKKTAIMMMKCEEDESSESSESDCEDEATMNVEQGLVISTAVPEVVASSISAVPAMECDKAAVKAMKMEKEAKKMAMATLNGCRDEDDSSCSSESSESECEGQVMRMSRCVTITAPEMPPPSTGLPIIVPQIPEPLAPQPSQSQPSEPATAVQATRVSSVAVTETSTTSRIEVCMGGKCKKSGAVALLQEFEKTVGTGGAVVGCKCLGKCGLGPNVRLRSGASAEGSAKGNPLCIGVGFEDVGTIVAGLFGGADLGMTPT

SEQ ID NO: 59359 - protein, 323 aa, Zea Mays
MDTAVYSRNRCFRLVFSSKSGKKSFLVPTKRFKCQELNDKDVFMESLICRLDDNCEKLLICKLDLECKKTLHFDSEISMSQIQGRSYRHRIATYQNDFSHAYTCGKSPFPPLDGFIESIASFGNVSGKIRSWFWFSQESLIIYNMLRSRYCENIGREHKGNHVFYIVDFQRAAYYQKCHDPDCRGYRSPLRPVPWDVIPELVESDQIEYQGHAMETNIENSSMSGKSITGAGAEDPEWWEQVVEFADSIENMDHSLATLEVKSDASIENMDHAPSLCASEENGCFEADPEWVMHAERAMEQYEEQSGGSQSHATSQVFDLEDV

SEQ ID NO: 59360 - protein, 859 aa, Zea Mays
MEPSSPATTATFPAAVEEHETYPPMVSSSLFPLFPFAASTSSAPPAESQWLSNPSFSFDASSLNIPATTSSSLPSPQSHSSDEDTPLQAAPAKYELVPSSPSSDEERGSRRKRSGRRKRKREKERYDGAATSRKAGIRAWAGLETKPAKDYYVDAKGDHDNLAFGSLYRMDVARYRSQNMMEAFGLNHLRFGSSHIDLDSDLDGMDNKVRAGGRYYSAKNAVSERNKGFKHLKIFKGNTSVMLAEDFVPFGTQSLPLKSTTVEQELEESWEDEILRRTREFNKMSRERPHDEKVWLAFAQFQDKVASTQPQKAARLQTTERKISILEKAVELNPDSEELLLCLLKSYGKRDNTETLLTKWEQILTKHPDSSTLWKQYLLLCQGEFSRFKVSEIRKSYVYAVQALSAACTKLCRQDNKSMDSKSSSLVQLEVGLVDIFVNLCRFEWQTGHRELATGLFQAQMEFSLFAPPLYLTTSSKQRLFEHFWNSGGARIGEDGALGWSEWLAKDEESRQKLSMQENSQETETGGWSGWFDPSLGNTETNDLSNKSLEPSLTDGNDAEDLDAEDSPAQDDVESLLKKLGIDVDAESNSEVKDAETWNRWASMELSRDNQQWMPLHENYGSIHCGDAPSGEDNDQLSRVILFEDVTEFLFSLSSEEARFSLMCQFIDFYGGKISRWTSTNSPSWLDRILSLENITDDILEDLGAVSDVVNKNQSSYSCKYKLESLLGSMCDLSQRPGLMKFLKNAILLLLGVFPRNHILEEAVLVTTQMFTPQENSSSIQTNASRALAKSMLKKDRQDFLLCGIYGRTEAMNGNIEQARKIFDMALLSTEATSEEEGSHPLSLVRRDGDYSVRFKKQL

SEQ ID NO: 59361 - protein, 237 aa, Zea Mays
MSSSSPSLLSSRLLSPAILFTKKPASLRSISSATARHGVRVVVAAASAAAASPVSAARVRPSAAEVARTVVELAASGTLSMVGPDGWPLGVGAHFVADSAGAPALCLSAARVAAPDAPASFHVEFRQSGARTPQCTMLGALTKPSDESVLKKLSTRWQKKFGEEIDQDLLYLISVDRILHMEDFNEDGMWVVPSDYTSAEPDPLRNFAENIVEEFNNKNAEDVRRIYNIYVESDLQT

SEQ ID NO: 59362 - protein, 302 aa, Zea Mays
MGQGSPGGMGKQPGLPGDRKQGDGKKEKKYEPPAAPSRVGRKQKRQKGSEAAARLPAVAPLSKCRLRLLKLERVKDYLLMEEEFVASQERLRPSEDKTEEDRSKVDDLRGTPMNVGSLEEIIDESHAIVSSSVGPEYYVGILSFVDKDQLEPGCAILMHNKVLSVVGILQDEVDPMVSVMKVEKAPLESYADIGGLDAQIQEIKEAVELPLTHPELYEDIGIRPPKGVILYGEPGTGKTLLAKAVANSTSATFLRVVGSELIQKYLGDGPKLVRELFRVADDLSPSIVFIDEIDAVGTKRSN

SEQ ID NO: 59363 - protein, 203 aa, Zea Mays
MMGNFLLAARKCRRPACTEYLISLDAKNTSAGSYIGKLRSNFLGTKFTVYDAHPPCARAAVSKGYMIGSAHVSPGVPAGNYPVSHISYYATLGSRVPRKMKCVMDSIPVSAIKGGGTAPTQTEFPSMSSSSFASVPFFTRKPGHRPDSCPGVPPGTQNETKTVLKNKSPRWHQPLQCWCLNFHGRVTVASVKELPAGGGFGRE

SEQ ID NO: 59364 - protein, 331 aa, Zea Mays
MGAAIKVERKESILTTPWAAILQLCLVSFGEKGKFLISGGNDASVKLWDWSKGFYSETNSKVDLVLDIDVKKKSETLSGCKLLLYPLEQEEEEGSSKLASLPAIAKKVLSYEEGIYAKLSRKWIEEGLRTVSIGRQEPGGFAAVLWRRREMGGLLLPHHRTFPNSLQASIPGPLSLHKGDRKNLHYFAPDVHLFCSLRQGFPRSSWSAVIRSEASGNAVASPGTVIKRSKEELITFFRDIQTSIAECSRKASKRTRKQPPDLFQEVRRREEQSHGGGDSGTDDVSEGPRKVKSLEDMNVAGLRELARARRMRGYSKLKKGELIDRLRGATT

SEQ ID NO: 59365 - protein, 1579 aa, Zea Mays
MDAEPRREGSDRAPAADSSAAPDGDEAMARGVAAAEKPTAASEAGAGGDVAAAERGRDGETPAGDPGVVADEGGAVGDQCPAAPQASEVDEGGAAGKERSDGGLANGAVEGSSIAGEVPDVAPVVSEARMDEDGGCSTGNEYSEMKMEVDGGCVAEREGDGQEQEQECTAAAVESEVKTGEGDGGVVNQGTTAHAGGLQVKEEVGEGLVGRYIGRSAPGRTRILIGKVVSYDSTAGVYSLVFEDGHAEELGLPQLQELLMSDDNGALGMKVSCRKRKLDLLVSSGSALEVKEPPSTRQRVDGCEMSARPDELQHSASGSDMSEDVESSSNSSDFTREETSEPCPPVQAVELPPSSGDIPVPEESISSLLSVYNFLRSFSVQLFLSPFGLDDFVAAINCSVQNNLLDAVHVSLLRALRRHLESRSAEGSRSASNCLKYLDWTLLDALTWPNFLLEYLYVMCCIKNLGGKSFGRSLLVAEYYKLPVTMKLRVLQILCDDVIESEELKTELENRVGYNEEMEYEIESSAFLEAGSRSVSTRAAKASACKNTNDFHNLLESAPNVTNPETAPAVLSQDGNSDDCRICGMDGTLVCCDGCPWAYHSRCIGQNKAFLPQGDWFCPECMVNKLGPTSSRIERGARGAQMFGIDMCGRLFLGTCNYLLVIETASDAESYARYYNQYDVAKVLQSLAVSDAYVDICKQIKDYWKHLLGIIHNERSTTGKEVGAKVALPQTNAQQKFVANQSAMCSVECLEEQKCKSSLGVVTEKNAEVFKQTVSAQNNIHNAHRNGAFGPSVVSSVSHQNGSIVTGGSNIAQAQPAQSIFHPDPSTVSVTSGSFCPSSLGKHHLQMFPERSGNMSGVKAAKLSSFKPQAYMNLYNHGNIAASAAANIAVITSDDSKVSASQLTAKHRKKMAADNALQLKAFSSAATQFLWPSTEKKLMEVPRDRCGWCLACRSSAIGTKKACFLNMATSNAVKCSARILSVMRVIKNSDSHFPSIVAYLANMEESLRGLLVGSLQDMQQKERWHQQLQEASNCRTVIPLLLELESNIRGVAFSASWLKPIDDWPLESPGPSTGASRPAQYQKRGVGGRRGRRRSVASESGTATATDEDNSWTWWTGGNISKRTLQRGALLHSTRRKAARQGGKQWIAGLSYHEGSKFPRRSRQFVWRGCVGISQTSSQLALQVRYLDAHIRWKDFIPPDHIPSDGKSYDADFSALRNAVVCDKKIIDNKIRYALKFRNQKHLPVRVTKNILESEGDQDENSKLWFSENHVPLYMLREFELHAGDNSLPTPGISDSNCFTNLYPRRVKAYAGDVFSYLFHKGEVYPCTSCKKDVIYRDIVKCNTCQGNCHKECTSSSVVSKGSSATSSLICKLCLQKRNLMLTSYNTNASYIQPQQKGNGQQPVTALRVKFKVSSSHSGEPAPKVEAQLVASVKAQPSAKVEAQSSMNVKARPVVNVKTQPFAKVEAQPIMNEKVQPTAKMEVQPLAKMVTQNITGVQALPKTKAKKSKSEKEKKPKKVQAITYFGLVWKKNKTDKDDGSEFRANDVILKSKDSIGSSIRPTCCLCDKAYSPDFLLVSW

SEQ ID NO: 59366 - protein, 102 aa, Zea Mays
MNETYWTQNPSVPTVTNDPDCKRWSNDQQTLCFQCDSCKAGVLAGIKKSWRKVAVLNIVVLIILVIVYVAGCAAFRNAKRIENGEAVGMARMTKSHPSRFQF

SEQ ID NO: 59367 - protein, 362 aa, Zea Mays
MGKRKQRGGGDGEPAAEGGAGGGHSPSTLEAVFSEVGPVRRCFMVAEKGSEKSRGFGFVQFATVQDADRALQQKNGSPVAGRKIRVKLAMNRAPLKERLQKGNMQVKDSDAKDEADEISPAEKHKGKSHKTDPEQLHLLSNDAKVSKEAPIGDSEKVKNSEKQRVAKTVIFGGLQDSAMATEVFRQAREIGSVVSVNYPLPKEEMRFNGLARDGCTSDMAAVLFASVKSAWDSVVQLHNKEVKGATVWARQLGGEGSKIRKWRAIVRNLPFKITEKEIVDMFSSAGFVWDVTIPHKSDEGISKGFAFVSFTRKQDAENAIKNINGKDVAKRPVAVDWAVPKKVYTVAAKVDAKDNGNRVIFC

SEQ ID NO: 59368 - protein, 209 aa, Zea Mays
MRRLAAPSSPSRLSRRRRRIPCQVRHRPLPGWTRPVALPFIAAIVGFIVVAVGSMLLWPSRLDPLSLWPDRRLNGWIRHYVAFPTGSVFYRGRGHPDRRRRMRYRRSPWRGSSTIGREEARRSLACWCSFVASPRLLTLERRPLRRTRLPLCVSRLWLPRHPGAIIHMECTPVPTPAATLAPSRRCDCVGGEGGQPVGSYFRLLLQSHR

SEQ ID NO: 59369 - protein, 108 aa, Zea Mays
MLSFSIEQSQSLVTVFNHVLDRMDTSVKCVTLHSEFRSTPLIGSNSLLLAYYLTFLFAVSIIAETCANQHLLTQSICWHHFIDRIHPASCFCFALLTCFYCCRGLFAI

SEQ ID NO: 59370 - protein, 188 aa, Zea Mays
MLKANLLTLRRCRSILRTSMRTSMRSWGSLFREEEQAAAAYNALQGRFYSGRPIIVEYSPVTDFREATCRQFEENSCNRGGYCNFMHVKQIGRDLRRKLYGRSASRRYHGRSRSRSPPPQRRGHRDRDDYRGGGGGGRGRGSRYDRYDDGGRRRHGSPPRRARSPVRESSEERRAKIEQWNREREGKQ

SEQ ID NO: 59371 - protein, 407 aa, Zea Mays
MLQTGTVPDEESYNLVVGLLIRQNLVDSSLKYLDLMLKSGYTPSLTVFTDYIQACVRSGRLDTLTSIIQKCKTADKIKVLCPQWAWCIDISEAAFEANNSKLALFALEFLARWIVRGENVKPPVQLSVNEGLVISALSAAGRTFSTDLLNAAWSLLRKSLRQKRAPTPETYLAKIYAHSSIGQLQRAFGTLHEFENAYGNSKDVDLELFSPFTSLHPLVVACCKDGFSTLDLVYVQLENLSHADPPYKSVAALNCVILGCANIWDINRAYETFVAIKEKFELSPDIHSYNALLCAFGKLKQTGEACNVFQHVLTLGVKPNATTYSRLVDAHLANKDPKAALAIIDEMVDAGFTPSKDTLRKVRRRCSRESDFDSDEKVQSLAKQFNYRMGGENRREMLYSIEYNPVY

SEQ ID NO: 59372 - protein, 138 aa, Zea Mays
MDPEDTTPPAPSQGDAETTPPPVLEVAAGEDSLASGGEAAERAHEEEELAREVMELGLQNEYLRSQIAGVRPAGDADEVPGLVRGWKEQVERMSREVQEQRLTREATEKALEHVNVAYAEADGKVQELTAKLAQVPCM

SEQ ID NO: 59373 - protein, 62 aa, Zea Mays
MDCLEMHVGAIEPGERVVVVDDLVATGGTLSAAIRLLERAGANVVECACLIGLPKFKLAKGN

SEQ ID NO: 59374 - protein, 52 aa, Zea Mays
MLCSSYHFTPPLLRGRLPHLHIKYKQGSSSSGNGQICLQLLRVYGERVSGAR

SEQ ID NO: 59375 - protein, 167 aa, Zea Mays
MQCALDPCRAQVVGWPPVRNYRKNTLAAATASRSKAPTEEAASGAGPMYVKVSMDGAPYLRKVDIKMYSSYEDLSLALEKMFSCFIAGQSGLHKSSSKDRLTNGSKVDALKDQEYVLTYEDKDADWMLVGDLPWELPSELEELTIRAVLLPTDKEERRWPHSLTQGQ

SEQ ID NO: 59376 - protein, 183 aa, Zea Mays
MMPARSNISIPQKCLGCDKAFCGAYWYSQGVSSSHCNLICNQDTLKSIYQRHISALPDTIHGGNPYEKDITERCIQQSGKTLQVVISEWISKFDNMEIDRSRLQLNNVDAITSRTYICNHCYSKFVDFLLYWFRVSLPQNLLPRDAAERESCWYGFMCRTQHHRPDHAKKLNHVCRPTRGNQP

SEQ ID NO: 59377 - protein, 395 aa, Zea Mays
MISPERSSSQSQRSAAAGAPFLSISVTDPVKMGTGVQSYISYRVITKTNLPEFEGPEKIVIRRYSDFEWLHDRLAERYKGIFIPPLPEKNAVEKFRFSKEFIELRRQALDLFVNRIASHPELKQSDVLRTFLQADEEIMDRARSYETGIFKKPADFIQMFKSKVSDVVLGKEKPVEESTPEYEKLKNYIFELENHLAEAQKQAYRLVKRHRELGQSLADFGKAIKHLGACEGDLMEKVFSEVGSKSEMLSIKLQREADNLLFNFEEPLKDYVRAVQSIKATMLDRANAFRQHFDLDQERKYKELNLEKLKFMNPEKYAEAESEFRELKADSEEATKKFEHIVRLMNEELARFQEQKTADIGLAFHEFAKGQAKLAKDIADAWRSVLPKLEACSTS

SEQ ID NO: 59378 - protein, 400 aa, Zea Mays
MEHLRWRPTVNERDFIECALQSDLRVDGRHSFDFRKLKITFGREDGSSEVQLGETHVMGYVTVQLVQPYRDRPNEGTLAIFTEFSPMADPSFEPGRPGELAIELGRVIDRGLRESRAVDMESLCVVAGKHVWSVRVDLHILDNGGNLIDAANIAALAALSTFRRPECTVGGDDGQQVTVHDPEVRDPLPLTIHHMPIAVTFAYFGEGNIVVLDPTYKEEAVMGGRMTAIVNSNGDVCAIQKAGGEGVMSSVIMQCLRIASVKAADITSKIKKAVDSYTTEKALKKVKRLPTSVPQKINVTNVTMDGKGDGELEKQSVQMHSDVQQISKGDENQQSIKRNSPLTRDRIAKHKQTSTFIGGPSNWDPYSKGVTLRSLKISDLPGTVNIVYMLWVFFLHANSQ

SEQ ID NO: 59379 - protein, 165 aa, Zea Mays
MRKFQDSIKALQADIDHANAMASEFLRDYDGSVIQMRVAYSAVAHFLLQWTDCKLAGALGLLKVMLYKVCADGSSALPDWEMEASIREFYGVIFPSLLQLPSGITELDDRKQRKLCLKKFRSRDEQLSEVDTERELECGICLEVSPKVVLPDCAHMLCMRCFEDW

SEQ ID NO: 59380 - protein, 476 aa, Zea Mays
MRSTYEIMVEEWNAPKPMHPSLLNEALRWTATDGQKKDLWSPLPYQGWKPCLTPSVSHKLPLEPSGYIQVFLDGGLNQQRMGICDAIAVAKILNATLVIPHLEVNPVWKDSSSFEEIFDVDHFINSLKDEVSIIKVLPKEFSWSTREYYGTGIRATRIKTAPLHASANWYLENVSPILQSYGIVAIAPFSHRLAFDDLPVDLQRLRCKVNFQALVFRSHIISLGETLVKRLRSPVRVHSSKSIHQVVGDTNQAEKYAVLHLRFDKDMAAHSACDFGGGRAEQLALAKYRQVIWQGRVLNSQLTDEELRNTGRCPLTPEEIGLLLVALGFDNRTRLYLASHKVYGGEARISSLRKLFPLMEDKRSLASEDELANVEGKASVLAALDYYISMHSDIFISASPGNMHNALVAHRSYENLKTIRPNMALLGRTFANKSMEWPEFQQVVQAGHKGRYGQIRLRKATQSIYTYPAPDCMCQG

SEQ ID NO: 59381 - protein, 467 aa, Zea Mays
MKGCSERLLFLLLLLASSSLLSAVQTCPADLDSKCDGGASDDDWEGEFFPGVPKIKYEGPTSKNPLAYKWYNKEEVILGKKMKDWMRFSVAFWHTFRGTGADPFGAPTKTWPWEDGTNSLAMAKRRMRAHFEFMEKLGVDKWCFHDRDIAPDGKTLEETNSNLDEIVQLAKQLQLFMHPRYMHGAATSPEVKVYAYAAAQVKKALEVTHYLGGENYVFWGGREGYQTLLNTDMKRELDHLANFLQAAVDYKKKIGFNGTLLIEPKPQEPTKHQYDWDVATTFAFLQKYGLTGEFKINVECNHATLSGHSCHHELETARINGLLGNIDANTGDPQVGWDTDQFMTDIAEATLVMSSVVKNGGLAPGGFNFDAKLRRESTDVEDMFLAHISGMDTLARGLRNVAKLIGDGSLDDLVRKRYQSFDSEIGALIEAGKGDFETLEKKVLEWGEPTVASGKQELAEILFQSAL

SEQ ID NO: 59382 - protein, 158 aa, Zea Mays
MVLTFIGRKHEDVFAGESNHLYGLLAQSLKSLVDEGVVEKEKLESFYLPIYSPSVGEVEAIVKQLGLFNMNHVKVFEINWDPYDDSEGDDVHNSIESGENVAKCLRAVMEPLVASQFGERILDKLFKEYARRVAKHLETEKTKHAVLVLSIEKAIIHV

SEQ ID NO: 59383 - protein, 1229 aa, Zea Mays
MEELQKDSALPSNSSDSEPEAMELDDNGAGKSHSIEGNRDSPIDTDEGQPSMDVDIKGKSSLNDDVNGKSSSEPFSNPPINMSVESLEKFCKEASRSFFDEVGLISHQINSYNEFVSHGLQELFDSLGEVIVEPGYDPSKKGSGSWKHAIIKFGRVKLEKPVFWTGKDEVSVDFKPWHARLQNMTYASRLRVEVTIQVYSLEKSDKSKTGNDGFVQKRNFMNETHWIFIGLLPVMVKSNLCLLHSLKESECLFDAGGYFLVKGMEKVFIAQELRCLRRLWISDRPCWTISFMSEMKRRRIYIKLVESTRSEDFSGSKIISISFLYATMPVWLLFFALGISSDKEAFDVIDMQDCDASVINTISATIKESDELCGGFRKSDKARQYVDELVKSSKFPPVESFDDYIAKFLFPGISGNRNKALFLGYMVKCLLMAFTGKRKCDNKDDFRNKRLDLPGELLGRELRAHLRQAERRMVKAIQRDLNSDRELQDLERYIDASIVTNGLNRAFSTGSWCHPYKRAERCSGIVATLRRTNPLQMMSDLRKTRQRVAYAGKAGDARYPNPSYWGKLCFMSTPDGENCGLVKNLAVTSIVSSKVVQPLIESFISCGMNKLNDIPTEHIQRMDKIFLNGNWLGSCSDSASFVFRLRCMRRSSLIDPQVEIKRDKHYKEVRLFSDAGRILRPLLVVENLNKIRKPKGRSFSFQELMQQEIIEFIGVEEEEDIQCAWGIRHLFESEGAISSYTHCELDPSFILGLSCGIIPFANHNFARRVLYQSEKHSQQAIGYSTSNPRIRVDTLSHQLYYPQRPLFKTVIADCLGRSDCTTFGRKDDFTRPEYFNGQNAIVAVNVHQGFNQEDSLVMNRASLERGMFRTEHLRSYKADVENKDGTKRLKLKEKIDFGKTESKRGRVDNLDDDGLPYIGASLQTNDIVIGKVSESGEDHSIKLKHTEKGMVQKVLLSANDEGKNFAVVTLRQVRTPCLGDKFSSMHGQKGVVGFLESQENFPFTHDGIVPDIVINPHAFPTRQTPGQLLEAALGKGIACKGTMRYATPFTTASVDVIAEQLHKAGYSRWGAENVLNGRTGERMKSLVFMGPTFYQRLIHMSEDKVKYRNTGPVHPLTRQPVADRKRFGGVKFGEMERDCLLAHGSAANLHERLFMLSDFSQMHICQTCERVANVVMRSVPGGKKIRGPYCGFCKSSENIVRINVPYGAKLLYQELFSMGICLKFETEVC

SEQ ID NO: 59384 - protein, 850 aa, Zea Mays
MAHNVWEADKMLDSYIYDYLLKRNLQNTAKAFQAESNVPSAPVSIDAPGGFLFEWWSVFWDVFIARTNEKHSDSATSYLESIKAREQQQQSQHQIQTQQLLLQRHAQQHPQEQQQWRQQKQQQRSENTDFPTSAQNGTVAADPPARQNDTTAGTLSAKVFEDRMKITVQRDVSEETSMKQRLTETICPLLESNPTSMLKSPARSSLASGPIFQRSAGGMSGSLQQAQFRSQPLLGSTQDIKAETNVALNQRAAGADGSLFGVPGSNQAGNNLTLKGWPLTGLEQLRSGFLQHKSYMYPAQPLQHQLQFLTPQQQHALIHVQAQQNATSPGDMDNRRLRMLFSSRNLVPGRDGQSTGFTEIVPSVGQSLQNMCLPMQRTETDMLMKKIAALQQQQPSNNLQQLLQHPLLSQQQQSSTYLEGEQEKMGAGIVTVAFAGNEQVSKNRNGRKRKHPISSSGPANSSGTTNTAGASPSSTPSTLSAHSPGETISTPLQHQNASSCTTLVVYGSEGPVPIGSPTNQLVDMDHYTEDDSMEDNLEPFLPHNGTNPRAAGSHCISSGKGYILREVSSAQASTSSVLCCHFSSDGKLIATGGHDKKVFLWNADTLKQKSMLEEHSLLITDVRFSPSTPRLATSSFDKTVRVWDADNHGYSIRTFTGHSASVMSLDFHPNKDDLICSCDGDNEIRFWSIKHGNAVRIFKGGSTQLRFQPRYGGLLATASDNVVSILDVERQACVRRFESHTKGVDSVCWDPTGEYVVSVSEDTVKVWSLNDESFVNELSCGGRKFSSCTFHPTYPSLLIIGCYQSLELWDMSENRSMTVAAHDSLVSALASSSSGLVASSGHDKYVKLWR

SEQ ID NO: 59385 - protein, 158 aa, Zea Mays
MAGLCLLSSAPLPPSLERSRRGLGDGSVGMLQSLTVYYYLYQISTGLWMGIEFYAINTDSQALINSQAQYPLQIGEQLTHDLGTGGNPNLGEQAAEESRETIATALRDSDLVFITAGMGGGAAPIVAQISKEAGYLTVGVVTYPFNFEGRKRSLQASI

SEQ ID NO: 59386 - protein, 1372 aa, Zea Mays
MFKLHRHRSSDRVGERFDFRFSNFRAVQVPAVSDRLFLSIVSVDSGRTIAKSSKVASRSGICQWPDTILEPIWFSKDEVSKEFEDCQYKIIVSLGSTKSGILGEIFLNLSNFLNIVDPTAISLPLKRCNAGTVLQLKVQCLGTKSKLSGVRSLRDMAPRLDDRSPTPTNDEMDNKSDCSDGMFNRSVRSSSENHLVGTYQDESGNRETSFSAPGSHRSSNSGDSTADRTNFSPRDNSSGGLYVGRQDSASSYASYVSAGRGDDGLRSNNSSFSSRASGPNLLQGNTPKIFSNGLSQLSMGASDSSKDLLEAAEETIEELRDEAKMWERHSRKLKADLEMLKKECSEKSKQHAELAGELSAAQAERDSYRHEIEELKSSLQDVNTRQTITGTPKRSDWIDLQKELEGEVKFLRESNADLTIQLNRTQESNIELLSILQELEETIEEQRVEISKISKVKQTADPENGLLVKEDKEWAKKLSMKDDEITVLREKLDRALNIGNAGGAGSNAIYLELEKENEILRAKIQELEKDCSELTDENLELIYKLKENGLTKGQVPRISNNNELQFEKLTSRIRQLEEELRNKEMLRDDSFSESSTSNADELQRKCADLELKLLNFRSQTCELEEKFQKSQEELEQRNLELSELRRKLNGLHSTELEVFESGATWKYQSRTADLEDTEPETDTLKARFELQLQENDDLRSSKVEMENFISEIQAEKSQLEERLSVSLKESSITSKCLDEVRKDILVLSSSIDSHVSANKVLERNIIELESCKAELELHVSELEQENIELSERISGLEAQLTYLTNEKESSELQIHDSRSLIINLKDKVERQQSEMETQRLEFKQKQQESQRRLSETQDDSEVLRRSNSKLQSTVESLIEECSSLQNLTADLKRQKLEMHGHLTQKEQELDESKKRNFEFSKTVEFLEAKLSSLHKDVSSKEQSLLSELESIFQEHMEQEERINRAHFMLNKIEKEKTLEVENLKREVVSLTAQVSSTHEERESATLDAIREVSVLRADKAKLEANLQDVSTQLRHYESQLEDLRKESKNKIKGLVDSLNASKQSEEMLTSDAEHMKKLMEAARSNEDTLRKTSNELELKLKSSDYEKQQMLEEISGLKLQVQKIMNLQDEVFKLQSSLDEAKFGKGKLEEILRSVTEECEELKAQKAMLTDKVSDMQETLRNGEEEKRNRIAMQAKLVRLESDLSASEASHVHEAELKNELSRIKRSNSEYQRKIQSLEQENEDLTRRVQTMEKGFEQMSHVKENLGKQELGGDNQAAIQSKIELLETKLAEALEENKMYRAQQKSPMPEGQPSAGAGDGKEGNTDRILQLEGELRDMKERLLNMSLQYAEVEAQRERLVMELKAMKKGRWF

SEQ ID NO: 59387 - protein, 131 aa, Zea Mays
MMEFVNAAYKWETQPKSVIESFVLLLSPFAPHLAEELWFRLGHPQSLAYEQFPEAKSEYLEESKLVLPVQINGKTRGTILVDKACSEDDVFQIAASDEKLSKYLDGKGIRKKIYVPGRILNVILDQQKSRT

SEQ ID NO: 59388 - protein, 66 aa, Zea Mays
MQSLGLPSTNVTAKAEVKVSPAPVVSIPSVAGIIGCLIGSYPSTNKAADPCDPSLTSTSFTPCTRK

SEQ ID NO: 59389 - protein, 677 aa, Zea Mays
MRSSWADSVANAEESAPATAAANGSVATHSTSRPTRSSYVPPHLRGRSAGAAVEAQAGLVAPAQGGPLPLAAAQPSGQGAAVGGPRWAGIVNGGGGGGSIGAPRQGHGGGGGGRGAWNSRPGGWDRRDREPDPFAKAEAEEIDFDGQENTGINFDAYEDIPVETSGHDVPAPVNTFAEIDLGDALNDNIRRCKYVKPTPVQRYAIPISIAGRDLMACAQTGSGKTAAFCFPIISGILKSPKPHQRSRSTRTACPLALILSPTRELSVQIHEEARKFAYQTGVRVVVAYGGAPITNQLRELERGVEILVATPGRLMDLLERARVSLQMIKYLALDEADRMLDMGFEPQIRKIVEGMDMPQRGERQTMLFSATFPKEIQRMAADFLADYIFLAVGRVGSSTDLIVQRVEFVLDSDKRSYLMDLLHAQKANGTHGKHALTLVFVETKRGADALEDWLFRNGFPATSIHGDRTQQEREHALRSFKSGATPILVATDVAARGLDIPHVAHVINFDLPNDIDDYVHRIGRTGRAGKSGLATAFFNESNTTLARPLSDLMKEANQEVPKWLEGYAARSAYGGGGGRNRRQGSSARFGGRDFRRDRGSGGGYGGGSYGGGGRNRRQGSGARFGGRDFRRDRGSGGSYGGGGGGGGGYGGSSGYGGAYGGGGSSGYGGGQSTSSWD

SEQ ID NO: 59390 - protein, 409 aa, Zea Mays
MDGAQLIGRHDEATIFTLRQLAEATNNFRQDSLLGRGGFGCVYKATLSNGQVVAVKQLDLNGLQGNREFLVEVLMLNLLHHPNLVNLHGYCVDGDQRLLVYEYMPLGSLEDHLHDLAPNQQPLDWKTRMKIAAGAAAGLEYLHDKANPPVIYRDIKPSNILLGEGYHAKLSDFGLAKLGPVGDKTHVTTRVMGTHGYCAPEYALTGQLTVKSDIYSFGVVFLELITGRRPQDSDRPPEEQDLVAWARPLFKDQKKFRKMADPSLCGRFPKRGLFQALAIAAMCLQEKAKSRPPMREVAAALSYLASQAYDRNNNAAAHRNRAGPSTPRVLDDQIGQDTCTLANQQGAQMSMHVGTDHAMPEVKEASCSGSHRGGRGRVTPNGADRERALADANVWAEAWRRQEKASKMR

SEQ ID NO: 59391 - protein, 617 aa, Zea Mays
MAKPVKYDDEEEISSSSAEEDDDQSAAAASGSGEEGDDDEEDAAALPTEEEEAEGEGQQEEEVDEEEIEAVTTGAGAEDGEDASAATAAEGEEESQSTEDDESVARDKDNGDETDAVVGKREKTRLKELQKMKKQKIQEILDTQNAAIDADMNNKGKGRLKYLLQQTEIFAHFAKGSQSNEKKPRGRGRHASKMTEEEEDEEYLKEEEDALAGAGGTRLVSQPSCIKGKMRDYQLAGLNWLIRLYENGINGILADEMGLGKTLQTISLLGYLHEFRGIAGPHMVVAPKSTLGNWMKEIQRFCPILRAVKFLGNPEERNHIRDNLLQPGKFDVCVTSFEMAIKEKSALRRFSWRYIIIDEAHRIKNENSLLSKTMRIYNTNYRLLITGTPLQNNLHELWALLNFLLPEIFSSAETFDEWFQISGENDQQEVVQQLHKVLRPFLLRRLKSDVEKGLPPKKETILKVGMSQMQKQYYRALLQKDLEVINAGGERKRLLNIAMQLRKCCNHPYLFQGAEPGPPYTTGEHLIENAGKMVLLDKLLPKLKERDSRVLIFSQVEKIVMHPLKPSIVQEVRSLFSYFQLGQVALVSTWPLLMLWFSMTAIGIPKLICKLRTVHIE

SEQ ID NO: 59392 - protein, 1607 aa, Zea Mays
MLRQILSTGNMAILVLPYVSICAEKAEHLEQLLEPLGRHVRSFYGNQGGGSLPKDTAVAVCTIEKANSLVNKLLEDGRLSELGVIVIDELHMVGDQHRGYLLELMLTKLRYAAGEGTLQSCSGEVSSSSSGKIASHGLQIIGMSATMPNIAAVADWLQAALYQTDFRPVPLEEFIKVGNQIFDKDMNVVRVLPKVADHGGKDPDHIVELCNEVVLQGHSVLLFCSSRKGCESTARHVAKFLKLPSVGTTDVSSEFSDAAAAIEALRRCPAGLDPILGETLPFGVAYHHAGLTVEEREIVESCYRKGLVRVLTATSTLAAGVNLPARRVIFRQPKIGRDFIDGTRYRQMAGRAGRTGIDTKGESILVCRPEEVKRVTGIIRSNCPPLESCLSEDKNGMTHAIMEVVAGGIVQTANDIHRYVRCTLLNSTRPFDDVVKSAQDSLRWLCHKSFLEWNHETKIYSATPLGRAAFGSSLNPEESLVVLDDLSRAREGFVLASDLHLVYLVTPINVDLEPDWELYYEKFMQLSSLEQSVGNRVGVIEPFLMHMAHGASIPFRARPERNTGLSNKSAQAAGNTLVSEHTIRVSKRFYVALMLSRLAQEIPIADVCETFKVARGMIQALQENAGRFASMVSAFCQRLGWNDLEGLVSKFQNRVSFGVRAEIAELTSIPFVKGSRARALYKSGLRTPVAIAEASIPEIAKALFESSAWSGQGDSGLRRMQFGVAKKIKNGARKIVLEEAEAARVAAFSAFKSLGVEVPQFTAPPLAAIEEYPTHDTIDQAKLNKLASGTHSRDDKNMNTCSDYATPRASTYSLRKDTSPAPSIQMKENAGLSKNVQITRQGASSSLSTEIADGSSRDVAEKGPVHAYNFPGGFDCFLDQWSTASNFFFDVHFIKRSMKPSLNLFEVFGLAVCWEKSPIYYCNFPKDLVTTGNNNIKEMWGNFQRRWEKIADIMKQKSVQKMTWNLKIQIQALKSPYISCQRLERFHLDHKMLDKVEVLNNSYMLLSPVSVYNGLDICLLAWVLWPDEESRAVPNLEKFVKRRLHSQEAAAANRDGRWRNQMHKAAHNGCCRRAAQTRALYTVLKKLLTQNLSVLVETIEAPLVNVLADMELWGIGADMDACLRARHIITKKLKELEKEAYRLAGKNFSLNATADIADILYTHLKLPVPKGCEKGKLHPSTDKQSLDHLRDQHPIIPLIKEHRTLAKLLNGTLWSICSRAQLCTQSQRYIIHGNWLQTSTATGRLSMEEPNLQCVEHVVEFDTGKSDKDYSSISVDDHHKINARDFFIPTKENWLFITADYSQIELRLMAHFSKDHMLVELLKKPDGDVFTMIASRWAEKEEALISSKERENTKRFIYGILYGMGANSLAEQLQCSTEEAAQKIQSFRRFFPGVSSWLHEVVLSCRQKGFVETLLGRRRVLTKITAGNSKEKAKAQRQAVNSICQGSAADIIKVAMIRVHSIITNRTSAADSTDEVTRKFSELGGQCHLILQVHDELVLEVDPCMVAQAGRLLQICMEEAASLLVPLRTKIKVGKTWGSLEPFHPEPCLMQMVNVSWMPMFHDMQGPGRRLNNFQYAPTGDLGDSVWCSSVEPSLLCLQSSVIADRM

SEQ ID NO: 59393 - protein, 137 aa, Zea Mays
MIAREEGESWSLQLGALGLEYIPQVHAGVLPLTQKPSRKERTNGEPGKKSAIKTTATARALPAWPVMPCHACGARPGLTTEPGLPFVNGGRGPGPQPNRRARAHGRFLPLPRRSPAPAARRGLWLSSRRAPVPRAGG

SEQ ID NO: 59394 - protein, 111 aa, Zea Mays
MPWTPTSKFPHPFSRVKQPAGYRPVQDPQKMTEIIVKALEITGQRGIINKGWGGLGTLAEPKDFVYLLDNCPHDWLFLQCKAVVHHGGAGTTAAGLKAAVSALSMPYFNVK

SEQ ID NO: 59395 - protein, 147 aa, Zea Mays
MERTLAMIKPDGLSGKYTEAIKEVILDSGFHIVKETEVQLDAERASVFYAEHSQRSFFDSLVKYITSGPVLAMVLERPDAVAQWRTLIGPTDAKKAKTSHPNSIRAMCGLDSEKNCVHGSDSPESADREISFFFGEAESVTVEHDEL

SEQ ID NO: 59396 - protein, 394 aa, Zea Mays
MAAPNSNDAASASGTGPAGEEDISIEALARRVQEHMTLNSNPAARRHKFWETQPVGQFRDAADASLPNGPIEPPTPLSEVRADPYPLPAAFEWLTCDLDDDALLADLYSLLAHNYVEDDENMFRFNYSPAFLRWALKPPSFFRAWHIGVRAKESKKLVAFISGVPARIRARDDVVRMAEINFLCVHKKLRSKRLAPVLIREVTRRVHQENIWQAAYTAGIVLPTPITTCRYWHRSLNPKKLIDVGFSRLGPRMTMSRTVRLYKLPDAPLTPGFRRMELRDVAAVTRLLRAYLARFVVAPDFDEVDVEHWLLPQEDVVDSYLVESPETHEQLMNDALIVAKRNNYDVFNALDVMENESFLKELKFGPGDGQLHYYLYNYRIRNGIKPSELGLVLL

SEQ ID NO: 59397 - protein, 344 aa, Zea Mays
MGGINAALGNMSEDDWRWHMYDTVKGSDWLGDQDSIQYMCREAPKAVIELENYGLPFSRTEEGKIYQRAFGGQSLDFGKGGQAYRCACAADRTGHAMLHTLYGQAMKHNTQFFVEYFALDLLMDNDGKCQGVIALNMEDGTLHRFRASNTILATGGYGRAYFSATSAHTCTGDGNAMVARAGLPLQDLEFVQFHPTGIYGAGCLITEGSRGEGGILRNSEGERFMERYAPTAKDLASRDVVSRSMTMEIREGRGVGPLKDHIYLHLNHLPPEVLKERLPGISETAAIFAGVDVTKEPIPVLPTVHYNMGGIPTNYHGEVCIEHVVDKYGSKPAYYNRNIFCYSA

SEQ ID NO: 59398 - protein, 141 aa, Zea Mays
MRVEMAGMRRDAEHYSRQEHVELEKRYRELTDLLYHKQTQLESMASEKAGLEFQLEKSLKQFREVQVEAERSKATRRSASSWEEDTDIKALEPLPLHHRHMATANHQLQKAAKLLDTGAVRATRFLWRHPVARVSVLFYLA

SEQ ID NO: 59399 - protein, 259 aa, Zea Mays
MEFMDAKEVTDVSGIKSIGVHPVDVSNLVSKAFAEMIFKHGFVHCDPHAANMMVRPMPQDSRKLFGWKRPQLVLLDHGLYKELDYNTRISYASLWKALVFADAKAIKENSAKLGAGEDLHALFAGVLTMRPWKRVIDPSPDHLVLGKNTDYSELQNYASLYFTEISELLRRLPRVILLMLKTNDCLRAVSHALVGGSSLESFMIIGRVSSEAVLDAKRMNRRSFLDGLKIWLEEALLEARFFTLKLMLCVMQLRKLLPG

SEQ ID NO: 59400 - protein, 108 aa, Zea Mays
MYQYFIKVVPTVYTDINEHIILSNQFSVTEHFRSGESGRMQALPGVFFFYDLSPIKVTFTEQHVSFLHFLTNVCAIVGGVFTVSGIIDSFVYHSQRAIKKKMEIGKFN

SEQ ID NO: 59401 - protein, 670 aa, Zea Mays
MGIRACSVCWLFYVLVLVCSLCQILYVGSVAAQTAQLTVDASPQNAQIIPGNMFGIFFEEINHAGAGGLWAELVSNRGFEAGGSNTPSNIDPWLIIGDESNIIVATDRSSCFASNPIALRMEVLCGASETNACPSGGVGIYNPGYWGMNIERTNVYRVTIYIRSSESVELMVSLTSSDGLQNLASHTIMGDKEDFVEWTKVEFDLQSNYINTNSRLQLTTTKSGIIWFDQVSLMPSDTYMGHGFRKDLASMLANLKPRFLKFPGGNYVMGNYLINAFRWSETVGPWEERPGHFNDAWAYWTDDGLGFFEFLQLAEDLGACPVWVVNDGASIYEGVPSATIAAFVKDVVNGIEFARGDPETAWGSVRAAMGHPEPFQLYYVSIGNQECSKYYYKDNYVKFYSAIKASYPDIKIISSCDRSAISSDNPADLYDVHVYTSSGDMFSKSRMFDNTARTGPKAIVSEYAVTGNDAGRGTLIAALAEAAFLIGLERNSDVVEMASCAPLFVNDNDQRWNPDAIVFNSWQHYGCPNYWMLHFFKDSSSATLHPSTIQLPNYDQLVTSAITWNNPHDGNTYMKIKVVNFGSKAVSLNISVTGLETDIQTFGSIKTVLTSGWLRDENSFQQPDKVVPAASPITNAGKQMGVILNSYSLTSFDLLLDSESQVRASIQAYD

SEQ ID NO: 59402 - protein, 125 aa, Zea Mays
MATVMAAAASAVEAPATAKAKKESKKQEEGVVTNLYKPKEPYVGRCLLNTKITGDDAPGETWHMVFSTEGPSLPARGLRIRGEKEKKRKDDDCLYLLLHVPLPRPGSSAQVQECSALSKRRPTRC

SEQ ID NO: 59403 - protein, 421 aa, Zea Mays
MVPRLFEKLKDESPRRRNTIVTRVPNIAREVCVLSIRKIEMFRLQLNDMGTATRSDDISGDVRAAEANLRRQLEQTLAAEPSSPLHHYNLGVFLWDRAEAEQEGDGEEARKLRAEASEHFLAAAKLNPNDGVPFRFLGHHYARGGDNQRAVKCYHRAVTLNPDDSEAGDTLCGLLDVEGKESLELAVCKEAAGKSPRAFWAFRRLGYLQVHQRKWSEGIQSLQHGIRGYPTCADLWEALGLAYHRLGMFTAAVKSYGRAIELDSSRVFALIESGNIQLMLGYYRKGVEQFRSALEMAPCNHSAYFGLASALLAWARNCVTTGAFGWAASLLKEASEASRICTSLTGNLSCVWKLHGDVQLTLARCFPWVDGKIKRVMDAQMFKNSVQEWRNTCLLAAIVQNSHINVLCILLPDEFKLNLHR

SEQ ID NO: 59404 - protein, 648 aa, Zea Mays
MGQSLRVRDMSPKSPINHISDNNRSEYHLKQRYSYSTKECPGERNLDGPSKVRGLEKDRAEILRMLDELRDQVQQSCNATNGASGIAPSTAAADSNSSHGTSDRLSQLRQVAPQLHQNGSHHSPSLNVGSPSVSRVYAPLPAQQDCVRYAEPISHARASSYPASLYPWRNFDNYFFGQHDPDPLLSCRHDGFYHQAACSCLHCCHQEFLPIQGNHIGFHDQRAPYLLNNYGAYPVDSPLLGQQRYSARVTNTTLQQNHMRVNVSKKAAQTCEPVAGGAPFTICCNCYEVLQIPRKQSLSGNEYKLRCGSCSHAIIVKLDGNRLNVSEFALCTRLSDGQENDMGTDGQTQDNRSIPAYHLSVGSPASQERDLHSNLSESENNHTPLGTDSEGTSLSRDLPAEDSAVSHVPNLPHHSHSGSSPTEHFGVGSRSTHSEPEKVILLTESSKQTSVRGICVTNKMQSPNNEFDVPEYTDDTLNDQQDTDHPRTTKASDSFLTNLIKRSFKINNGLRNRRARVYVNGFPISDHVVRKAEKLAGSICPGNYWYDYHAGFWGVMGHPCLGMIPPYIPEFNFPMPKNCAGGNTSIFVNGRELHQKDLDLLVTRGLSDSPGRSYVVENSGKVSDEVSGEELYGLGKLAPTSCLETQYF

SEQ ID NO: 59405 - protein, 169 aa, Zea Mays
MTTPGVLEVIEDLCRSYPSLTFGVGTVLNAADARKAICAGAQFLMSPGTVLDILHDLKESNVLYIPGVLTSTEVLSACSAGAKVVKVYPVSVMGGEMYMSALKKPFPLVPMVASQGIKIGSIKGYMEAGASAVVLSDAIFDSQLMRDGKFNEISELANLATLEALQFTK

SEQ ID NO: 59406 - protein, 201 aa, Zea Mays
MIYATGHISGAHMNPAVTLSFACFRHFPWIQVPFYWAAQFTGAMCAAFVLKAVLQPIAVIGTTTPSGPHWHALAIEIVVTFNMMFVTCAVATDSRAVGELAGLAVGSAVCITSIFAGPVSGGSMNPARTLAPAVASNVFTGLWIYFLGPVVGTLSGAWVYTYIRFEEAPAAAKPDTQRLSSFKLRRMQSQSALAADEFDTV

SEQ ID NO: 59407 - protein, 71 aa, Zea Mays
MNVTMTDRRAGKFEAKFYHKILQEEIGGVKGHFGPINALAFNPDGRSFSSGGEDGYVRLHHFDSDYFSIKM

SEQ ID NO: 59408 - protein, 520 aa, Zea Mays
MALNRSCFLMIQFLPHIFGCRLGQFHLALLSQVNTLHISCPEKAAHDQSQGKDNLFVSSTDIRKKQDSVVPELAPKIRNDRALPCGTLTDRRETLGGDRKRKHTKMSQDPSAFLPSKNDLLHLKSKVPATTSNVALSFDDDPLCLQQGNNTICVTEGDMDKAPSFSFPSKVSCGGNGCTSSKFASLIPFEEMVRENCLKLLNLDDDADEEKFRKAKERPHSPNLSIIRPRRTKLPTYAEPHSLGRSLNGCPALGSDAIDSKTRSKASEVKEPVIQKSTQNYIQLDPSSNTIECSGIAKPLFVNDKSNAAVNVSCSTSLVVVPASTSFDSLLHEHVAQNSVASSAEALDSISRPMLSGGGHSDSILHLSKEVSNKNNSHLICDKSSPGLQANVRTSETTVTKPNNSVSNSLLRHHHGSENPPLHLVGFTRMKRSKMINIFRYWEILSSQSQKHSDEASVDGPLLDKVSTDTMLPIDEKVSLIFSLLLWDTRFTEETFVDGNFASSAFSSSGRFFLQEGTTS

SEQ ID NO: 59409 - protein, 214 aa, Zea Mays
MMQWSQLEDANLQTKSMPSDKGTASESTTPNFAMGSMDGNISASSSPEELLEQALQYLGTGCRDQAIPLIRTAVERNPDLYTALIGMGQTLFSNRLFPEAAVCFEHAIPKIQEDDPLLVLAYFGAGLSNKRQGDNETAIKLLERLAELKEPEKPINKSRYFQGMLALASILYREGRNSEAAKYLRMAIAYDPSVERLLKECEEGMDDQPKPEEK

SEQ ID NO: 59410 - protein, 83 aa, Zea Mays
MNTIKSRLGPLKGCDLASPEPSLGQGQPTPEDLRLVRGPPQATDTPSARPRPSLRQEATLAKSPQRPTVSQEHLMQRWPDTLS

SEQ ID NO: 59411 - protein, 358 aa, Zea Mays
MGKGGGEEDGAAAAARAAEQARELQDAAAALLTQTRAEEEALRRRAAALQGELRRLREAAAAHADSDKVEEDLDRAACLIAEGDVASLLPSKTQVNLRATRKEVQLKVKEEYNSYRDRTALLFLCFPVILLFLRQWLWNGCFPVLPVQLYQAWLLFLYTSLALRENILRVNGSDIRPWWILHHYCAMLMSLVSLTWEIKGQPNCARKQRGVELFLCWAIMQGFVMMLQNRYQRQRLYTRIALGKAKRMDVVWGETAGVEGQLLLLCPLLFLLQGFEGYVGFLLLRTAHTGVVPEWQVVVCGILLIAMAIGNFANTVDTLVTKSRFKAKMKKSKGRRDLDTCPSPTGSSSPIDSATTKA

SEQ ID NO: 59412 - protein, 487 aa, Zea Mays
MGADDEAAAAMEAQEREAEIEKAMRARVADFKKQADSLTLEGVRRALEKDLDLKIYSLDAHKKFIKQCVDKVFAESADENANDDALEDSDAKDDHLSKEGTDVAKPMPVSNKMSSNADVVTSSKTGKDPEEEKNQTSSSDISEDMIKEAIEKRASYFRKNSDTLTLQGVRRTLEEDLKLQKKALDAYKNFITTGLDKILQEPANGTKKKSKNGSSKDTDKTSKGSKRVHEESDSSELNDRKSDMDNSDVDSRPRKKRAEKAKVTKKQKIVTNERKLSTPKAKKVAKQDLGSSTEEQGGNSAEEDNSHSSAEEDNKRKRQQTPAYGKQAEHLKSIIKSCGMTIPPTVYRRVKQAAENKREACLIKELQDILEKEGLSKNPSEKEIKAVKKRKERAKELEGIDMSNIITSSRRRSTSSFIPLPPPPQIEVDSDDDEDDDDDAEGNDAEGDDAEDDDEVDEENVKGRDEGDNDTAEAANGSADDAEKENN

SEQ ID NO: 59413 - protein, 56 aa, Zea Mays
MGEFTVLLCGREYFPQILAQKSRFGAVSGGFTGWCCVEARPCLRFVWVQLYNLCKV

SEQ ID NO: 59414 - protein, 50 aa, Zea Mays
MPKATIDSQQTEDPQSHAPGPNNHRADVRSATVPAFFPAEIGYDDSVIPS

SEQ ID NO: 59415 - protein, 296 aa, Zea Mays
MELKRVLVAPTAARRAPTVPPTTSGATALPPAGLGLLPPLPEAIPWPSSGVQTHVAAVEQAVVKDATKLEAPVVVVTGASRGIGKATALALGKAGCKVLVNYARSSKEAEEVSKEIEASGGEAITFGGDVSKEADVESMMKAALDKWGTIDVLVNNAGITRDTLLMRMKKSQWQDVIDLNLTGVCLCTQAATKVMMKKKKGKIINIASVVGLTGNVGQANYSAAKAGVNAIAPGFIASDMTAELGEELEKKILSTIPLGRYGQPEEVAGLVEFLALSPAASYMTGQVLTIDGGMVM

SEQ ID NO: 59416 - protein, 239 aa, Zea Mays
MDQPEENPEFPSCDAYFEAIQSKKKLPLTLQESLTAAFAQIPVSSFPEVPAGRVIEIPGDTSVIDAVRTLSEQNIRAAPVLNPEPGAPTDWQGRYLGVIDYSAIILWVLENAELAAVALSAASATAAGVGMGAVGAVGVAALGTTGPAAVAGLTAAAIGASVAGGLTAEKGVAKDGLTAADHLGEDFYKVLLQQEPFRSTTVRSIVESYRWSPFVPITLDTSMLTVLLLLRPNLFSNFS

SEQ ID NO: 59417 - protein, 496 aa, Zea Mays
MQVVVWVAAPAMIRAGLTTPVMTVLLVSFLLEYLPKIYHAARLLRRMQRQSGYIFGTIWWGIALNLMAYFVAAHAVGACWYLLGVQRASKCLKEQCLQAAGCARGSAVACAAPLYYGGSPSPGVGGGDRLAWAGNAQARGTCLASGDNYQYGAYTWTVMLVANPSRVERMLLPIFWGLMTLSTFGNLESTTEWLEIVFNIITITGGLVLVTMLIGNIKVFLNATTSKKQAMHTRLRGVEWWMKRKKLPRSFRGRVRQFERQRWAATRGVDECQIVRDLPEGLRRDIKYHLCLDLVRQVPFFQHMDDLVLENICDRVKSLIFPKGETIVREGDVVQRMLFIVRGHLQCSQVLRNGATSSCTLGPGNFSGDELLSWCLRRPFLERLPTSSATLVTLESTEVFGLDAADVKYVTQHFRYTFTNDKVRRSARYYSPGWRTWAAVAVQLAWRRYKHRKTLSSLSFIRPRRPLSRCSSLGEEKLRLYTAILTSPKPNQDDDF

SEQ ID NO: 59418 - protein, 87 aa, Zea Mays
MHWFSPGHHQEMGFYKQPPRACCGAPGRGPYNFNLTAKCGEPGASACADPKTHWSWDGIHLTEAAYLHIARGWLHGPFADQPVVQAS

SEQ ID NO: 59419 - protein, 716 aa, Zea Mays
MVHETRSRVHAAAQEEGKLASKKQKPDNETKERGQNVPSKNKKSADNEGKDGEPEAPTKSKKLKAEESEPNGREAAAREFAEFCKAIGERLSLEDMRKILQANEQDASGSEDAVVPRCEDMMFYGPLEKCPVCEGQLEFKEWKYKCTGNYSEWARCTFSTNDPSRRSGSIEVPDDIKDDFIRKWLKQQEGKEFPKRDLDEEAHIFSGMMIALSGRMSRSHIMKHGGKVKNSVLGATCVVASPAERDKGGSGGFAEALERGTPVVSENWIIDSIEKKEAQPFAAYDIVTDVVPEGRGLPLGQLDPSEEAIETLAAEVKLAGKRSVHKDSKLDKDGGCVFEKDGIIYNCAFAVCDLGCQMNELCIMQLVMVPGNRLHLFYKKGPIGHDQMAEERVEDFGSRVNDAIKEFVRLFEEVTGNEFEPWERQKKFEKKSMKMYPLDMDVGVDVRHGGAALRQLGSAAAHCKLDPSVSFLLKQLCGQEIYRYALMEMAQDLPDLPIGMLTDLHLKRGEEMLLQMRRDAETVAESGPEADAFWTDASSKWFTLFPTTRPYTMRGFEQIADNVASGFETVRDINDASRLIGDAFRSTLLDDPLSECYKKLGCCISAVAEGSEDYKMVLKYLEKTYEPVEVEDVVYGVSVERIYAVESSAFPLYEEIRNLPNKILLWCGTRSSNLLRHLHKGFLPAVCHLPVPGYMVGNPPVTIMPCHPGRKEIYNY

SEQ ID NO: 59420 - protein, 252 aa, Zea Mays
MRSCPEWEPENFTVAAALLGKPLVPLGLLPPSPNGGRRREEDGGSTARCWLDAQPPSSVVYVALGSEVPLTVALVHELALGLELAGARFLWALRKPSGVADDADVLPPGFRERTCGRGLVAMGWVPQMSILAHGAVGGFLTHCGRNSLVEGLLFGHPLVMLPVVGDQGPNARAMERTKVGLQVARNGKDGSFDRHGVAAAVREVMLVEEARKVFVANALEMQRVVADKERHERYIDEFIRQLRSYSTPPAAS

SEQ ID NO: 59421 - protein, 105 aa, Zea Mays
MNYFMLAMISSFHFSFLITETIYLIFFVLHFNDMFLSSCTTCYTMFSILFKCIPNVIPYKNSDKGNRLNVMDTYTKRINLCIFPVSLFFDYLLQRSGIICENIYK

SEQ ID NO: 59422 - protein, 542 aa, Zea Mays
MVRVQQLSELEEVIDYCTLPMESPIADGRRELIRNMWNERIKGTKRNVEVWQALLAVRELVLPPNEDRDTWIKFAELCWKNGRISQARSTLVKLLQFDPESSPELTLYHAHPQVALAYLKYQYAVGDELKRRDAFSKLQELSVQVATTMGNLPGTSANHGTMSNAGVPLIARVYLTLGSWKKALSPALDDDSIQEILISYHNATLSAKDWGKAWHIWALFNTEVMSRYTFRGRPDIAGKYVVAAVTGYFYSIACASTTKGVDDSLQDILRLLTLWFNHGDTSEVQTALQKGFSLVKIEMWLVVLPQIIARIHSNNRVVRELIQSLLVRIGKGHPQALMYPLLVACKSISILRQRAAQEVVDKIRQHSGGLVDQAQLVSKELIRVAILWHEMWHEALEEASRMYFGEHNIEGMLAVLEPLHAMLERGDETIKENAFIQAYGHELLEAHECCLKYRATGEDAELTKAWDLYYHVFRRIDKQLPSLTTLDLHSVSPELLKCRKLELAVPGTYAADSPLVTIEYFVPQLICYNVQTKAKKADNSWK

SEQ ID NO: 59423 - protein, 992 aa, Zea Mays
MGNIFLKENDFHIDKYTLHTGKNWRFDTSRSSQFHPSLDPAILEADAHRALLLLLDILRTAYAHRGSFLVGTINSLAAVVKIRPIYYDRVLPVLLDFDPGLETAKGAHSASLRYAVRAAFLGFLRSPHQAMIESKDILVRRLRVLSPGEAMEQNIRQAEKMSRNIERASRASKDESTSWEMPYGDINRKKPAVRSSDTFTTSDGIAKRARFDMSATSNLPVLGLSDYSDMQADNDASVGHSSDPAILNNEVSPVEKMIEMIGALLAEGERGAESLGILVSTVEADVMADIVIETMKHLPEASFHLATNNGVQQLNFKYSSGLVTQNLPANSDSTLFTAQSTPTADGVSISPSDAFVMTSVHDAKRDPRRDPRRLDPRRIVSSSAVNSIQVKMETNSVHQTDNLSNTLYSNSRKAENYSDYQGDLHKNEGEQQSASQPNQTIAKDKLELLDVVTEPEPTFEVEAPVDVRIHSSDVDEDIVKPMSSVVNSLDESDSMDLEVDPFLPAPKAPTPDDTNDDLPIITSQLELSEKGKISINKLAIGRILDDYKKNSFNARFSLLAHLIAQSAADDNIMDLIQRHIIFHSHDQEGYELAMHVLYQLQSISVANSPESSTSTSKHYEKFFISLARSLIDSLPASDKSFSKLLCDAPYLPESLFRLLEDLCMSEDNSQQLKDGDGDRVTQGLGTVWSLILGRPPLRHVCLDIALKCAAHSQDEVRGKAVRLVAKRLYDLTYATEKIEQFAIESLVGVANEHTVDTDINSKSLKESTAEIEVGSQGTSVSGSQIPDTEFSENGPFKTSSVSTKQSAVSVSEAKRRTSLFFALCTKRSSLLQHLFNAYGRSPKVVKQCIHWHMPNLIRNLGPSCPELLNIIHNPPEGSEHLITLTLQTLTEDSNPSADLVAAVKQLYNTKLKDASILIPLLPSFPKEEVLPIFPRLVDLPLERFQDVLARILQGTAHTGPALTPAEVLIAIHDINPEKDKVALKKLLMETHF

SEQ ID NO: 59424 - protein, 518 aa, Zea Mays
MFFTSPKLIQALASHGQSTTASSISMDACSLVHCHLPRPLQLPLLAPPTPSRHRPRVASALVCCCCPAAAADHHQERPWEWYDRAIQSHAGSDLARSLGLLADMQASGGRPSGSAYARLIRALSRAGRALEAEALLLEMRRLGPRPEAAHYNALLEGLLAAAHLRLADLLLLQMADDGVARNRRTYTLLLGAYARAGRLEDSWWVLGEMRRWGIRLDTAGYSMLVRLYRDNGMWKKATDLVMEMQEVGVELDVKIYSGLIDTFGKYGQLADARRMFDKMRAEGVRPDISTWNALIQWHCRVGNMKRALRFFTSMQEEGMYPDPKIFVMIISRLGEQGKWDEIKKLFDGMNNRGFKESGAVYAILVDIYGQYGHFRDAQDCIAALRAENTQLLPRVFCVIANAYAQQGLCEQTVNVLQLMEEEGFEPNLVMLNSLINAFGTAGRHLEALAVFQHIKDSGMSPDVVTYTTLMKTFMRAKKFEKVSEVYREMERAGCAPDRKAREMLHDATVVLEQRGCIY

SEQ ID NO: 59425 - protein, 149 aa, Zea Mays
MSMAEEGSEAEEGSEAEALEKDGSKASSPSGPASRLVSSNAAGVGSLEVGAATDTSNASRQGLDLGKKGPGAMSMAEEGSEAEEGSEAEALEKDGSKASSPSGPASRLVSSNAAGVGSLEVGAAADTSNASRQGLDTTHMHSMPAARFT

SEQ ID NO: 59426 - protein, 53 aa, Zea Mays
MRRVPLWCERRRAIARTPPVPSALLVHGHAPWVQVNPQTHNQGPGNPADGLPA

SEQ ID NO: 59427 - protein, 139 aa, Zea Mays
MQVTAARFPSISSTHSLQEGMAAMPLMALKTPTVLPLSTTSLPPPSLYKTRARAHGADSWSPQPLHDLSLSPAVENRCRFAARRRSTSGAEADAAPTTPTAEVVPCFPLLLHRSSHPAPLPTPCSSISSTRKNQGSESV

SEQ ID NO: 59428 - protein, 104 aa, Zea Mays
MLHLPSHGSAPGRPLTQLQHPLAASSRSWLQIPQMGPRPCASRSSPPSTSCTPRCMATLLPSASSLPAPSSTNPPCTLVVPASPSASSDTTPTPSLSRPQQSGA

SEQ ID NO: 59429 - protein, 672 aa, Zea Mays
MEAALGALCRAGGWSYAAVWRFHPQDPRLLTLGDCYCEDEAKAMVQKMLNLVEVVGEGILGQALVSGECQWIYDDTCHALNQISHADNGDLHQGYTWWQHQFLSGMKTIAVLPLQLHGLVQFGSTRKVPRSSVFLNQVRDIFDRMKNASSDGPMEYTQNNSLACAVSGKVKDCLQTESDKFLCKSVSFGSNPCASKFQENRLSPYHALMHEQSLIPDPGESVRLLSQEESFIVQGDSSQFKDTADFTGQGNSTFPELPNRSPEEATAETLENNMKDCSGNNSLLETMMLDLSTNSFVQDWWDNSVLLAENLPNSSEKDPEPAMELANRHSLPTGERGSPFIPVIEQLLGDVAHPPTPTGHSSLEAEATALAGRVSDYQLPQFAFRDCLTVDNAQIPALACSNYTCRTRSAQNGSSEVPSANVSVDDTCSLNTANSNGSQSSNPEGTKVAKRRARAGESTRPRPKDRQLIQDRVKELREIVPNGAKCSIDALLERTIKHMLFLQSVNKYAEKIKQADEPKIIDKGSGVILKDNPVAGTNGGATWAYEVAGQTMVCPIIIEDLSPPGQMLVEMLCEEQGLFLEIADNIRGIGLTVLKGRMELCDGKIWSRFLVEANREVTRMDIFLSLVQLLEQNSLVRSTDQMAKVMNNGVPSFANHQRSPLLVPVGIPERLQ

SEQ ID NO: 59430 - protein, 520 aa, Zea Mays
MAETIFSQLLLLPNPPFKPIYYTLVIIDLCKALPGAFPSVVVGAVHALFDRISNMDMECRTRLILWFSHHLSNFQFIWPWQEWSYVKDLPKWAPQRVFVQEVLEREVRLSYFEKIKQSIEDAAELEELLPPKAGPNFKFHSDESNESTDGLKLSKELIGLIRGKKSTYDIILWVEEQIIPKNGTEFALDVVSQTLLDMGSKSFTHLVTILERYNKIISKLCPNEEMQLLLMNGVSAYWKNSTQMTAIAIDRMMGYRLISNLAIVKWVFSPANVEQFHVSDRPWEILRNAVSKTYNRISDLRKEIQSLKKGLQVAKEASAKNRKELEEAKSVLEIVEGQPAPAERPGRIRRLESHVKNAEDEERTLEESLEAKGVLLARAHEESKDLLKLLFKSFVDVLTERLPPVSVDGEIPNLRSGDQNVNFAAQNSEAATMEIDNENGADNNSEPNERNTKNAYNVGELEQWCLCTLGYLKSFSRQYASEIWSNIAMLDEVFVGDVHPLIRKAAFSGLRRFTNEGSHP

SEQ ID NO: 59431 - protein, 223 aa, Zea Mays
MAGAIVGRLGRHPTSLLLLTLPRHAAAHHRLHSPSSSQGQYSKMGDPSERNGHGALTRVLFCGPYWPASTNYTREYLQDYPFIQVDEVGLEQKEMDTAVNRKDLGVPVGDTLFGKTILILGFGAIGIEVAKRLRPFGVKILATKRNWSSDTLPSYVDELVDKKGGPEDMYEFAGEANIVIACMTLTSETIGIVDHKFVSSMKKVHACFCHTGLHVIRSVGSFR

SEQ ID NO: 59432 - protein, 242 aa, Zea Mays
MGEKDDGSDSIAVQLADETHWNDLVIIIAVVSSKQKETSSTSGMRDSVETSPLLQYRAQTVVPGRVLKMEEAIKNRDFESFAKLTCADSNQFHAVCLDTSPPIFYMNDTSHRIISLVEKWNHSEGTPQVAYTFDAGPNAVLIAQNRKTAAHLLQKLLYYFPPQDNDLSSYLVGDKSILGVAGLHSMKDVEALPAPPETKIPDQKFKGDVSYFICSRLGAGPKVVSDEGQALIDSVTGLPKGV

SEQ ID NO: 59433 - protein, 668 aa, Zea Mays
MRCLAALARWEDLSALCREQWTGAEPSARLEMAPMAANAAWHMGEWDHMADYVSRLDDADENKLRMLGNATASGDGSSNGAFFRAVLLVRYKKYDDARMYVERARRCLATELAALVLESYERAYNNMVRVQQLSELEEVIDYCTLPMESPIADGRRELIRNMWNERIKGTKRNVEVWQALLAVRELVLPPNEDRDTWIKFAELCWKNGRISQARSTLVKLLQFDPESSPELTLYHAHPQVALAYLKYQYAVGDELKRRDAFSKLQELSVQVATTMGNLPGTSANHGTMSNAGVPLIARVYLTLGSWKKALSPALDDDSIQEILISYHNATLSAKDWGKAWHIWALFNTEVMSRYTFRGRPDIAGKYVVAAVTGYFYSIACASTTKGVDDSLQDILRLLTLWFNHGDTSEVQTALQKGFSLVKIEMWLVVLPQIIARIHSNNRVVRELIQSLLVRIGKGHPQALMYPLLVACKSISILRQRAAQEVVDKIRQHSGGLVDQAQLVSKELIRVAILWHEMWHEALEEASRMYFGEHNIEGMLAVLEPLHAMLERGDETIKENAFIQAYGHELLEAHECCLKYRATGEDAELTKAWDLYYHVFRRIDKQLPSLTTLDLHSVSPELLKCRKLELAVPGTYAADSPLVTIEYFVPQLICYNVQTKAKKADNSWK

SEQ ID NO: 59434 - protein, 273 aa, Zea Mays
MGSGSLLKVFANNFDVLAGPLVALAYPLLPFWPSMKLIFICWLVLPYFNGAAYVYQNYVRPAFIKNQMVNIWYVPQKKGLLGKSDDFLTALDKFIEENGTDALKKLANKAGKPFKQSGKSSKDQKETKSSKDSKEPKPSKDAKQPKPSKDTKEPKPPKVSKSPKDSKEQKKATLKDPKKAPKDSKGLKKALKDPKEQESLEDPKEHTAKKAGKRVTFAEVEPEKELKASNSDWHPSSDFHAAYPEQNPWASGFMIFEDENSYWNRGPLDWRSC

SEQ ID NO: 59435 - protein, 89 aa, Zea Mays
MSGADTSASKKTKTGIVPFAALYWFNQMCCPCACLYFKVANAKFVYIIVYALRYLRSKNLYCFVAGAILLVYYIYALNCYLYYSIKNII

SEQ ID NO: 59436 - protein, 145 aa, Zea Mays
MDLPRNQTPLNRSHHQRTTIRVLLRCSSTTEAQSEPHRLARTERTTREKLMGRNRKVKKRQFLQLQNQVRLPRRARMTMILMRTRLMILTRTRQTILMRVRVCLLKKAMMMIQVMKMIPVTMRRKTLQLLRSMRQARRELLKVSC

SEQ ID NO: 59437 - protein, 1362 aa, Zea Mays
MAAIDRVVFALNGQRYEVGGVDPSTRLLEFIRTQTPFTGPKLGCGEGGCGACVVLIAKYNPKTDEVTEFTASSCLTLLYTINFCSVITTEGLGDSQYGFHAVQERMSGFHASQCGFCTPGMCMSIFTSLIKADKSKRPEPPKGFSKLKVSEAGKAFSGNLCRCTGYRPIVDACKSFASDVDLEDLGLNIFWKKGDRNPDVSELPSYTLGGGVCTFPDFLKTELKSSLDHLNNPCIAASGEGWYHPKSIKEYYELINSCLFSDSVKVVVGNTSSGVPGYKDQDIYSKYIDIGGIPELSNIVRMGSGIEIGVATSISRTIEILEEECESISSPNGSVVFRKLANHMSKVATPFVRNTASIGGNIVLAQKFPFPSDIATILLGAGATVCLQVVAERRQITLEEFLEQPPIDATTLLLSIFIPNWISDSGANISLLFETYRAAPRPLGNAVSYVNCAFLGHASLDEQSDTLVLSNLRLAFGAYGTEHAIRATRVEEFLTGKSLTASVVLGAIQLLRETVVPMEGTSHPEYRVSAAVGFLFSFLSPFSKCIPEPGKSLASSSTDSADTDDVRNLPLSTRRETFSSDEYKPVGEPIKKYGVELQASGEAVYVDDIPAPKNCLYGEFIYSTQPLAYVKSIKFKSSLASEKIISFVSAKDIPSGGLNIGSSSTFGDEPLFGDPIAEYAGQALGIVIAETQRYADMAAKQVVIEYDTEDLSPPIITVEQAVEKSSYFDVPPEFYPKEVGDVSKGMAEADHKIPSTEVKLASEYYFYMETQTALAVPDEDNTLVVYSSSQYPELAQSVIARCLGIPFSNVRVITRRVGGGFGGKAFRSFQVATAAALCAYKLRRPVRMYLNRNTDMVMVGGRHPVKAHYTVGFKNDGNVTALHLDLLINAGISPDASPIIPGTIISSVKKYNWGALSFDIKLCRTNNSSKSVMRAPGDTQGSLIADAVIEHVASVLSLDANSVREKNFHTYGTLQSFYPDSAGEASTYTLHSIFDRLVSTSSYLDRAESIKEFNSNSKWRKRGISCVPLIFKVEPRAAPGRVSVLKDGSVVVEVGGIEIGQGLWTKVQQMTAFALGRLWPDADGGGECLLGRVRVLQADTLNLVQGGLTAGSTASESSCAATLQACNTLYDRLKLVLDRLQQRSENVSWDTLVSQAYEDDVDLSASAYWVPGQASNKYLNYGAGISEVEIDLLTGAITIIRGDLVYDCGKSLNPAVDLGQIEGSFVQGIGFFVYEEYTTNSDGLMISNSTWDYKIPSVDIIPRQFNAEVLNTGYHKNRVLSSKASGEPALVLASSVHCALREAIRAARVEFADSTVSSGHSPLEFQMGVPAPMTLVKELCGLDIVDRYLEGLSTCERAAGGA

SEQ ID NO: 59438 - protein, 496 aa, Zea Mays
MEVDGEAQHFRLFSKRAKPKLKPEVQPQPEPEPPSRDPAAAEAYLDPAPTIVTETGQADDAADAAGTAPATFADLGLSQWLVDACEALGMRRPTAVQRRCIPRALAGADVLGIAETGSGKTAAFALPILHRLGEDPYGVAALALAPTRELAAQLAEQFRALGAPLGLRCLAAIGGFDSLAQAKGLSRRPHVVVATPGRIATLVKNDPDLAKVFSRTKFLVLDEADRILDVNFEEELRVIFGCLPKKRQTFLFSATMSDNLRSLLELSGNKSYFFEAYEGFKTVETLKQQYIHVPPQGKELHLWHLLSVMKGKTEDPIRSAIVFVSTCKDCQYLDLLLEELRYPAVALNSHKSQAQRLSALNRFKSGQVPVLLATDVGSRGLDIQTVDLVINYDMPMSPRDYIHRVGRTARASRGGLAISFVTQKDICLLHEIEDVVEKQLEAYECSDKEVTKDITKVFKAIRLSKMRRRDEGHDEKVEARKEQKRRDRARKRKHED

SEQ ID NO: 59439 - protein, 149 aa, Zea Mays
MVPRRWGASSHGSSARISPRSRARRSRRPRPTGPSSMACTSASSAPAAPPPARPTGGTQRSTSAQPRCSTPTGEQGFSRDAGLAMEAIHSLSASKSSYPMVDLTQLFKQQNISLCVTEFFMHSGFGSIHYVPHNEVFHAYSVAKDDIFS

SEQ ID NO: 59440 - protein, 58 aa, Zea Mays
MPAENIDRSLVTELLLIGLDRIFNIMVLVHSSGFGEPKFLLYISDQQSRMYQCITFFS

SEQ ID NO: 59441 - protein, 87 aa, Zea Mays
MGDLGKTGASLDGQEVKTVVCAAGALTKLQKQTNLGSLAHWCGSSKRKPKTGISPTSRNGYRLELSALTRESPVCAVSMLYLFFEFY

SEQ ID NO: 59442 - protein, 191 aa, Zea Mays
MVGSVKRWQKSDSEKCKDTWSKLAFANSALENQLRILKGLSENHREAYESVVLSCSHLTYEKWTEVATNQHQELIIKSLLAARDACLEIRLHMREMGIAAGVPIEPDSQTRLLDATMNMEGVLLAGVPGAGGFDAVFSVTLGDASNAVANAWSSAGVLPLLVREDCRGVSLEDADPRTREVSAAVSSIQIN

SEQ ID NO: 59443 - protein, 740 aa, Zea Mays
MAVVNPTNLAIDDDDDDTPISFKRTSNSTKTARPTPSKHEGSSGGNGAPVRIPKPVSPNPQKNGATGASRPLHMKPPSSSPNHRPSGSGQPNSLAQHSSKANSIDMSKLKRPLVKDERSDDSDDEVPIGLRRKVEEKKLKGVDTRVQKTDDSDDDDKPLGLKINSSRMSSNRVNKPVLQRTVPKVEQPDEDSDDDKPLASRLPSNAGPKSGGDVSEDSEDEKPLAARFSKVAGSGNPKIASSSKGLTSDTNGQQSLGKRPLDNSNQTSSALKKAKPSNVSASAIVRREIKTDDNTPLAQRLKMGESSKGKSSAKSVFKKSPASVKKDIKKMKGKGKLKKNMKNSQFSKIMKVPPGSGGGKKWTTLEHNGVIFPPPYKPHGVKMLYNGKPIDLTPEQEEVATMFAVMKDTDYAAKPTFIDNFFTDWRKVLGKNHIIKNFELCDFTPIYEWHLREKERKKQMTTEEKKTLREDKLKQEEKYMWAVVDGVKEKVGNFRVEPPGLFRGRGEHPKMGKLKRRILPSDITINIGKGAPVPECPIPGESWKEVKHDNTVTWLAFWNDPINPKDFKYVFLAASSSLKGQSDKEKYEKSRKLKGHIQRIRENYTKDFKNKDVTRRQIAVATYLIDKLALRAGNEKDDDEADTVGCCTLKVDNVTCMPPNQIQFDFLGKDSIRYFNTVEVEELVYKAIEGFRAGKKPGQDLFDKIDTSRLNAHLKDLMPGLTAKVFRTYNASITLDGIVS

SEQ ID NO: 59444 - protein, 1151 aa, Zea Mays
MEPSSPATTATFPAAVEEHETYPPMVSSSLFPLFPFAASTSSAPPAESQWLSNPSFSFDASSLNIPATTSSSLPSPQSHSSDEDTPLQAAPAKYELVPSSPSSDEERGSRRKRSGRRKRKREKERYDGAATSRKAGIRAWAGLETKPAKDYYVDAKGDHDNLAFGSLYRMDVARYRSQNMMEAFGLNHLRFGSSHIDLDSDLDGMDNKVRAGGRYYSAKNAVSERNKGFKHLKIFKGNTSVMLAEDFVPFGTQSLPLKSTTVEQELEESWEDEILRRTREFNKMSRERPHDEKVWLAFAQFQDKVASTQPQKAARLQTTERKISILEKAVELNPDSEELLLCLLKSYGKRDNTETLLTKWEQILTKHPDSSTLWKQYLLLCQGEFSRFKVSEIRKSYVYAVQALSAACTKLCRQDNKSMDSKSSSLVQLEVGLVDIFVNLCRFEWQTGHRELATGLFQAQMEFSLFAPPLYLTTSSKQRLFEHFWNSGGARIGEDGALGWSEWLAKDEESRQKLSMQENSQETETGGWSGWFDPSLGNTETNDLSNKSLEPSLTDGNDAEDLDAEDSPAQDDVESLLKKLGIDVDAESNSEVKDAETWNRWASMELSRDNQQWMPLHENYGSIHCGDAPSGEDNDQLSRVILFEDVTEFLFSLSSEEARFSLMCQFIDFYGGKISRWTSTNSPSWLDRILSLENITDDILEDLGAVSDVVNKNQSSYSCKYKLESLLGSMCDLSQRPGLMKFLKNAILLLLGVFPRNHILEEAVLVTTQMFTPQENSSSIQTNASRALAKSMLKKDRQDFLLCGIYGRTEAMNGNIEQARKIFDMALLSTEATSEDLRKKVPILYLWYAEMEITVSASRNNSDSMHRAVYILSCLGSNLKYSPFVGPISRLQVLRARQGFKEQIRSSRSAFSCGAINKESVALICSASLFESMTTGCYSGLEVIEETFPMTFSESNNLECEDLWVYYIKMLQKNLNQLNLSRVWPSISRGVHKYPYNPKSYSATLTLSYLYSVSNNLRLTLDKCSQRDPSVITLLFALSFEWGKAGSDNRIHSLFERALADDKLQKSVLLWRCYLAYEAEIVCNSSAARRVFFRAIHACPWSKRLWLDGFQKLGSVLTLKELSDLQEVMRDKELNIRTDIYEILLEEETNT

SEQ ID NO: 59445 - protein, 508 aa, Zea Mays
MALWNGIGQVASIAQLAGVDAYGLISMIVEAAKTVKRNRETCQLLARRARMIGDLLHQLERTQLMQHMETRNPVEHLEETLRHAYVLITSCRNSSYLYNCCMGGKQADRLREVQNEITFYLQLFPLVSFVDNTRTWERLLSRACPLCTTENMDELHAAAHHVEHEDGSEAIKATKFENLGSHPTLKPDIDQMEGQVMRMGGLVNLIGGTKGAELSCFTFSHILAATDNFSEKNLVGKGGFGYVYKGNLINGLNVAIKRFDACSSYQGPHEFRTEIDAIPNLRHKNIIGLLGYCVQGEESILVYEYMSNKCLASVIADETKRGLLNWSKRLQIIKGIADGLAFLHGHSQMCIVHRDIKPSNILLDHEMNAKITDFGLALMLAPKSTAEVPVLGTYGYADPEYIVTGKISEKADIYGFGIVLFEIISGRSIHSYMKAEGTRELPYPAYAHKYNPKTLHKLVDPLLRVDEHERAQIMECVRVAQLCVDHRAKHRPVMSEVVTMLGMAASKG

SEQ ID NO: 59446 - protein, 236 aa, Zea Mays
MKISNYANIVLLALKVYATIKSGSIAIAASTLDSLLDLMAGGILWFTHLSMKSINVYKYPIGKLRVQPVGIIIFAAVMATLGFQVFIQAVEKLVVNEAPDKLNQVQLLWLYSIMIFATIVKLGLWLYCRTSGNKIVRAYAKDHYFDVVTNVVGLAAAVLGDRFYWWIDPIGAIVLAVYTISNWSGTVWENAVLTAYTCTHLHPSNHTHEKEVSLAQLVRLEVWSYTQPTRFKSSPA

SEQ ID NO: 59447 - protein, 407 aa, Zea Mays
MCTLCAVQRWSRRVATMLPWLVVPLIVIWAATQLLLPAAYRFEVSPNVQPHPTGLKKSWHQLFIRSASVAPYPDVTTSAHDMIRKPEPNGAQINNAHTFLSQYPPLDCKPSSSQSMQYPGFPPLNGAPPSNPLFHFSAGHMPFYDDAESTLLEESEQFEDPCYDPDAIALLGPVSESLDNFPPDLDCGFFSSDVAKEPHGWPSPIESPLSRSHTVEEKLTKPSHSSVARGSGGPILPVTSSEQGTWQMWSTPLVQESLGLQGPQSQWFQQNTNQFNHSANLFSSGGRARSPLGTGLNDSDPWLQKAPFQQLPPDTSSLFLSHEMPGKLHNDLAFGSPNKSAREHPFGPPGYLLPKEELVLDGAQEGGGGHVLSPSGAHVGLFSPTSPDVQPLWPFSEKREHRTNRLL

SEQ ID NO: 59448 - protein, 294 aa, Zea Mays
MEQELDRQVRGIELIASENFVCRAVLDALGSHLTNKYSEGAPGARYYGGNQHIDAIERLCHERALTAFGLDPACWGVNVQPYSCTSANLAVYTGLLQPKDRIMGLEPPSGGHVSHGYYTPSGKKVSGASIFFESMSYKVNPQTGYIDYDKLEERAMDFHPKILICGGSSYPREWDFARMRLIADKCGAVLLCDMAHISGLVAAKECRSPFDYCDVVTSTTHKNLRGPRGGIIFFRKGKNLRKRAGSFSQGDENEYDFEDRINFGVFPSMQGGPHNNHIAGLAITLKQIGYRWHR

SEQ ID NO: 59449 - protein, 356 aa, Zea Mays
MEEEEESASSGSSTSAAASGCSRPARPGSPWTRARPSTSPCRRSETSLLRSGGRGPMFLIGNRNSKLTQILSDSLGDGSKVVMVVHVSLSEDDVGETVCSLNLAKRARSIEPNREIPQDLKTLKQKRVAELDREIRAAEEELKRLDEQIRRAEEKEISLEEEEEEEEEKKLFASSVCQALSDDEKGSPRSTLVVVGHTDAAESPRATTEKAKGRRPPPARGHGGSAAPHFMSSTVCSRQRRCAGGYHSVGNGKPRLTAVSVNRYPPPAAELSGSQNAAARASRSASVALSSGVHKLRCLRVNKSDQVNVISNSSVDSTAASAPPPRRRESCFGSRPVLQRAAAPLHLHRRRMSSLT

SEQ ID NO: 59450 - protein, 283 aa, Zea Mays
MGLGAAMALGDPPADYASIAAVGLFVALMCVGIIVGHLLEENRWMNESITTLFIVLSQDETPFLYSLVFGEGVVNDTTSVVLFNAIQNFDPGNISGAKLLNFISSFLYLFGSSTILGVASGLLSAYTIKKLYFGSPVKSIALSNTILALVLVSRAAFVFPLSFLSNLTKKTPNGKISFRQQVIVWWAGLMRGVVSIALAYNKAFDLMFPRFCGSARHFGRCARHFGRDIIMPNLKSSVTTTASAVEYMDEVLKALPLGEARNEDSRTLQFNYGSFKHKGFLKH

SEQ ID NO: 59451 - protein, 934 aa, Zea Mays
MHWDGRQCPKIQGGVVRINCIMDSGNSSCSRTRSGLVRKKDTFALSRSSCSRTRSGLLRVKSSVDSSDVSSSRTRSGLLRIKSFLDSHDGSFSRSQSDHVGGSPPIVEAINDESVLKESPDRLMKEEMPVTTPNGLVRQSFTEQAVTKDKSGMRTLLDGCLSEDMPSRTRSGLVRRSPTVKTLSKDKSVIKGLADGCLKEDKPLGTRSGLVPIKAEVLTKGQHDRWLKNDKAAAMRSDHGGRRLAAKTVSEDKRGVEGLPDGWQKEYRPRKNGPCSDPYYIDPVSGYEFRSLKDVHNYLETGDISQCAVTPKKSTICEDITESQTHTSTSPQHMRPGTANKGIQCEILTSDGIMAPWEDNGNDTEHTMLPEPESLKATQGYGNKLETSEPTRVQPVSPHNGSRQTKSVKRKESNAEVKSKKRKTSSAVTRVRASPRLAALNAHLDVSIEHEDDMVSTNHVDWVQTIEERAIDQAQKSQSGSFDQIHGNLESTFSQLQLSQADPANGMQVIQANTTIHSQPSQLDTLSPTQKKQENSSKQLQSVVTDSSIPKRTTQKCTIDQPSQPDINHIRTDQEFTGNQFPSSLPVDTVISLGDTEEFTAGHSQPRNSDTAGQIQANEENTADQVQLSLAETVILVPAIQEYAAGYSLLSKADTTDQTQANQEYIADQVQSCLTDALIPVKAIEEYTTDYSHISKADITNQIQVNQESTDDHLYLRQVDCLAEMQIIEQNLSKQPQLSQPDTGDQIRIDLESTTNHLQPNYDENSMLQSGFSWAPEQNRGAPTTDFWKNVESQASSVSMPINGAPLSSFPANVRFQNAAAAAAAAEPALPPQVAPTETGSDQSGLAFQSLFGNIWSDPCIEFAFKTLTGDIPVLDDTTAVTDYFPEQQDLNKDPAPNCAGSVFDSSRNHTQVDVNLPPPAPDGFYDGSWFPPQ

SEQ ID NO: 59452 - protein, 261 aa, Zea Mays
MCDLLRINTDRGVMIADGKSRFSINGKPIYHFVGTSTFSEYTVMHVGCVAKINPQAPLDKVCVLSCGISTGLGASINVAKPPKGSTVAVFGLGAVGLAAAEGARIAGASRIIGVDLNPSRFEEEFVNPKDHNKPVQEVLAEMTNGGVDRSVECTGNINAMIQAFECVHDGWGVAVLVGVPHKDAEFKTHPMNFLNERTLKGTFFGNYKPRTDLPNVVELYMKKELEVEKFITHSVPFAEINKAFDLMAKGEGIRCIIRMEN

SEQ ID NO: 59453 - protein, 985 aa, Zea Mays
MARGGGGRSKKEDEEELRGAKRGYKEASAEGNREEEARWANVIGDIYKRRCEYVEALRWLRADYEVSVKHLPQRHLLPSCQSLGEVYLRLGRFSEALTYQKKHLQLAKESDDLVEQQRATTQLGRTYHEILLRSENDHSAIRNAKKYFKSSMKLARILKERSPSQKSDFLKELIDAYNNMGMLELELDNFEEAEKLLIQGLKICDDEEVDSYDDARTRLHHNLGNVYTELQNWKKARGHIEKDIEICRKIRHLQGEAKGFINLGELHYRVQKYDNAKLCYNKALEVARSLEDEDALIEQIHQNIETVTKAVEVFEQLKEDELKLKKLIRDTSNARGTSKERKLLLDQHAWLDSLIEKARMICAWQKHKEFSKGKKRVANELRDKEKLSDSLLSIGESYQKLRNFSKARKWYMKSWNIYRSIGNLEGQALAKVNIGNVLDSCGDWAGALQAYEEGYRIAVEADLPNVQLSALENMHYSHMVRFDNIEEAKKMQEKIDNLKQTLNQCEARDTVSDYCSETDTEGGCTSDNTLDAQNDHGQAANNYEEPDDDVTLASLVQRSGSSSKIKVPKIRNSSKKFDELCDVTEDIHNSSKKVDELGDMAEGTRAVLSRSRSDHSVGRKRVRVILSDDESDENHENVQFKKTSTSPADSMSVSDHGASSSRNQDTLQVNQTRDAPYPAEESICSFKSSSPIDHAFEGIGLGASSAGKGPTSKSAASFSKLSTPGSNSLNESQNAVGSQSKDADNHFWAFRIGGHLVYLDGRACVHEGAFSIDSLKVEVACVYYLQISDEKRAKGLLPIIGELKFRGKVLEDAVSIYYDDQLASEQKCVDVVIDDWVPKQLMKLYVDFCMKSLEAPNKKLLTKLYNLEVSEDEIIVSDCGLQDMSIVPFLDALRSHKTIAVLDLSHNLLGNQTVERLQHIFASSSHTYGGLTLDLHCNRLGPTALFQICECAVLTDRLEVLNLSGNRLTDACSSYLFTILKKCKA

SEQ ID NO: 59454 - protein, 877 aa, Zea Mays
MELKHERFVAFVDRLILKLGFSEVVLGIPGNIQSATSQSIDITSPVSSLSRVWVAGEVLCTWTWKGGCALKTFLPLLVQYMKDESYLEINIVPLLLDTLLGGALMHDSGPWVLFNAWHLSDNEIDKIQDRFLRALVALLFTINTNDCLWRESDALVFFEQLLSNLFIGSSVNRKCLKILPYVMTSIIKQFSALNNGDSSYADLVRKSIQSWLDATISCLSSSSREVPVQDIEDWMQVVLSCFPLRITGGARELVAVVEREISDTERSLMLTLFQKYQIFYGSTASSLVTSGTAVSTTVELLGVKLTAVLVGYCWSNLKENDWHFVFRMVFKCIESSVLLVEEMTDGINDATINQVSSEDALEKLKLVVGTTDKLTLSLAESALVTMCQLNHLCNIQEAENSQCVQLIKSGDYAESNDKMVESVLRLFLASGVSEAITKSCSEEASSVIGSSRHAYLHFWELVASFIKNAPLQSRKSALESMELWGLTKGSVSGLYSILFSSQPIFHLQLAAFSLLLSEPFCQLSLVKNYSMGESCSSAQQSGTSQSAELMPDSDKTVHLREELSDLIEFPTSELLKTDLTARDRVDVFIAWSLLLSHLQTLPASSSIKGDVLQYIQEKHIPVKAAAPNGKKKDTELAPEAEAAAKASKNAIATCSLLPYLESLWPIGTLQMASLAGSLYGMMIRLLPSFVRTWFTTLRDRSLSYSIESFTKQWCSPPLLLDEFSQVKESVYGDENFSVSVNRSAFEIVATYKKEETGIDLVIRLPSCYPLRHVDVECTRSLGISEVKCRKWLLSLTSFVRSQNGAIAEAIRTWKSNFDKEFEGVEECPICYSILHTSNHNLPRLACKTCKHKFHGACLYKWFSTSNKSTCPLCQTPF

SEQ ID NO: 59455 - protein, 844 aa, Zea Mays
MYASPPSAGGMWSQPRRNHDEDYATARDHRSHRDFGADRSKRIGSRERAEFHGEFEDRYRSSHQSREDSYERDHEYGRYGYDSDYERGKRDSSWRRRDSCDSERERSGLSREREESPYTRHSRSRSHGRDDRSRSRSRSRSPRPRSHGRNQRDGLYYDNRFDRRREYDWDDRGHGDSVAPSATVVVKGLSLKTNDDDLYKILAQWGPLRSVRVIRERNSGMSRGFAFIDFPTVEAARRMMEATGENGLEIDGRNVFFQYSKPTGGMGGPSLGQENFTRPTYGHRTAAAPCDWICTICGCMNFARRTSCFQCNEPRTEDALPADATGSASHFGRRGSELGPTHVLVVRGLDENADEEMLRYEFAKHAPIKDIRLVRDKFTHVSRGFAFVHFHSVEDATKALEATNGITLEKNGQVLRVAYAKSTHGPASGGSQSNSLAAAAIEAASFAQQYDAIGWAPKEYNPDDKQNNNSESQKDGSTAQSGFVWDEKSGYYYDSASGFYYDGTTGLYYDSNSGVWYSYDQQTQQYVPCNDQSNTKAAGEAASENTKTSDSNSGKKVVISAPAATIKQSEKTSLPDAVQAAANAALAAEKREKEKAKEIKLASKNSLIANKKMSNVLAMWKQRNQEGQAARIVLDDKEPANSDDKFSHSRSGTGFSLKSKPNSDLENAMGNSLGQGMTSTQTLDSVVKPRPVSNSLGTTVMGVIRGSARGVIKSDTTFHALSDAGSTDSRTTITTRASGLMTSSEALITPAPFKTDVSALVSNTPSGVSGSGKRRFSEAPGQSQYRDRAAERRNLYGSSHGTDTVGLDSSKNTLSYVFIACNCCHFPILSVQNLIFLFSSLSFC

SEQ ID NO: 59456 - protein, 301 aa, Zea Mays
MSAVHRPTKEEAFHRFIGQPVSIIFSSRTDAGVHALSNVCHVDVERISKRKPGEVLTPHEPGVVKRAVNHFLLKSEGDIMVTDVCCVAPDFHARYKSLERTYHYRLLAGPESTSVFEKNSVWHISEDLDIQSMKKACSILVGHHDFSSFRAAGCQANSPVRTLDELSVTEVFPFMFFPSSVERSELELSNVSLVYSRKPDMESSGKGSDGSCTSSVKSDFENGKDFGKRSRHRCFVVTARARSFLYHQVRLMVGLLKSVGTGDLTTADVERILDAKTVTAAPSMAPSCGLYLANVKYDLNT

SEQ ID NO: 59457 - protein, 81 aa, Zea Mays
MPDRDVVAPAGGGDRKAAKLGSWSSMSSNCGSKKRKSSSSSFGRRSTSTCEERQGVFRMLMSWNQESRFSKKIKTTTSKER

SEQ ID NO: 59458 - protein, 208 aa, Zea Mays
MYKGKTVMTEDERYESLRHCKWVDEVIPDAPWVINQEFIDKHDIDYVAHDALPYADTSGAANDVYEFVKAIGKFKETKRTEGISTSDIIMRILKDYNQYIMRNLTRGYSRKDLGVSYVKEKQLRVNMGISKLREKVKEHQEKFHSAAKIAGTNPVEWMENADRWIVGFLEKFEEGCHMMETAIKGRIQEGLKRQGRSESNLSGEESDS

SEQ ID NO: 59459 - protein, 1141 aa, Zea Mays
MGVPAFYRWLAEKYPMVVVDVVEEEPVEIEGVRVPVDTSKPNPNGLEFDNLYLDMNGIIHPCFHPEDRPSPTTFAEVFQCMFDYIDRLFIMVRPRKLMYMAIDGVAPRAKMNQQRSRRFRAAKDAADAAAEEERLREEFEREGRRLPAKQQSQTCDSNVITPGTEFMAVLSVALQYYIHQRLNYDPGWKKIKVILSDANVPGEGEHKIMSYIRGQRNLPGFNPNTRHCLYGLDADLIMLALATHEVHFSILREVVFTPGQQDKCFLCGQVGHLAANCEGKAKRKAGEYDEKGEAIVPKKPYQFLNIWTLREYLEYEFRMPNPPFQIDFERIVDDFIFMCFFVGNDFLPHMPTLEIREGAINLLMAVYKKEFPSMGGYLTDSCTPDLNRVEHFIQAVGSYEDKIFQKRARLHQRQAERIKREKAQAKRGDDLDPHVRDDLIVPVSNFRGSRLASGAVPSPYEQNGSQRERYNQTRKAPRVSSSGSSIAAAIVEAEQDLEAQERENKEELKSMLKDALREKSDVFNSENSEEDKVKLGEPGWRDRYYEEKFGARTPERMEEIRRDVALKYTEGLCWVMHYYYEGVCSWQWFYPYHYAPFASDLTSLSQLNITFELGSPFKPFDQLMGVFPAASAHALPLKYRQLMTDPNSPIIDFYPTDFEVDMNGKRFSWQGIAKLPFIEEDRLLAEIKKVEDTLTPEEARRNSTMCNMLFVNGAHSLSPYIYSLNSKFGHLPDKDRGAIKEKLDPSASGGMNGYIALCGGDPSPPVFRSPVDGLEDIMDNQVICSIYKLPDPHKHIARPPAGVIIPKKSVEAGDLKPPPVLWHEDSGRRPHDNNHRRPYDNSNRQNPSGALSGRQLGEAAHRLVVNSLNVRGGGQNNSPSMPYQTMMSGMNYPNGRHHVGNHGVPPRMEQPAGRSGWHVSDDNMTNGQAAYGQYQPERLGPSRHERGNHGRQQYNPYARDNHHDSSGRVQPPGYHQNRGNPQSAAPSAGPGLYGPYPPAYAGGYSGGYQPVPYGGQQWQQRPYGGGTPPTRPNSHQSQNRYGTLDRSSNKRSSDVEENELLDLDLDDLEDLTDALGESFLDFFLLYFLGGFGMSGIGLFLDRYFWGDMPTGHISGCSSNSASQRLVPEAVRSGTTPSQRAN

SEQ ID NO: 59460 - protein, 195 aa, Zea Mays
MMAEITPCWTSFERCSMLSFNQQKRIQLDLALEAKPKFERILNQNSLVKTQVVIICWTFSSSWSQTHIIEGGGGLFLLTGEVAKLFSDAGLVCIASLISPYRRDRESCRALLSDGSFIEVFLNMSLELCEARDPKGLYKLARAGKIKGFTGIDDPYEAPLNCEIEIKEIDGVCPSPSDMAGQVVTYLEEKGFLHE

SEQ ID NO: 59461 - protein, 112 aa, Zea Mays
MSPGAPVNRTSVAHCSSSQTAPSAKHAPTPALFHLLPPLSLVSPSPVPLGDLASLAQWLAARARRPAVWPSQLPLLHPRRGQPTRQHARRGQPARVALLGTASAVASQRDST

SEQ ID NO: 59462 - protein, 1038 aa, Zea Mays
MAPTLAAGRLEEGATTTDALYLAERKGHDQTKKSLSEAQETNKELLKKIEKAEKNIDQLLENVERLEKDAITRESLLLTTKQSYGDTAKLLLESQEKNQELVHKVEDSDSKIVLLEDSVKRLEESTADKDSLLAIERHENSETKKELVGSQKKIAELLTEVQDTRANVAELEDLIRRLEGKLAITEALLLTEKEQNASTLKLLAEAQLRIEELIKKLEGSDRKSDSLQDTITRLEQDVTAKEALLLTEKEAHDATRKTLTEAQEESGELLKKIHDNDKHILQLQFTIQRLEETTVANENLLLREREQNDITTKAHNESQEKYEELLSKFVDVDRKIDLLQGTIERLGENTTKDSLLLSERHEKDAIKKALTEAQEKNEELLMKVEDANEKIEQLQTTIDMLEDNVAAKDVSLEAAMKENDAIRRSLTEAQERNDELLKKISDSEYRIHLLQDTIQKLQVDAISRLSSFVMEKQESDASKRAVTEAHERNEDLLKRNEDLLKRNDDLIKKIEDSSKIVTQLQEALQRLEGKACNLEAENQVLRQQATSTPPTSAKSPASRAKISRIHRSPENGHNLNGDIRQTEMKPSTGTSEAITSAANVPDLGDQKDFEHGEKLQRIPKQKYQPSHHQQPQDDQQWLLACIPQHLGFSGSKPVAALLIYQCLLHWKSFEAMKTGVFDSILHAINSATEAQNDMRTLAYWLSNLSTLTVLLQRSFKTTRTAISTPQRRRFSSERIFHGNQTSNAGLAYLSGQSVVGSAGLPQVEAKYPALLFKQQLVDLIEKVYGMISDSVKKELNPLLELCIQDPRTSHSSIAKGNLNGMGQQNQLTYWLGIVKILTSYLDVLRVNHVPSILVHKLFTQIFSLIDVQLFNRLLLRRECCSFSNGEYVRAGLTELKHWSDNATREFAGSAWEALRHIRQAVDFLVISLKPMRTLREIHTDVCPALSIQQLERIVSMYWDDVNGTNTISAEFTSSLKSAVRDESNMATSFSILLDDDSSIPFSLDDITKTLPVIEVADDDFVPFVHENPSFAFLLQRGE

SEQ ID NO: 59463 - protein, 105 aa, Zea Mays
MSSTVPKSSNIFWHDCLVGKTDRQKLLNQKGCVVWITGLSGSGKSTLACTLGRELHTRGKLAYVLDGDNLRHGLNKDLGFKAEDRAENIRRVGKCLTNIDKKGQT

SEQ ID NO: 59464 - protein, 51 aa, Zea Mays
MGEGGDPLLAVVWEKEKFHGRDGWEKKKGWRLVDLTGHRWHPIGHRGRQTI

SEQ ID NO: 59465 - protein, 280 aa, Zea Mays
MKHLSNNPDDLNSMSLKPELFEGLRFDFTKGLNQKFSLSHSVFMGSLEVPAQGSETIKVPTAHYEFGANFLDPKLMLIGRVMTDGRLNARVKCDLTDNLMLKVNAQLTQEAHYSQGMFNFDYKGSDYRAQFQIGNNAFYGANYIQSVTPNLSMGTEMFWLGHQRKSGIGFACRYNTDKMVGTLQVASTGIVALSYVQKISEKVSLASDFMYNHMSRDVTSSFGYDYLLRQCRLRGKIDSNGVVAAYLEERLNMGVNFLLSAEIDHCKKNYKFGFGMTVGE

SEQ ID NO: 59466 - protein, 645 aa, Zea Mays
MFWRMTGLSAASPVDTILDKENFTLEELLDEDEIIQECKALNTRLINFLRDKAQVSQLLRYIVEEVPEDSEKKQSFKFPFIACEIFACEIDIILRTLVEDVELMDLLFSFIKPDHPHSTLLAGYFSKVVICLMLRKTAPLMNYVQEHPDIVVQLVDLIGITSIMEVLVRLIGADETIYLNFADTLHWLENTYVLEMIVDKFSSSDSPEVHANAAEILSAVTRCAPPALAAKICSPSFVGRLFHHALDESRPKSVLVHSLSVCISLLDPKRLASVSYQAFRSNLTHGTLVTASPETVDGILESLGDLLKLLDITSSQNVFPTTYGCLCPPLGKHRLKPTLPSEGKEPPRIGNIGHITRIANKLIQFGNSNSMIQSHLQENSEWAVWQIDVLIKRNEVENVYHWACGRPTSLHDRGRDSDDDDFRDRDYDVAALTNNMSQAFRFGIYRNDDIEEAQGSHERDDEDVYFDDESAEVVISSLCLGDDQDSSSLFTNSNWFTFDGDRGINDRLAASVPPSSPDSEAISLNTENTDEALTGETTGGTESLRESASLANELAEVANDNDADATDGEKILCTEEDSQASEGPVDAKEDKTGGASKAANESVPDNALPESHHTDCRCADSSESGTEEDVEIDDEKKSETAMTNE

SEQ ID NO: 59467 - protein, 1235 aa, Zea Mays
MDGGHTTRHPMSPAISASTVLPQQRQMQPHHHPARPAIADLFTLYLGMNSKQRAEDPLRESSNKLQKRVTALNRDLPPRDEQFISDYEQLRMQFPDAEQLQAITESVLISFVLQCSSHAPQSEFLLFATRCLCARGHLRWDSLLPSLLNTVSSIEAPMVQGVSVTGGGSVTPSSAITMPNAPNFHQSNPASPLSVMNTIGSPTQSGIDQPVGANVSPIKAAEFSSSAQLGTAARGDQSRRGAEASYLHHLSCRIILAGLEFNLKPATHAVIFQHMVNWLVNWDQRPQGMDETDTMQTCRLEKPLHEWMHLCLDVIWILVNEDKCRIPFYELVRCNLQFLENIPDDEALVSIIMEIHRRRDMVCMHMQMLDQHLHCPTFGTHRFLSQSYPSIAGESVTNLRYSPITYPSVLGEPLHGEDLANSIPKGGLDWERALRCLRHALRTTPSPDWWRRVLLVAPCYRSQSQQSSTPGAVFSPDMIGEAVADRTIELLKLTNSETQCWQDWLLFADIFFFLMKSGCIDFLDFVDKLASRVTNSDQQILRSNHVTWLLAQIIRIEIVMNTLSSDPRKVDTTRKIISFHKEDKSLDANNIGPQSILLDFISSSQTLRIWSFNTSIREHLNSDQLQKGKQIDEWWKQMMKASGERMIDFTNLDERATGMFWVLSFTMAQPACEAVMNWFTSAGMADLIQGPNMQPSERIMMMRETYPLSMSLLSGLSINLCLKLAYQLEETIFLGQAVPSIAMVETYVRLLLIAPHSLFRPHFTALTQRSPSILSKSGVSLLLLEILNYRLLPLYRYHGKSKALMYDVTKIISMIKGKRGEHRLFRLAENLCMNLILSLKDFFFVKKELKGPTEFTETLNRITIISLAITIKTRGIAEVEHMIYLQPLLEQIMATSQHTWSEKTLRYFPPLIRDFLMGRVDKRGLAIQAWQQAETTVINQCNQLLSPSAEPNYVMTYLSHSFPQHRQYLCAGAWMLMNGHLEINSANLARVLREFSPEEVTANIYTVVDVLLHHIQCEVQRGHLAQDLLSKAITNLSFFIWTHELLPLDILLLALIDRDDDPYALRLVISLLEKPELQQRVKNFCNTRSPEHWLKNQHPKRAELQKALGSHLSWKDRYPPFFDDIAARLLPVIPLIIYRLIENDATDIADRVLAFYSSLLAFHPLRFTFVRDILAYFYGHLPIKLIGRILNLLGVSTKVTLLPFCIPFLAIFHKSGWNLLILSSNTFGQSIQLPC

SEQ ID NO: 59468 - protein, 132 aa, Zea Mays
MIMLEAAKATTETVDALRTGAAAMKAMQKATNIDDVDKTMDEINEQTENMKQIQDALSTPLGASADFDEDELEAELEELEGAELESQLLEPVAALPVHPVHVPGNKQPARPAPQKATAEDDELAALQAEMAL

SEQ ID NO: 59469 - protein, 103 aa, Zea Mays
MASGELACTYAALILSDDGIAITAEKIATIVKAANIKVESYWPALFAKLLEKRNVEDLILSVGSGMHPPFAPQDIMPGVCNVWVVRGGDVVDLAYFVMLLVFY

SEQ ID NO: 59470 - protein, 967 aa, Zea Mays
MIVQPIELRAWTAFPGSAQEGIGRMAASVSRAICVQKPGSKCTRDREATSFARRSVAAPRPPHAKAAGVIRSDSGAGRGQHCSPLRAVVDAAPIQTTKKRVFHFGKGKSEGNKTMKELGANLAEMASIGLSVPPGFTVSTEACQQYQDAGCALPAGLWAEIVDGLQWVEEYMGATLGDPQRPLLLSVRSGAAVSMPGMMDTVLNLGLNDEVAAGLAAKSGERFAYDSFRRFLDMFGNVVMDIPRSLFEEKLEHMKESKGLKNDTDLTASDLKELVGQYKEVYLSAKGEPFPSDPKKQLELAVLAVFNSWESPRAKKYRSINQITGLRGTAVNVQCMVFGNMGNTSGTGVLFTRNPNTGEKKLYGEFLVNAQGEDVVAGIRTPEDLDAMKNLMPQAYDELVENCNILESHYKEMQDIEFTVQENRLWMLQCRTGKRTGKSAVKIAVDMVNEGLVEPRSAIKMVEPGHLDQLLHPQFENPSAYKDQVIATGLPASPGAAVGQVVFTAEDAEAWHSQGKAAILVRAETSPEDVGGMHAAVGILTERGGMTSHAAVVARGWGKCCVSGCSGIRVNDAEKLVTIGGHVLREGEWLSLNGSTGEVILGKQPLSPPALSGDLGTFMAWVDDVRKLKVLANADTPDDALTARNNGAQGIGLCRTEHMFFASDERIKAVRQMIMAPTLELRQQALDRLLPYQRSDFEGIFRAMDGLPVTIRLLDPPLHEFLPEGNIEDIVSELCAETGANQEDALARIEKLSEVNPMLGFRGCRLGISYPELTEMQARAIFEAAIAMTNQGVQVFPEIMVPLVGTPQELGHQVTLIRQVAEKVFANVGKTIGYKVGTMIEIPRAALVADEIAEQAEFFSFGTNDLTQMTFGYSRDDVGKFIPVYLAQGILQHDPFEVLDQRGVGELVKFATERGRKARPNLKVGICGEHGGEPSSVAFFAKAGLDYVSCSPFRVPIARLAAAQVLV

SEQ ID NO: 59471 - protein, 889 aa, Zea Mays
MACGNPDCLYLHDVGSQEDSFTKDEIISAYTRTRVPQMASSVSQRRTGTVLPPPGDDFSHSAVVSAKHTFKNGTLNTTSQPRLSPPNSSSGRSTLPPAASWGQRDLNARITATGATSSQSHTKPKSESQSNPFSSSSAISSTKTPSSWNDDTSTAAKMPEGQQVSEKESKTLQPYKPGISKETQALSSLESSLDIDFSTIPSAWNDDDIVVSDGMPKGSDENQVPNKNECQSCHAAGEKMLEDIGSKDIDMEKISSQISSVTLGGNDKIQSMAGNQQPDVMPCTSIDVPMDQNFGRDRSHLNLNELLLPSENKDSSLSCQYSSDKRLAWSLKMQNCSVTPLNDTIDSAMLTDKPYSILLEGSEKPSYPPFVEFPSTWDTSLWNDTKNNAASTIDTITSSQMQTGFSSIDNTYALLNGGQDGLGTVYTHDNVSVYTRGRGNVSGHPGMGSHQHRAMGSVRTDSIGSFDKTISVNKDESRIISDTLSEFNPWDDSYSTANNFVRMLRESENNDVQCTAPSWKSGTGSKQSRFSFARQDNQGNLLDSSLRNCGIGTEQNFSLLPQNSRRNIYQNGLAFQSLENEFSNSNFPGLLDMATTGTSMSKISAPPGFSAPTRVPPPGFSTAFPSQDSLNPTPGFPSGILSHDGSIPLSRFPSFSSGVSAQEVSKLPTRLPSPFSSRFSSQDGPDPPSRFPFSSGFTSQDGSNQLYGSTNPENLLGGTVLGVDGNHYQSQFGRHSSDMEFDDPAILAVGKGLMPGIGDSGLEMKNTRASQLQPASSDPRFQLHVQPNVQSHQNMRFTDPVQDGLNHMNDNYLASRFLAQNHGPLSPYVQIPQQPRNSQVTNGHWDGWSESRQGNNIPMSDMSRILYPSEVNKLHMLGSNDIHNRAFGM

SEQ ID NO: 59472 - protein, 108 aa, Zea Mays
METVTTKARLRKIRPALHQLRKKAAHRASTAATTTTTTTFTANCCCRVRVRKPTCPSCGSFGCGCCGPLRSCLALRFPRCCRPPAACFTCGGCCWSCRCRSCFKCCCC

SEQ ID NO: 59473 - protein, 183 aa, Zea Mays
MGVSAEPKEQAASAAALAVEDEAGGKEDKAAAVSCSICLDAVLAAFGERSTARLHCGHEFHLDCIGSAFNAKGGMQCPNCRKIEKGNWLYANGFRPAHDVSMDEWAHDEDLYDVSYSEMPFRFHWCPFGRLAQLPSLFEYVLLQMIIFYYCLAFCSNILNTQFYLIDYFWPVGLTYKPHYLHM

SEQ ID NO: 59474 - protein, 130 aa, Zea Mays
MTFKRRNGGRNKHGRGHVKYIRCSNCAKCCPKAIKRFLVRNIVEQAAVRDVQEACVHDGYVLPKLYAKVHHCVSCAIHAHIVRVRSRENRRNREPPQRFRRRDDGPRPGQGPPRPGGAAPAAAAAAAPRT

SEQ ID NO: 59475 - protein, 340 aa, Zea Mays
MAGRYYQGQGGGGGTSMEVVSTPNQELALTNCAYVCPADLRRFPNALAVVADSWVFTLREHNAVASGRIALNAIQRRQAKVSAGDSVTVSSFVPPDDFKLALLTLELEYAKARANRNDELDAVVLAQQLRKRFLDQVMTLGQRVPFEFHGTNYVFTVNQALLEGQESSTPLDRGFLSSDTYIIFEAAPNSGIKVINQKEAASSKLFKHKEFNLEKLGIGGLSAEFTDIFRRAFASRVFPPQVVSKLGIKHVKGILLYGPPGTGKTLMARQIGKLLNGKDPKIVNGPEVLSKFVGETEKNVRDLFADAENEQRTRGDQSDLHVIIFDEIDAICKGARLSNT

SEQ ID NO: 59476 - protein, 366 aa, Zea Mays
MGSNAAGKPPPPPAAAVSWEFHATGPRNLTSPGWRDLIRSSWRDPSYRRIAVSCFVQAAYLLELDRQEGRAGEAALAPNWWKPFKYKLVRPLIDSRDGSIYGALLEWDQLAALADLIVAKPQGAPKVVLALRGTMLRQLTVVRDLEDDLRLFALESLRGSVRFTGALEVLKSAIHRHGSANVCVAGHSLGAGFALQVGRALAKDGTFVECHLFNPPSVSLGTGLRKIQEKASSVLKRYISRSGGGGSSSSSNVSPGPGEELQAAAARDGVGEEVMSREVKRWVPNLYVNSCDYICCFYADRSGVATVTEEKRSGMHSKLYVIAKGPSKFLEAHGLQQWWSDDSELHLAVHDSKLMYRHLKSLYVEQ

SEQ ID NO: 59477 - protein, 150 aa, Zea Mays
MPPPDAPLPPSISPQGTRRASRCPLAPVCLAVMRAARLAMPSRPCPCSPLLRPIPLCLARYPPLPTSSSPSHPPIVRQPIHASRPRPCHAGGEAKLTYRTRISFQTRRRRSGTGATFHAACGVGTMRQQDSRSRMMNNNSGVDAGGPGSD

SEQ ID NO: 59478 - protein, 100 aa, Zea Mays
MACLLHLESLGGRCVQIVWLKRLRECLALVLPFFFVFGGRSINSEQRLPSIDDSWCVEGTPLFLGIRRFVSFKPINGRQPGTVTCVPAYELPALLHMLHV

SEQ ID NO: 59479 - protein, 370 aa, Zea Mays
MNKDKAPMPGDGDPSDGLPPQSTRRAGAPPSSSTPPREYDISRMPDFPTRSTGHRRAHSEILGLPDDLDLSAPGGGDGPSLSDENDEELFSMFLDVDKLNSSCGASSEAEAESSSVADGVGEGAELGHAPRPRHQHSQSMDESMSIKAEQLVGAPGMEGMSSAEAKKAVSAAKLAELALVDPKRAKRIWANRQSAARSKERKMRYISELERKVQTLQTEATTLSAQLTLLQRDTTGLTTENSELKIRLQTMEQQVHLQDALNDTLKAEVQRLKVATGQGPANGGGGMMMNFGAVPRAFGGGNQQTFHSSQSQAMQSMLATHQLQQLQLHSQPQQQLQAQHLQQVARDLKMKGHLGAQGQWGGGKSGSSGS

SEQ ID NO: 59480 - protein, 712 aa, Zea Mays
MWSPQASFEEVDVAWRHYEQAGTGLAAIFINLAVENFSGWKYTATFAIIKHSYFVGFFVYTVFNLALVFSSVYIVTNFAPAAAGSGIPEIKGYLNGVDTHGILLFRTLVGKIFGSIGSVGGGLALGKEGPLVHTGACIASLLGQGGSAKYHLSSRWVRIFESDRDRRDLVTCGCAAGVAAAFRAPVGGVLFALEEVTSWWRSHLMWRVFFTSAVVAVVVRSAMNWCNSGKCGHFGAGGFIIWDISGGQEDYSYQELFPMAIIGVIGGLLGALFNQLTLYITKWRRTCLHKKGKRVQIFEACLISLVTSTISFVLPLLRKCSPCPKLETNSGIECPHPPGTDGNFVNFYCSQDREYNDLATIFFNTQDDAIRNLFSAKTFHEYSAQSLITFLVMFYFLAVVTFGTAVPAGQFVPGIMIGSTYGRLVGMFVVKFYKKLNIEEGTYALLGAASFLGGSMRMTVSLCVIMVEITNNLKLLPLIMLVLLVSKAVGDFFNEGLYEEQARLRGIPLLDSRPKQVMRNMNARDACKNQKVVCLPRVSRVVDIISVLRTNKHNGFPVVDRGQNGESLVIGLILRSHLLVLLQAKVDFQNSAFPCGPGVLNRHNFSDFVKPASSKGKSIDDIHLTEDELGLYLDLAPFLNPSPYIVPEDMSLAKVYNLFRQLGLRHIFVVPRPSRVVGLITRKDLLLEEDNNNVMPELQSTSGLAERQNARG

SEQ ID NO: 59481 - protein, 570 aa, Zea Mays
MECAKFGIAGEAIDIIVEHLEKESNLYKRVDLFFLVDSITQCSRNQKGGAGDVYPSLIQAVLPRILYAAAPPGNSAWENRKQCLKVLKLWLERKTLSEYIIRHHIREIETINEASFGSSRRPSRTERALNDPLRDNEGMLVDEYGSNAGFQLPNLICTKVLEEEEENSSEGRSLSFEAVTPEQDAPYNDDNEESQMPVEKHHHILEEVDGELEMEDVAPPSDIGATTKCQPEQSDTNRAPSDQRPSDAGPPLPVDRPPSPPPLPSSPPPVPVPQSAQMQPKLQMASDPMAPHPQRATYSVQSQQQHSIAEHPGNMNSSVAPLPPPPFNSSGYGGQQNQIPPPPPMAPLNPPGPHGSFPAPPAPYHGNNYHRPPTTSMPNEGYHQQPPPPPPPPNQFPSVPPEHQHRPHHWGNNCPPYPERYRYNGHDRGNHRHDRRHHGHDRQHHYDDRGYHYDDRGYHYDDRGHYFDDRRHHFDDRGHHFDERAIRGPMHNDAADQGRYSFPPGPPRIPDHFEAPPAPMHYGRPSDPPPRPCAGWSRPPRISDNYSPSRHSVEPPVSHTAGGHGGWRPR

SEQ ID NO: 59482 - protein, 933 aa, Zea Mays
MDRRSWLWKRKSLDKSPGESDSSGSASSHSEPSFDDQEPKPVSSNSSPNHSHSPDVSSRIIYNENQEAERAESLNEKLVLATSSNDSSPQHDQSMKPDIYQSPLLFPNIRNDDVPDSVKNLNEKVSPKFKVDDVQDSVKSLNEKLSAALLTINDKDDLVKQHTRVAEEAVAGWEQAEAEVASLKQLLETASKKNTSLEDQVSHLDDALKECVRQLRQAREEQENKIHETVAKKSKELESEKFELQHHIAELSKQLQATKLEATTVRVQRDLQEKLQIVEKENKDLKVELLALSKDLKILARERDLSNQAAETASKLHLESVKKITRVEAECLKLRHLTRRTSLTNDSRLITNSACMESQTDSQSDSGEHMLVDEMKNSDSWATALIAELDQFKNANNDTRNLVNNSVEIDLMDDFLEMEKLAALPEVDCVSSSFGAETDSDQGVSRDKSSKVKTEPLQCQVTDLHAKIEKIEGEKRELEMALADARVQLGTSCDALMVANNRLIDLQMQLDLANESKHAAFGEAERLNGERKDLALQLESRSSQVDELQLMVASLEKNVDRKVLELQLELVSVEAADLRKTVASLEEKIDAEITLSMQHKTNADLAEASKESLEAQLQSANTEIGKLNGIVQTLENEVRKETDSREELLKQIEAMKIESERSLSVVSTKESLEVQLQVANSEVAKLRGMVNALECDAANEKAYSSDLQMQLEAVEGIRKVLESELESSHQEVMRLKEKVSSLEARIKDQTSLLVEYTAKSEDAVSRKKAMEGQLEAANLEVTKLRNKVSLIQGKVEQEKLLSEEYEAKCRKLEAQVLRDSREAKLWRLTNSNGDLKEKELVSAAGKLAECQKTIANLGRQLKSLTDLDGVVADPEKLESRDTHLDFRDGGDVADGLYELGLPKRNGSCLSPLRSDPSPRGLPSLSSYLSKTKR

SEQ ID NO: 59483 - protein, 397 aa, Zea Mays
MAMEKGWKARDAAGAFMMDLELVAEETDDAVPSIPPPQTPLEPMEYLSRSWSVSASEISKILLGGGKKSSVAAASRLPEVTIPEQSALATTSSVVPLPCHQQNRAARRSSTSSGHHHQSIGKWFQVHHRETRRAKQSSKEKQRAEKAHVHAMVSVARVAAAVAAVASATSSNAQATTTKMATAMASATELLASHCVEAAQHAGARHDQVAAAVQAAVGVRSPGDLMTLTAAAATALRGAATLRQRAQRETRSNASILLPYEKAANSWSPDIWCKEGALLKRARKGGLHKIRVCIYINKRSEVILKLKSKHIGGALTKKNKSVVYGVYSELPTWAEPGKDCIEETCCCFGLSTAQGLVEFECEGNASKQEWIDDVQNLLRQAALHDRVGDKLGLVKLS

SEQ ID NO: 59484 - protein, 72 aa, Zea Mays
MPTIEMIRQTGIPAIFTDFCEEAAHLASCCISSITGQPLKIPIQVNPFRQPVAAENNALYVPCYSNCFVFGM

SEQ ID NO: 59485 - protein, 353 aa, Zea Mays
MPPSPIVLPATALPAARLARVVAASESGGATPPRASPRRGRRGKPGFSRRSAIKKSFHQEQVVFSTPVSTDPTVAVIGGGASGLSCATSLAARGVRSVVFDTGMHGLGGRMATRFVDGGKQLVFDHAAQFFTASDERFQRLVNEWLDRGLVREWSGLIGELEAGGCFRPIPSLTPRYIGVNGMRPLADAMLPETDMIKVLRPCWISKLEPFNGLWRLFENEKPRGEYDAVVIAHNGKCANRLLSTSGLPLLTKQMKRLELSSVWALLAAFEDPLPIPLLDSNAAFEGAFVRDVDSLSWMGNNTRKLFPMQTGAPECWTFFSTAAYGKRNKVPQENIPKLTAEKVKEDMLGGVD

SEQ ID NO: 59486 - protein, 759 aa, Zea Mays
MLFGWHLFLMLHLRSPELFKDLVSCIHGLVAVLAILLIHVPAKFRSFTIEGSSHLIKQTEKGVDLIASLCHNYHTSEERLKEMLHKSHNAIEDIFHMKALSASECKPENLDKIDTDDLMYFKGLIDMECFQSNLEKMEKLCNSNSCKGELDFKSILINNDYIPYDENSTGDSTNLGHSKCAFETLASPTKTIKNMLTVPSSPLSPATGGSVKIVQMTPVTSAMTTAKWLREVISSLPDKPSSKLQQFLSSCDRDLTNAVTERVSIVLEAIFPTKSSANRGVSLGLNCANAFDIPWAEARKVEASKLYYRVLEAICRAELQNSNVNNLTPLLSNERFHRCLIACSADLVLATHKTVIMMFPAVLESTGLTAFDLSKIIENFVRHEETLPRELKRHLNSLEEQLLESMAWEKGSSLYNSLIVARPSVASEINRLGLLAEPMPSLDDLVSRQNVRIEGLPATPSKKRAAGPDDNADPRSPKRSCNESRNTVVERNLQTPPPKQSHMVSTSLKAKCHPLQSTFASPTVCNPVGGNEKCADVTIHIFFSKILKLAAIRIRNLCERVQCVEQTERVYNVFKQILEQQTTLFFNRHIDQLILCCLYGVAKVCQLELTFREILNNYKREAQCKPEVFSSIYIGSTNRNGVLVSRHVGIITFYNEVFVPAAKPFLVSLISSGTHPEDKKNASGQIPGSPKPSPFPNLPDMSPKKVSASHNVYVSPLRQTKLDLLLSPSSRSFYACIGEGTHAYQSPSKDLAAINSRLN

SEQ ID NO: 59487 - protein, 106 aa, Zea Mays
MILETRFTSKCPPKEIIRKIEEAAKPLGFGVQKKNYKLRLEKVKAGRKGNLNVATEILQVAPSLHMVQVRKAKGDTLEFQKFYKNLSKTLKDVVWKSEDLQMRAAS

SEQ ID NO: 59488 - protein, 62 aa, Zea Mays
MVGEACGVPGAEVVCVREWQWWPRARSLSAAVVACVCRSRTQQAYGGRDCRFSPAPSSSLQF

SEQ ID NO: 59489 - protein, 499 aa, Zea Mays
MLACSSSKPHRPVKALGAQFSPALPSAASLQPQQHVHFTCPFLPPFPLPPRHLRSPPPAAPAMAMTEGLVPITRTYLARYYDKYPLPPLPDATTDLAARLRALSADLAAVAPIAPDEELLEQEAAGIPAHKIDENLWKNREQMEEILFLINTSHRPVALQQKSTPEDAEIVCTLDDIEAKLKDMLKNLEQFQLKNADNVFNTVMTYMPQDFRGTLIRQQRERSERNKQAEVDALVSAGGSIHDRYALLWKQQMERRVQLAQLGSATGVYKTLVRYLVGVPQVLLDFIRQINDDNGPMEEQRERYGPALYTLTKLVLAIRLYLHVSLARYGQRKIEKDDAAVLQQAVVIYTKEFLKFTEFIGEVFVNAPFFISAEDAGAVDARKSDEYKETIIPAGKTHEVILSVEAVNSYIAWDFSLQQGALNMDIGFHVEYISPSGEKTLILPYRRYEADQGNFCTVSSGSYKLVWDNSYSSFFKKVLRYKVDAVPPVVEPALSATEL

SEQ ID NO: 59490 - protein, 153 aa, Zea Mays
MHGMELENPRPIGSEREPATGACGVCTCPVVHLIRRLLSVQMSIYPSRMHDASITLNDTTHLHAHTAWCVHACIYDLKLARTRKPYSTYMIRRSDSLLLAACTAARTPRPTRPCLGRPACVCVRVTLCLPRAAAVQPRRRWGVLLLRRIRRRH

SEQ ID NO: 59491 - protein, 488 aa, Zea Mays
MGDNYDDEGEPIVNLDEREPSPEHQPYEDLDDDLDGGGDWTRDRSPTPVHGDDGGAGSSSKPRKRLLKKGGGGGMPGDDGLDDFGLEDEDADPSAEARKRKGSSSGRDTGMVRDRRGSGGRDSGGRDDQDDGEREIQELWDTIAGGESEDDQEGVRTVDDDNFIDDTGVDPADRYGSDNERHSPGRYAQAEEGEEDDEIERLFKGGKKKKKKNDRPRADIGLIVEQFIAEFEVAAEEDANLNRQSKPAINKLMKLPLLIDVLSKKNLQQEFLDHGVLTLLKNWLEPLPDGSMPNMNIRSAVLKLLTDFPIDLEQYDRREQLKKSGLGKVIMFLSKSDEETTANRKLAKELVDKWSRPIFNKSTRFEDMKRYDDERAPYRRPQMKKPSSSSSGMESRDDDLDADFSQRKSGQSSSRQHASRPEASPLDFVIRPQSKIDPEQIRARAKQAVQDQRRLKMNKKLQQLKAPKKKNLQASKLSVEGRGMIKYL

SEQ ID NO: 59492 - protein, 108 aa, Zea Mays
MSTVPRLGGSTLNAWKGHRELCCPSVAVVTQTSAYTVACHGNFRRCPTLVETTELLTVAITHCNIKLKMRAEVSLTGYHMSDMSFVPLISAPGVMYECISICYCRNVW

SEQ ID NO: 59493 - protein, 430 aa, Zea Mays
MLEDQSCLISRSLPGSCEQESRLAYMTYHLLEITRSKRPPGTLSIEHDVVAALTKRTKSSEHQNSEALDCQGSNGQGDSDSSTLISSIGRDNSINCLARCSRSDYGSIASLNRSFRSLVRSGELYKERRQQGISEHWVYFSCNVQEWEAYDPYRSRWMTLPRMPRNECFMHSDKESLAVGTELLVFGKEILSHIILSYSILTHSWSRGVEMNAPRCLFGSASFGEKAIIAGGMDADGRVLRSVELYNSETKRWTTLPSMNKARRKCSGVFMDGKFYVIGGMASNTEVLTCGEEYDLDRGTWRVIENMSEGLNGASGAPPLVAVVENELYAAQYAGKLVRKYNKRDNSWTTLGELPERPEAVDGWGIAFRGCGERLLVIGGPRVLGGGMIELHSWIPSEGPLQWNMIGSKPSDFTQGSSNRASRFRVLVNS

SEQ ID NO: 59494 - protein, 123 aa, Zea Mays
MEINPAHRKTSVRLSPMWAVSRSFLVVPARETRPVDRGWKISQPGLHANAKGTRLLVGVDLLRRPLVIDYPYIGLTWRRRASTILGPYTLSFRELHLKKPMNIRCATCFCLCGSINYVQTVAS

SEQ ID NO: 59495 - protein, 294 aa, Zea Mays
MGFDHSFGLWFMARWIKPDLMIESGAFKGHSTWVLRKAMPNTRIISLSPRHPEKYLKKGPAYVDGNCTYLAGKDFVDFGSIDWGKLLRNHGISDPDKVLVFFDDHQSELKRLKQALKAGFRHLIFEDNYDTGTGDHYSLRQICDQSYIRGGGHSCFWESDEARLRFERKKFWEKAVGIADLCGKDDAWWGVKGYMRDNFNHSNMAISYKEHFQNSRLVESVLDMYWELPPVAGPSLTHQTRYDPARTVDPIIEDGRYGLFRKTGLARLDASVFNGYTQMAYVQISGSMLSTDDV

SEQ ID NO: 59496 - protein, 375 aa, Zea Mays
MLVNQMLLCYGSIFACQENTVKISLLNNLDQCLKSGKKYLWFKFLITNACVALLSGLKEFLALRGAQSLPIDILSMIQSIFKAILVEPEISTAQRRAACEGLGLLARAGNDIFTARMARSLLGELVTTTDLSYTTSVAFSLGCIHRSAGGMALSTLVTPTVSSLSHLSKSSNFNLQLWSLHALLLTIEAAGLSYVSQVQGTLFLAMEILLLEENGYVDLRQGIGHLINAIVAVIGPELAPDSTFFSRCKSVIAEISSSNEMATLLESVRFSQQLVLFAPQAVPVHLHVQGLIPMLYSRQPSLRYLAVSTLHHLIERDPAAMIDENIEENLFSMLDEETDSETAMLVRATIIRLLYTSCPVCPSRWLAVLRNIKET

SEQ ID NO: 59497 - protein, 1097 aa, Zea Mays
MAGGQAPEASPGRYQRRRDEIDDDDCADVLGIDVRGPDADPFDIPAKRAPVERLRRWRQAALVLNASRRFRYTLDLKKEEEKEQIRRKIRAHAQVIRAALLFKEAGEKQTHETELPEILPRDFGIGEEQLTVMTRDHNYSALQEYGGVIGLANLLKTNLEKGIHGDEADLSCRANAFGPNRYPRKKGRSFWVFLWEACQDMTLVILIIAAVISLVLGIATEGTKEGWYDGTSIAFAVFLVIVVTAVSDYKQSLQFQHLNEEKQNIQVEVIRGGRRIQVSIFDIVVGDIVALKIGDQVSADGVVISGHSLAIDESSMTGESKIVMKDQKSPFLMAGSKVADGYGTMLVTAVGLNTEWGLLMASISEDNNEETPLQVRLNGVATFIGIAGLSVAAMVLVVLFARNFFFASRYFTGHTTDSDGSVQFVKRHTSVKSAIFGSIKILTVAVTIVVVAVPEGLPLAVTLTLAYSMRKMMADKALVRRLSACETMGSATTICSDKTGTLTLNQMTVMQSIVGEVKLQPPANVDKLSSTVASLLLEGIAQNTSGSVFEAQDGSVEVTGSPTEKAILSWGLDLRMKFAEERSRSSIIHVSPFNSEKKRAGVAVVARDSNVHVHWKGAAEIVLALCTSWLNVDGSTHEMTPDKANQLKKLIEDMAEQSLRCIAFAYRNLDMKDVPSEEQRINWQLPDNELTLIGIIGMKDPCRPEVRDAVELCKKAGVKVRMVTGDNLKTAKAIALECGILDDSEASAQAIIEGRVFRAYDDTERENVADKISVMARSSPNDKLLLVKALKKIGHVVAVTGDGTNDAPALHEADIGLSMGIQGTEVAKESSDIIILDDNFSSVVKVVRWGRSVYANIQKFIQFQLTVNVAALVINVVAAVSSGNVPLNAVQLLWVNLIMDTLGALALATEPPTDQLMRRPPVGRREPLVTNIMWRNLFIQAVFQVAVLLTLNFRGRDLLHLTHDTLGHSSKVKNTLIFNTFVLCQVFNEVNSRKPEELNIFSGVSRNHLFLAVVSITVVMQVIIIEFLGKFTSTVRLNWKLWLVSVVIAFLSWPLAFVGKFIPVPRTELKDLIVRCWPKRGESAAQQTQDDRMEVPV

SEQ ID NO: 59498 - protein, 94 aa, Zea Mays
MSTKTTCCQLDELCVKLVSLNMFFCLIVMAKERKEKENREIKKEKSDPIALEALQSPAVLCSHTVCHILSFTLPGPARFGHFHGARCLHHWGGA

SEQ ID NO: 59499 - protein, 1050 aa, Zea Mays
MVPEENSSIINFEMARIAFKVLQGSLFSLWRLEENSVFPSILAALFVIEWECSMSLALDEEKCLESNIEDTEVGVSMCSSSKGCLEEEMHLKVNLAESIHVFCQSLSPSFWDNLHSCTLNRLATILPQCVRNLESFFDVLLSEGEHWPLWLMPSLQNGHLSVKVQLDPDITDEIELKHERFVAFVDRLILKLGFSEVVLGIPGNIQSATSQSIDITSPVSSLSRVWVAGEVLCTWTWKGGCALKTFLPLLVQYMKDESYLEINIVPLLLDTLLGGALMHDSGPWVLFNAWHLSDNEIDKIQDRFLRALVALLFTINTNDCLWRESDALVFFEQLLSNLFIGSSVNRKCLKILPYVMTSIIKQFSALNNGDSSYADLVRKSIQSWLDATISCLSSSSREVPVQDIEDWMQVVLSCFPLRITGGARELVAVVEREISDTERSLMLTLFQKYQIFYGSTASSLVTSGTAVSTTVELLGVKLTAVLVGYCWSNLKENDWHFVFRMVFKCIESSVLLVEEMTDGINDATINQVSSEDALEKLKLVVGTTDKLTLSLAESALVTMCQLNHLCNIQEAENSQCVQLIKSGDYAESNDKMVESVLRLFLASGVSEAITKSCSEEASSVIGSSRHAYLHFWELVASFIKNAPLQSRKSALESMELWGLTKGSVSGLYSILFSSQPIFHLQLAAFSLLLSEPFCQLSLVKNYSMGESCSSAQQSGTSQSAELMPDSDKTVHLREELSDLIEFPTSELLKTDLTARDRVDVFIAWSLLLSHLQTLPASSSIKGDVLQYIQEKHIPVKAAAPNGKKKDTELAPEAEAAAKASKNAIATCSLLPYLESLWPIGTLQMASLAGSLYGMMIRLLPSFVRTWFTTLRDRSLSYSIESFTKQWCSPPLLLDEFSQVKESVYGDENFSVSVNRSAFEIVATYKKEETGIDLVIRLPSCYPLRHVDVECTRSLGISEVKCRKWLLSLTSFVRSQNGAIAEAIRTWKSNFDKEFEGVEECPICYSILHTSNHNLPRLACKTCKHKFHGACLYKWFSTSNKSTCPLCQTPF

SEQ ID NO: 59500 - protein, 633 aa, Zea Mays
MHPVPLFQLAPDKPNTSPFPTSPPPFRICGQIRRSRPYRSVFAHSSPPTRFSSKASELGVTPELVWAVVEERGKGGDEGGGASETVNGRLSVDQAPRSLLIRQRVDADEGRSAETLASATGDPKVVEDDTYGEEASAKARANANARGTTAEEERMLASEPEQRKRAQEATTSEILAGEDDRGRKSQQEGHKEHQQHKLTLPTVSNYTIHDATDGTDNGKQEDTEFNLTPDVDQRNGRDRSHQAALDNMERDKPLCDFSNFRANVCEMRGNIRIHPNGSSVIYMEPTSSGSKRNEQWKIKPYPRKGDELCLNHITEVTVKSSIVAPECSKYHDVPAVIFALTGYTGNLFHDFTDVLVPLFTTASEFNGEVQFLITDMAIWWTRKYAVVFEKLTKYPLIDFNKDNEVHCFNHAIVGLHAYMEFTIDPLKAPHNYSMVDFNQFMRRTYSLPRDAVRAPGETPQTRKPRLLIISRQRTRMFLNLKEIVAMAEEIGYEVVVEEANVNSNVGHFAKVVNSVDVMMGVHGAGLTNCVFLPHGATLIQIVPWGALDGICRIDFGYPAEQMGLRYKHYSIGVHESSLTEQYPLDHEIFRNPLAFHKNGFEFVRQTFMDTQNVRLDCNRFRPVLLEALDQLNQ

SEQ ID NO: 59501 - protein, 426 aa, Zea Mays
MPVPPLLSPLRLPSPAPPLHRNGAPWRRPTQLRAALRVPPPLHLGLAAARGDGVRRFVGTLGSKRARAVGAIRVSAISGDGGGGAGGTGIAAAAAATVVFAVMNRVLYKLALVPMKNYPFFLAQFATFGYVLVYFSILFIRFRAGIVTREMLALPKPQFMLIGLLEALGAASGMAAAAMLPGPSIPVLSQSFLVWQLILSALILGRKYRANQILGCLLVTAGVILAVAGGASNGPILFEVKFFWPAVMMISAAFQAAASIIKEFVFIDGAKRLEGKKPDIFVVNSFGSGFQALFIFLLLPFLSNLKGIPFAELPAYLTRGAACFLNVGGNLKDCHGAPLLPLLYITLNMAFNISVLNLVKMSTAVVASLTSTLAVPLSIYILSLPLPYLPEGTNLSASFLIGVATLVLGLLLYNLPQESTNQVKED

SEQ ID NO: 59502 - protein, 400 aa, Zea Mays
MQCIQLSHHTTFSADRKASYLSQSACHSGENGTVPPVVRDTAHGARRYRNVAAAAARARRVAIAAGQGGWRRQAAGAGHPGVRRLHRGHGQQQRRPHAHQVQLQAIRQGPQRRRTHRTLLQRPDSDGLRSFTARLERSGSGVSRHRPQRRRPLHGRQLRVWGHRLRPAHLHSRVLPMQEELNMFAEYKERLAGVVGDEAAAAGIVAESLFLVCAGSDDIANNYYLAPVRPLQYDISAYVDFLVEQACDFIRQLYQQGARRIAVLGMPPVGCVPSQRTLAGGLARDCDPARNHAAQLYNSRLKEEVVLLQKELACQRIGYVDIYDVLQDMITNPCKYGFEVSTRGCCGTGDLEVSLLCNQLTAPTCPDDRKYVFWDSFHPTEKAYEIIVDYLFPRYIENLL

SEQ ID NO: 59503 - protein, 555 aa, Zea Mays
MKDQSGHSKGYGFVRFAKRDYANTAKRQKNGIEVQGKRLVVELSMDQDTVFFGNLCKEWTLEEFEELIHKAFKDVVSVDLAMASNLGSSNKKNINRGFGFVRFSSHAAAARVIRIGSRTDFMLGDILHPAINWADKESHLDPDEMAKMKSAFIGNLPEDVNEEYLRKLFGQFGEVVRVAISRKGQCPVAFVHFAKRSELENAIEEMDGKTVRGPGRGPSFKIQVSVARPTADNDKKRSREEVRTRRSNASGDRRDYSHGRYGHDSLDRQVKAPRLSNYVADAADPYESAVNSLPSAVKEVLLRILRLRIGTRYDIDIHCVKSLDELPESSALAVLNQFLISGGDKHNKGDYFASLVAKAETFGLTHALHGTTYLSRNPEMHSKRYPHEDYDFVTPSRYDSSAHHPSTYYEDDPPVSESRVRRYAEERSTIVRSPEPRPRYDETDIRINPEPRLPYESRHNAEKHLDRRYIQEHSSNIERPAEEALLSRERRFLPAAGYMPNPGGSDFRSRSPAEYSAQRQQMRFDPFTGEPYKFDPFTGEPIRPDPNQRRSGSLY

SEQ ID NO: 59504 - protein, 288 aa, Zea Mays
MPAAAVVSPLLLSLSSSSSPFLSSSSTSFFPPSSAAVTPHAAVRTRAAVSVLRALRAEAATLPVLSFTGEKVGEVTLDLKSAPPSTARAVVHRAIITDRQNARRGTASTLTRGEVRGGGRKPYQQKKTGKARRGSQRTPLRPGGGVVFGPKPRDWSIKINRKEKRLAISTAIVSAAKDAFVVEEFEEAFASGPKTRDFVAALQRWGLDPKQKAMFFATDFDDNVRLSGRNIGSLKMLTPRTLNLVSDDYYTDDEDDGEEELVEQEAEEGTTADAAPDATEEGEADSSS

SEQ ID NO: 59505 - protein, 197 aa, Zea Mays
MAPAVIAKGEDVMWTSGLIFGKGEGIVGLETNLGTLHIQLLPGCAPRSVDHFIELLGLRNCAGCRFYRAEGRGNVWDAKGDHEKNVAFGPPYALLQGTLEVDGVPFKKIPREACPAVKRGSVAWVGSGPEFLISLADHEEWRDAYTVFGNVLPMDMAIAEEMTLLPTSTDVWSNVKVKVLKDPVYFKVKRSSNASAV

SEQ ID NO: 59506 - protein, 278 aa, Zea Mays
MEVTPKTLADVKGGTLISYEGRVQLLEIAQVPDEHVNEFKSIEKFKIFNTNNLWVNLKAVKRLVEAEALKMEIIPNPKEVDGVKVLQLETAAGAAIRFFDKAIGINVPRSRFLPVKATSDLLLVQSDLYTLVDGFVIRNPSRANPANPSIELGPEFKKVANFLARFKSIPSIVELDSLKVSGDVWFGSGITLKGKVTITAKSGVKLEVPDGAVFENKGRERTPWDISVLTVPQLNAPATKRTISPGGMLYDKGDLSTQVATSTCLVLENIVVEGHIPR

SEQ ID NO: 59507 - protein, 221 aa, Zea Mays
MGSKVLILKPRDATLVSGVYSIGVYGFKGTSKYQLSVAIKDVSGQRIGEYASASGSVDFDSVLCRNCKRHIASQSAHLHEAYCMRHNVACSHDGCGVVLRKEEAADHVHCNKCGRAYQQREMEKHMKVFHEPLQCPCGVVLEKEDMVQHQSLTCPLRLIVCRFCGDTVQAGGEPSDVRDRMRNMSEHESICGSRTAPCDSCGRSIMLKEMEIHLIAVHQKS

SEQ ID NO: 59508 - protein, 994 aa, Zea Mays
MWTNVPMSILILAFLRYLSFKVEFRWREHPVRKQTHLSQASKRQLSANDHRLSTVPPVSRWRRKVGSPSVEAAFESFIEKILRDFVLDLWYSDITPDREAPELIRGLVLHALGELSGRVKEMNLVDMLTRDMVDLIGNHLDIFRKNEILIGVDVMRTLSSEEIDERLKQHLIVSQELHPALLSSEHEYKVLQEIVGGIMALVLRPQDAQSPLVRCFSRELMTCLILQPVMNFASPVYINELVVYLLNAKDTGSAGGTNMANTGTVTLVPYKGGSQGCQMESRNLTVETSGLVPPNNSGMRSLVTSECGKSKVSEDDNDGTIQPRQPDWAAVLDAATKRRSEVLAPENLENMWAIGRNYQKKMVKLDHSSRQKGSEGSDNSTSAGAVGKELSSNFNDRIASVDDKYMVNLMQSKNRNAQSTFVTGSHPLALQNMNEVKPKEGSQVNFTSKEKPHETSNRVKAQLKRCNSTPDIEKRYLAKSNQPMVSSERLNVRINQDERGVGPASHVEVLMHVPKIRCRVVGAYFEKQGSKSFAVYSIVVTDADNKSWFVKRRYRNFERLHRQLKEIPNYSLHLPPKSFLSSSVDDYLVHQRCILLDKYLQDLLSIANIAEQHEVLDFLSASSKTYSAGKSSSVMKTLAVNVDDAMDDIVRQFKGVSDGLKRAVGTSPSSATAQFADNRMSLSWNQEEKDNHNLHQRNLERAHSLSDGDSNYEDHISSVNSGCHSDNEVNNRGHTSNDVEHIETCSSLDKQASDQIGKPAKEYSDSSNMSSLNAFEDPTGIPPEWMPTNVSVPLLNLVDKVFQLKRRGWIRRQVLWISKQILQLVMEDAIDEWIIRQINWLRREDVIVQGIHWIQDTLWPNGIFFTKLDEYKGNAGTSEFDKQSLGSPTLAVGNKKGRTSSFELHLEASRNASEVKKLILDGTPSALVSIIGYKQYRRSARDMYYFLQSNVCIKQLAYAMLEQVLVTVFPELRQLIEDIHEKGRKEQASFTYQL

SEQ ID NO: 59509 - protein, 287 aa, Zea Mays
MPPGKKGPRVPRHHAEPTPTDYEKQRAITIMKNNQMMQRLGIRQLQSMMASIPSGRMNDNAPQESGSLYDGDDIEDSEDEMESLVDKSVASHIPNNGAEISSKNTRASKRVVAPGVQEQPIRVTRRRSATINQESNQNIMAGILSDSCDATNQDCIQRISTVVQPSSPIETESEDPTGDQELVPRQRSMGRQLESLSRGLGIKIPIQIREGKRRPEAPIQAAKFASEGGIALRQHMPIFSHWKEYKKKENAGKIENYIGKIAGQFTMDADNTAVRAACIDMLKGGHR

SEQ ID NO: 59510 - protein, 322 aa, Zea Mays
MWILGHETTHLDSNSTWSDYVKDAKDRECFLKTRDDDFLARTMDQFRLMQNSQVTDNVSRWNIECQCAPDAQLTGDNRATIPDKAQVVEPAHAEQVPVQSERAVEKTWQVRLDQLSLSPSFAPGEQLTDEKVVEPAHAEQVHLARLSPSPSRERARLSQFAPGAQLTDEEAATLEEEDRPQIDLLDGLPQLAEAVARTPVRSASDGRFWSNEHMDLYNSIYSKKKCADNKWIDWKNIKRLPKMPYVEKASRDISLHELMAIKQNWYEEPIKQFYSTLSINQSRTSLTWMTGINKKITVTKRFCQKVLHVPSEHNIKIKRQLM

SEQ ID NO: 59511 - protein, 272 aa, Zea Mays
MMFRAQCSLVVDCGFSFTHASPVLQNFTLNYGVRRMDLGGKALTNYLKELVSYRSLNVMDETLLIDDAKEKLCFVSLDVPGDLHLARCSYILPDGITYKKGFVKDMDEALRYRTLPQVSDSKDHGMDTNKSEDRKKAELSQNEFVLTNERFLVPEMLFHPIDLGINQAGLAECIVRAVQACHPYLQPVLFESIILTGGSTLFPRFTERLERELRPLVPDDYKVKITRQENPIFGVWRGGSILASSPDFESMCITKSEYEEMGSARCRRRFFH

SEQ ID NO: 59512 - protein, 655 aa, Zea Mays
MKVEDANEKIGHLQTKINMLEDNVAAKDVSLEAAIKENDATRKSLTEAQERNGELLKKISDSDYRIHLLQDTVQKLQVDAISRLSSFVMEKQESDIAKRAVTEAHERNEDLLKRNEDLLKRNDDLIKKIEDSSKIVTQLQEALQRLEGKASNLEVENQVLRQHATSTPPSTAKSPASRSKISRIHRSPENGHILNGDIRQTEMKPSTGTSAAITSVANVPDLGDQKEFEHGEKLQRIPKQKYQPSHNQQPQDDQQWLVTCISQYLGFSGSKPVAALLIYQCLLHWKSFEAMKTGVFDSILHAINSATEVQNDMRTLAYWLSNLSTLTVFLQRSFKTTRTTISTPQRRRFSSERMFGNQTSNAGLAYLSGQSVGSAGLLQVEAKYPALLFKQQLVDLIEKVYGMISDSVKKELNPLLELCIQDPQTSQSSIAKGNLNGMGQQNQLTHWLGIVKILTSYLDVLRENHVPSILVHKLFTQMFSLIDVQLFNRLLLRRECCSFSNGEYIRAGLAELKHWSDNATREFAGSAWEALRHIRQAVDFLVISLKPMRTLREIRTDVCPALSIQQLERIVSMYWDDVNGTNTISAEFTSSLKSAIRDESNMATNFSILLDDDSSIPFSLDDITKTLPVIELADDDFLPFVHENPSFAFLLQRGE

SEQ ID NO: 59513 - protein, 762 aa, Zea Mays
MTVTPRITVWDGRLVAHGRSVLAGVPDNIVLTHASGAGLVDGAFVGATAAEPSSMHVFTFGTLRDLRFVCCFRFKLWWMTQRMGTSGRDVPLETQFMLLECGPGDGHGDGDAAVYVAMLPLLEGQFRAALQGNDRDELEITLESGDKAVQTAQGTCMLYVHAGTNPFDTITQAVKVVERHMQTFHHREKKKLPSFVDWFGWCTWDAFYTDVTAESVKQGLKSLADGGTPPRFLIIDDGWQQIGSENKEESANAVVQEGAQFASRLTGIKENAKFQKKTKTKESGGGGGEQQAQTPGLKLLVEEAKREHGVRYVYVWHAMAGYWGGVKPAAEGMEHYESALAYPVQSPGVMGNQPDIVMDSLSVLGLGLVHPRRALSFYDELHSYLASCGVDGVKVDVQNIIETLGAGHGGRVALTRAYHRALEDSVARNFPDNGCISCMCHNTDMLYSARQTAVVRASDDFYPRDPASHTVHVSSVAYNTLFLGEFMQPDWDMFHSLHPAADYHGAARAIGGCPIYVSDKPGNHNFELLKKLVLPDGSVLRAQLPGRPTRDCLFADPARDGTSLLKIWNVNKCTGVVGVFNCQGAGWCRVTKKTRVHDAAPGTLTGSVRADDVDVIAGLAGDGWGGEAVVYAYRSGELVRLPQGATLPVTLKVLEFEVFHVSPVRAVAPGVSFAPIGLLDMFNSGGAVEQCEVRGGANAAAAVALRVRGCGRFGAYCSRRPARCMLDATEVEFSHDADTGLVTLHIPVPEQEFYRWSLEIEV

SEQ ID NO: 59514 - protein, 72 aa, Zea Mays
MGIEPFLLLIHPISNCLNSWDPVTNRRKCCREMPNNQRSASSSKLAGGHFLPVDVGAWLMQYFPLIWSTLLR

SEQ ID NO: 59515 - protein, 222 aa, Zea Mays
MAASALHLRLHPSPPAGVKLQQRKLRSKIQRQGGLSRRFSKVVSYYGLTTPPYKLDALEPYMSKRTVELHWGKHHQDYVDGLNKQLATSPLYGYTLEDLIKEAYNNGNPLPEYNNAAQVWNHHFFWESMQPEGGGLPEGVKRNERKLSVVHTRNAISPLAFGDIPIISLDLWEHAYYLDYKDDKLTYVTNFMDHLVSWHTVTLRMMRAESFVNLGEPNIPEA

SEQ ID NO: 59516 - protein, 178 aa, Zea Mays
MGTTGGNRQLLHKTVHDANIYAVISPQMGKQVVAFLAAMEIMSEQFPGAFSGYKLEVMESHQATKLDISGTAKAVISCFQKLGVSFDMNEVKQVRDPEEQVTLVGVPEEHLGGHAFHMYHLTSPDGTVSFEFQHNVCGRSIYAEGTVDAAMFLYTKIQSGASKKLYDMIDVLREGNMR

SEQ ID NO: 59517 - protein, 453 aa, Zea Mays
MPLLTGPMQPAPISSAAPAPAPVDLLVAHQPLNLQGFSFSSMSDSESDDESEDDDMTAETGGNQDRLGKRKRGDGGGSSSNKMMSFFEGLMQQVVDRQEEMQRRFLETMEKREAERTAREEAWRRQEVARLNREQEQLAQERAAAASRDAAIIAFLQRIGGQSVQPPATAVVVPMPAPVSVHTTPPKQPSRQQQQPPPPSPQAGQATPQSKPISAAPLQQQPPQQQPKDTSQQDAGTPRSLPPASSQSLELVPVAATEHHVDSGLGGGDGGAASSSRWPKTEVHALIQLRMDLDMRYQETGPKGPLWEDISSGMRRLGYNRSSKRCKEKWENINKYYKKVKESNKKRPEDSKTCPYFHQLEAIYNRKHLRSLTTAATSSAAAAPRPAYPDQLNPSRQEIEGKNINDDKRNNGGSGGGTQVPTSNGETATTTTTTTLVAFDADTGMKKKTSSGS

SEQ ID NO: 59518 - protein, 554 aa, Zea Mays
MARHIFSDQPEEYIQSQVNTLLHSLDIDNRMRGPMHGQYPELQEYWKQSQSSTRPAPMHNAADKWITEFGKQNNNPENWANSFEQQYGPNGWASEFEQHQSQMAMRQMGGANMANLAAMEQSRVLAQTLASNNDPKFQNSKFFQFVSKMSRGELIIEDNQVKEGSASQSSGWADEFQTPYIANANSWADQFAHEELSQGADKWVSEFSSQPNHGALNENWVDEFSKLNVTDEWAEEFSGGGFGESSADPWVDEFQEHLSSFKQSPGASRGVYVFSENNPYVGHPNPMQEGQELFRKGLLSEAVLALEAEVLKNPDNTEGWRLLGVTHAENDDDQQAIAAMMRALEANPTNLEVLLALGVSHTNELEQGEALRYLYRWLQNQPKYGGLVPLQSTDSPYGPDVVRLFNEAAQMSPEDADVHIVLGVLYNLSREYDKAIASFKTALQLKPQDYSLWNKLGATQANSIQSADAILAYQQALDLKPNYVRAWANMGISYANQGLYEDSIRYYVRAVAMNPKADNAWQYLRISLSNASRADMIAACDARNLDALQKEFPL

SEQ ID NO: 59519 - protein, 113 aa, Zea Mays
MQALLLPARAAPPTPAMLRQRAVSASACASQVCRPLFGAASCISCGVHGSVRRHLTVAVAAAPPSPSSSPSSGPLYPTPPPTEQEVERVKLEQVMRRLEKTASLLVIWLHPSL

SEQ ID NO: 59520 - protein, 211 aa, Zea Mays
MHVIAVPSIPKKTAEFSSADEVINSLLDVRPEKWGLPPFNDWIEGTLPIEPWFIGGPVIKGFGRGSKVLGIPTANLPAENFSDVVSEHTSGVYFGWAGLSTRGIYKMVMSIGWNPYFDNTEKTVEPWLLHNFGEDFYGEEVRLAIVGYIRPEANFPSLESLIERIHEDGRVAEKALDLPMYAKYKDSPYLRNPSKHGSSTTGGTQSEMDSK

SEQ ID NO: 59521 - protein, 141 aa, Zea Mays
MLSGLASSLCQWASQVKKHTSYMMTIEMSFIGSVCLLASTYRSPDGEAIRKYGVFHEWTFWTMVPVLMNAVGGILVGLVTTYAGGIRKGFVIVSALLVTALLQFVYDGKPPSLYCLMALPLVATSIFIYQKYPYVDKKKKV

SEQ ID NO: 59522 - protein, 398 aa, Zea Mays
MMGLDVVQKPAQNGPQGASVSPQCDNNYSTRNYGVRPSWNSRRGPRGSFIPPIRNNGGSGTTISRVTGKNDESMEDSTRKCIEMLCAPDGELPEKLRNLEPRLIEHVSNEIMDRDPNVRWNDIAGLEHAKKCVTEMVIWPLLRPDIFRGCRSPGRGLLLFGPPGTGKTMIGKAIAGEAKATFFYISASSLTSKWIGEGEKLVRALFGVASCRQPAVIFVDEIDSLLSQRKSDGEHESSRRLKTQFLIEMEGFDTGNEQILLIGATNRPQELDEAARRRLTKRLYIPLPSLEARAWIIRNLLEKDGLFMLSEEETSAICKLTEGYSGSDMKNLVKDASMGPLREALQTGVEIAKLSKEDMRPVMLKDFENAMREVRPSVSSSELGTYEEWNRQFGSLSI

SEQ ID NO: 59523 - protein, 103 aa, Zea Mays
MRHIQMCVYSELKKLKHKKCLVQSPQLLHGPIRLWHRNPILDSIEGLQCRHRHSWKSSTDGHRAPRWAVLSTAARTACVGSILTPAPTSAPAAQHSDDTSSSL

SEQ ID NO: 59524 - protein, 112 aa, Zea Mays
MILATSTVSTFVKYIFYVSDMLMEGQWEKKAVYTFYLVRELYVTFRNFRIRIADYVRYRKITSNMNERFPDATSEELDVSDATCIICREEMATAKKLLDGHLFHVHCLRRTG

SEQ ID NO: 59525 - protein, 544 aa, Zea Mays
MESSKQSIAITVAHELAHQWFGNLVTMEWWTHLWLNEGFATWMSNLAVNSFFPQWNIWTQFLDDTTAGLKLDSLEESHPIEKALASYIRKFAYSNAKTEDLWAVLEENSGEPIKNMMTTWTKQQGYPVINAKLQGNYLELEQAQFLLDGSSGPRMWIVPITADCGSYYTQKKILLKGKSDRLDIRDIASQCGNQEKGGNFWIKLNINQTGFYRVQYDDKLAAALQNALQAKKLSVMDKIGIVEDSLALSMACKQTLTSLLRLLYAYREEADYSVLSHINTASLSIAKISVDATPGLVGDIKQLLIKLLLPPAVKLGWDLKNGESHLDSLLRPVLLVALVKLGHDKSINEGARRFSIFVHDRNTSLLRPDTRKAAYLAAMQNVTASYRSAYNDLLKVYRESDEAEERGRVLSTLCFCKDENIVLESLNLLFTNEFRKQDAYYVLQGLDVETRDTAWVWLKDNWDRVTRKYGDTQAGGFIRYVVTLFTSNEKAAEFSRFFATRKKPEFERTLKQSLENVRISARWIQGIKSEPRLAQTVQELLRRP

SEQ ID NO: 59526 - protein, 444 aa, Zea Mays
MAAAAGDGAGEARARALLQQHRPFATPPGEYHHFGAPSAAADEMVEAVVLRTPLKRKHNDRTENEAAESNDWMSPGYANAGSSPVPTPPSGKGLKASTKPKATKGQKSGPQTPLGFGSPGNPSTPVGGCRYDSSLGLLTKKFLNLLKGAPGGIVDLNNAAETLEKRRIYDITNVLEGIGLIEKKLKNNIRWKGVDDSRPGEVSDDMSILQADIDALTLQERNLDERISEMRDRLRGLTEDENNQKWLYVTEEDIKSLPCFQNQTLIAIKAPHGTTLEVPDPDEVNDYPQRRYRIVLRSTMGPIDVYLVSQFEEMSGMETPPRPTQTISMDSLENPRTPLAADCNKVTGMESNIHGGLILPSDAPSSSQDISGMMKIVPSELDADTDYWLLSDNTGVSMTNMWETGPDEWDGIEKFNAEDFLEVGTPQQQDKPADVVDDDPSCII

SEQ ID NO: 59527 - protein, 597 aa, Zea Mays
MGNTCIGPSAPSDRHSFFNTVSLAVLWRPPAAADRAEPSPTAEPSSSTPCSPPSRAPNPVTISDSEHPPHSTSTALGPAAPPNPNGKPKPKPKVKRVQSAGLLAGSVLKRDSERLKDVYTLGKKLGQGQFGTTYQCVEKATGKHFACKSIAKRKLVTDEDVEDVRREIQIMHHLAGHPNVVSIVGAYEDAVAVHLVMELCAGGELFDRIIQRGHYSEKAAAQLARVIIGVVEACHSLGVMHRDLKPENFLFVNQKEDAPLKAIDFGLSIFFKPALICFAGRGEDLLGQSCEIFSDVVGSPYYVAPEVLKKRYGCEVDVWSAGVIIYILLSGVPPFWAESEQGIFKQVLKGGLDFSSDPWPSISESAKDLVRKMLNRDPRKRLTAHDALCHPWVCVDGVAPDKPLDSAVLTRLKQFSAMNKLKKMALRVIAENLSEDEIAGLKEMFKMLDTDNSGQITLEELKIGLKRVGANLKDSEITTLMEAADIDNSGSIDYGEFLAATLHLNKVEREDNLFAAFSYFDKDGSGYITHDELQKACEEFGIEDAHLEDIIHDVDQDNDGRIDYNEFVTMMQKGNNPLGKKGHCQMSFGLREALKLG

SEQ ID NO: 59528 - protein, 267 aa, Zea Mays
MESSLLLSTPRPLKPFHPHHFPTARRRDASFRGKPPPPPPLPPLGRGSRRLGRAVPRASSEAFGDGFRSQDRPPGVSSGGVRRRTYREAQGEAAVPPVAAAARAVAPYVAPVGAVLMLSFVIWKVVQNMIPGKKKDHGSGKHAPSGIMWSFAAGSNLATSTLSAEKESRKNLNKFYKELRTLKTVNMAGRQFGDEGLFFLAESLAYDKSAEEVDFSGNGITAVGIEAFDGVLQINTTLKTLNLSGNDIGDEGAKIYWLKMWVSRNSS

SEQ ID NO: 59529 - protein, 618 aa, Zea Mays
MTRGRGRNVAPWTHHDPRFNSLDMMDFASQMASQGPPAHPSLFMGTALPCGPYGFMPGMPHGILDPIHPLGMQGPIQRSVSPLIDLGMPRQRCRDFEERGFCLRGDMCPMEHGVNRIVVDDMQSLSQFNLPVSVPNAQGLGIQNEGGTSSVNLSNLGGSKSVPVKDVKSGVASDALKPNGSAVSAVADADVYDPDQPLWNNEHREASSTGFINKDVGPWNAESSGYEMGQEHSNQVLASDGSQSLKSSVWGRITSKRKPGGNNTAKSTPTSITGNQKSDYDDMAISTGQVKSAAKDTNGQPNSRIYGDVGWQSNRAAQKASRTLYVNGIPQESNRWETLLSHFQKFGQVIDIYIPSNSEKAFVQFSRREEAEAALKAPDAVMGNRFIKLWWANRDRVLDVGEGRISQKPSQLSTTPANSYPNRVKENVQPTAPGPSSGSSAELLSSGTPSSRMLPASSAKAVPPHAPKRQESLELLEELRKKQEILAQKRDEFRRQLEKLTKQKGSANSVKHAETGGKEIASNDASQVKDAASTRVEGSQETAGSLEKRSSGEFALLSQKSAAISTQKPVVVTKQTTLPAPPQNRFKLDNRTTSFRILPPLPPEIANVSFTSNHLPFL

SEQ ID NO: 59530 - protein, 408 aa, Zea Mays
MYLANMQGWKAPLMNQAGRLTLVRSVLTAIPIYHLIAIPCPKWVVKAIDKIRRGFLWKGRKDVRGGHCLVGWNKVCKPLSMGGLGIHNLEILGWALNLRWLWLKKTQPDRPWAEFDVQVHPNVTAMFSASVCSIVGDGGGTLFWTDRWLHGQCISEIAPSLLNRVPIRVRKRKTVQQALRDNSWVGDISGSLPAEVIVDFLIIWDLTQDIHLQPGVPDAFRWLPGASGEYSAKTAYQRFLAGSMEFEPGKRIWKSWAPPKCKFFIWLASLNRCWTADRLARRGLDHPVKCVLCDQQEETIQHILVSCVFSRNLWWQILCKVGLQLVAPGLETSIFQDWWSMAEDLVPSLHRKGFNTLVILVAWWIWKHRNACVFDGVSPNSNAVLQQIQEDARLWEMAGAKALRRLWP

SEQ ID NO: 59531 - protein, 292 aa, Zea Mays
MYRDARRYSTSGGHHQSIGRWFQQAHHRETCRAKQSGKEKQRAEKAHVHAMVSVARVAAAVAAVAGSGDTQTQATKMARAMASATELLASHCVEAAQHAGARHDQVAAAVQAAVGVGSPGDLVTLTAAAATALRGAATLKQRVQRETARSNASVLPYERGSSWSPDIWCKEGDLLKRTRKGGLHRIRVSIYINKRSQVILKLKSKHLGGALSKNNKSVVYGVYSELPTWAGKGSVEETCCFGLSTAQGLVELECEGSASKRKWVDDVQSLLREAALHGHGQVGNGMGLVKLS

SEQ ID NO: 59532 - protein, 421 aa, Zea Mays
MLMGNTWPVGMAGGNTAATLWCSHCGMGIAAPAPGSGSIVRCAFCRGVTRVEHQRGGVGERAMTTRTLAAAASLPRQLPVSAGPVEIPASYPRVSGGNKKRALLVGVSYTGTAHELKGTVNDVKEMRRLLCDRFGFPGACILELTEKESDPTRVPTRENLLRAMRWLVEGSSSGDSLVFHFSGHGVQKLDMNDDEVDGYNEALCPMDFERSGKILDDEINDTIVRPLGKGVKLHAIVDTCHSGTILDLPYLCRMSRTGYWQWENHARPSGMLTKRPNGGLAISISGCSDDQKSADASGFSDESSSIGAMTDSFIKAMLISGYSDGKAKSSVASAQKPEACATMGAMTHSFITAVEREPQGVTYGRLLTSMKAIMTNSGGCAVQGPIGAGAAARKVANFSGVEEPNLSSSEKFDIYRKAFVL

SEQ ID NO: 59533 - protein, 618 aa, Zea Mays
MRPSARASLPSLALKMDSLQKLCSSLEPILRRVVSEEVERALAKLGPARIQGRSSPKRIEGPDGRNLQLQFRSQLALPIFTGGKVEGEQGAAIHVVLLDANTGCVVTSGPESFAKLDILVLEGDFNKDEDEDWTEEEFESNIVKEREGKRPLLTGDLQVTLKEGVGTIGELTFTDNSSWIRSRKFILGLRIAPGFYEGIRVREAKTEAFPVKDHRGELYKKHYPPTLKDDVWRLEKIGKDGAFHKKLNASGIYTVEDFLQLLVRDQQRLRSILGSGMSNKMWDSLVDHAKTCVLSGKHYVYYARDSRNVGAIFNNIYEFTGLIADDQFISAENLTDNQKGYADALVKKAYEDWMQVVEYDGKALLSFKQKKKSVMTRSDAAVASTNHPASNGSAISQKQLSLPAKAGQTSSAGIMNEDGTRNAYNANGNQSARYAATTQNIPANVAMQYDRSAVSPESQFSGSSLQSQASRGSNTLALGPPQQHQSFAFPALGQSMRPTGLNPFEEWPQQQENCGGVDDYLMEEIRMRSHEILENEEMQQMLRLLSTGGAGTNLTEDGFSFPSYMPAPSPKLSYEDDRTRAPGKAVVGWLKIKAAMRWGIFVRKKAAERRAQLVELDD

SEQ ID NO: 59534 - protein, 273 aa, Zea Mays
MAAAAPVASGSGRLSRPRPPRVGLRGARVAAAAQGPSCLYVGPIETASQEKLEALYHQARDSYYSGQPLIIDDMFDKVELKLRLYGSKSVVKYPRCSLIRHSTYADAEEDQSMFMALSSIWMLLLLFGTSAVLVPTLYTLSIAFGDVFGARHLLYGEKSLDAVTRVNDLALVGLGYLVGYPIASASVGALQGLLSNNLVALKGSCPNCGEQVFAFVKIEKTVRAPHRAECHVCQCPLEYRTKIEKSSSGPRRSWVYGRVYLVKQGHPETEMDK

SEQ ID NO: 59535 - protein, 417 aa, Zea Mays
MISCAFATISHSQTLGCFPRVKILHTSRQYSGQLYIPEVNYLLCLGACLVTVGFRTTVIIGEAHGICVVLVMIVTTLLLTIVMLLVWKISVWWIVAFFLVFMSSESIYLSAILSRFAHGAYVPVAMSAVLMVVMVVWHYVHVNKYRFELEHSIPRDKVKELLERSDIQRVPGIGLFYTELVQGIPPVFRHLIEKIPSIHSVLIFVSMKHLPIPSVDMSERFLFRQVDREDYKVFQCVARYGYRDPFEEAKDFVDKLVEHLQYYIRDVNLYGLGCEPMMKQSFSYCSSRAESFGSHEKTKVKAVYAEEMLTPAESFSEHARQASGKNKLFTQFQGDKMNIVEMMKIQQEQQAVLEEMSKGVVYIFGESEVVARPHSSLIKKIAINYIYSFLRKNSRNGEKMLSIPRRQILKVGVSYEI

SEQ ID NO: 59536 - protein, 902 aa, Zea Mays
MATAVASQPCHLPLSAGGDPSTSNVHTLEKVYGFRFICRSIVDVKTHKFHSRISKRKCYLRNSLSECDRTIHSGRWLEFRRHKGVFQRTRRMVHIIPLASDGDGNHISVNGALQVGSTSNIDEIKLKLNKALQSEDISNGLVQSIHDAARSIELALIEHSKLPKSSWFPKTWLGVENNAWIKSLSYQAAVDSLLKAVIDVSSRGNDRDRDINVFVQRSLSRLLTPLESVIKNELSKREPALYEWYSSDQNPLVVRQFVNIFENDPMFYSATAICLEGEPMNTSESDLSLLMLGLICLAAITKFGSAKVSCQQFSSMVPDIIGRFMDMLLEFAPLSKAYNLAKDIGLRREFLYNFGPRAAVPKLGNDHGLEISFWIELVQKQLLWALDREKIWSRLTTSESIEVLEKDLAIFGFFVALGRSTQGYLSFKGLTDLDDSLNGIVRYLIGGSVLYYPQLSSISSYQLYVEVVCEELEWLPFYNDDVLSAKTDTEGREEVPKGEVISRVLNVCSYWMTSFTKYSSWLENPSNVKAAKFLSKGHVMLSDCMKELDISRNMSNDSGFLEPEEELDTGTELASFDKSLENVEEALVKLENLLQELHVSSSHSGKEDLKAACSDLEMIRRLKKEAELLEASFLAKAEYLEADASSGSLSPAEEGPVKTSSRTNDTSAPQKTGSRVDNKRRPFWDFFGRSLKVDPALADQDLITVANVEKEGMESNDILRFEQLRRELIELEKRVQKSADEAQKEEEMVVAEKTTAPSPGSSVSSRQTTKKENVITKSVEKVKETTTTVLQGTQLLAIDTGAAMGLLKRALIGDELTQKEKQALQRTLTDLASVVPIGILMLLPLTAVGHAAILAFIQRYVPSMIPSTYAPGRLDLLRQIEKVKEMEVAEGSSEDILEELNK

SEQ ID NO: 59537 - protein, 124 aa, Zea Mays
MQPALAITLKAAATLEAAHATTLSPAHWAPSVLSLFCHRRCVAPQLLASPPLANPRLLPLRPLPCRRLQRQLWPLLHSRPVLATMCLFLMLCLRIHHRHCHSLGSRIVLLSCFYVLLLCSRSIL

SEQ ID NO: 59538 - protein, 257 aa, Zea Mays
MAGYGEENQNAMNGYEEEEEEEEVEEVEEVYEEEEEGDGEGEGDEGAAAEAAAMAAETRSVDGGRGLAEAVGNVDAGGEDERDADSSGGDASGKVFVGGVAWETTEETFTKHFQKYGAITDSVIMKDKHTRMPRGFGFVTFSDPSVLDRVLEDEHVIDGRTVEVKRTVPKELSSKDGPKTKKIFVGGIPPSLTEDKLKEHFSSYGKVVEHQIMLDHSTGRSRGFGFVTFESEDAVERVMSEGRMHDLGGKQKSAFNS

SEQ ID NO: 59539 - protein, 351 aa, Zea Mays
MEEMLMAGNAANPNPPPAAAPSAPGAQTQRGGGAPPPAAGAAAPRAGATGGAAPAGTERRPRPQKEKALNCPRCNSTNTKFCYYNNYSLQQPRYFCKTCRRYWTEGGSLRNVPVGGGSRKNKRSSSSAASSTSAAMSGTVSVKNPKLVHEGAHHDLNLAFPHHNNGRALQPPEFPSSFPSLESSSVCYPGPAMLGNGAAGRGMGALSAMELLRSTGCYVPLQHVQLGMPAEYAAPAGFTLGEFRIPPPPPPQSQSVLGFSLDTHGTGGYSAGGLQESAVGRMLFPFEDLKPAVTTAGGGASNDGADHRQNDHRKDQAAGDGSSVTGGHETPGFWSNSLIGNGSSNGGGGPW

SEQ ID NO: 59540 - protein, 379 aa, Zea Mays
MSQPAATVAAAAQPQGRGPAGRQGGLGQSIAGIVRMAVFWYFASKFFGPKRPPADPGMLMSNLFQKGEPMDMWMYLSENEKFNDFANEDALIWHEANIPYAVWGPTSTRTRSLTYYPSEALKHNGSLYAHVYFAPFGVILWTLQIQNMSRNLRLGGPIVSVVAFLPKSKAGKKKSLLGDSEEPEEKAPRNKENKESEDKDEGPTEYISYWKPNVTINLVEDFTRYPNNNVPPIVAPYLNVDPVTGDYYPTVFFNEFWLLKDKLIALNETVEELPLNLEVGPISMTKWQLFLQIEQSFQVHRSYGSMLEGEADELKRVFLEGNPYLLGLTMVVSLLHSLFDFLAFKNDPVLEQEQVHGRSIGKICGSEFCVSTSCFPVPS

SEQ ID NO: 59541 - protein, 345 aa, Zea Mays
MDGRCWKRADILQSALREGVDKIKYRAWPLVPSMSARMDHQPLEVSPSSDFVQIPADAVDVWEVDLRLLKFEQKLASGSFGDLYHGTYCSQDVAIKVLKPERVSVDMLREFAQEVYIMKKVRHKNVVQFIGACTRPPVLCIITEFMHGGSIFDFLYNRRGNFQLPDVIRIASDVSKGMNYLHQINIVHRDLKTANLLMDDQVVKVADFGVARVKDQSGVMTAETGTYRWMAPEVIEHLPYDHRADVFSFGIVLWELLTGKLPYEDMTPLQAAVAVVQKDLRPTIAVDTHPMLAELLQRCWQKDPALRPTFAEIVDILNSIKEAVRSSVHHKRHSCRSHSGRRRGC

SEQ ID NO: 59542 - protein, 288 aa, Zea Mays
MWIMKIFNVTLSDGTVSEGTLRVSEAAIQISRCRVSEYLSLHTCYDLLPDSGKVIALDINLPVKQSFHILHEQGIPVAPLWDSFRGQFVGLLSPLDFILILRELETHGSNLTEEQLETHTISAWKEAKRQTNGRNDGQWRPQQHLVHATPYESLRDIAVKLLQNGISTVPVIYSSSSDGSFPQLLHLASLSGILKCICRYFKNSTGNLPILNQPVCSIPLGSWVPKIGDLNSRPLAMLRPNASLSSALNMLVQAGVSSIPIVDDNDSLLDTYSRSPSKRQGLHTCSAG

SEQ ID NO: 59543 - protein, 742 aa, Zea Mays
MENTNFVMFAKKLCSQLNNRSSMAASASVKNTSSQHGQSRPDTATVSTSTPPNALLSASLLKVAQQNGHPVREHSVYAERDLRFIQQASICESQFGSNLQSGVMNSCLTSPSFASVKKQSLLMNSIGQLQFSNNVHSSADLAREIILKSLGRQDSSICENTNMNMHRGRYVVSLGRQDSSVCENTNMNMHRGRYVVSNDINGSRNFDFLPIGAKESRANLSIPASSQILDHMPGTLQQKQSLVPFRVTQSSEFSKKVENPESGSFQIPSVTTSDSGGQVSNSFNMVQENRLSMSNNVRQVQKIDRFSDPSANVSTQRMKNRDECEPGMPIERASSFLVEPGADNDLFDMFGSEFHQSSHNVGADLVTWSGTESQNSDRDVPESSICFNSSPLFSSLDNELHYSGILSLTDTDQLLDAVISNVNPSGKQCPDNSASCKTALMDVPSTSHLCSIDLKRCESPSVPSLLIKHELAQFAKQPCLVDKSEDGCLSQNNGMHKSQIRLWIESGQNMKCESASASNSKGLDVPSKANRKRSRPGESPKPRPKDRQLIQDRIKELRELVPNGAKCSIDGLLEKTVKHMLFLQSVTKNADKLKDSTESKILGSENGPLWKDYFEGGATWAFDVGSQSMTCPIIVEDLDRPRQMLVEMLCEDRGIFLEIADFIKGLGLTILRGVMETRKSKIWARFTVEANRDVTRMEIFLSLVRLLEPNCDGSGAADNTNNMNMHLGLVHQPVIPATGLIQ

SEQ ID NO: 59544 - protein, 447 aa, Zea Mays
MMLSNQLPMRLKEVSATILANVVASGARFESIPLDHNRQTLVSEDIVHNLLHLISNTGPAIECKLLQVFVGLTDSSTSVQNIVDAIKSSGAIVSLIQFVEAPQREVRMNSIKLLNNISPYMGQELADAFRGNFSQLSSLVKVIVDNNGISEEQAAAAGLVADLPMGDSVLTRRLLQDGAFAAIISKVLRIRQGEIRGGRFVNPFLEGLVRIVSRITFVLDDDPDIIAVARDYNLASLFTDLLQMNGLDVVQIVSAVSLEKLSQQSKHLTKILPAPSPGLCFSIFPCLSQKTVATGVCRVHCGICSARESFCLLEGKAVEKLVACLDNNNEKVVEAALAALSTLLEDGVDIEQGVMVLCDAEGINPILAVLCENRNEALRQRAVWAVERILRTDEIAYEISGNQNVGTALVEAFRHGDSRTRQVAERALKHVDKLPNFSGIFSKMGAQ

SEQ ID NO: 59545 - protein, 1174 aa, Zea Mays
MEALNELCDLVAAHPDLLLADKLAWLSSRCAAAPGAAAPQRASRAHLHSLLALARLLPAGGAGAGAEGDAAPPAPLLFFLASHAFLSPAFWPQSFAPAPFLARLLPLLAAAPSSPALSSALSAALLAALDVADPTSAPLARAFLSAAAAAAPLPLLPADAAPIAARLLLEFLGSEEEPIRAKGKGEDTLGEENGGAKEVVRRFEEEEVDELERKEVAFRLTVHMLGGEGGLETEQIGKVRNAAARQVRSLTDFLKIRKRDWREQGTQLRARINTKLMCCQAAVGVLVRSVSTMDTDIKSSKDMLQQTLAWFIEATKSCILSSWRKLKICEELFCTLLNGISQITVSRGGQLLPVLLIPLKPLVVSTCSQADMAGSSPGALFEAVVKLSCEIIEFGWTKDRALVDTFVMRLAAYVRERNDYEEEDGKGKEAVPVIRLNVIRLLAELCVCLKKWEVVDMILPLFIEHLEEGDASSPSSLRLRLLDAISRVACLGFEKSYRESIVLMTRSYLDKVKALGASENNTVPSEATTERTETLPAGFLLVASNLTSTKLRSDYRHRLLSLCSDVGLVAESKSGRSGADLMGPLLPAVADICSDFDPVSTVEPSLLKLFRNLWFYVVLFGLAPPIQNNEAPTKPVSTSLGTAESSSAIALQAVAGPYMWNSQWSVAVQRIAQGTPPLVVSSVKWLEDELELNTLHNPGSRGGNGNENSAVGQRAALSAALGGRVEVAAMNTISGVKATYLLAVAFLEILRFSCNGGILSATSTLNRSNSAFSCVFEYLLTPNLTPAVTQCLTAVAHRAFETVLSWLDDRISDIGEGADVRESVLSVHACFLIKSMSQRDEHVRDVSVKLLTQLKEKFPQVLWNSSCLDLLLISVHNELTSGPVSDPAWVATVRSLYQKIAREWLTSALSYAPCTTQGLIQENFCKPSGVQRTQHTADVVSLLSEIRICSGKNDWNGIRTANVPAVMDSAAAASGAKKEAPDFTLEVLSTAVVSATVKCNHAGEIAGMRRLFSTMGGINMGMSPPGTQSLHPHQSFDEVFVSKFVSLLQNFVVAAEKQPIDNSQFRETCSQATALLLDHMVSDSRANLEGFSQLIRLLCWCPAYISTPDAMETGIYIWTWLVSAAPSLGPLVLAELVDAWLWTIDTKRGLFASDMNYCGPDAKLRPHLIAGGSA

SEQ ID NO: 59546 - protein, 77 aa, Zea Mays
MVWCCWVNLEIYFVKSSNLNTFLDCLISGFYISLHISTNGTRETDKGHERILETINTVGHDGNNIDTADFCLCYLKV

SEQ ID NO: 59547 - protein, 506 aa, Zea Mays
MDRLARPASPGGGGLGYASRRGLYAQASSHHLAGGSAQTSPGGSPKELSPVHRHARAGSLGGAGAASTAGRRAGVGAGAGARAQNSAARAAAQRLARVMGGAGGDAGSGSDDDDDYELSGPPIELSNTPRRTSTRSPSPSVGRHLADQTQVGRPPSLTNRYTAGKSVPMIPSIKRPATSGPGAGAGSESPMPNRREQRRSVDLGSSLRARRTSSSLNDEINTLQVENESMYDKLQLAEERFDDGDAKSMHMEREDSDAGDAAETEPILINRKDAALEQRKIAMRIASRRSSSASCNEIATLKSEAKVTTNVVTSLSRRVKSARSELRSLQATANRMILSQEELEEVVLKRCWLARYWTLCSKLGIHSDIAEEKKEYWSSFAPLALEAVLSIGQKARDGTLSDNADMESRSKMSDVNDISTDGNIETMLSVEKGLRELASLKVEDAIMLTLAENRHVKPLSGQASEGRSPSESLVKCGRARRCTLQAGMVDLFLEAGEKSQHRRRYS

SEQ ID NO: 59548 - protein, 463 aa, Zea Mays
MSGVGSGRPPAAQKILQSLRPPLSFATPSRSPFAAPDDYHRFPTPAAATAPAATSGGVGAGAPPRDTIEEGLFIRTPLKRKATSEENDAAAEPSDCIITSPMPTSVSGKTVKASKAKAKNSKTGPQTPTSNVGSPLNPPTPVGTCRYDSSLGLLTKKFINLLKQAPDGILDLNNAAETLEVQKRRIYDITNVLEGIGLIEKTLKNRIRWKALDDSSVQLDNGISALQAEVENLSLQEQALDERISDMREKLRGLTEDENNKRWLYVTEDDIKGLPSFQNETLIAIKAPHGTTLEVPDPDEAGDYLQRRYRIVLRSTMGPIDVYLVSQFDEKFEELGGVATPVKHSSVPRHQPAEDFNTYAGQSSTPMDVAHDVQHGQKIPQDPSALHDFGGMTRISPSDVHTDSDYWLLTEGDVSMTDMWKTGQEVQWDQMDFLSEDVVTPRAHNQQPVTVDGPHMEVPSMDP

SEQ ID NO: 59549 - protein, 704 aa, Zea Mays
MSEISDAIRDGAEGFFRTQYGTISKMAFILAFVILGIYIFRTTTPQQEASGLGRATLAYITVASFLLGALCSGIAGFVGMWVSVRANVRVSSAARRSARESLQIAVRAGGFSAIVVVCMAVFGVAILYSTFYVWLGVDSPGSMKVTDLPLLLVGYGFGASFVALFAQLGGGIYTKAADVGADLVGKVEQGIPEDDPRNPAVIADLVGDNVGDCAARGADLFESIAAEIISAMILGGTMAQRCKIEDPSGFILFPLVVHSFDLVVSSVGILSIRGTRDSGLISPIEDPMAIMQKGYSVTIMLAVLTFGVSTRWLLYTEQAPSAWLNFALCGLVGIITAYAFVWISKYYTDYKHEPVRLLALSSSTGHGTNIIAGVSLGMESTALPVLVISVAIISSYWLGQTSGLVDESGNPTGGLFGTAVATMGMLSTAGYVLTMDMFGPIADNAGGIVEMSQQHESVREITDVLDAVGNTTKATTKGFAIGSAALASFLLFSAYMDEVASFAQMPFKEVDIAVPEIFVGGLLGSMLIFLFSAWACSAVGKTAQEVVNEVRRQFIERPGIMDYKEKPDYGRCVAIVASASLREMIKPGALAIISPMAVGVVFRILGHSTGQPLLGAKVVASMLMFATVAGILMALFLNTAGGAWDNAKKYIETGALGGKGSESHKAAVTGDTVGDPFKDTAGPSLHVLIKMLATITLVMAPIFL

SEQ ID NO: 59550 - protein, 165 aa, Zea Mays
MEIIPGTKALQIPLAHPTKHKHEWRYTLFKRKICTKLKMSAVNGKGVLSIVLEIFLLTQVADSEKTHILSWGGSSSKMPAASSSRPTSSGDCSDQNHRWVSGSSGGSGRPSTVQRHHHSAGAENSRSSTRSPVARNAAERGGSGSRDSTTFRSLERLSITTSRRK

SEQ ID NO: 59551 - protein, 303 aa, Zea Mays
MKDRYTQKPRGFGFITFADPTVVDRVIEDEHVINGKPVEIKRTIPKGAAPLKDFKTKKIFVGGLPSALKEDEFKEFFSKFGKVVEHEIIRDHATNRSRGFGFIVFDAEKAVDDLLHKKGNMIDLNGSQVEIKKAEPKKPSNQPPRSLDSEPRGRPYADSYDGFGSSYNYGGSFGPYRSPRSFGARPSSYSSAYGPGDYGSGYATYGGALVGYREPSLYSSRYGSTYGGSLGGGYGGVSYDGGLAGAYERDAGGYGGSSYGRSYDSSWANTGDGFGTGGLYGARTGYGGSGGSGAAGRYHPYGR

SEQ ID NO: 59552 - protein, 1986 aa, Zea Mays
MTAHGVAIDDVIRRISEYIESNSKISGDVALQVRALNDCETWVTTQFSANQFSALGHGTFLEFLDKHCHQFRTALSSFFKEGPSNSSSLEVSVLQQQIEFLLCQAESNWLEDSDFSEDSFVMLLKKQFPTISFNIVQDKSDGGVSGFIEGQKKDIRTYSLKFSISLLEKRWSGTLPSRHGNVDELGNIVAEQSCYHTTVCSREAINCLLRAPMLSDLHLWSHWDSLFAPTLGSFVHWLLNTGPIQELACIATTDGRFIRVDSSATVDQFLEAIIHRSPLQVAVKLLSLLYIYNGSMNTPMSLLKCYAQRAIKLIVDNNNDLMNAKSENKIFMPDEPQNLSSESSTCFADQCQESSQASPGRLIRSDSLPNINNTVHLITKFVLDCLDHLPSEFRSLAADILLAGFRVVTKNWHAVMLHEATENGQLCMLHDIGLSLGVVEWVEDCHRLCLTDEVHVQTEMHSSAKLATPASVGATHEDSNMHISSDVNMMDKRKQLFPVINDRAGIDKEDNKMLNPAGTEADVAELHTTSRSSMMEETSLEEASLVIETIRREEFGLDQALSDTENSLLKKQHARLGRALHCLSQELYSQDSHLLLELVQNADDNTYPEDVEATLAFILQEDGIAVLNNERGFSAENIRALCDIGNSTKKGSNQGYIGNKGIGFKSVFRVTDAPEIHSNGFHVKFDITDGQIGFVLPTAVPPYSTTSFSRMLSVEDDKDAHSLWNTCILLPFRSKFRECTGMCSIVSLFSDLHPSLLLFLHRLKCIKFKNLFDDTLLIMRREILGDGIVRISHGIETMSWLVVSKRLQGTIVRHDVCTTEIAVAFTLQQTEEGDYEPYLKQQPVFAFLPLRNYGLKFILQGDFVLPSSREEVDADSAWNQWLLSEFPSLFVSAQESFCALPCFQRCPGKAVTAFLSFIPLAGEVHGFFSQLPHLILSKLRLTRCMFLDGSTVQWVYPCNTLRGWDEQTKMLFSEGLLHEHLGLGYLSKNIVISDKLSRALGIHDYGPNILLDAISSICRIDGCIESLGLEWLCAWFVNLYLTLLSHSSQNVSSARNLEDILLDKVRKIPCIPLSDGSFTSISDGRIWLPYDVASSIPECSSIPNFPALYGNLRTVVKVEKTLSQVDSILAGGLSLADVSTKQCTVYDWESPELSRILSIFSSKRCKENCVYLLEVLDRFWDDHYSAKSRIFTDATHCGENRAVESSFMKCIQSFKWIASRMDEDLHYATDLFYDCENVRSLFGSVAPYAVPQVSSSSLKKAIGFKTEVSYCDALMVLKSWITSKVPFRASMSQMCKFYTFLSEGVADAKIDIKREFMSSPSIFTPLQRPRASEVIPGRFLAPEDLYWHDPTGCSEITEDFVATKNRSMFPRKMLSAAYPNLYELFTLTCGVPKAPTTSNYVEMLLRLSTIALPSQAGNHVFCVFVRWAKCMHSESDKMNDILYLKESLQKLETTILPTSADKWVSLHPSFGLVCWVDDDELKQQFVNSNDVYFIQFGDLSSEDKQMLYGRVAALMKSLGIQALSKVVYREAIFYGTSENREKVSLICWLLPYMQRYIYKMHRDTYINFQKNDIMKISNLQVVVVDKLFHKYVLRGLESSSKKRFQCHCLLQGDTLYATQEADSHSVFLELSRIFFDGSHDLHFANFLHMIKTMAESGTHAEQIETFIVNNQNVPELPEHEAIWSFSSLSAAKHGSANQGGADTQGVDFQPVHEFSIPNHQKAQVMVSSWPLNYWRTAPVFRTPLINQHASMQEAKVNDAGPSSNLNMPAMYGHTEDSLLSADLERDWIIEENPRTETTLFGDSSSEILDEPQMVMSAEPFHAPAYLNLEAGNSSPTVHVELTNSDEKLANLAEDKNQRLSDANQLRTGRLGEELVEKYLAKQLGSNNVRWVNNRIETGLPYDIVITHPEGFTEYVEVKTTVSSRKDWFDVSAREWQFALEKGDSFSIARVILGTKKASIEMLKNPHKLCKQKALRLALLISRSAAT

SEQ ID NO: 59553 - protein, 216 aa, Zea Mays
MCPSSNLSSCRELGYLRPAFIEEESYLRSMFHGDNGGYSSDWKVNETDEYNRETRPVSGTNRLIDDDKSRFDFNHAETRTDSMIYKLEIMTIELFSMYGKQFKIDPQDFQDSEPDILANSASSIIERIKENSDQCAAALRSLCRRKKGLTVEEASLIGVDSLGIDVRAFSGLEVKTVRFSFNAQALSERSAEKKIRRMLFPRYQRKNVKASTEDES

SEQ ID NO: 59554 - protein, 143 aa, Zea Mays
MATSSPASGAAIHTPAWSTTAATLTQAPRRQRSSFNGVGDSCGEGARQRAGSNEQRERPLAAWARSRRGADQSHDRSREAVPPQIEHQSSTFPLRFVLCRADQQVNQRVKKLTKVPAEATFDHGGVRLDNSSPLRPQNRMVRA

SEQ ID NO: 59555 - protein, 956 aa, Zea Mays
MENGNNGGNPPHYPPYQYPYPQAQAQLYPYGYQYPPAPPSPSPSAAPAGPYLSPSPSFPSYAPAPHPPQQFHSGPLQAYPPPPQYHAYPPPPHPSPYGHGYDPYPSPYFSYPSTNPSPSPSPGLSPSSSFHHQHASAPEPPSPAPSAPSAPSYPIEDVLASMRLSGRHDYASSPSVTPPSTPFLGDGSSHGGGMQLVPYGTAAGGSQHGGGMQVVPYGAAAGGSQHGGSFRASLKVVLLHGSLDIWVHDARHLPNKDMFSKRVGELLGPRITSAVGSKMSSASMTSDPYVTVQVSYATVARTYVIPNCENPVWSQNFMVPVGHEAAEVQFVVKDSDVFGAQIIGVVSIPAEKLLTGDRIQGVFPVLEPNGKPCAPGAVLHLSIQLIPVAQLTMYHHGVIAGPDSHGVPHTYFPLRRGMRVTLYQDAHVPDGCLPDIWLSNGLRYQHGQCWRDIYDAICQARKLIYIVGWSVFHTIHLVRDGTQAPSLGDLLKMKSQEGVRVLLLVWDDPTSRSILGYKMDGFMGTRDEETRRFFKHSSVQVLLCPRSAGKRHSWVKQQETGTIFTHHQKTVIVDADAGNYRRKIVAFVGGLDLCGGRYDTPWHPLFRTLQNEHKEDYYNPNFNTVDARGPREPWHDLHSKIDGPAAYDVLQNFQERWLKAAKRHGIKKLAKSYDDALLTIERIPEIININDAIYFSDNDPETWHVQVFRSIDSNSAKGFPKDPRAATMKNLVCGKNVLIDMSIHTAYVHAIRSAQHYIYIENQYFIGSSFNWDSNKDLGANNLIPIEIALKIANKIKANERFSAYIVVPMWPEGNPTGAATQRILYWQNKTMQMMYETIYRTLKEEGLDDMYEPQDYLNFFCLGNREVADSTSTSNASNTANNPQEQARKNRRFMVYVHSKGMIVDDEYVIIGSANINQRSMEGIRDTEIAMGAYQPQYTWANKLSAPRGQNVLMG

SEQ ID NO: 59556 - protein, 423 aa, Zea Mays
MGMDAYRFSISWPRILPKGTVEGGINQDGIDYYKRLINLLLENGIEPYVTIFHWDVPQALEEKYGGFLDKTHKRIVNDYKNFAKVCFDNFGDKVKNWLTFNEPQTFTSFSYGTGVFAPGRCSPGLDCAIPTGNSLVEPYIAGHNILLAHAEAVDLYNKYYKGENGRIGLAFDVMGRVPYGTSFLDEQAKERSMDINLGWFLEPVVRGDYPFSMRSLARERLPFFSDKQQEKLVGSYNMLGINYYTSIFSKHIDISPKYSPVLNTDDAYASQETYGPDGKPIGPPMGNPWIYLYPEGLKDILMIMKNKYGNPPIYITENGIGDVDTKEKPLPMEAALNDYKRLDYIQRHISTLKESIDLGANVHGYFAWSLLDNFEWYAGYTERYGIVYVDRKNNYTRYMKESAKWLKEFNTAKKPSKKIITPA

SEQ ID NO: 59557 - protein, 484 aa, Zea Mays
MEEAAPAGTNKVYYDGCPGCAMDRRKESRAGVPYKELLFVAAATFASALPITSLFPFLYFMIRDLRVAEREEDIGFYAGFLGAAYMIGRGVASVFWGVVADRVGRKPVIAFSVLSVVVFNTLFGLSAKYWMAIATRFLLGALNGFLAPAKAYSIEVCRPEQQALGISVVSTAWGMGVIIGPAIGGYLAQPAKQYPHLFHEKSVFGRFPYLLPCLCISFFAALVVISCAWLPETLHKHRGLERAAAEVAEGTTAAAAAQESTPEPEPEPPKSSLLRNRPLMSSIVTYCVFSLHDTAYVEIFSLWTVSGRDHGGLSFASKDVGQVLTVAGASLLVYQIFAYRWVNKILGPVNSTRVSSALSIPIIAAYPFMTRLSGIRLGVPLYVAAMLKSVLAITRVTGTSLLQNNAVPQEQRGAANGIATTAMSLSKAFAPAVAGILFSWAQKRQHAAFFPGDQMVFLLLNLTEVIGLVLTFKPFLAVPQQYKQ

SEQ ID NO: 59558 - protein, 931 aa, Zea Mays
MRPEDWQKRGMLSHFTVVRKLEGSIFPIGLAKEASDRNQKAGSNVLALESSERALLNRLMIELSKLDCDVLVGHNISGFDLDVLLHRAQTCKVPSSMWSKIGRLRRSLMPRLTKGSTLYGSGASPGIMSCVAGRLLCDTYLCSRDLLKEVSYSLTQLAETQLKKVRKEVSPHDIPMMFQSSGELLKLVEYGETDAWLSLELMFHLSVLPLTRQLTNISGNLWGKTLQGARAQRVEYLLLHSFHARKFIAPDKFARNKELNSTKRKMNPDTGGANADDGAADPSVDDEVHNGDQSKARKGPSYAGGLVLEPKKGLYDKYVLLLDFNSLYPSIIQEFNICFTTVERSSDGSVPNLPASKVTGVLPELLRSLVERRRMVKSWLKTASGLKKQQFDIQQQALKLTANSMYGCLGFSNSRFYAKPLAELITLQGREILQNTVDLVQNNLNLEVIYGDTDSIMIHTGLDDISRAKAIAGKVIQEVNKKYRCLEIDLDGIYKRMLLLKKKKYAAIKVALDGSLRENIERKGLDMVRRDWSLLSKDIGDFCLKQILSGGTCDDVVESIHSSLVQVQEQMRSGQIELEKYVITKSLTKAPEDYPDAKNQPHVQVALRLKQNGYSGCSAGDTVPYIICSQQDSDNAHSVGIAQRARHPEELKRDPDKWMIDIDYYLSQQIHPVVSRLCASIQGTSPARLAECLGLDSAKFQPRLTESSNQDTSMMLLSVIDDEDERYRGCEPLRLSCPSCSGTFDCPPVSSLITSASATSVSDPIEGKDATANFWRHMRCPRCLDNTVESKFSPSMLANQMKRQADNFISLYYKGLQMCDDEGCKYSTHSVNLRVMGDSERGTVCPNYPRCNGRLVRQYKESDLYRQLSYFCYVLDATRCLEKLDQKARLPFEREFVAVGQTIKLALLEIQKIRDRCAFGWVQLKDLAVSI

SEQ ID NO: 59559 - protein, 252 aa, Zea Mays
MNRKHRLLMITSNLSVLYLFCIVMNSFFFDMTLQMALWSMTKSPLMYGGDLRNLDDSTLNIITNSGLLKINHYSRNNMEFHYVHSERTSNGEHSGHFRSPYPVRVTKNDGIFVSLTACSDDAAKGWYMFPQDGKPDHICRNYEILNDKNVSFCLGKTKRFLASDVLTMDTKEHQSKFHISVTNTDDTCLDASAGRRQTASEIRLPMFSACRWHAKQMWELNANGNLVSSYSRLCATVESRDEGGIYYITFLF

SEQ ID NO: 59560 - protein, 57 aa, Zea Mays
MVRPCRIDPQVPDSGPSWQALAYGAPPTRHGEESGWMVSAIVCSFISASPPLASASG

SEQ ID NO: 59561 - protein, 258 aa, Zea Mays
MEMQRNAASSSGMMGRSMNDRSVHMNEAIRMQMEVQRRLHEQLEVQRHLQMRIEAQGKYMQSILEKAYQTIATGDLAACSPVAAGYKSLLGNPQAMLDVCSLKDMAPSMGFPSLQDLHMYGGGGGHCLDLQQQMERPMEAFFASCDIGSLAKKRPVSPYADDDGGKSPMLWGEDDEGKGIVDHFQMAPPMMDAAGIDVMDSIADVYGDAKHMTMSSDSTGSKGGGFDVRLERPSLRRPHMGGSPSVLGGGQTRNLSYG

SEQ ID NO: 59562 - protein, 145 aa, Zea Mays
MLIQQIGDTFVTEDTTNVMFPREVTVPGYTHPLVAVGTDYSLRLDTEQWKAKTGIESFDSSSVFDSIFKAPVVKSLSIILVRAVDGKTFVNALNDVIARQIKNPNAEEESSLSTLQNTFLGRNLKQGTSIYLTWLEPKRMLTLKL

SEQ ID NO: 59563 - protein, 818 aa, Zea Mays
MQQQQQGLDIGKLQEVVKTRWLKPQEVLKILQNHELFTISHKPPQKPQSGSWFLFNRRVLRYFRNDGFEWQKKRNGKTINEAHERLKVDNVDALNCYYARGDKNPTFQRRIYWMLDPAYEHIVLVHYRDVLEGSISVSARNDSSTLNQNGSASRAEVHSSPGWTSELIAHCTNSCSPGSAEEVSSQISASESDLIQHKAALRKLKMQLSLEDKEDCDVNAEDVPADNEPIILPVIQNEEPGTSRNHDDIFDVLDFSEDHINGTGTHPCHSAIDVLKNSDTWLEDDQLEAILHPACMTLTENQWFRIHEVSPESAFSYESTKVCVEIIQQGVIRCHTPCLDAGKVRMCLLDGNGKSCSEAREFEFLEKPTKCMIDGNTNPCNEAQDVKLHQIPTKSSEELSLLLHYVHTLFDGHASGLFSNFSLPLQNLGCGIQSNQMDVMKKAYKQLDPENVVSSVMEVLLNDKFKQWLSSKCEQNIDGDHLLPKQYRNIIHTVAALGYDLALKPLLSSGVPINYRDANGWTALHWAARFGREDMVVALLTAGAAAGALSHPTSEDPAAKTPASIALAYGFKGLSAFLSEAQLTTHLDSIESKENGKLDSREEGICRAVDRISDKSSHVHGGTDDQLALKDSLGAVRNAVQAAGRIQAAFRIFSFKKKKEMALGNRNSCCLSISEAGAVSHDMLEKAVLSIQKNFRCWKKRKEFLKMRNNVVRIQARVRAHQERNKYKELISSVGILEKVMIRWYHKGVGLRGFNSGAMTIDEEVDEDVAKVFRKLRVETAIDEAVSRVSCIIGSPKAMHQYRRMLNRYQQTKDDQEK

SEQ ID NO: 59564 - protein, 951 aa, Zea Mays
MEEDHSVILISEGAIKSIKLSLSTGEEICTYSINECPVTHPSQLGNPFLGLPLEAGKCESCGASENDKCEGHFGYIELPVPIYHPCHVTELRQLLSLICLKCLRIKKGKVKQSNGKGNAAPTLCSYCRDIPALSLKEIKTTDGAIRLELRAPHNKHMTERSWNFLDKYGFHHGGCSHHRTLLPEEALNILKKVPDDTRRKLAARGYIVQTGYVMKYLPVPPNCLYIPEFTDGQSIMSYDISIALLKKVLQKIEQIKRSRSGSPNFESHDAESCDLQLAIGQYIRLRGTTRGPQDNTKRFTVGSADSAALSTKQWLEKMRTLFISKGSGFSSRSVLTGDPYIGLGVVGLPSEVAKRMTFEEQVTDININRLQDVVDKGLCLTYRDGQATYAITVGSKGYTTLKVGQTISRRIVDGDVVFLNRPPSTHKHSLQAFYAYVHDDHTVKINPLMCGPFSADFDGDCVHIYYPQSLAAKAEALELFSVERQLISSHSGKVNLQLGNDSLVAMKAMSHTTMLHKELANQLAMFVPFSLLAPAVIKPVPSWTISQIVQGAFPANLTCQGDTHLVRDSTIIRLDLGKESVQDSFPDLVSSILREKGPKEALQFLNVLEPLLMEFLLLDGLSISLRDFNVPKALLEEAQKDIRNQSLILEQSRCSTSQFVEFRVENNLKNVKQQISDSVGKFSDLGLLIDPKKEASMSKVVQQVGFVGLQLYREGKLYSRRLVEDCFTNFVNKHLAIGDEYPPEAYGLVQSSYFHGLNPYEELIHAISTREAMIRSSRGLSEPGTLFKNLMAILRDVVICYDGTVRNICSNSIIQLKYGEDDETDSSSVVPPGEPVGVLAATAISNPAYKAVLDSSQSNNASWESMKEILQTRTSYKNDVKDRKVVLFLNDCSCAKKFCKERAALAVQSCLKRVTLGDCATDICIEHQKQINLDGTSEAAPTLVGHIHLDK

SEQ ID NO: 59565 - protein, 342 aa, Zea Mays
MVPYPQIQNPQGWMAILRPPPPKLCGSPGGPPLTSPRIKLRDGRYLAYKEDGVQRDKARYKIITVHAFDSTKDFPSPVSKELVEGLGIYLLAYDRAGYGESDPNPNRHVKSEALDIEELADQLGLGHKFYVLGASMGGYSVWGCLQYIPHRLAGAALVVPIINYWWPSFPAELSKQAFNRLIVPEQRTLWIAHNIPSLLYLWMTQRWFPSSAAAMHHPEIFSKHDMEVLQKMMAMPRTIENKSRQQGIYESIHRDLLVAFGTWEFDPMNVTNPFPQNEGSVHIWQGREDRLVLVELQRYIAKKLPWIKYHEVPEGGHMFVMVDGWTDRILKALLLGEEPLDV

SEQ ID NO: 59566 - protein, 459 aa, Zea Mays
MFGVRKLWDVKDNQAWVHDRFEEMNLHDDFYEDQRMSRGRGGRGKARGGGRGFSRGGKQRNYHEDSNNTQNRTPKVVRGRGPRRYEAAARNNREVVGSQRKQAARFRESAPNAVAARDSGQVSHAQPEAAPPKRNVMSSSLNSASPPFYPSSASTQDFPVAAQTRDIQAGGSNKIPPSSMKMDDNSKLQSGSMVRGRIAMDYGGRDKLLADGPIRSSQGRAPTASLNSGFTSSSVNPGQSPIARASGGNSNIGISSNNQPQSHGSVMHQKLGQVQNQSATRIPTQQLSHRTSNLSPVAQHLPGKSGESGENGSYPTLNDSKTASAVVKVNSQETGMSSFMYGGTQVIGAAGLSQGDQNFPGTPALLPVMQFGSQHPGGLGVPTVGMALPGYVAQQQMGMGNNEMTWLPLLAGAAGAFGGSYPPYIALDPSFYSRSSGQTSSSVPSRSISGPCQSLWCTT

SEQ ID NO: 59567 - protein, 124 aa, Zea Mays
MDRKPFWLAHWTEGDAQKAQVEEAKQKLALMEAQLDGRRFFGGDTVGYVDIAACVLAPWLSVVEEVTGVAVVDEGEFPALRRWSREYSSCEALKQCVPDRDQLVAFYTERKEAYKVFANAWLQQ

SEQ ID NO: 59568 - protein, 78 aa, Zea Mays
MRDLAIRSPPASPRLGSACHCQHGPRPLTSAFLKFRPFIFDPDASATLFSLFFPGRQKHCCAAARCVFVVGQMPLYRS

SEQ ID NO: 59569 - protein, 525 aa, Zea Mays
MPLLKSIPPVTRMAMGRGTWIAVLCKKLKHWWHWVAEGDIPIVASHGAETELYKALEPGIRLVILKAICDIRSEQEDVRNFIDSSLKHGYHLSIFRKERIGGDSHGISYWYEDDPILGHRLYREIRRVEHAKDSTKKSKGKGVSTVPVISYNWEAVASNFDEFKVAAEKLFSSRNRTEVSLGKKLKFTYLPEIEKIHKKKEKLLKKQQREAILLDSCLTVNGLTSGRSRRERKHVTYTFDDYERSINEAIKTIRKNENAVEVGPSPLCKGFYGETPEKLYYKAKTDEGKAETLHRRQRKRSQRYTKDYVEAISDIDLDFDSDDDIMGEAVYDEEYLRRRKRYKASLSENDDEFQLDQVANDGDDEVGTSLNVNEDTKDLQWYKRFPLLTPQGTKLKSIDEIQTGIRRSKRSTRSRINYRQLDTFGANTKYGKSEKCNASDPDASSDALNDTELSTSQDREEEDGVNKAQQQYTEKPIVPVKESRSVRRKFLVLNELVPIAGFDDASVLVKDKHVNNNGGKCSAAH

SEQ ID NO: 59570 - protein, 75 aa, Zea Mays
MFLVLVEFFVLKLTGNLSLGALMLGESRKYGTTIVPGLYAPVHLHFFVARMDMAVDCKLNEVHNQVGVAIYLHLF

SEQ ID NO: 59571 - protein, 584 aa, Zea Mays
MEGDDFTPEGGKLPEFKLDARQAQGFISFFKKLPQDPRAVRLFDRRSCSRIPYIKGILQQYNGQFSTLIRSKFLEPLEEWMAKNRFGRFSSLVETAIDLAQLENGEYRISPLYSSDLGVLKDELSVVENHINNLHVDTASDLDLSVDKQLKLEKGSLGHVFRMSKKEEQKVRKKLTGSYLIIETRKDGVKFTNSKLKNLSDQYQALFGEYTSCQKKVVGDVVRVSGTFSEVFENFAAVLSELDVLQSFADLATSCPVPYVRPDITASDEGDIVLLGSRHPCLEAQDGVNFIPNDCTLVRGKSWFQIITGPNMGGKSTFIRQVGVNVLMAQVGSFVPCDQASISVRDCIFARVGAGDCQLHGVSTFMQEMLETASILKGASDKSLIIIDELGRGTSTYDGFGLAWAICEHLMEVTRAPTLFATHFHELTALAHRNDDEHQHISDIGVANYHVGAHIDPLSRKLTMLYKVEPGACDQSFGIHVAEFANFPEAVVALAKSKAAELEDFSTTPTFSDDLKDEVGSKRKRVFSPDDITRGAARARLFLEEFAALPMDEMDGSKILEMATKMKADLQKDAADNPWLQQFF

SEQ ID NO: 59572 - protein, 310 aa, Zea Mays
MSVVLPDCKGNLADIVLGRDTVAEYFNDTSYFGPITGRVAQRISRGRFVLDGKVYHLQRNDGRNTIHGGGTAFSKSVWTVKEYVGGGDSPYVTLYYHSFDGEQGFPGNLDAYVTYRVSGPYTLGVHMSATALDRATPVNLLLHAYWNLGGQGSGDVLGHELRLHASRYAVLDEELLPSSGRVAPVAGTPLDFRTPTPIGARIRQVTGGKVVGYDANYVVDGEGMRPVAQVRDGASGRAVELWANQATVQLYTGNWLNHTQGKGGGVYDQYAGFTLETMGYVDAVNHPEFPSQTLLPGQEYKHDMVFKFSF

SEQ ID NO: 59573 - protein, 78 aa, Zea Mays
MTVSSICISILSMLSSSPAKVTYFLYISLFNRWVLLSDCNTYMYRLQQRPADNDRYVRNCRNGRSPKETTWWFHDDTV

SEQ ID NO: 59574 - protein, 333 aa, Zea Mays
MAASHGAGTLKSTSINGVKLYSLNGGRYVAPWVVAKKKRALRKDKEYQRRLDLIHDLRFETATTKIKLTPDDQYLIASGIYPPQVKVYELKELSMKFERHMISEIVDFQILGDDYSKLAFLCADRSVNLHAKYGSHYSLRIPRVGRDMAYDCWSCDLLCAASSPDLYRINLEQGRFLASLSSESPAINAVTRSKIHGLVACGGEDGAVECFDMRKKTSVGRINIPAVSSEDYSQEVTSLQFDEDQGYFMAVGTSTGKISIYDLRMSSPLRVKDHMYGSPILNIKWHQTLNCTEPKLITADKHIVRIWDPNTFKDMGALMHLQCVWFVESPHAS

SEQ ID NO: 59575 - protein, 205 aa, Zea Mays
MKNSNFNIYLVNTSIFHSLHALNKLPYSKLDSKTFGITDGVVFVTYSSLIASSENRSRLQQLVQWCGSEFDGLLVFDECHKAKNLIPEAGSQPTRTGKAVLEIQDMLPQARVVYCSATGASEPRNLGYMVRLGLWGDGTSFENFNQFLGALEKGGVGALELVAMDMKARGMYVCRTLSYKGANFDILESLLEERMMDIFVSMIAH

SEQ ID NO: 59576 - protein, 1074 aa, Zea Mays
MTNMVDLFARLVVLLHNPLARGQLATQILTVLCYLGPLFPRNLSLFWQDEVPKMKAYISDPEDLKQDSTYQEKWDDMIINFLAECLDVVNDTEWVISLGDAFARQYDLYSISDGHAALLHRCLGMLLQKVDDRIYVSEKIDWMCRHSSMSIPINRLGLAQGIGLVAASHLDTVLEKLKNILDSAEQSAFQRFLSFFSFGPKVEDVDDTYAALALMYGYAARYAPSTVIEARINALVGSNMLGRLLHVQHPTAKQAVITAIDLLGRAVISAAEMGISFPLKRRDQLLEYVLTLMGRDQSNDLTDFNTELLHTQSLALSACTTLVSLEPRLPMETRNRVMKATLGFFALPTEPSSIVESLVTNLIILLGAILLTSGEDGRSRAEQLLHILRQLDPYVSSSLEHQRRRGCVAVQEVLIKFRNLCSGGFGALGSYPTFTMNKQIDRGTRSLSSLPSAFVLPSRDSLSLGERTMAYLPRCADTDTEVRKVAIQIIALFFDISLSLPKQKAYPNDIDLESSYSALSSLEELVSIVRREASVDQTELFQRVVSSVCILLSKDELVVLLHSCTLATCDKIKQSADASIQAIIMFIIRRGKELREADVSRTTQSLLSSAISLTDTHSRQEVLNAISCLAENTNHVVVFDEVLSVAGKDICTKDIPRIRGGWAIQDVFYLLARDGEQTEKDKWIELVQEIACSSSVKRPKDVLPTCVILCNALNRNQRAEREAAAAALSEFIHHIEKEPTLLEQMVEEMCQHVSDDSPTVRSLCLRGLVQAPESHMLKYIQQVLGVILALLEDPNESVQLTAVQCLLNVLNLSEQDAVGPILINLLVRLRNLQVSMNTKMRSNAFAAYGALSAYGVGLQRTAFIEQIHATLPRLILHLHDDDLSVRLACRNTFQLLATLMEVEGLSVLLSKQYFASDRRSDYEDFIRDLTRQLCRLSPARVDSYLESAIQAFDAPWPVIRANAVCLVSCMLSFLDDQRFIAPYFSQVFATLVGRMSQSPDAIVRASASSALGILIKRSNMLRSLVSRYDRADSSRNSQSGDSNTKTPSEFQEQAEGNPNDGASGAAIKGTEADH

SEQ ID NO: 59577 - protein, 172 aa, Zea Mays
MSEDEAESSSSGAAASEPKDPRTIARKYQLDLCKRAVDENIIVYLGTGCGKTHIAVLLMYELGHLIRKPSREVCVFLAPTIPLVRQQAMVIADSTNFKVQRYYGSGKHSRDHQAWEKEMGEYEVLVMTPQILLHNLRHCFIRMDLIALLIFDECHHAQAQKRHPYAQIMKQQ

SEQ ID NO: 59578 - protein, 185 aa, Zea Mays
MASPPSIHGSHAPSAPFHPWLRLPPRRNSSHPLLPRGLRLPILSLCVVFFPSSPSAPDLAPCPPTPVSVMARSGQRWTQPLPGVCSRPRPSSGTSPRWPPARVPRATGWTPPSPRRSSGRSAGGRARRGAFPSTRSSTASMVPSSPPLGEPKPSRGGRSRPDLGILLLPNGMNGRKQNLSGVDLA

SEQ ID NO: 59579 - protein, 83 aa, Zea Mays
MRGSTAGMTRRRAIPPTTWLPASDSPPGHDPHHRRGVRERTTSAKRGRRRQTAMVALPYLKACSRGVYSRARTKRTGLRIDAG

SEQ ID NO: 59580 - protein, 213 aa, Zea Mays
MNRDLTGAVAQVICSLCSKEQDVQQNCSSCGACMGKYFCKVCKFFDDDVSKGQYHCDGCGICRTGGVENFFHCDKCGCCYSNVLKDSHHCVERAMHHNCPVCFEYLFDSTKDISVLQCGHTIHLECMNEMRAHHHFSCPVCSRSACDMSATWRKLDEEVAATPMPDIYQKHMVWILCNDCSATSSVRFHVLGHKCPACSSYNTRETRAACPRI

SEQ ID NO: 59581 - protein, 464 aa, Zea Mays
MDAASASSSWQDLPPRLQSYDNRAPLLLPVKIMDAAADDKPEISDDTAHQISVDPWYQVGFVLTTGVNSAYVLGYSGSIMVPLGWIGGTCGLLLAAAISMYANALLARLHEVGGKRHIRYRDLAGHIYGPKIYGLTWALQYINLFMINTGFIILAGQALKATYGLFSDDGVLKLPYCIAISGFVCALFAIGIPYLSALRIWLGFSTLFSLMYIVIAVVLSSRDGITAPARDYSIPKSSQSTRVFTTIGSIADLVFAYNTGMLPEIQATIRPPVVKNMEKALWFQFTIGSLPLYAVVFVGYWAYGSSTSGYLLNSVTGPVWVKAVANLSAFFQTVIALHIFASPMYEFLDTKYGSGRGGPFEIHNVAFRVAVRGGYLTVNTLVAAVLPFLGDFMSLTGALSTFPLTFVLANHMYLMVKGPKLGAIQKSWHWLNVLGFTALAVAAAVSAIRLIMRDSSTYHFFADL

SEQ ID NO: 59582 - protein, 651 aa, Zea Mays
MANGSNWLGFSLSPHTAMEVPSVSEPASTHHAPPPPSSSTTISSSSTNNTISSNFLFSPMASPYPGYYCVGGAYGDGTSAAGVYYSHLPAMPNKSDDGTLCNMEGMVPSSPPKLEDFLGGGNGGGQETATYYSHQQQGQEEGASRDYRQYHYQHQQLVPYNFQPLTEAEMLQEGAAPMEEAMAAAKNFLLASYGACYSNEETRPLSLSMMSPGTQLSSCVSAAPQQQHQMAATVATAATAAAALGRSNGDGEQCVGRKRSTGKGGHKQTVHRKSIDTFGQRTSRYRGVTRHRWTGRYEAHLWDNSCRKDGQTRKGRQVYLGGYDTEDKAARAYDLAALKYWGPATHVNFPVENYRDELEEMKGMTRQEFVAHLRRRSSGFSRGASIYRGVTRHHQQGRWQSRIGRVAGNKDLYLGTFTTQEEAAEAYDIAAIKFRGLNAVTNFDIARYDVDKIMESSTLLAVEEARKVKAVEAASSAPMTHTHSGGKEQLNATTAEETSSAGWRMVLHGSPHQLEAARCPEAADLQSAIMNNDSHPRPSLHGIAGLDIECAVHDHHDHLDVPAGSRTTAAGSINFSNSSSQVTSLGNSREGSPERLGLAMMYGKQPSSAVSLAATMSPWTPVAAQTVAHVLKQQPNVVVSHRPVFAAWADA

SEQ ID NO: 59583 - protein, 834 aa, Zea Mays
MHVTVTCKAASIGNIEREMRVAMVGSGLSGLVAAHELARSGGVRVTVYEKEDHLGGAKTVAVDGGAEEGRVLVDLGPVVFNPVTSPNLMEWFERLGVEMCTSDMSFSASMRLNKSSESFEWGSRSGMSGVLAQKSNLLSPRFWLVVHEIFKFKNHALKYLEDHRSGPNRNETLGQFILSHRYSQLFQDAYLIPMCACIWPSPSHEILGFPALFVLSFFRDNQLLEILSGSKWLTVKGGSGSYVNKIREELESNGCQIKIGCEVNSISKSNDGYQILEVDGSVETYDRIIIGINAHDALKVLGAEATNEELKNLGAFHFIRSIAYLHSDESLMPRNSSAWSARNFLGTTSSGVCVTSWLNILENIESAGPLLVTLNPPRVPNHVLLKCHISHPIPSIAAAKANLQLNSIQGKRGIWFCGSYQGYGYHEDSVKAGKAAALGLLGRKCDLLSNPKPMVSSWTEAGARLLVARSLDQYITIGNFCILEEGGTTFSFGKACEKCHVKSAIRVHDPQFYWKAATEGDLGFASAYINGQISFVDHRKGLVNLVRIILANRGEFKRLSSTASGNTRKAWWSPLLGITGVSFAKYFLRHALRKNSVSKARKNISEHYDLSNDFFALYLDPSMTYSSGIFKVAEESLETAQLRKLDSLINKAKVEPGHHVLDIGCGWGTLAIRLVKQTGCKYTGITLSEEQLKYAKRKVKESGLEDRITLLLCDYRQLPAGDKFDRIISCEMIEHVGHEYMDDFFGCCEYHLAEHGLLVLQSIALPEELYDKMRMRPEFLKTYIFPGGCLPSLGRIVSAMSNASRLNIQHLENIGDHYYTTLMNWRDNFVANRE

SEQ ID NO: 59584 - protein, 165 aa, Zea Mays
MASSLLAGRGGGHHHNWGETRAPLEPIPPNPSPSQPHPRADGSKSKPRAAAGYVKFRPASLGHREARALRDRLAVELGQVRALLSRIDTWQQQGPPPRAVLRGAMRKRCGQILSRLRKDKRSVWFNAPVEVERLGLHDYHAVIKRPMDLGTVKEGLAAGRRVRNL

SEQ ID NO: 59585 - protein, 98 aa, Zea Mays
MEAGGEEFAIGVVISAKTTLGEEFEGQIVAFDRPSNLLVIQEGVGRAERGERRNVRVLKANYIREFSVVSKGDDPLDPASCMLDLNSIYAREDAALRD

SEQ ID NO: 59586 - protein, 724 aa, Zea Mays
MARQGKLDPVIGRDDEIRRCIQILSRRTKNNPVLIGEPGVGKTAIAEGLAQRIVQGDVPQALTNRRLIALDMGALIAGAKYRGEFEDRLKAVLKEVTDSDGQTILFIDEIHTVVGAGATNGAMDAGNLLKPMLGRGELRCIGATTLDEYRKYIEKDPALERRFQQVYVDQPSVEDTISILRGLRERYELHHGVRISDSALVAAAVLSDRYISGRFLPDKAIDLVDESAAKLKMEITSKPTALDEIDRAVLKIEMERLSLTNDTDKASKDRLSRLEAELSLLKDKQRQLTEKWEHEKSVMTKIQSIKEEIDRVNVEIQQAEREYDLNRAAELKYGSLNALQRQLQTTEKELDEYQSSGKSMLREEVTQDDIAEIVSRWTGIPVSKLKQSDREKLLYLEEELHKRVVGQDPAVKAVAEAIQRSRAGLSDPNRPIASFMFMGPTGVGKTELAKALASFMFNTEEAVVRIDMSEYMEKHSVSRLIGAPPGYVGYEEGGQLTEAVRRRPYSVVLFDEIEKAHLDVFNVFLQILDDGRVTDSQGRKVSFTNSIIIMTSNVGSQYILNMDEEDGSSDSAYENIKRRVMDAARSVFRPEFMNRVDEYIVFKPLEREQINSIVKLQLARVQKRIADRKIKLDVSPGAIEFLGSLGYDPNYGARPVKRVIQQYVENELAKGILRGDFKDEDSIFVDTQVTVPSNGQLPLRKLVFQKVGEQSKPAAEGEKFLPAV

SEQ ID NO: 59587 - protein, 50 aa, Zea Mays
MVQRDPQTHTQFHQTLILRIGSFACISTPKLYHEQCLVLGGRLQVLFMEA

SEQ ID NO: 59588 - protein, 112 aa, Zea Mays
MRGAVVLAAKHAKTMVGKPLLYGIGTLLVMSLRTLYGVGCVFGARWFLYMTSVSPSLQIEFVYRKFFGGYCNCSYHVAQNTSLHEFLDSYLQFRHRWYDSPGFFWDWSLRAC

SEQ ID NO: 59589 - protein, 338 aa, Zea Mays
MAEVLRSRVEDDGNDILCLPIDFQQLQELRMFIEDKLNESPKEALLCMGVAAHLALCSDKDNKRNKINIRLYNTGAAIALKKLKAAFIKKLVTVRGTVLKVSTVKPLVLWLKFRCMKCRKEIPRVFCDGKFSPPMSCTIQGCKSRSFIPDRSSAQLMDFQKIRIQELASADNHEEGRVPRTVECELTEDLVDCCIPGEIVTVTAIVKVLNNHMDVGGGKSRISSQGLYYLYLEAVSVRKLKSHAVSDKEIQASGICHSQSSTVNDDFAVKYKEKYGTDVFRRILQSFCPSIYGHELVKAGITLALFGGVQKNSMDQNMVPVRGDIHVIVVDKIVLRMV

SEQ ID NO: 59590 - protein, 207 aa, Zea Mays
MDLWSDDEDNEKMSRSWSSTSDESLFNCDVLWSNRKRPGHLYFEFFEVGSPYGRVPLIDKVYELSQGFPGLTSLKSAELSPVSWMSVAWYPIYHIPYQRSVKDLSACFLTYHTISSSFQDHGLETMTTDCCHPVANGKQNGHMDKKSNTVSLPPFGLAAHKIQGSLWTNPMTGDRRKMDFLFSAADSWLKQLGVQHHDFNFFITHPM

SEQ ID NO: 59591 - protein, 133 aa, Zea Mays
MMQTCCVSLIYGGLEFSHLILKNIAFQTAAYFVCHLKIGGKLKAFLLGAIYTGKPQNGGQSWKQCCKRVSSLRLRHYPQIPFPFYRMSTFPRKSNKACIYKIGHSCIRPGCVIEYNLFLSDYSYIRRHIMCKH

SEQ ID NO: 59592 - protein, 664 aa, Zea Mays
MRIVQSTSRISQVNQKMMKSALIKDLYFQMDRLKQELYAAREKNGVYIPREQYIADESEKKAMSEKLDRLELVLESKDKQLEELHGLYESQKVLSADLSDQLQTLQKRMKETECTLADLETRYMKANDTIKEKQYLIENLLKSEKVLVGEAQTLRSELENTAGDLHGLFSKLERKEKIEDKNGSIIQYFHSQLIQEMNVLHRTVSTSVSQQERQLKALEEEMQSFVTSKGKVAGGLQEHVRKLKESFNSRIAELHGFANELKHKSMLSFENLNSQVTTHTSSLEDCMKDLLVDADELLIALQNGLSQHEVNFATFIEQQHEGLSRNLEGTKFVSATTMNFFRTIDSHALGLLKILEESKMEHQKQLFQLQKKFEAVVADEEKYLMEKVAGLFAESNARKKNMVQDDICSLNRTVSESSNNLQTETTKLHDFTSSMKEQWEGYMKKTEEAFQQNVSSIEQKRGFLAGNFQQCKEKVESCSEQWITAQNLVLALGRRNAEAIGLVISDGNEVSNQLGARISSAVAAGFEDNDISSKSLLSCIDDSLKLDHGIRENVKSIVMTSRAQLHDLEHGHYEMTKAITGNADRSLGEDYKVDEATCSTPRRREINIPDSQSIIELVTPLEDIVKSFWDSRTPTKPALNAKGKQQLVGSTTPETQRAPLSAIN

SEQ ID NO: 59593 - protein, 317 aa, Zea Mays
MAGGFFSMAHPAVTLSGIAGNIISFLVFLAPVATFLQVYRKKSTGGFSSVPYVVALFSSVLWIFYALVKTNSRPLLTINAFGCGVEAAYIVLYLAYAPRRARLRTLAYFFLLDVAAFALVVAVTLFAVREPHRVKFLGSVCLAFSMAVFVAPLSIIVKVVKTKSVEFLPISLSFCLTLSAVAWFCYGLFTKDPFVMLRPDGPLLLVPQAPPGGQEQRRAADDHGRRQRGAGAGAGHRAGAQHGGHPVGEPHPHRGRAQDRGGGAAAQGGRRGRRDPPDGRRKPGRRHAGGHRDRPRRRRGVTQRQSPCTVHTLLASY

SEQ ID NO: 59594 - protein, 651 aa, Zea Mays
MASPAGGESPAKPVLLHGDLDLWILEARLLPNMDMFSEHVRRCFAACRPPSSCGTKHPPPAAAGRRHHHHHRNIITSDPYVTLSVSGAVVARTAVIPNSQDPVWEERFAVPLAHRAADLEFQVKDNDTFGAQLIGTVAVPADRVVSGDEVEDWFPVIGTNGKPYKPDTALRLRFKFQPIADNPAYRHGIAGDPDHRGIQDSYFPLRHGGQLTLYQDAHVREGDLPEIELDNGKTFQHNACWEDICHAILEAHHMIYIVGWSVYDKVRLVREPSPSRPLPEGGDLTLGDLLKFKSQEGVRVCLLVWDDKTSHDKFFIKTGGVMATHDEETRKFFKHSSVICVLSPRYASNKLSIFKQQVVGTLFTHHQKCVLVDTQARGNKRKITAFIGGLDLCDGRYDTPEHRLFKDLDTVFQNDYHNPTFSAGAKGPRQPWHDLHCRIDGPAAYDVLTNFEQRWRKATKWRDRFRRVSHWKDDALIKLERISWILSPSPNVPNNHPSLWVSKEEDHENWHVQVFRSIDSGSLKGFPSDCKAASKLNLVCRKNLVIDKSIHTAYVRAIRSAQHFIYIENQYFLGSSYAWPSYVNSGADNLVPIELALKIASKIKAGERFAVYVVIPMWPEGVPTAASVQEILFFQMSSRQRTIRICTLKIT

SEQ ID NO: 59595 - protein, 644 aa, Zea Mays
MTLLSYLNELREPTEIPLCHIPEAVIKTASDWISQRSYDALGDFVLWCIDSIMSELSGPSAGPKGSKKVAQQSPRAQVAIFVVLAMTLRRKPDVLVNVMPKIMGNNKYLGQEKLPIIVWFIAQASQGDLVTGMFCWAHFLFPTLCAKPSGNPLARDLVLQLLERILSVTKARSILLNGAVRKGERLVPPVSFDLFMRATFPVSGARVKATERFEVAYRTIKELALAGSPGSKTVKQASQQLLPLCAKAMQENNAELTREAVDVFIWCLTQNAESYKQWERIYPENTEASVAVLSKIVIDWKDVSPKLSSEALKATVKNLKAKNEAALESATDAGKQASIKKQTSTARLEQGSEQLLGGRPGPALGVLATVAECSVEPAAQTTKGPDSNGSSSPLPPVLPSVCFPPRPRAMAPCASPSALALSASTRVSSFPLTLRPRPRPEARVPRAPGGAQLRPATACSWPRPLLPELAPAFPRAGARSAGRPQPLFRPRAMMTTSQIASCAFTVGTVAVLPFYTLMVVAPNADITKRTVESSAPYVALGLLYAYLLYLSWTPDTLRAMFASKYWLPELPGIVRMFASEMTVASAWIHLLAVDLFAARQVYHDGLKNNIETRHSVSLCLLFCPVGILAHVVTKVLAGAAGRSH

SEQ ID NO: 59596 - protein, 423 aa, Zea Mays
MGGSTSPWLPSLGRWEDGLADQIQYDSDGNVKSEIVKTPFVQIPLGVTEDRLIGSVDVEASVRSGTTVFQPGLLAEAHRGVLYVDEINLLDDGISNLLLNVLTEGVNIVEREGISFRHPCKPLLIATYNPEEGSVREHLLDRIAINLSADLPMSFDDRVEAVDIATRFQESSKEVFKMVEEKTETAKTQIIFAREYLKDVTISTEQLKYLVMEAIRGGCQGHRAELYAARVAKCLAAMEGREKVFVDDLKKAVELVILPRSILSDNPQDQQQEQPPPPPPPPPPENQDSSEDQDEEDEDQEDDEEENEQQDQQIPEEFIFDAEGGLVDDKLLFFAQQAQRRRGKAGRAKNVIFSEDRGRYIKPMLPKGPVRRLAVDATLRAAAPYQKLRREKERDKTRKVFVEKTDMRAKRMARKAGHICCGR

SEQ ID NO: 59597 - protein, 504 aa, Zea Mays
MVVLAASIVSKSGKALVSRQFVDMSRIRIEGLLAAFPKLVGTGKQHTYVETENVRYVYQPIEGLYLLLITNKQSNILEDLDTLRLLSKLVPEYSPSLDEDGICKTAFEIIFAFDEAISLGNKENVTVQQVKQYCEMESHEEKAHKLMMQAKINETKDLMKKRANELDKMRMERGKLDKGGYSSISGPRVIEKTFSDMSISGSGFGSGSGLGGLSTDMDSFASKPKGRPSTAATAPGKGFGMKLGKTQKTNQFLESLKAEGEVILEDVQPSAVSTRSSALPPSDPVTVNIEEKLNVVVKRDGGISNFDVQGTLALQVLNDTDGFIHLQIESQDMPGLSFKTHPNINKDLFNSQQILGAKDPNRPFPSGQNETPLVKWRIQGMDESSLPLSASEMFDLHNVVISIPLPALREAPSVRQIDGEWKFDSRNSVLEWSILLIDQSNRSGSMEFVVPPADPSSFFPISVGFSASSTFSDLKVTGILPLKEGNPPKFSQRARLLTANYQVV

SEQ ID NO: 59598 - protein, 289 aa, Zea Mays
MRNFPLSRGTVAGLIKGYVAVSAAVYTETFNGMLGNSPTNLLMLLALGIPTACIVVMYFVRPCTPSLDEDNSTEHSHFMYTQISSVVLGIYLMVATILGDTLKLSQAVTYLLFGIMILLLLAPLAIPIKMTLYPNKQTKEKASTLAPSYSTDSLSGADPENSQPLLGSASTTLATGTNESDDSTDLDLLLAEGEGAVNLKKKRGPRRGDDFTFLEALVKADFWLLFVVYFCGVGTGVTVLNNLAQIGMSVGANDTTILLCLFGFCNFAGRILGGSVSEYFVSSSCWLHL

SEQ ID NO: 59599 - protein, 307 aa, Zea Mays
MVKTPKTTQALDMVQPTAVPTAPSSVKTTAPDHVSLPPPPLPANQQSVAQLSAPFSSGLSNVGSTMDPPTISANPPQSAQAKGYLIHQMPSSAPQPSQHPNMALPHAPPQYSNVPSHIPIVHSQPQQPLQSPAIYNQQLQPPLPQLSRPPFPHQMHSQVPNSFGLTHANAPQHMLQQPMFHPVANPQTNFLPGQPPLPSQPPPQQLYQASSHYNTQNTTPMQVDRGAPWGRAPDAPTPGSHFPGQLPGLPGQMTQGIGGIQAGQAPLTPEMEKMLVQQVLGMSAEQINMLPPEQRQQVLQLRDMLRQ

SEQ ID NO: 59600 - protein, 322 aa, Zea Mays
MALDAPVERRDEVQIAMGNGNGVAPSQPSRPAGRPTAAAAAAPYADRRLRLNPNADHKPEDYSDVRGEYAPAVYSALERHLPPSLIDADRDVKLHFMRDILARYWPQGERNKVQRHREYRQRILHLYKPLHEELYNMHPSVFFLPTFLEAPTFCEMLLEEVENFEKWVHAMKFKIMRPNTMNKYGAVLDDFGLEAMLNQFMEQFIAPISKVLYPEVGGGTLDSHHAFIVEYGKDRDVELGFHVDDSEVTLNVCLGKQFFGGELYFRGIRCENHVNSETQHEEMYDYTHIPGWAVLHHGRHRHGARATSSGLRINLLLWCRRY

SEQ ID NO: 59601 - protein, 182 aa, Zea Mays
MLKLNEKMEHLEQKVKEVSNTIREKDLRLSKLQILIGTADRATVEEAAASIDQLETEFEHHLQEILEAEIQYLVMMKARQNWQVRAEDQMALEEHRASAAGDNTRMLLKLRETESKIVMLKEQVDKLEVREKDLYRTTEVLKMQSRTFKVSLFGLVQLIMMCLSLKMFFAQVSAPFDEVVPT

SEQ ID NO: 59602 - protein, 209 aa, Zea Mays
MALMLSMTEIRFSVSSENGKNYRDSVIPMRDSKQWSRLGCQDPEVEIIFDSVSVEAVVPVGRRTTPTLPNTIINCGKAVMDSVLMRRSREETFKIIDAVSGTIRSSRCFSCVARMTLLLGAPGSGKTTLLKALAGKLDSSLKIHGDVKYKCNGETMSSTSQHLCAYVSQNDLHHPEMTVRETINFASNMLGANNEFGMSACWFWSKSKY

SEQ ID NO: 59603 - protein, 978 aa, Zea Mays
MAAAPPLSADALSFLTSAPAAAAAVPTPVVAAAWGAARAGHVRGKAGLRTTGGGRGGVLAPVVGKRLCRTPLSVRCNATSRDGRITQQEFTEMAWQAIVSSPEVAKESKHQIVETEHMMKSLLEQRNGLARRIFSKAGVDNTRLLDATEKFIQRQPKVLGEEPGSMLGRDLEALIQRARDFKKEYGDSYVSVEHLVLGFAEDKRFGKQLFKDFQITVKTLKSAIESIRGKQNVIDQDPEGKYEALEKYGKDLTAMARQGKLDPVIGRDDEIRRCIQILSRRTKNNPVLIGEPGVGKTAIAEGLAQRIVQGDVPQALTNRRLIALDMGALIAGAKYRGEFEDRLKAVLKEVTDSDGQTVLFIDEIHTVVGAGATNGAMDAGNLLKPMLGRGELRCIGATTLDEYRKYIEKDPALERRFQQVFVDQPSVEDTISILRGLRERYELHHGVRISDSALVAAAVLSDRYISGRFLPDKAIDLVDESAAKLKMEITSKPTALDEIDRAVLKLEMERLSLTNDTDKASRDRLSRLEAELSLLKDKQRQLTEQWEHEKAVMTKIQSIKEEIDRVNVEIQQAEREYDLNRAAELKYGSLNALQRQLQATEKELDEYQSSGKSMLREEVTQDDIAEIVSRWTGIPVSKLKQSDREKLLYLEDELHKRVVGQDPAVKAVAEAIQRSRAGLSDPNRPIASFMFMGPTGVGKTELAKALAAFMFNTEEAVVRIDMSEYMEKHSVSRLIGAPPGYVGYEEGGQLTEAVRRRPYSVVLFDEIEKAHSDVFNVFLQILDDGRVTDSQGRKVSFTNTIIIMTSNVGSQYILNMDEEVGSSDSAYENIKRRVMDAARSVFRPEFMNRVDEYIVFKPLEREQINSIVKLQLARVQKRIADRKIKLEVSPGAIEFLGSLGYDPNYGARPVKRVIQQHVENELAKGILRGDFKDEDSIFVDTQVTVPSNGQLPQQKLVFRKVGEQSKPAAEGEKFLPAV

SEQ ID NO: 59604 - protein, 97 aa, Zea Mays
MCAIFADKRDGTPSTTRTSTSNWDIHHREREHGAAGSLHCRPACTALIGALCAIGRICPSSRIMLKVVARRECDLGAANLTSWPQIRGAPWAGKGTA

SEQ ID NO: 59605 - protein, 251 aa, Zea Mays
MDAGVEKCGDAAAEGGGDLYAVLGLKKECSDADLKVAYRKLAKKWHPDKCSSSSISVKHMEEAKEKFQEIQGAYSVLSDANKRLLYDVGVYDDEDDEDSGMGDFIGEMTQMMSQVRPMRQESFEELQQLFVDMFQSDIDSGFCNGTAKGHQVQGQAKSRTCSPRSPPTTIVKEAEVSSCNGFNKRGSSAMDSGKPPRPVECGAGQSQAGFCFGVSDTPKPRGPNANRKRNGRKQKLFPKHYVTSEDDTAGS

SEQ ID NO: 59606 - protein, 50 aa, Zea Mays
MIRLMGDHRYRPFIEQVEVLARRYCPEMLAYRKPVAGGSSADEPAGASDL

SEQ ID NO: 59607 - protein, 1410 aa, Zea Mays
MTVMSAFTKIKGGCFLHVNMAEATAATHCCQDAPATDTRRLNGVSLGIYEKNHVQELPAVAPDVACDMLPRGLEGCNDDAVLNTVQTHDVLPNCTLVPSSSQLNTEVPKNNAVGLASYTEAGIAQVIDKAKSYSGQIKHANQTEGAYIISTSKACVDKSLNESNMSHAVEELHASRDHGVGDDVSDKKQVMVEEQLLEEIQAKDNLSQAKEHKKCRTSSFDTSCMDLLETGTTSLVESLNTSNHQEVHDTLHEESIQLENPSTVGKKKKRKRRQLSPSKSASAQETTEPSATAVDLLIPTGEVLSNNSPGIQIHNIHAMDNLSQEKEQKKSRTSSPDTSNRHLLETNPTSLRETLNTSNHQGHDTLDEEFIQPENPSAAGKKKKKRRQLVPSKYASAQITTEPSSGAAPADLSKSTGDKAYNAELTSKGETVVEASGLPLSSYEHNDGNQGGKSVKFVSDDQASTDLISEQEKFDHALKGCRDPLIADDIYSTGENVAIEGKTTKGSCAPLNGGDRHEEIKHLNEGCHNAGVPETSNMEKDGKSTDVSDKRQTSQNTSQVKKRKKSKVGSVDMPSVDASGEKDHRYSENATKQDTASTKREIVHEPSMQQMSNIVHQGDSNVIENPSGDGKKKKKRRHHSESLKGMNPSQDLTKSSGFVTNESSIQCTGAAPINAKQTNLVIIEGETVTGHRKLSENLDVAATHVVDEVLADLRSKDGLSKDLDENLLPGQTHLGSNQNGIEVPESIAVKVGSTTAALPPKYPATVHSASPVNSPRQRKSKGKKLKVLSTMADSSHQSSGVPEEDANRKLKESDSLRFADKTSDHEDIVTANVVAQADEKRKATKRQRKKGSVKQVLDTLDLKEVNDTEENLVQGGSVVDTPLSTAGNVEQKDWSSETLSPKEQETNCSTHGLDSHTAKDSQDEYVTDTIGTHDNENAAGTPALHVVQKDAMALKSASPNSQKEQETSLNSELQSQDCPLEHGFSADLVNSRTEKGVRTTSSASAVKSDYNTMFHPANGRINVLDHFSRSNLNDGSSIVAESKQNNEDGSLREVKNKKKKRKQGTGSVEPNDVIESLPSEIASLTGHFGTSKAVVSSVATENMNGGNENVNKGKEKKRKGKSNMEVPTAGKDHPNCDTQFIDIGTQESLISIVQKERTGQDNGKESNSKATQNASIMQHEPEDATWNRSPEKNHHQSVDDDQNKLLTEKDHAHINKEVRKFTPQTKAHAKIRKPDGSTIKEKVAPNPKPVTNLVKDFSMSPRASSDSTEGMPQSANRYRVAVRKVPSKRYEETSGNSNKASRKVGSGAIFNDSISEGSGDELDTKTVMERSPNKSSTSADSGISSAASGESEVPDDDGTVSLSQKSFKGLHISSILRGSRSYKKALKRQMELLDDDTIVPDSQPADGLWG

SEQ ID NO: 59608 - protein, 81 aa, Zea Mays
MSDRDAVAPAGGGDRKAAKLGSWSSMSSNYGNKKRKSSSSSFGRRSTSTCEERQGVFRMLMSWNQESRFSNKIKTTTSKER

SEQ ID NO: 59609 - protein, 161 aa, Zea Mays
MKEPKIAAEIAKELRKFHQVDIPGSKEPQLWNDIFKFLKKAAALKFEDNMKQKRYEKISFREIQDEVQELKDLLDILRAPVVYAHNDLLSGNLMLNDLEATVAMTLQIISMSMQDLIVTIICTQIKMPSITSSGIIYTLIDLVRWMHKIWKYFMWKQTLSD

SEQ ID NO: 59610 - protein, 149 aa, Zea Mays
MSSDSSSWARALVQISPYTFSAIGIAVSIGVSVLGAAWGIFITGSSLIGAAIKAPRITSKNLISVIFCEAVAIYGVIVAIILQTKLESVPTSQMVCVGIIGSSCALSDAQNSSLFVKILVIEIFGSALGLFGVIVGIIMSSQATWPAKA

SEQ ID NO: 59611 - protein, 76 aa, Zea Mays
MEIAAVGVSIAIFNQVSKEHHNQCEPMPAHGYEMDCYICPNVKYLREGAFINVDIEKGIQDGQKAVGDEATVVKKR

SEQ ID NO: 59612 - protein, 367 aa, Zea Mays
MALPKDGCLDGAKITEVGGVGYKELLVMALPKDDSIDGAKVAEAIGVKLPDVGGAIRTILNSREAREFASGALAGAMSKAILAPLETIRTRMIVGVGPRHIFGSLVDIIQQNGWQGLWAGNTINMLRIIPTQAVELGTFECVKRSMAEAQEKWKEDGCPKIQLGNMKIELPLHLLSPVAIAGAAAGIAATLACHPLEVIKDRLTINREVYPSIGLAFRRIYKTDGIGGFYAGLCPTLIGMIPYTTCYFFMYDTIKTSYCRLHKKSSLSRPELLLIGALSGLTASTISFPLEVARKRLMAGALQGKCPPNMIAALSEVIQEEGVMGLYRGWGASCLKVMPNSGITWVLYEAWKDVLLADRNKPRSLAN

SEQ ID NO: 59613 - protein, 306 aa, Zea Mays
MILLLGPIGLALLLSRSVSLLEAIKCCISTTLVCIGFTVLIDSIMWRRILWPEFQVLWFNSVLNRSSEWGTHSIHWYFTSALPRSMIVAYPLCMVGALLDRRIVPYMFPVFLFVVLYSKLPHKELRFIIGSIPMFNVSASLTASRLYNNRKKAGWNLLFILMLGAFLVSLGYSTVTFMASYNNYPGGYALKALHEADSSVKEKMVHIDAFTAMSGVSRFCENEYPWRYSKEEEIPIEEFEKRNFTYLLNEHRSIGGYQCLFAVDGFSRVKLTPQIPPLSLVKEPKVFAHGNTRDPDILSLSWPGCP

SEQ ID NO: 59614 - protein, 57 aa, Zea Mays
MMAFPCRCCSLAAMAVPPCISPVTGPSPSHVMLVPCLLPHRPTSPATRKDVDNWKSM

SEQ ID NO: 59615 - protein, 557 aa, Zea Mays
MAAASTATAASHSASFPAASLRHDARRPSCVAPAAAAATTAAETGLTAVPAPPPTPMLRVVPESLQRDSGCLVAGFRERGAGAADGEGFGDAVGEGGGPGAMEYLTSVLSSKVYDVAIESPLQLATKLSDRLGVNLWIKREDLQPVFSFKLRGAYNMMAKLSREQLERGVICSSAGNHAQGVALSAQRLGCDAVIVMPVTTPEIKWKSVERLGATVVLEGDSYDEAQSYAKLRCQQEGRTFVPPFDHPDVITGQGTIGMEIVRQLQGPLHAIFVPVGGGGLIAGIAAYVKRVRPEVKIIGVEPSDANAMALSLCHGKRVMLEHVGGFADGVAVKAVGEETFRLCRELVDGIVMVSRDAICASIKDMFEEKRSILEPAGALALAGAEAYCKYYNLKGETVVAITSGANMNFDRLRLVTELADVGRKREAVLATFLPERQGSFKKFTELVGRMNITEFKYRYDSNAKDALVLYSVGIYTDNELGAMMDRMESAKLRTVNLTDNDLAKDHLRYFIGGRSEIKDELVYRFIFPERPGALMKFLDTFSPRWNISLFHYRAQA

SEQ ID NO: 59616 - protein, 73 aa, Zea Mays
MFRPPRARPTTLVETSVLESTLASQMPLDRIRSQVVGWGRWKTAVWSPTLTATGGFGFGMKVCVIWRYNPKAG

SEQ ID NO: 59617 - protein, 150 aa, Zea Mays
MIIPLPSYPIHRHHPHSPSILLHHNLIPLPRIRQQQITLLLIFTNHPPIIQLPATQAQISLPMRSTNHLPIIPHLLTQGQIALPMTATILTAMVNQMFRLTLRHINPHPTHLTLSTTLKTTTPRKPQLFHTTTLISSHILVSRTTRQLLF

SEQ ID NO: 59618 - protein, 184 aa, Zea Mays
MVDIKGNHGGINMDLMMASPKDAPKPSDRRRPSPEDARSTLGRRMSRGPQHGGRTPHAPPGSRRSRAYRSGSCCRRAFGSKNSHRRTAGSGSCHRRATGSRIHRRCSSRSGSHRCRARVREPPRHRIRERPPVVSSEAATALGVTIAHVPWHRRHISLSGNRRHTRVWVGVIAHVSGGASKIEP

SEQ ID NO: 59619 - protein, 771 aa, Zea Mays
MQLSFGVDEFLIIAPLSASGVILDDPESTKLLSSVAIALSNCGSNWPAFVPVHDPSRKAYIGIQNLGTVFTRRFEADRIGSQVPIRLMHLEGLHELFLSKFVLSSSDFPARVKVHFSMKLSYKTPEYDHDNETLDSEATEPLTENEVVNHPRKLWDDDCPWAEWYSAEDPVKGFELTAIWGERTFEETLEMAEVENASSFDADSWFLHPVVSRYMVDDSIGKFVGFASQLHLLVNAYESSVEAQFLEDFVADTSGQDNAKSTATVPPPSVIDRVMKDLFSDETGNYMEAENKYSRAMRGAPADSLFGQFCLHALWFGNCNICAIATLWIDFVREIRWCWEESERLPRMKSTSSIDLSSCLIHQKLQMLTICIERKRSLNREKGTGYKDETSNSTAVNKSRKGSAGVVPKMMLLNTFQEMHAPYTQDAPLMTEDMHEERLHAAEAFGNAIGLSGQLERDILCSDMSAFKAANPDAVFEDFIRWHSPGEWLSEDKTDGNAGWPPKGKLSHRMSQHGNVWRKIWNDALPLPVSEQKSLLDPVREGEKVLHYLETLRPQQLLEQMVCTAFKSSADILNKTMYGGFKEMKTKMDRLYVTMASTLKSFLGNSDVNDLVGGLKRLCQVFEHIEKLLILAASINRKLIDAPRLAQAIFYDYYNFYLPKMGTSLESICYEKEFTTKEKVGMYERDAVSNLFPPPTANQSWRKVLSMGNLLNGHEPMQREIIFSVQERISNGHYSSPTPLCTNNEKIQTHRMYISGTSNDLWVALSVTSWD

SEQ ID NO: 59620 - protein, 799 aa, Zea Mays
MHPFCCAPLVPVSPAASAAPAASSAVAGTQAVMPPPQPPPLPPPPPRNNSATGGERRARAAGVSGGGGGDSSPLEGVKLNEIVGGGISGIMYKWVNYGRGWRPRWFALHEGVLSFYKIHGPDRIILSRETERGAKVIGEESLRRLNRPSAFSPSHSNGHHHPRNPIGEIHLKVSTVRESRSDDRRFSIFSGTKTLHLRAETREDRAAWLEALRVTKDMFPRMSSSEMVGPGDTAAAVAVSTERLRQRLQQEGVSEAAIADSERIVREEFEALHKQLVLAKQKHALLLETLRQLETEKVDLENTLVDESQRQSKEYGSASKPRHEKYSEGSASESDDYNEPQDPAEETDDEANLYFDTRDFLSSSSFKSSGSDFQRSEAGSDDEDDYPMDGINPSMKSIGVSYAYVRRRNRLPDPVEKEKGVSLWSMIKDNIGKDLTKVCLPVYFNEPLSSLQKCFEDLEYSYLIDRASEWGKRGNSLMRILSIAAFAVSGYASTDGRSCKPFNPLLGETYEADYPDKGLRFFSEKVSHHPMVIACHCVGTGWRFWADSNLKSKFWGRSIQLDPVGALTLEFDDGEVFQWSKVTTSIYNLILGKLYCDHYGTMRIQGNCEYSCKLKFKEQSIIDRNPHQVQGVVQDRNGRTVATLFGKWDESMHYVMGDCFGKGMGTEQFSEAHLLWKRSKPPNFPTRYNLTRFAITLNELTPGLKEKLPPTDSRLRPDQRCLEKGEYERANAEKLRLEQKQRQARKMQDSGWKPRWFAKDKATDTYRYLGGYWESREKSSWEGCPDIFGQDPNDLMIAD

SEQ ID NO: 59621 - protein, 237 aa, Zea Mays
MAMPFARRDIEAAGAGASSDDSPAAKKGKPELAGARPALTRSEAFAFAAVLALFTAGIFCVFLTAPRGEFGQILRLPRSLADVRLLKDNLAVYARDYQTNFILGYCSIYIFMQTFMIPGTIFMSLLAGALFGVIKGGILVVFTATAGGSSCYFVSKLIGRPLVSWLWPEKLRYFQSEIAKRKEKLLNYMLFLRITPTLPNTFINMASPIVDIPFHIFFAATLVGLIPASYITVKFDQ

SEQ ID NO: 59622 - protein, 719 aa, Zea Mays
MDIIINSLYSNKDIFLRELISNASDALDKIRFLSLTDKEVLGEGDTAKLEIQIKLDKEKKILSIRDRGIGMTKEDLINNLGTIAKSGTSAFVEKMQSGGDLNLIGQFGVGFYSVYLVADYVEVVSKHNDDKQYVWESKADGSFAISEDTWNEPLGRGTEIRLHLRDEAKEYLEEDKLKDLVKKYSEFINFPIYLWSTKEVDVEVPADEDETSEEEDSSPETTEEETEEDEEKEKKPKTKTIKETTSEWELLNDMKAVWLRSPKEVTDEEYSKFYHSLAKDFGDDKPMGWSHFTAEGDVEFKALLFIPPKAPHDLYESYYNSNKSNLKLYVRRVFISDEFDDLLPKYLSFLRGIVDSDTLPLNVSREMLQQHSSLKTIKKKLIRKALDMIRKLAEEDPDEYSNKDKTDEEKNEMEEKKGQYAKFWNEFGKSIKLGIIEDATNRNRLAKLLRFESTKSDGKLASLDEYISRMKPGQKDIFYLTGSSKDQLEKSPFLERLTKKNYEVIFFTDPMDEYLMQYLMDYEDRKFQNVSKEGLKLGKDSRLKDLKESFKELTEWWKKALESESVDSVKVSSRLHDTPCVVVTSKYGWSANMEKIMQAQTLSDSSKQAYMRGKRVLEINPRHPIIKELRDKVAQDNESEELKQTARLVYQTALMESGFNLPDPKEFASSIYKSVHKSLDLSPDAAVEEEDEAEEQPEVEEKEPAAKEGSEPSFDKDEL

SEQ ID NO: 59623 - protein, 1025 aa, Zea Mays
MGWSPRPPPITRSTASLRLVPHFSHFRFSFHRAQESRGGGGSRRRTLRCCGGTAPAAAAGAAEGRMAAATAADMVWVRVLEDGVFRFDASEAARAAAGPSLSFADPRRREAPHDGADMPAVVPVCEVAAGGSQKVVIKVFTWNTDAWGFGPGTTSLYQSHPWVLAVLPDGKALGVLADTTRRCEIDLRQESTIKFSALSAYPVITFGPFNTPADVMTSLSHAIGTVSMPPKWSLGYHQCRWSYDSSEKVLKVVRTFREKDIPCDVVWMDIDYMDGFRCFTFDSIRFPDPISMVDDLHSIGCKAIWMLDPGIKKEEGYFVYDSGSKSDVWIQKADGSPFVGEVWPGDCVFPDYTSEKTRAWWASLVKDFISIGVDGIWNDMNEPAVFKTTTKTMPESNIHRGDADIGGVQNHSYYHNVYGMLMARSTYKGMEMGNAAKRPFVLTRAGFIGSQRYAATWTGDNLSNWEHLHMSLPMVLQLGLSGQPLSGPDIGGFAGNATPKLFGRWMGVGALFPFSRGHTETGSIDHEPWSFGKECEEVCRLALLRRYRLLPHIYTLFYHSHTKGIPVATPVFFADTQDPELRKVETSFLLGPLLVCASTLPNKGAHEYAHKLPKGIWLSFDFADSHPDLPVLYLQGGAILPVGLPIKHVSEASLEDDLSLIIALNENGKAEGVLFEDAGDGYAFTQGDYLLTYYIAELHSSVVTVKILKSEGSWKRPKRNLKINILLGGGAMISTDGVDGEVIHLTMPSESVVSSLVATSEFEHKKRMEMIQPIPDIEEPSGQEGAELSKIPVDLKSGDWFLKIVPWIGGRIISMAHIPSDSQWLHSRIEINGYEEYSGAEYRSAGCTEEYKVIRRHLEQSGEEESICMEGDIGGGLVLQRQISILKDNPKIVQIDSSIQARSVGAGSGGFSRLVCLRVHPTFTLLHPTEVVVAFTAINGSKQEISPEAGEITFEGDLKPNGEWMLVDKCVGLSLVNRFNPREVSKCFVHWGTGDVNMELWSEERPVSNETPLRICHQYEVQQTT

SEQ ID NO: 59624 - protein, 485 aa, Zea Mays
MAFLFGAFLGLVVGVAVVMAFARFENSRAEQRRELAATAAAFSKLTVQDLRKLIPPEFYPSWVSFTQKQKLKWLNQELTKIWPFVNEAASELIKTSVEPIFEQYKSFILASLHFSKLTLGTVAPQFTGVSILESDDSAIIMELELQWDGNPNIVLDIQTTLGISLPVQVKNIGFTGVLRLIFKPLVSEFPCFGAVCCSLREKSKVEFTLKVIGGEMTAIPGISDAIENNDLNPIWNEHYEFVVEDISTQHLTVKIYDDEGLQSSEIIGCARVDLADIQPGKVKDLWLDLVKDLEIQRDKKPRGQVHLELLYYPYAKHEGVPNPFANQIQLTSLEKVLKTESNGYDINQRKNVIMRGVLSVTVISAEELPPMDIGGKADPFVVLYLKKGETKKKTRVVTDTLNPIWNQTFDFMVEDALHDLLMVEVWDHDTFGKDYIGRCILTLTRVILEGEFQDTFVLQGAKSGKLNLHFKWTPQPIYRDRDRDQ

SEQ ID NO: 59625 - protein, 645 aa, Zea Mays
MSRCFPFPPPGYAKTARPDGQLASHLQQQQQLDKEKQKEKKHKKDKKDKVRKEGKEKKDKDRSKDKHKDKKDRKEKHRDKKKDKSKDKSRDSGEGIERNDEAHHGQKVGESSRRSEEIKDLKFREDLVRDVQDEKGAASRPSENYGVSNDRNRKGFSASPAMETERFALNKVHIQSSNAPRKNEGLVQQSISANRQKNGTSIRHSESLTTFAQRTVGGFPPAPSTEEKFKAARPLSNTEAAPRKEGIGQRISNISILVPKRTENTNRDVAKKEVGTSSPLPPNPANAMHKGNDKVGRPMENTQVPMQRFGSPSMSTAAVGMDRGTPRSSIPSPSITIRRPNGIVRPPKNISVSSKKPDAGDVSPAIGKEKEQGGRLLQANISTDQKLVMSKPPAVEKAAHGSAERTEKVSRDGVPDVAKKEDKKSDRHEKKKRKEKDKHKERKKEKEAKKEKEKHNYKEHDKTRENNISYPVDSLNLKPSAPPVAPPVDGGKSVVPDENLKKRKNHETNGYLQNHLEMRPTKLPRPALPINLVENGTASHVAAPLSSVKPEAIINNIEKAERLHKEEKMNGNQQAERASVDPVAAYENGITSRKSPHPDCKYLSQIYSVPEAPQMMELPGQEGEDWLFDRGGTKSRKPSSAAEAD

SEQ ID NO: 59626 - protein, 914 aa, Zea Mays
MGCGQSKMEEEYAVRHCRVRSELLALAIRQRYTLADAHHAYAESLRAVGALLHDFLRGVQSLPPPPPEPALRLPQQRKGDGLPAASPPPAMASSSAAAAAPPVAKQVRIAPDDGHIQFSDGDSDSEDGHIKFHSDEEPDPARRRPEVVRSTGAPGPPPPQMGQPYASGGGYAPPPYGPGYGYGYATGPGPGPGPDYGGIGMNGGGGYEPGHGVMYGQSYGGSGSGGGYDDQGYGGMGSGGGAGGYDQSYAGIGGYGQSFFNISYARSQPPPPSVSHEQRLEATNARVHYYSGNGEQQPPPRGYGGGYSYPPQSSRSYNQYAYGGYYGGGSAPAPPADIPSSSGEPAAVPPPPSPPRVSTWEFLDPFGTYESYYEQPTATAAPYSPGRSLKDVREEEGIPDLEDEDMEVVKEAYGDEKHPVKGYMGNGKAAKGEGRSSTGDELPRKSKSSEASGSGSSLEHDVHVVEKSVVGEQVRHSEPRQHVAGLPPTGSEKLYIDDTEVVVEIRTQFERASQSAGEVSKMLEVGKMPYYQKGSGFKVSAMIVCGIPTMEEEFLRFEEDKAMGSGNLSSTLQKLYMWEKKLLEEVKTEETMRVLYDRKREELKMLDEKGAEAHKLEATEVYIRKLSTKISIAIQVVNTISEKISKLRDEELWPQTCELIQGLMRMWSVMLECHQIQLHAISQAKNIDSMIDTAKFGDAHMDLIKRLELQLLDWIACFVAWVSAQKNYVKTLNRWLTNGVIYVPEETEDGAPPFSPGRLGGPPIFVICNNWAASVDRISEKEVVEAMQAFASNVLNLWERHRSEQRQGLMANKGMDRDLRVMERDEQSMRKALEAQNKKLVLVSSQGSVSLSAQALHEQRGPGAEVGSLQSGLRNIFEAMENFTSASANTYRELHLRAEEEKARVAQESGGSVP

SEQ ID NO: 59627 - protein, 229 aa, Zea Mays
MVWLLLLLLHGISVPSHQGETGRHRSDIARAACEACASYCWGCGADLLSGGAQVPVQGRQQEGHPGVPRPRGAAGQVLGPAGVHGADQGADGARDPAHLLPPAAPPGEGHRPVPGAARHRRPGHGPAGVARALRRGGVRAQGPAPVRRVPARPALRARARRGRRRDRRLDGRDAPAPAAGWMKGWPCCFSPSRWCSSPKYNNRFVCQDKMDAFVLWNYVTYLFIFITAG

SEQ ID NO: 59628 - protein, 431 aa, Zea Mays
MAACSRGLAWPPFDLTTARGAASWPRRRATIRCCCAGTDPEPRRRLSRAAAAAPERAEEWRVDGNKPSAAAPARRRASLTAMPPLPFPAPRSRRQFKQQDFYPRCTPRGPAPQSCDSPPKRDTGIASEKEWGINLLDEAVKESGINEDGSTWYRESGEDTGENGYRCRWARMGGQNHDGSTEWKETWWEKSDWTGYKELGAEKSGKNAEGDSWWEKWKEVLYQDEWSNLARIEKSAEKQAKSGAENAGWYEKWWEKYDAKGWTEKGAHKYGRLNEQSWWERWGEHYDGRGFVLKWTDKWAETDLGTKWGDKWEEKFFAGIGSRQGETWHVSPGRERWSRTWGEEHFGNGKVHKYGKSTTGESWDLVVDEETYYEAEPHYGWADVVGDSTQLLSIQPVERPPGVFPAIDFSSAPPPKDAPPGMPPSPLDGGN

SEQ ID NO: 59629 - protein, 132 aa, Zea Mays
MAWMTAVSAPVVLKSSQVGGLCAPSDKLLFGRSDGHFMDWSKRLKVALGAARGLAFLHDEGPFQAMYNEFSTLNIQIDKGFTAKLSGYGCVGFNTEEISNAPVQTIRWRPWRRVYSLSLSIAATSRGWTVPK

SEQ ID NO: 59630 - protein, 79 aa, Zea Mays
MSVETTAGPSLVLLAAAVMMREAEAWRSRRAMRSRSLLHGHRPVPSGSLPDSFLNGRLEKKLGIMPKHKDGSIRACRVL

SEQ ID NO: 59631 - protein, 146 aa, Zea Mays
MHGGLSPELTSLDQIKDIERPAEIPDYGLLCDLLWSDPSPDGEGWGESDRGVSCTFGADKLVEFLEKNDLDLICRAHQVVEDGYEFFAQRRLVTIFSAPNYCGEFDNVGALLSIDESLMCSFQILKPTDMGPPHARKQIPNKPTRG

SEQ ID NO: 59632 - protein, 614 aa, Zea Mays
MPLHSATGVNDGGWEVVRPRFWWRKALKNPVRSPRNLQLDVKGTNLFKLKLKGKCYNCLSPAHLAFCCSAPTRCWQCLQSGHKARYCNQKVSQRTFNAAQCFPEPAVLASKSSTYQEVLLKPDKLHKYQDLPHVNSLGHPPPSTKKSYLQAVLEDHGMEARYPGDPRVRPARAFCAVSATGSIRRRRDELIDTAVVCSFDGNSHEVDILSAGDMLREKFSLQHGQYQLVKHFPEQFFIIFSDPRSKQWALDRRSVSYRGRIFHFGDWSEDSYARKTNLEFRVKVRVEGISVHCWGEDVASKALGKSCAIHYVQERTRRRERTRSFDLWAWCSDPCDIPKEVLLTVLEPDRELPPISTPLALVGAQQDAPADLKAGHVYTLRNHIEVVEDLSFLRGRGSRGGPPNRKQRMEFIWSYGAPDSVGEKRERVEAVRGREIARRDWGHDDDDDGDFQRSRRCGNRRHRSLSGWARSSRCRGGMDDCYSSNDKQRHLTPFRRHGWESKLSSRWVPKVKVRSVSFADPIVTAVWPQEDKCGQAEDIGDRSGSMGAVILEPVRSPATTTCKLARHFSRPLTKEQMEAIMELATLGKEKEGIKKKGSKVTPLKAPIIEASEML

SEQ ID NO: 59633 - protein, 136 aa, Zea Mays
MMSLSGFLLHIPDGYECVDLSLYKDNQVVLLLSETSCSDSPGKSWMVMLQIENFSFMPLSGTFPANIYSLQKLVALDLQLDTDYGKVRSIPHTVSTPFAVSASRGVACVFSSRRHALVYILDEDEEAEGDETSDME

SEQ ID NO: 59634 - protein, 1174 aa, Zea Mays
MAAVGVGAADERWASLCNCVVNFLLEERYHLTALELLQELQEDGRSAHALRLRAFFSDPALFPPDLVARSSSAPPGADPQILLEEKIAAEEKLALTEYDLRLAKEDLSQLKLELQKQKESSPDDSNGLLLGASIREGYTRQQENWDVKISALGPLKDNERKDLNCAVKEYLLLAGYRLAVMTFIEEVPDQDLDVWPNSSACVPDALRRYYYQYLSSTAEAAEEKISILQENETLLKDNERLNAENDSLMKSREGANSQVAALRKSLEAAHKDIKDKEKMIQDLRQSLDVQRKELNDCRAEITALKMYIEGTQSIKQLFVGTSDGVKSHSFANSVGASSLNNEDEDSKGSEAITNKLASAVNITDDTQKDRQVLESSAEGSSVSETPVSFTAVENDSYGTSKEDKSVSNISSNNVCFQSNLHGASMTGKSQGSSDGISMYLSIEKLESPSKQKSSDKIALETIKIVSDALPKIVPYVLINHREELLPLIICAIEKHPDSDVRDSLTHTLFNLIKRPDGEQRRIIMDACVELAKSVGEMRTETELLPQCWEQINHQYEERRLLVAQSCGELAVYVRPEIRDSLILSIVQQLVEDAATVVREAATHNLALLLPMFPNLDKYYKVEELMFQLVCDPSGAVVEVALKELVPAVVRWGDKLDQISRVLLAHILASAQRCPPISGVEGTIDSHLRVLGEQERWNIGVLLRMLTELLPFIHQKAIQTCPFASADPTSSTPENFSASCLKSYATGDSEWSAFEWMHTDCLPDLIKLACLLPVKEDNLRTIITKYLLEVSGLYGKDYLEHIMLPVFLVAAGDIDSGDFTYFPLSIQPKVRGLRPKTSTAEKLAIMCVFPLLLSGILGSPSSRQQLEEYLRKVLIQNTKDGSFSMHHTTEIINAVRFLCVIFNILWEMVASSDTSLKINAAALLRALVPYTDVKIASTHILPALVTLGSDQNLKVKYASIDAFGAVAQHFKNDMVVDKIRIQMDAFLEDGSHEASVSVIRALAVAVPHSTDRLREYLLTKIFKMTCITPVGNDIERRRERANVLCEALRALDATDLPAMGIRDLLLPSIQNLLKDLDALDPAHKEALEIISRERSGGTLESISKVMGAHLGIASSVSSFFGENSLLTKKEGGEEHDPAGPTAPEQNLQAQPESTRFGRIMRSGFGDILRGQSKGQ

SEQ ID NO: 59635 - protein, 127 aa, Zea Mays
MFKPFNGEILVGRITGYDDKGLQVSLEFFSDICIPGHLMQFGTVRGPDGRWMLKTELGDELYLDLDDEIRFLVSSTKYPPIPIDQNEDDPPFAPMQIVGSIKGDGLGLLVWWAADEEEGEEAAEEEQ

SEQ ID NO: 59636 - protein, 523 aa, Zea Mays
MASLPKPPPPPRPKTRGNYNCGRCGQPKKGHVCVGPGPGPGGAASPSSSSGAGGEHGLRRALSFDEAGTPSSPEKKPKVEDVDEAELDEEATVDVGARAVSREVMAEVLHRLGPRGVMAAAGVSRGWRDCAGRVWRAAEELRLRVLASSGAGLLAALLPRCPALSRLHLRMESDVDGTTLACIAFSCPSLRTLEITMAADAVNRMTGEDLSRFVSEKSSLSALKIGGCSNLDILNLCSSSLSILWLSDLCSLSKSVMNCPNMSELSLCFTEHSSDCTNLITLMDGLGRTCPNLEKMHISSKQLSNEAVCALENANLRGLFMLSLILGSKITDAAVASIVRSCASLELLDLSGSSISDNGVGMICKAYPRTLSRLLLALCPNVTTRGIQLATAQLPCLQLMDCGMSLCANVKNEKEGPYFGEINGGIRIIRKLSILKRQPIHQKLIIKHGNLKKLSLWGCSALDALYLNCPELNDLNLNSCTNLHPERLLLQCPNLKNVYASGCQDMLIGAIRNQLNHLFHASG

SEQ ID NO: 59637 - protein, 276 aa, Zea Mays
MILLVYYIKHVSREVQVFEPFSILGLESGASESDIKKSYRRLSIQYHPDKNPDPEAHKYFVEYISKAYQALTDPISRENYEKYGHPDGRQGLQMGIALPKFLLNIDGASGGIMLLGIVGFCILLPLMIAVIYLSRSSKYTGNYVMHQTLSTYYYFMKPSLAPSKVMDVFIKAAEYMEMPVRRSDDEPLQKLFVAVRSELNLDLKNIKTEQAKFWKQHPSLVKMELLIQAHLTRESFALTPALLKDYRHMLELAPRLLEELVKAYSSNMLPDVGRIS

SEQ ID NO: 59638 - protein, 223 aa, Zea Mays
MNALQGFQATLSKSPNDPTALEGAAVSLSELGEYEKASTFLEKLIKVIPDKAEAYRLLGEVKFELKDYEGSSSSYRSALSSSDNIDFEVLRGLTNSLLAAKKPDEAVDIILLCRRKLNEKSQTGLADLEATNDNGRQKPQDIDPIQVDLLLGKAYSDWGHISDAISVYDKLITDHPEDFRGYLAKGIILKENGKAGDAERMFIQAKFFAPEAAKALVDRYAQR

SEQ ID NO: 59639 - protein, 619 aa, Zea Mays
MQTSKPSSLCRSGSSDAPQRTSPRTPRASRVAKTGGNETDSTGVTPTRTPTERSPKVTERRSPRSPITEKKRPSRLSELESKVSQLQDELKKAKEQLSSSEARRRHAQQEAEEAKTQEQAAAASKLEELQRQLDEFSAAEESRLQELRKISQERDRAWESELEAVQRQKSADAAALGSAMSEIQRLKQQLEASAESDAARAKQCEYVEAEIEGLKQEMEIRLATIEGLKVNVSESDRAAAEANATVNETKQQLETAKATIDSLVAEGVRMQECLRSKDMELNESKALVASLQEDMKKSHDTDNAKAKANTDVRSETEALQKVLVTTSAADANGSCGSYDPEIEQLRTALEVAEIRYQEQQTRMTIETGGLYETLESVRAECARELCELRLELKNKNDALMEAMAGAAADPHRPDAMQQPELEAKLMRSITDAAELKACLMDKENALQSLAEENEALKAGAGRAEAELRRKYEAAVAELELAKAAEQDVRMRLGLVTDEADRSSRRAARASEQLDAAQAAGAEMEAELRRLRVQSDQWRKAAEAAAAALGGGGGKDGNGGTVERTGSLGPEYGSSIGGKLMSSPFSDDVDEESPKRRNGGGGGGGGVLRRMSGLWKKSPK

SEQ ID NO: 59640 - protein, 1094 aa, Zea Mays
MRDARAPQLQQRAHGGVGVVVVLLVLLAGAASGQQQAQPPPVVPPADLPDVERQLNNLTNDIAVTISDKFSFCVADLEEDWNEAFNYTSDLSFVDRCLTETQGDLVQRLCTPDEVKFYLASLYDRDGDKNINLKTNINCNISSWGRGCDAGWACAADPVVVVRDPRNGVPLRARGCQACCEGFFCPRGLTCMLPCPLGSYCPRATANQTTGLCDPYKYQITPNSTNGCGGADMWADIQSTEEIFCPAGYHCPSTTRKDNCSTGHYCRLGSTAQEKCIIKGSCDENTENENVKILGACIVGALCLLLLVIYNCSDKFLSIRERRKARSRENAIQLARQQLKAQEGWRAAKQFARRHVSGMQGHLSRTFSRRVSFRQPVDPHSSSRRVQEAPLMTQEMSDSAVFASESRSEITEVVMPSVVVDVSDGGEVVVVDTKEDKPAPKGKHRSTHTQVFKYAYGEIEKEKFQQQQESRNLTFTGVVAMAKDQQREITRPLIKVEFRDLTLMLGNNKKKKLLRSINGELRPGRVTAVMGPSGAGKTTFLNAVTGKLNGYKMTGSVLVNGKDVNIRSYKKIIGFVPQDDIVHGNLTVEENLWFSAKCRLPASMKHRDKVLVVERVIDSLDLQGTRNSLVGTVEKRGISGGQRKRVNVGIEMVMEPSLLILDEPTSGLDSSSSQLLLRALRHEALEGVNVCAVVHQPSYTLYNMFDDLMLLAKGGLVVYNGPVKTVEEYFTTTLGIHVPDRVNPPDHYIDILEGIVKPESAGIIKAKHLPVHWMLHNGYEVPSDMQDDAKEIGEQTPQLRSGSSVSAGSTPHCLPLRNAFAEERDRLEQHLSKPKDLSSRKTAGILMQYKYYLGRVTKQRLREARLLMVDFLILGLAGICLGTIAKLSDKTFGMPGYIYTIIAVSLLCKIAALRSFSLERLQYFRERESGMSSLAYFLARDTIDHFSTVVKPIIYLSMFYYFNNPRSTIADNYIVLLALVYCVTGIGYTFAICFSPGSAQLCSALVPVVLTLLATQKSTPTFIKRLCYSKWALEGFIIVNAKKYPGVWLITRCGLLFQNQFDIHNYKLCILILFMYGLFFRMVAFAAMILLKKR

SEQ ID NO: 59641 - protein, 132 aa, Zea Mays
MVDGNGLLHPRGFGLACHLGVLADIPTVGVGKNLHHVDGLNQSEVRRLLGSKENCNRELVLLTGQSGTKWGMAVRSCPGSSKPIYVSVGHRISLDSATAIVKSCCRYRVPEPTRQADIRSKVFLQKLQKPRQ

SEQ ID NO: 59642 - protein, 101 aa, Zea Mays
MIISILSTVTSGVGLVEYFLMTLMITIKKCFSTSLQVKPFARMIGWNYLYSDVEMSDAGNNRSKTFLRPLGSISKKKVQLHLKIKKDKRKARKKGKFSFKK

SEQ ID NO: 59643 - protein, 637 aa, Zea Mays
MEGSSYASRSYSELAAAASGGGRTLRVIPLRHPLGSLSTSSTSPWWRAVVGRARGMGPLDWAEAALPCVAWTRNYRWKQDLQADLASGITVGVMLVPQAMSYAKLAGLHPIYGLYTGFVPLFIYAIFGSSRQLAVGPVALVSLLVSNVLGGIVNSSSKLYTELAILLAFMVGILECLMGLLRLGWLIRFISHSVISGFTTASAIVIGLSQIKYFLGYNVTRSSKIIPLIESIIAGADEVGEIPQGLPRFSIPQGFEHLMSLVPTAVLITGVAILESVGIAKALAAKNGYELDSNKELFGLGIANICGSFFSAYPATGSFSRSAVNHESGAKTGLSGIIMGIIIGGALLFMTPLFTDIPQCALAAIVISAVTGLVDYEEAIFLWAIDKKDFFLWAITFITTLVFGIEIGVLVGVAFSLAFVIHESANPHIAVLGRLPGTTVYRNTLQYPEAYTYNGIVVVRIDAPIYFANISYIKDRLREYELNLPSSNKGLDVGRVYFVILEMSPVTYIDSSAVQALKDLHQEYKARHIQIAIANPNRQVYLLLSRSGIIDLVGAGWCFVRVHDAVQVCLQHVQNSSSNALKLPVQASGVLTDSVSTPKPEQQHQKQHGLFKDLWKAQDSNADAGGEVQPLLRQNLV

SEQ ID NO: 59644 - protein, 73 aa, Zea Mays
MARNSAHHPKKGCSLCTYIYRTHKHKQATQGFQASDVSVGSMLRRRRSSREKRLKMCEQVSSDSYQKGKSYKG

SEQ ID NO: 59645 - protein, 117 aa, Zea Mays
MAGANGWSVFLNAQAFSYIYIRNTLQSLCLSRRFQRRKRGNGAPPRAIFHTSRPLRRRTTTSTLLSYASLGSLWSMSMTKTFTSRQLWNKSRTLNRQADVLARSQPFPGRLELRGCY

SEQ ID NO: 59646 - protein, 272 aa, Zea Mays
MYFDGFPYVIRDIMLYILCADIWELMFKYTSPNSKNMVTNASLLNDKVEMETENVQAIPEGNQAPKNELSNSNNGSPAMEISPNSVPDNSRLTVSDQMATAFVTVESPDAISKVAASRIVCSLPYISNEILKEAQTLEKAVNADEMADEGLNEILPDDKDDKKDCQLEVSSGPVILNDSSTPVYPEFSNFFYAKDGTEVSNNAVDSKNNAEQHAFSNQGKGNMEECKDSDGNNASESSVAQKLVSVIVLPASDTGDVSNFVENSCIFQANWF

SEQ ID NO: 59647 - protein, 57 aa, Zea Mays
MGCGPAADIGLRRAIVRSSGPKSHPTKQGAPTPHLGEGPRPPIEPRAATWARHLAAE

SEQ ID NO: 59648 - protein, 686 aa, Zea Mays
MLMILRNYHHLLKKHQNMRYLLHCHMGSKYNIARTKDLEDSIMGTCGTILLQWLESAVVDGNDEETLAEILQIFQIILSRASDKKPLKFAELLASSSWLCANNQILASVEQYILLNGGTFPYEINGSIMLTLLVHLYAFIRGLSHSCSIPHSPEAENTLFHLIIHKDWDLLVIRVHSVAIKWLFQKQEIMEPLAFQMLKFCRTFCEDETVMLSNSSQLVDMQMIAELALSGETTISSLLVSLLDQMLKEGTEDELFSVVSVIAEILMISPCSSDQFISCANASTFGQEDEWLPLVLKQSRLASRCRLLGSVLTDVVVNNACVKGPSLFQHNQETTFGEFLILVLLLVFFSLRSLHSILEVSIDWQDFLQHSDDVQSFSVLGIPCHDLCRLMHFGSPSIKLIASQCLLELLTRISDQRSCNNAELRCSVGYLKSIIAVTEGLVFSEDSKVAGNCSACLSVILGWEKFGSQEKVAVRESKWFRLIMEEFVVALTAPGLTSKSFSSQQKFAANMAVSLLRLSQVPDWLTSLFDGHLISGIVANLSARNVTAEIINLFSELMARKYLSQEHIVDLHNLLQVCRSQVYEGSSKAPLPEQRVEKVARSTNDVLASLFGLMVNQCTDSGTAQAEQQRLLHAIDVFFQESGRRQQQHATARQETVPGDYGPRQGSRARRPKEKISGPGWIRIRH

SEQ ID NO: 59649 - protein, 370 aa, Zea Mays
MCEHIDKKLTFRSSQLEDGDIICFQKAPVPDGDAQVRYPDVPSFLEYVHNRQVVHFRCLDKPKDDDFSLELSKLHTYDDVVERVAHQLGLDDPSKIRLTSHNCYSQQPKPQPIRYRGVAHLLDMLVHYNQTSDILYYEVLDIPLPDLQRLKTLKVAFHHATKDEVVVHSIRLPRNSTISDVITDLKTKVELSNPDAELRLLEVFYHKIYKIFPPHEKIENINDQYWTLRAEEIPEEEKNLGPHDRLIHVYHFMKDPNQNQQIQNFGDPFLMVIREGETAAEVMERIQRKLRVPDDEFSKWKLAFISMNRPEYLQDTDVVSARFQRRDVYGAWEQYLGLEHTDTTSKRSYTSNQLYSRMASAYGTVISYIF

SEQ ID NO: 59650 - protein, 264 aa, Zea Mays
MGGGTGTGGAPIIAGIAKSMGILTVGIVTTPFSFEGRRRALQAQEGIASLRSNVDTLIVIPNDKLLTAVSPNTPVTEAFNLADDILRQGVRGISDIITVPGLVNVDFADVRSVMSDAGSSLMGIGTATGKTRARDAALNAIQSPLLDIGIERATGIVWNITGGNDLTLTEVNAAAEVIYDLVDPGANLIFGSVIDPSYTGQVSITLIATGFKRQEESESRSSQAGEDSNRGRSGWFSPTSQEEGHALQIPEFLQRKGRPGFPRV

SEQ ID NO: 59651 - protein, 554 aa, Zea Mays
MDNTPTSKSIRIKCDPSESDVTWGWMERWTALIPPITVVHLPEHKENSELMGETVTEQVTEHAQCDEDIVPLDSDLSFPKLVADDVKETVETSDFSALEAPASVPDESPKMEMKHDPESELIETTNADADHVTDQKAENDVDEPFMSLDQQYAQADDASRNPCPLPGKFEPSNEDSGDAYNSEQTLEMEGKRFVARKPCNPAFAAAQLKFEELSTNSTVSRSSSPPHLDGVSKPRMHTPSSQEDYTPKQDGTGIQESSAGHDTKMRIAASECGTEISISSTLDSPDRSEGDGGEIVLEIGALENRNYVTGKADKDSSIVHPGVKDAPEAEAQPQKEVEENGHVPALETEAQPQKEPHTEPEVADLHGQLEKSVTSYATPEGTPMSRTTTIPESHGTPSSEVSVNTKRSRSNKPKSHASKRSLASPGSDSVGRSSTDKFSKESRHAKRESSSSKAAKSDQGDQEPRVSNSNSNPLPSYMQFTESARAKASSPKMSPDVQDSNAARKRHSLPMTNGKHDSSPRMQRSSSSQAPQGVKSSGPSPHSASGGADKRWHI

SEQ ID NO: 59652 - protein, 423 aa, Zea Mays
MLPTISPLSKDCVVEESSSAMDLVGLFPYWLDVNQGNAILNDVHMHSLFVLTGPNGGGKSSMLRSVCAAVLLGICGLMVPSTSAVIPHFDSIMLHMKAYDSPADGKSSFQIEMSEIRALVSRATARSLVLIDEICRGTETAKGTCIAGSIIERLDNVGCLGIISTHLHGIFDLPLSLSNTDFKAMGTEVVDGCIHPTWKLIDGICRESLAFQTARREGMPDLIITRAEELYLSMSTNNKQGASVAHNEPPNGSPSVNGLVEEPESLKNRLEMLPGTFEPLRKEVESAVTTMCKKILSDLYNKSSIPELVEVVCVAVGAREQPPPSTVGRSSIYVIIRSDNRLYVGQTDDLLGRLNAHRSKEGMRDATVLYVLVPGKSVACQLETLLINQLPSRGFKLINKADGKHRNFGISRISGEAVATGRN

SEQ ID NO: 59653 - protein, 130 aa, Zea Mays
MAMATSSSYPPPPPFYRLYKNFEQDPSSAPEPPPPIDGPFKALGVDYTGDVVIPSLESHNVRQLYPKGPNIDFKKELRTLNRELQLHILELADILVERPSQYARRVEDITLIFKNLHHLLNSLRPHQYLL

SEQ ID NO: 59654 - protein, 156 aa, Zea Mays
MFPQSLGILGGKPGTSTYIAGVQDDRALYLDPHEVQMVVPLESLNLAAEDSGEKDKDENGDEAPSKVLANIKWPETLETDFIYSALSFGTSINPQFIASFASAAGKRPHQDFDSQESDPEWGWWTANHELKKPSISLLFPTIILLSRRHQQQQQRC

SEQ ID NO: 59655 - protein, 490 aa, Zea Mays
MGNASGGERAKFAGRVANAMIDCAWDFINRVNVLQELPSKGSQVLGASWQEFHREEESSTSEKNQGKFVPSEKVMQLRKKLIKFIEDHIYPMEAEFYKHAQSTSRWTIHPEEENLKALAKKEGLWNLFIPLDSAARARKLLFEDHSQISLGSSNNLLLGAGLTNLEYGYLCEIMGRSVWAPQIFNCGAPDTGNMEVLLRYGTKEQQKQWLVPLLEGTIRSGFAMTEPQVASSDATNIECSISRQGDFYVINGRKWWTSGAMDPRCKILILMGKTDFSAPKHKQQSMILVDINTPGVQIKRPLLVFGFDDAPHGHAEITFENVRVPVTNILLGEGRGFEIAQGRLGPGRLHHCMRLVGAAERGMNLMVERALNRTAFGKRIAQHGSFLSDLAKCRIELEQARLLVLEAADQLDRHGNKKARGILAMAKVAAPNMALKVLDMAMQVHGAAGVSSDTVLSHLWATARTLRIADGPDEVHLGTIAKLELRRARL

SEQ ID NO: 59656 - protein, 126 aa, Zea Mays
MTTTAAGYGCCWAGIPPFALLPRILSTRRETPPPPPPRASLVASSSKLRALAPRLRVSNRPRRLIVSASSSGEANSDAAPSPTEAAIDIKLPRRSLLVQFTCNACGERTKRLINRVAYERGTVFLQ

SEQ ID NO: 59657 - protein, 1008 aa, Zea Mays
MKDHGSGGVTPSPAEGEKKPINSELWHACAGPLVSLPPVGSLVVYFPQGHSEQVAASMHKELDTVPSYPSLPSKLICKLLSLTLHADSETDEVYAQMMLQPVNKYDRDAMLASELGLKQNKQPTEFFCKTLTASDTSTHGGFSVPRRAAEKIFPPLDFTMQPPAQELIAKDLHDISWKFRHIYRGQPKRHLLTTGWSVFVSTKRLLAGDSVLFIRDEKSQLLLGIRRASRPQPALSSSVLSSDSMHIGILAAAAHAAANSSPFTIFYNPRASPSEFVIPLAKYNKALYTQVSLGMRFRMLFETEDSGVRRYMGTITGIGDLDPLRWKNSHWRNLQVGWDESTASERRTRVSIWEIEPVATPFYICPPPFFRPKLPKQAGMPDDENEVESAFKRAMPWLADDFALKDVQNALFPGLSLVQWMAMQQNPQMLATASPAVQSQYLTSNALGMQDGIGSVSEDPTKRLTMQAQNIGLPNLQAGSKVDHPAITPLAQHQQQPHHVLQQQQVQPLQQSSAILQQQQAQLLQQNAIHLQQQQEQLQRQQSQPQQQFKATACLQSSDQHKLKEQQPSGGQAASQVHLLNQILQPSSSQLQQLGLPKSPTQRPGLPSLTTMGSLQQSQLPQTPQPQQTAEYHQALLQSQQPQLQQLSQSELQLQLLQKIQQQNLLSQLNPQHQSQLIQQLSQKSQEILQQQVLQHQFGGADAMGQLKHLQQTPLNHNTGSLPPQQLVRSHSALTESEEPSSSTVPSGSRISPINSFSRANQGTRNLPEMPATPHIEHLLQEIQSKTDNRIKNDIQGSKETVHAPNRHLASDQLDASSATSFCLDESPREGFSFPPVCLDNNVQVDPRENFLIAENVDTLMPDALLSRGMSSGKGICNLPSGQRDHRDVENELSSAAFSSQSFGVPDMSFKPGCSSDVAVADGGMASQGLWNSQTQRMRTFTKVQKRGSVGRSIDITRYRGYEDLRHDLACMFGIQGQLEDPYRTDWKLVYVDHENDILLVGDDPWDK

SEQ ID NO: 59658 - protein, 585 aa, Zea Mays
MPDLSTSYLPPFPELSLDAGALAVDHAGNAAAAASADAASAYASSSASVGSGVDDLVIPAECRWKGHVRTFDMAGAGAVTTCPAARRGGGKKLSLIPSLEPARTQASASAPTLEERVSEWAAKKAAAGVPTHHCVLPFLTGAPMAVECRLCSKIIYVGEEIKCSVKKCPQMFHLKCVAEDTSNFTVESFRCPQHGCMVCKQKMFFWRCGRCTVAAHTKCAPWPVVHLKNDQGSAICWRHPSDWLLQNKNADFTNSVEEVFCRLPLPYVNEDLNIDSIIRDYAEAVYKPPPYTSIRRNVYLIKKKRTGVRVDIGCTNCRADSTCKEDCECRGLSMSCSKNCRCSDLCTNRPFRKDKKIKIVKTKRCGWGAVALEPLERGDFVIEYVGEVIDDATCEQRLWDIRRRGDKNFYMCEISKDFTIDATFKGNVSRFLNHSCEPNCKLEKWQVDGETRVGVFASRSIEVGEPLTYDYRFVHFGEKVKCHCEAVNCQGYLGSQIKNPIQSILATVAPQVQLREYSPMHHEAPRLKPINHLLPWTNCIEVSFNLRSKRKIDRLCWARKKKRTSLVPSSTSMPASPSEVPAADF

SEQ ID NO: 59659 - protein, 242 aa, Zea Mays
MILFYPKDEKLFMVCFSFAEGPLAWALIVWRCSLVFGSFDKLVSVLIHLLPGIVLFTIRWWDPQTFAAMHPEGRDARVTWPYVEDKSYMWTWLFFVPLAAYTLWQLMYFLIVNVLRRQRLLRDPEVMTSYRELSKKAQKANNIWWRLSGLLGDRNRQVMYILLQALFTVATMALTVPIFLSYRMHVVFLILKVCASTWNGGSFILEVMPRQVERKQQKKLGMKPIEQGSWTQGAPADGTYIG

SEQ ID NO: 59660 - protein, 250 aa, Zea Mays
MVDYEEETRKCTWEYYDDKDEVKHEIRSNKLMGEKMQCGSQLIDSYIKQCGQKIRRFAEELGCNSPMRVERRKRKVAYEKRAQEAREMPAARAEEEMLDNLAGHLCTKIGCTGKHIVEEARARYVEQKMAEVELLAEEEGDTSRLSELLELAETGLHVEEEEFMSQAADQAEAAHYKRKADEASAGVMLLAQEEENELISQAADVVEAAYYKRKAEEGNAGQSSKWNNIVIEDCATDDTDDELLTDYVSD

SEQ ID NO: 59661 - protein, 72 aa, Zea Mays
MIDGPKGYTPRSNLCPPQSIQRSTAHHHPQPVSRWHTDPSSAAHGLPVTRPRRAADRSAQPEIQERTRSMRC

SEQ ID NO: 59662 - protein, 395 aa, Zea Mays
MMGGVAQLVVVAALLATAAAAPTAAAAGALPSEVAVGALFTYDSTIGRAAQLAIELAVDDVNADDKVLAWTKLNLVSMDTNCSGFLGTIKGSASPQCSSHTKLLDEKLSPSEENTRTALGRFVLIIWMFVVLIITSSYTASLTSILTVQQLATGITGLDSLISSSLPIGYQTGKFTKKYLMLNLNVPESRLVQLNTIEEYADALNRGPKNGGVAAIIDEKPYIDIFLSHYCNFKIVGQQFTREGWGFAFQKDSPLAADMSTAILQLSESGQLQSIHDEWFTQPSCATNDESNVGATRLGLGSFWGLFLICALICLFAVVVFFIRVCWQYKQYSNSEDADESNEAGADGAGKRQRKLSRLGSFQEILKFFDMKEEEVMKSSMKRRPGEKDNHAAGF

SEQ ID NO: 59663 - protein, 423 aa, Zea Mays
MAGPSVPAAALAALLAVAALTCCAIPPGTLGRLTNLRVLSLRSNRVLGTVPDDVLQLASLKALFLQQNLLSGPIPTGIQKLGGLERLVLSHNNLSGSIPFALNKLTALRVLKLDGNHLSGSIPSISIAGLGALNVSDNNLNGSIPKSLSHFPRESFAGNLQLCGDPLPPCSSSFFPPAPSPGLSPGPATGSSKRRKLSGAAIAGIVVGGVVVGLLLLIAVVLCAVSKRRSAGAREGPKAATSSAAAAAGSGATRGQPPPASGEGGGMTSSSKEDLGGGASGSAAAVAAAAAGGAAGEQSRLVFVGKGAGYSFDLEDLLRASAEVLGKGSVGTSYKAVLEEGTTVVVKRLKDVAVQRREFDAHMEAVGRVEHRNVLPVRAYYFSKDEKLLVYDYLPNGSLSAMLHGTPCTRSTLAMGYMVEDSR

SEQ ID NO: 59664 - protein, 192 aa, Zea Mays
MASLKDHCAVVAVVVAICFVVLAAALPSHASTAVDEPAKYKPSRAPAPSPASASSYVPPPVQPVIVVQGVIYCKSCKLRGYNSDATASLVCYGDAESKYRVLNQTSTATDTNGYFIVMVYDVGMFDRRSCRLYLRSSPTALCAAPFIPSNPKLGLTLVRDRAATAPRGARGIFHPKTALMYAPGTGGKCPPY

SEQ ID NO: 59665 - protein, 487 aa, Zea Mays
MITIPHSSVQTDVATSKNELRYKKLLASVDLTKDFFYSYTYPIMQSLQQSVTSAGMKEMPYENLFVWNTFLTEPVRSRCHNTLWTVALVHGHFKQVKLSIFGREINVVLSSRRSRHFAGTRYLKRGVNDHGKVANDVETEQIVFEEEAGSWKGRMSAVVQMRGSIPLFWSQEASRLSPKPDIFVQRYDPTYEATKLHFDDLARRYGHPIIILNLIKTVEKRPREMMLRREYCRAVEYLNQNVPEEKKLRFIHWDFHKFAKSKSANVLGVLGKVAGEALDLTGFYYSGKPKVQKKRLIQLSRTSTARDGSLDIRASSGDLSRLRDGSLDIRASSGDLSRLSSNAEALSSTGFQDMRNQANKQEFLGDTPCYQTGVLRTNCIDCLDRTNVAQYAYGLAALGRQLHAMGLTDVLKIHPDSSIASALMEMYQSMGDALAHQYGGSAAHNTVFPERQGKWKATTQSREFLKSIKRYYSNAYTDGEKQDAINL

SEQ ID NO: 59666 - protein, 471 aa, Zea Mays
MIRLWDLGQQRCVHSYAVHTDSVWALATTHSFGHVYSGGRDQSVYLTDLSTRESVLLCTNECPILQLSLQDDTIWVATTDSSVYGWPAEGLTPQKVFQKGGSFLAGNLSFSRARASLEGSAPVPVYKEPSFVVPGVPAIVQHEIMNNRRHVLTKDTTGSVKLWEITRGAVIEDFGKVSFEDKKKELFEMVSIPAWFTMDARLGCLSVHLDTPQCFSAEIYAVDLNVSGAQEDLKINLAHDTLCGLLVHWSKRKQKSSSHGLPNGDSSIGKDVPSKDSHRSRTEVDDTTENHTTHVLPSFEFSTVSPPSIITEGSSGGPWRKRITDLDGTEGDLPWWCVDCVTHNRYPKENTKCGFYLHPAEGSPAPNITQGKLSAPRILRIHKVANYVVEKLVLDKPLDGGSDSTFVMGLSSAQSQLSQLDSSSRLGLKPWQKTKPCIEVLSPDMSLATVRTYIWKKPEDLILHYRVVQSR

SEQ ID NO: 59667 - protein, 71 aa, Zea Mays
MGHVDLIIADFFLYAGIVALTALSGISATFLSLPAGIRQGKIIGTKYLFRITIHLGFVIDQYERMFDLGIS

SEQ ID NO: 59668 - protein, 1458 aa, Zea Mays
MAMSRSPKLAPLLGSNNLVPAIFSILTVKTASGSITTYALEFIENLLRLDIDLQQQDEHLVKKVLLQHMDVLIHSLHDFVNHRKELNRRSGTWLGQRELRLFKLLLNYITDPSAADNFIDLILPFFSKKDLNSDDCLEALCVVRGIIQNLRCKVSEKVLNALNPLLAIVGLELRLCICDIYAGLSLNDPSMLFLAGLIGDLNAVSASELGELDYDTRLNTYDKVRPQLFLGLTEEHVGAILSHCVYDMSSEELILRQSASRALQSFLDFSASVMNNDVSKYSIDDKFRENNTRSICTMGCIQKILEKTYLHNMGVAMTKDVSIQKEWIILLREMVSNFNHLASLSSFRPLCKVDIEEDFFHNITHLQAGKRSKALLLFRQGIKENNFSEDITMKVFVPLFFNMFSDVKAGKGEQVRDICLDTLSAVAAKVQWEHYRTILKRCFRELNLRPDKQKIILRLICSILDAFHFMKPANDASGNSDALSEDIDSSLTFSLVTVSSDKQQYMQKVVFPQVQKLLGSDPEKVNVNINLVALKILKLLPVDYFESQLSSIIHRICNFLKNRLESIRDEARSALAASVKELGIGYLQFVVKILRAILKRGFELHVLGYTLHYLLSKNITADMYGRLDYCLEDLLAVVDSDLLGDVAEQKEVEKLASKMKETKKRMSFETLKLIAQSITFKTDLLKKIISPVSLHLQKQLTPKLKTRLEMMLHNIALGIECNSSTETSNLFIFVYCLIEDTITGSRSECKENTQSSPDQDSTVRKTFLGLGESGSQNSYILTKFALDLLRNRLKSIKLDKEDEQLVKMLDPFVDLLRKCMSSKHASVLSATFRCFALLVKLPLPSLRDNAITIKNVLMEILQRAGNSNGHLVTSCFKLLADLLRGFRISLSDNELQMLVHTPMFVDLQTNPSPVALSLLKTIVRLKLVSHEIYDIVVKIGELMVTTLTESIQQQCIQIMLQFFLNYPLSEKRLQQHIDFFLANLSYEHPSGREAVLEMLHDILTRFPQRIIDEQGQTFFLHLVVALANEQHQNVSSMILRAIQKLLGRIGGQGKSYIYEYSLSWYTGEKKSLWSASAQVIGLLVGDHTLQMGKHLKSILAVVKKIMESSIIASGAIQLGLSDEAALPLWKETYYSVAMMERLLLRFPELYFEKNMEDIWIILCKLLIHPHSMLRSISSSLVASYFATVEKRKHEQKLDAPSWLLVQPSRLFIIAVSLLKQLRSELSDTTANNLIVQNVAYSVCNLHMLIRQSTSTHQFWSSISSDRGAFLEGFELLGSRKAKNIFLLCTSTSSDVSGSSLDTNEEPTSLLVSSILKKMGRIAMQMQDTQIKNVFNCFNMISSALGPDESLTYADHLLAPLYKVSEGFAGKVVSDEVKQLAQGVQNKLRDLIGSEKFVEVYKSVRMGLKQKRDGRKQAQKIVAAVDPERNAKRKQRMAAKHREHKRRKIMAMKIGRWMR

SEQ ID NO: 59669 - protein, 760 aa, Zea Mays
MQRAPERRRGAGPLLLLALLVALAAAPRLVRAVTDATDVSAINGLYMSLGSPLLPGWTGNGGDPCGESWQGVVCTGSSITGITMNAANLGGQLGSLGNFTAITSLELNNNNIGGTIPEDLPVTLQSLFLSANQLTGSIPSSLSKLENLTAMSVNGNHLNGDLPDTFDSLNRLVNLDISSNNLSGVLPSSMKNLASLTSLHMQDNQLSGTLNVLQDLPLKDLNIENNLFSGPVPASLLNIPNFKKDGNPFNTSIVPSASPPSTGPAPTPAASKPAPTPAPTTSNSTPPAPAPSFPSRSPPPPKTTSNSSEGSTTRDSTSPSKKHSTSTLKIVGFVLAGVVLFIIIVLLVLFCLSKYQERRSRYDHNRSQQARVHHRVEPQIKPPPVQQSNDLKKGSGEVLDRRGHELSSSTADSDLFPVSLPPPPPPPPLPPIERVIANPIVPPEKRYSPPPKTSSSTSATSFSIASLQQYTNSFREENVIRESRLGKVYLAELPDGKLLEVLKIDNANGRISVDDFLEEVECILDIKHPNILELVGYCAEYGQRLLVYNHFSRTTLDDTLHDGEDTESALSWNARLQVALGSGKALEYLHASFQPPIVHQNFEPANVLLDKKFSVCVAECGLAELMPPSSVTQLSGRMRALLNYEAPELQDSGVVSERGDVYSFGVVMLELLTGRKPYDSSRPRHEQHLVRWASSQLHDIESLSKMVDPSIRGQCSEKALSRFADIISRCIQQQPEFRPPMSEIVQDLARLVNATGEESE

SEQ ID NO: 59670 - protein, 431 aa, Zea Mays
MGSAMEKEQRRPPSSKTAPVSMKASPANATPQCMKNRKIALQQDVDKLRMKLRHEENVHRALERAFTRPLGALPRLPPFLPSQTLELLAEVAVLEEEVVRLEEQVVNFRQGLYRETVITTSMAAKSVYFPDGYRSTPARHKPPAQPQSPELSTSTRQGSDQDAADWLPSLRRATNAMWTPRRPGRSLSQGDSPGKENQSFGSGTNSCREFGLAPLSKVPGCRVVQVAETRAGFQTTSAVEDHKAVEGSNGTGPSKASTAANEVSEELLACLLAIFSQKSASSGQDEERVSLPPVSGSCGSSSADPYCVPEFGWRDIGRYKQFRSVDMNTCAGDDSALGQRLKALLRKLSLVDLAGLSHQHNRLAFWINTYYSCMMNAFLEQGAPSDPRMLVAMMPKATINVGGRVLSAVAIEHFILRLPHYDDDDAKARAH

SEQ ID NO: 59671 - protein, 479 aa, Zea Mays
MPRKSHKARGAAAHAAVGLTAGPRPPLKATAPNPSAAAELPQVVVAEAEGLKVPDAGASAAADALERLHVAPAPDGDPPPPEPVHEPAAPPQPPPAEASSSGRSAAGGSWEEEAVRKLRELAEVSRDETELTEEEVRANDQRQEDEICALEAIFGDAVVILDRKGGQRSFQVLVHIEVPDYIDVSTKLSYGDGTLNYAATHDDDDLFYKFRVEHLPPILLTCLLPTSYPSHRPPFFTISTYWLDKGMISPLCRMLDMLWEEQQGMEVTYQWVQWLQSCSLSHLGFTNEVVLRKSYVTCYADGEDKRACPDYASPDVIIPRMMRYNDNKHHEAFLHAIHDCMICLSECPGVDFIKLPCHHFFCWKCMQTYCKMNVKEGNVVKLLCPDTKCEGAVPPNVLKRLLGEDEYERWEGLLLQKTLDAMKDVVYCPRCQTACLEDVETPRIWECARRSDESSTGTTQPEGNYEGFKTVPKMQDGHI

SEQ ID NO: 59672 - protein, 212 aa, Zea Mays
MLTADGDSVRLVVDRPYKAGEPIIIWCGPQTNSRLVLNYGFVDEDNPFDRVAIEASLNTEDPQYQEKRMVAQRNGKLAIQNFNVYVGKEKQTVAEMLPYLRLGYISNPDEMQSILSSEGDTCPVSPCTERAVLDQLVGYLESRLAGYPTTLDEDEAMLADGNLEPKKEVATRLVRLEKKMLHACLQATNEFINDLPDHTVSPCPAPYAPELK

SEQ ID NO: 59673 - protein, 507 aa, Zea Mays
MLGRGSGEEIGTYVEKLMTSELSGNVIDICPVGALTSKPFAFKARNWELKGTETIDVTDAVGSNIRVDSRGPEVMRIVPRLNEDINEEWISDKTRFCYDGLKRQRLNDPMIRGPDGRFKAVTWRDALAVVAEVLHQVKPEEITGVAGKLSDAESMMALKDFVNRMGSDKVLCEGNGPNPPADLRSNYLMNTSIAGLEKADVFLLVGTQPRVEAAMVNARIRKTVKATQAKVGYIGPPADFNYDHEHLGTGPQTLVEITEGRHPFCSVLQSAKNPVIIAGAGLFEREDQDALFSMIETVAKRFNVTRPDWNGLNVLLLHAAQAAALDLGLVANPAESIKSAKFLYLMGADDISLDKLPDDAFVVYQGHHGDKAVYRANVILPSSAFSEKEGTYENTEGCTQWTIPAVPTVGDARDDWKIIRALSEVAGALLPYDSLSAVRDRISTVAPNLVHVDEREPSTISVEVKPPVKQKVSSTPFKTVVENFYMTDAITRASKIMAQCSATLLKK

SEQ ID NO: 59674 - protein, 889 aa, Zea Mays
MAPQYQAATLIASPSYPSAIAWSSDNLVAVASGHIVTILNPSALDGPRGLVGLCRSDPFPIGLVNREDLLEPCLLSTSLARETEPCARSISWSQQGFAPNSGCLLAVCTMDGHVKLYRSPIWELCDEWVEVADISQLLFNYYKLINFGEDNGSHLTSLKNTNTGETEVLGSAYELQESLYFRCPGQRKLKRSRVDGFIYDVNEVDLDASKDADFSIEPCSKSKKKYLKKTVKPRHEVVAVNERNNTGNIKGSLSSNGENKSLPLITAKQYACRAAHLSSLVVSWSPVVSSSDKTSCLLRHWCIIAVGSKSGNLSFWKLPKPEYYTIDAGVVTSDPMLIGVLQAHKSCVSVIAWQVLSAGSSKSSLLLATGCSDGSVKIWLGNIEGLNQCASGEVPFALVAVVATDLSSPVSSISLAIPAQSQHEVSLAIGRVSGSLEIWIWNASSNKIEIFSAWHAHDQVVTGLQWAMDGYCLFSCSQDNSARCWISHENHLEEIFMHSNFPELRESADLSELSDRCYGLTLAPGEQMIAVVRSLDLNLLNQMYQVRTQKAVVEFIWIGGQFVGIPLDRSIDICSSQSTDLSSSNLMWWGSNILWSLKKYENVEKRLVIWDVVAVLQELKKSAPAFLETLVHSWVSVLLSGDPQCVSIDAPSRSMHDMMPYVSTRKLHLLNIMCRKVMVSIHTHHGPGAENGNEETTDFWSTLLVRSETELRERLVGFTFAAVLKRTAYLFNGTSTENCWFPVGVAQMDSWVTMNYDGQVHDQLQSIRSKIKDLGSRIDGYSDVESCPYCSSPVHFESPDVAICGERHTLPRCRASMILCSVVQPLWHCVCCGGTVNKLLPESFFTMQASTMHDEGSLDLSAASVPLCPFCGILLQRSMPAFLLSTSPA

SEQ ID NO: 59675 - protein, 498 aa, Zea Mays
MPVLRAKGEAEALCAQLNNEGHVGACITADSDAFLFGAKTVVKVLRSNCKEPFECYHIADIESGLGLKRKQLVAMALLIGSDHDLHGVPGFGLETALRFVQLFDEDEILDKLHEIGKGVYPFLKGFDNPHIDDLPSSSKKSPIKSPHCSHCGHPGSKKNHIKDGCNYCLVDSLENCVERPAGFKCECPSCDEARDLNEQRRHENWQIKVCKRIAAETNFPNEEIIKLYLSDNNLVEEKGVPLLSWSKPDVEALVDLLSYKQNWEPSYIRQRMLPMLSTIYLREVASSSSTPLPLCDQYEFDSIERTKIRHGHPYYLVKWKRATRGMNSNMPSKKPVTEGETSSEVVVLDDDDNEDTVVCESPELLDEPDVPQVLMDDGCCFLLTDEDIQLVGAAFPKETARFQEEQRLKEARSRSRKSKTSLADSGCETPKGPRPSGVQLSITEFYRSKKGQDMESGKKKQAGEGHAAARDGSRKSSDRDLNNKSLPKSVRRRLLFDC

SEQ ID NO: 59676 - protein, 81 aa, Zea Mays
MARVIRDKWTGKTKGYGFVSFADASDLTSALKDMNGKYVGNRPIKLRKSTWKNRIDLEALEKGKTQPQKKIKLQKRSVLHK

SEQ ID NO: 59677 - protein, 287 aa, Zea Mays
MKAPGSGRNKGYGFIEYYNQACAEYAKQKMSTPEFKLDTNAPTVSWADHKNASEATSTSQVKSLYVKNLPKTVTQEQLKKLFEHVGEITKVVIPPAKSGHENRYGFVHFKERSMVMKALKNTERYELDGQLLDCSPAKPPADKKDDTGSSPTAKGRPLPPSYAPLGYGLAGAYNPLGKGLAGAYNSPGNGLAGAYGVLSAHAAQPMLYAPGASPGSTMIPMVLPDGRLVYVPQTAGQQPLHVTSPLPQQGGRRFGGGGGSSSGGKRQRGDDRGSNSNSSRRGWHRPY

SEQ ID NO: 59678 - protein, 376 aa, Zea Mays
MSIGAVVSPANPASTAEEYTHMVALSRPVVALAAPEVAAKLPRNLRCVVIGSNEYKSLSSAGGVAPSPPVAVKQSDTAAVLYSSGTTGRVKAAAVSHRNLIAVISAHRNNRVIAEKEAAEAGEEPLPPTVTLFPLPLFHVFGFMMLLRSVAMGETAVLMDRFDFIAALRAIERYRVTLLPAAPPVLVAMIKSEEARRCDLSSLLFIGIGGAPLGREVAERFAAIFPNIELIQGYGLTETSGSVASTVGPDECKAYGSVGKLASHLEAKIVDPSTGEVLGPGQRGELWVRGPVVMKGYVGDDEATAATVDSEGWLKTGDLCYFNEDGLLYIVDRLKELIKYKGYQLSRRRRRATPNGFYSEETRVKPYRATSHGFRG

SEQ ID NO: 59679 - protein, 1251 aa, Zea Mays
MAFFSNSGSKADSGGYNLNEKAEDEGIYESVQDGNVDLSSRQWNLNEKADDAYHCEAEQYEAGQSGLYSSEKASGQHIQKGGRSSGGPWGTNFLKDSRSKQMAEDVPSNSGRGMNAASLHDGLDDSGEDDELNRANGEVPAEEMLSDDYYEQDGEEQIESLHRGGTKQSSCSTSEDDPADVDFEPDSETDKATDKDKFMDSENSDGDDDDGLELSDDDDDFVENRRQPKRLKIVATKTSKGRKLPMPAQRKRGVSHSDEEYSSGKDSDLPSDADFKHRSKRPDRLHQKSVGRSDVAPINSHNELRTSGRRTVKKISYVESEESDDSEEKSTKQQKLMKEELEEEDGETIEKVLWHQPKGVAEEAIKNHQSAQPTVVSLTSDFDQQWDELEFYIKWKGQSYLHCQWKTLSELQSVSGFKKVINYTKRVAEEQRYKRALSREEVEVHDVGKEMELDLIKQYSQVERIFADRVSKADGDDLVPEYLVKWQGLPYAESTWEKDTDIDFAQDAIDEYKAREAATSILGKTVDFQRKKSKASLRRLDDQPEWLKAGKLRDYQLEGLNFLVNGWRNDTNVILADEMGLGKTIQSVSMLGFLHNAQEINGPFLVVVPLSTLSNWAKEFRKWLPNMNVVIYVGNRASREMCQKHEFFSDKKGGRHVKFHTLITTYEVILKDKAVLSKIKWNYLMVDEAHRLKNCEASLYTTLLEFSTKNKLLITGTPLQNSVEELWALLHFLDPVKFNSKDSFVERYKNLSSFNETELANLHKELRPHILRRVIKDVEKSLPPKIERILRVEMSPLQKQYYKWILERNFQNLNKGVRGNQVSLLNIVVELKKCCNHPFLFESADHGYGGDSIGDRNKVERIVMSSGKLVLLDKLLVRLRETNHRVLIFSQMVKMLDILAEYLSLRGFQFQRLDGSTRADLRHQAMEHFNAPGSDDFCFLLSTRAGGLGINLATADTVIIFDSDWNPQNDLQAMSRAHRIGQQETVNIYRFVTCKSVEEDILERAKKKMVLDHLVIQKLNAEGRLEKKESKKGGSIFDKNELSAILRFGAEELFKEDKTDEEAKRNLESLDIDEILERAEKVETKGGEGEEGNELLSAFKVANFSSGEDDATFWSRLIQPDPADIIQETLAPRAARNKKSYVEDPQFDKNNNRKRRAVEAQEKPRRRSGRTVETVNSVPLVDGAVAQVREWSFGNIPKKDASRFVRAVKKFGNATQIDLIVDDVGGVLEKAPHEAQIELFDLLIDGCQKSC

SEQ ID NO: 59680 - protein, 926 aa, Zea Mays
MSQSVANPARSAGLRVPMETTEAAAAHPQKDSVKVAVNIRPLITVELQDGCTDCVTVTQGEPQVQIGPHVFTFDHVYGSSGPSSSLIFEQCVHPLIDALFSGYNATVLAYGQTGSGKTYTMGTNYSGEENCGGIIPQVMDTIFRKVDTSKDGSEFLIRVSFIEIFKEDVFDLLDANQAAVRLDAGSMAKASAPGRVPIQIRETATGGIILAGVTEAEVKSKEEMASYLTRGSSSRATASTNMNMQSSRSHAIFTICVEQKRTSGTSDKSASSDYDILSSKFHLVDLAGSERAKRTGADGHRLKEGIHINKGLLALGNVISALGDEKKRKEGAFVPYRDSKLTRLLQDSLGGNSKTVMIACISPADINAEETINTLKYANRARNIQNKAVVNRDPATAEMQKLRSQLEQLQTELLFSRSGSAALEELQLLQKKVSLLELKTSELNNELKEKELSCEQLAERAQAAQLERDQLMLKIESVRNGKSLDDIENIDNDQDMDLLKGYISKIQQLESALMRQNFSNACRHGLHDQLAMDQDIFLNELGSGCEVETTDASNEVDEEEKEREHSFMQDQLDKELQELDKRLQQKEAEMKQFAKSDTSVLKQHYEKKLTDLEQEKKALQKEIENLRHALTNISSSMDDNAQKVKENYLQKLNALESQVHELKKKQEAQQQLLRQKQRSDEAAKRLQEDIQRIKSQKVQLQQKIKQESEQFRSWKAAREKEVLQLKKEGRRNEYEMHKLLALNQRQKMVLQRKTEEAAAATKRLKELLEAKKSSRETYGSANGSGMQALIRAIDDELEVTVRAHELRSYYERQMQERAAISKEIAKLKEESKHKISDCPQAMSPSARSSRISALENMLSSSSSAMVSMASQLSEAEERERVFNGKGRWYHVRSLPEAKNIMNYLFQLASSARWLCLMVELGSWKHK

SEQ ID NO: 59681 - protein, 96 aa, Zea Mays
MVPLKVELLAGEDIVQVSCGGTHSVALARDGRMFSYGRGDHGRLGYGRKVTTGHPMELPINLPPLSSSRDGRWQAKYVACGGRHTLAIAEWTEATD

SEQ ID NO: 59682 - protein, 122 aa, Zea Mays
MNLLLCSAFFPYGAYLFSLQNVCSKFCSGVIGFLLCAKDGPPVNFLTPVNPIEEVEGATKAGREIRFYNSEMHMAAFVLPTFAKRELEAYCASTETEQAEEVAATAPQKLTAAPKRGITTAS

SEQ ID NO: 59683 - protein, 839 aa, Zea Mays
MVEGRSYLPAEVRSGLETLKQRRLERMRLSAQNEEGGNPALAARSGGDALRSPTNCRVRLHPDNNTGGLPGDVQGKNPFAKRKVEKFDMSNLEWINKIPECPVYCPTKVEFEDPIAYIQMISPEAAKYGICKIVSPVCASVPAGVVLMKEQPSFKFMTRVQPLRLAEWAEDDTVTFFMSGRKYTFRDYEKMANKVFSKRYSSSSCLPGRYVEEEFWREIAFGKMDFVEYACDVDGSAFSSSPHDQLGKSNWNLKNFSRLPGSVLRLLQTPIPGVTDPMLYIGMLFSMFAWHVEDHYLYSINYHHCGASKTWYGIPGDAAPGFERVASQYVYNKDILIGDGEDAAFDVLLGKTTMFPPNVLLDHNVPVYKAVQRPGEFVITFPRSYHAGFSHGFNCGEAVNFAVGDWFPLGSLASKRYALLNRTPLLAHEELLCRSAMLLSQKLLNCDPRSLDKLEHPCSQYSVKSCFVRLIKFQRRARDLLAKMGSEICYKPKTSPNLSCSICRRGCYITHVLCGCNFDPVCLHHEQELRSCPCKSSRVVYVREDILELEALSRKFEHDVYLYKERSSIRSCKEAEISDANVEHVPNLGITLDFANSKAGSSGFITVDGGNSSSAVSILTSSAHHEALMHSEARAINTSVTKGTCTTDESSSGMDCACNEHGSCNASVMECSDDSGSENEIFRVKRRSTLFDKPTSETKTSTLSEQQVLRRLKKVRPGVQQVSKRPEESGNGSVRSTHMSPSSNHASSDDEIDMAPLFLRIKRRQLENQDVTSRGARSQSYPSSSGSREEFVERSRDAAAELRPKRVKIRLPSSASRQIEQQRSSGQRFAREDKLPLAF

SEQ ID NO: 59684 - protein, 84 aa, Zea Mays
MVLALLDESDLDIASDAVEMIVDRTFDQADTKGDGKIDQEEWTEYAKDNPYVLRNMTLPYLKDITMVFPSFVMHSEISETDMAV

SEQ ID NO: 59685 - protein, 115 aa, Zea Mays
MQLVLIIVDTLKRFQLAVKVNAYDGVQIVDSLHSSKYHIATLAECDSCCCTDPPTSQFVDNENTKNLLKEKHTKPINFPGPIKMLGDGHTVTVINVQSKLSPPYMHSKDPGDAER

SEQ ID NO: 59686 - protein, 156 aa, Zea Mays
MSQTGEVQVPLLQTEEADGEWSSKPRRIALFVEPSPFAYISGYKNRFQNFIKHLREMGDEVLVVTTHKGAPEEFHGAKVIGSWSFPCPLYQNVPLSLALSPRIFSEVNKFKPDIIHATSPGIMVLGALAIAKMISVPILMSYHTHLPAHYEPVVSR

SEQ ID NO: 59687 - protein, 885 aa, Zea Mays
MSRMVASQPTKDAESSSVVNNIGLRAESREQPQVGRIAHTCSRDRPDQMPSSSSASGVGLGRRRPPIAAGGPRRSDSRWWWARLMEKNYSDAESYRARRPEERLINDYLLLESAARKVATGLAYLLLTWSTVVLLGGFVSALKLIDFWCLAAISTSFAVNLADLFEYTRGYMLAAASVYAGLRDDRPSSRSCRLGVHVSILLAEALLGVLITVHFVVVQVLTFAPVVAIVLSLSRLIANNYGNVGDDAANSAKLKASLQIFYSLTLVQINAFYFWKMLVLRKKHCASAVAKKCRFGEWGFRLVWSYIEETKTMLERDGAVLRGRNLITFAVGLLGSESLHDRRSALRMLDTFVGDKVSVAPCLLPCRGPLENLMEALEVGDGETRERAARIVAALAGDLRRIDQLPRALHHMASLLQASDYRFPRPRTTTATDARTTTTSMQEQRQRQAAESKRGRFGLLFWAILSCLNFWEVLAKEKKEDTFPSGGGPKQLVSQGLLIVERLARHPANRAQICNNSVLLSKLTAPLFSHAFLDTAEHGRGWVVGMLATSLRIITRLLIRAPGEASRGLRDGITSNAQAVSNLSRVLEEEDDAKFGPELKAAAVDILAELALPSSDRSSTSRLGKADIVRGLWCIFLVQVDDGVDGSNTQGEEQRQQDSTLRKKASEALAQMLSAELRHVAGRLTDMLAKSKGSTSRVRTARTLECLCSHISTEHGQPPRLDAIEMLTKVLQLILRIPCESNKLETADEEQQEEEEFLVALLSLAVVICDGMVDEHGFSCAAPPQDMVPLVRKLKDIIQANNTTTVECLRTVKLTCKLVVSMAQLKPMCIKDFTEHNFMDVLLESLKTLSDLDNCLVLFEVDNHYQVTKTDKPLVSLVKKAHQLF

SEQ ID NO: 59688 - protein, 225 aa, Zea Mays
MGYMLLYESMLPSVLFARDKWLKPGGLILPSHATLFMAPVTNRERYEDSVDFWRDVYGINMSALVPLAKKFTSEEPSIETIGGENVISWPSVFKRFDCYNFTAEEFKSITSKYKVSSMMLAPIHGFGFWFEVEFNEPIESSHNFPSSLDPLEIIQKKRRRSSEDIVLSTAPEDEPTHWQQTILYFPDPIEVKQDQIIEGSVTVSQSEENPRFLNIHLECLRTDIG

SEQ ID NO: 59689 - protein, 58 aa, Zea Mays
MQVLTDLEMQVDAAMQALIDLHVEDNATATIHKHLRRATHLFYGMSIAIYSDANFAFV

SEQ ID NO: 59690 - protein, 422 aa, Zea Mays
MYLDHGSSHGGGATQQERRQTLNIFPSQPMHVEPSPKGEISLVLSPAPVGSKQPRSPDHHHHQQAAMEELAGSRRQQEHLHLQHHQPFAAAAEPAAPGMIKDVKPLAKKDHRRGTSTAERDPKTLRRLAQNREAARKSRLRKKAYIQQLESSRIRLAQLEQELHTARAQGVFFPNSGILADQGVAGKGVPIGGIDGLSSEAAMFDVEYGRWQEEHYRLMYELRAALQQHLPEGELQMYVESCLAHHDEMVGIKEGAIKGDVFHLISGVWRSPAERCFLWLGGFRPSEVIKMLLSHVEPLTEQQIVGVYGLQQSALETEEALSQGLEALYQSLSDTVVSDALSCPSNVSNYMGQMAVAMNKLSTLEGFVRQAENLRQQTLHRLHQVLTTRQMARSLLAVSDYFHRLRTLSSLWVTRPRAPQEQ

SEQ ID NO: 59691 - protein, 972 aa, Zea Mays
MDANANALGMDAITNETVDLEHVPVEEVFEHLKCTRDGLTSAAAQDRIDAFGYNKLEEKQESKVLKFLGFMWNPLSWVMEAAAIMAIALAHGGRDVRGKPMGIDYHDFVGIMLLLIINSTISFIEENNAGNAAAALMARLAPKSKVLRDGTWSEMDASLLVPGDIISIKLGDIIPADARLLEGDPLKIDQSALTGESLPVTKQPGDGIYSGSTCKQGEIEAVVIATGIHTFFGKAAHLVESTTHVGHFQKVLTSIGNFCICSIAAGMTIELIVMYAIHAREYRQIVDNLLVLLIGGIPIAMPTVLSVTMAIGSHKLAQQGAITKRMTAIEEMAGMDVLCSDKTGTLTLNKLSVDKNLIEVFARGMEKDDVVLMAARASRLENQDAIDFAIVSMLPDPKEARAGIQEVHFLPFNPTDKRTALTYLDARGKMHRVSKGAPEQILNLASNKSEIERKVHHSIGNYAERGLRSLAVAYQEVPEGTKESSGGPWQFIGLLPLFDPPRHDSAETIRRALDLGVSVKMITGDQLAIAKETGRRLGMGTNMYPSSSLLGDKKGDIAVLPVDELIEQADGFAGVFPEHKYEIVQRLQARKHICGMTGDGVNDAPALKIADIGIAVADATDAARGASDIVLTEPGLSVIISAVLTSRAIFQRMKNYTIYAVSITIRIVLGFLLLACFWKFDFPPMLVLVIAILNDGTIMTISKDKVRPSPHPDSWKLAEIFATGVIIGAYLAVTTVLFFWVIYKTEFFVRVFHVRTMNRKKIEETGDQNLLADNMEMLASAVYLQVSTISQALIFVTRSRGWSFMERPGLLLMAAFVIAQLIASVLAAMVSWELAGIKGIGWRWTGVIWLYNLVVYLLLDPIKFAVRYGLSGKAWNLVIDHKVAFTNRKDFGKEAREAAWAHEQRTLHGLESAGTPGEKAASVELGQMAEDARRRAEIARLRELHTLKGKVESVVKLKGLDLEDINNQHYTV

SEQ ID NO: 59692 - protein, 495 aa, Zea Mays
MPVYSIRGVNVDFPFDAYDCQITYMDRVIESLQQGKNALLESPTGTGKTLCLLCASLAWRRTFGEFLRVGRGGGGTKQLPYGSQPSASQQSEDSTSQKQQQSRYPVIIYASRTHSQLRQVIKELKATSYRPKMAVLGSREQMCIHDEVSKLHGRAQNNACHFLCKKRRCPHNNHVAEFIKNKPELGNEPFDIEDLINIGRHKGPCPYYISRELSKSVDILFAPYNYLIDPGNRRSLNGIPWDNAVLIFDEAHNLESICADAASFDLFPNNLTACIAEAHECIKLCSAKRSIENSADKQFDPENYAILKALLMALEKKIAELLIGSELGYTKAGSYIYDFLSELNITSDTSKKLIETIDCASLLLEEGNSAQTGPGVQAKAAVSRLESIRDMLDIIFRGGGQNHAKYYRFHVNESQQTHGDALKFLGKSSRTLSWWCFNPGLAMEEFLKLGVRSIILTSGTLSPLDSLAMELNLTIQIQRLRTQFGSGSVSTSSQL

SEQ ID NO: 59693 - protein, 50 aa, Zea Mays
MWLNRGNKRVMFTKMCNTRSSGYPLMNVAEDGVDGVISLDCLVDSWVWWF

SEQ ID NO: 59694 - protein, 68 aa, Zea Mays
MSWMPFMHQSAPTSDVPSMCYCMLLVEHLTAGTWMNSKTLLIYGNAKGIVELVVFSEIRCGTDSFFSI

SEQ ID NO: 59695 - protein, 267 aa, Zea Mays
MGLRSPLVLLLLLLFLAATFRPSAAALAPPTGSIVKQLSSVVRWPRAAPSTHGPKQPGHPQYADGHVGVALQFESGYFVETLVEGDKLGVTPHTVRVSPVEGGELLAVDSAHSNIVRITPPLSEYSRGRLVAGSFQGHSGHIDGKPSDARFKRPTGVAVDDMGNVYVADTANLAIRKIGESGVTTIAGGKSNIPGYRDGPSEDAKFSTDFDVVYVKKMCSLLVIDRGNAALRKISLPQEDCTYQDSALLSSDDEVLEEKLMPIWLVV

SEQ ID NO: 59696 - protein, 366 aa, Zea Mays
MATGKPPWSQQYQEVALLFHVGTTKSHPPIPEHLSQEAKDFLLKCLQKEPELRSTAPDLLKHPFVTGELDDLQPRNHAAHKDCFNEIHAHDMPNGLGLNHSSNWSTMNSNRSSKIKPLWEGSCDDVDMCEFADKDEYAPVGSSYNPMSEPFDNWENKFDTSPEQSSHEPMEFGELAKHAESSITENDFTCPVEGSCEDDVLTESKIKAFLEEKALDLKKLQTPLYEEFYNTVHGGSCQTSKGKFPISPKLPPRGKSPPSKTRGGACDTLNNTAPESCSKQFPRSSVVESSRILREIASPQLNEFADKLHLDAQDSPSISFTERQRKWKEELDQELERERVMRLAGCGKTPSPNRGSNVKKECHADH

SEQ ID NO: 59697 - protein, 319 aa, Zea Mays
MEGGSNSPDGQSSGGSPEERGSGGSGGRGTGEPARSRWTPKPEQILILESIFNSGMVNPPKDETVRIRKLLERFGAVGDANVFYWFQNRRSRSRRRQRQMQAAAAAAAAAAASSASNNSSPAASATVGLPSGALQYPLAMGGTAACQYEQQASSSSSSGSTGGSSLGLFALGAAGVPGTGGGGYFQASCGASSPLATGLMGDVDSSGGSDDLFAISRQMGFAAASTVASASVAPSSNAHHQQYYSCESPAATITVFINGVPMEVPRGPIDLRAMFGQDVMLVHSTGVILPVNDYGILTQTLQLGESYFLQGQLKTAASS

SEQ ID NO: 59698 - protein, 107 aa, Zea Mays
MGRLFLMHLDGNVYSCKHCKTHLGVASDIISKAFQCKHGKAYLFHKVMRHMRRARDTRKASLFWRGTRCRALTEANTGFHKMLTWAEATPMTYKTRSNKLKPVVDPL

SEQ ID NO: 59699 - protein, 279 aa, Zea Mays
MIKNTVATLMVRLHHLPLPRAAPAPTYRCGRHLALAPPLPRLRASAAVMSTAAEQTIADQKRTLRAEVRRALKALSADQRASEDLAIQTTILDSSWFKASKRLCAYISCQQLREVDTSKILAECLPSNPEELAKDLYVPRVEDKNRNMRMLKITTMDDLVKNSMNILEPSPVDATGNNREDVLSSLSPVDLFLLPGQAFDRTGRRLGRGGGYYDTFLLKYQELAKEKGWNQPLLVALSYSVQIMDEGIIPVNSTDVPIDALVSSSGVIPISAAALQRMQ

SEQ ID NO: 59700 - protein, 129 aa, Zea Mays
MPSRAPFIATAGSLVLAAWYTFPARRLRWGHPPPPSSGAPARALHRHAALGTAMNLPGRSRARRTLMAGGCRRGCRVCTSSRDSLCVVQGRSGAHMTGGWLQIFVGVIGGIRNRSTWQSPPPPSTFKHG

SEQ ID NO: 59701 - protein, 82 aa, Zea Mays
MEIEADHIGLLLLASAGYDPRVAPSVYEKLGKIGGDSALNNYLSTHPSSKKRAQLLSQASVMNEALKLYREVSAGQGTEGFL

SEQ ID NO: 59702 - protein, 655 aa, Zea Mays
MQVSARVPDPANSSSASVSFVPIIKESALSNMTHRKHREHKLDWCYLNDDSYTDIFHNEVKQLVDKIFSSDGHNHACVVTCGSTSKTHLVIGSDHQPGLLTMAMERIFDYAKPIRATVSVSSYHVLQDSHVFDLLDPKNNEVLVREDADGRTHLKGLSMVEINSIQEFQNLCYDSDKHQNRTKVSKAKGHNGFIIFISKSDQNGKESSVSKMHFLELADHINDKQKSHGERFVQQNSKKSLYAVMDVVQALNSHQSFIPYRKSKITHILQDSLSKTGGALLIACLDEVSCQDAISTLSLASRSSQVVNEQRYNLSLITKGCSKSNVKLSVNNKNLSRSLLSSIQQQSPVLEKPYKTQVNNIAVKATRSLNANKRSETSTHSAKKTVNLVSASINLKHSGAKSILRERNFFIPTTNSSKEDKKTFVTTAVRKHESDMQENHNGTKNIVVSSEMQVVPCSMKEIVSSDMKEEDHSSPGFLAENLFADLGFTCSSNAADKTTEENPATVLQSSPKISDQLRKISNSLKLLNSMAPSIVKQKTDIVRPQSFDLVEAEPKTPEVNLKLWHAQDAQESLKARSTGIKKSLAKECLLFLNSANKEQLKSLKGIGEKRANYILELREESPLKEIDDLKSIIGMSKREIDKMMSKLISDSEMNE

SEQ ID NO: 59703 - protein, 124 aa, Zea Mays
MADSSGVPFLNLATLQGILKFLCSKLQEEAEGCSLLHNQLLSIPIGTWSPHTGRSSSRQLRTLLLSSPLNTCLDILLQDRVSSIPIVDDNGSLRDVYSLSDIMALAKNDVYARIELEQVTVQNN

SEQ ID NO: 59704 - protein, 200 aa, Zea Mays
MAGSMVDRATSDMLISPDWAKNLEICDICNRDPGILIPPWNRFLAMPGDNVGGTVWLCSMLLAPVVWFLMFISFPPNRSPFKPSRREFGLMVVYYAKRGDKHHARATFENMRARGIEPNAFVFTSLVRAYAVAGDMRGALSCVEEMKSEGIEMTVVTYSTLISGYGKTNDAQSADNLFKEAKTKIDNLNGIIYSNIIHAH

SEQ ID NO: 59705 - protein, 95 aa, Zea Mays
MNVHLRAWFMLLHWKMPMVLVLSCLAISITLHFFVPSCSTLILGISQLSSGVTAILLVRFLMIITWKACKTCGFLVVIFWRGTLAACSSSVFFSR

SEQ ID NO: 59706 - protein, 347 aa, Zea Mays
MSVLYLAEDLILKVVQNISYELDSFNKRKWDHIIVNQFLRDLREAKKRGNSERRHKEALAILAATAPSVTPTSRNTTVRKETENNVTPAKRENMPRSITGSSRIGQLSSSPQAKDLSFSNSDVSDETNFGIFNLAKFSKKSALPCDICMRCDTILNRIFVCSSCKQATVHLDCYQSLVYPTGPWKCELCHEMPSDSVTSGEQSDQNGPKACLVQCGLCHGTSGAFRKTVKGQWVHAFCAEWLLETTFRRGQHNPVDGMRLHHKDKDTCSICHRCVGACLKCCTLDCQITFHPSCARDAGLYMNTKRLGNMLQHKAYCCRHSIEQRKAYSQQYGPDEIKGMKQMRAIA

SEQ ID NO: 59707 - protein, 124 aa, Zea Mays
MFQFPWFFDDWIFLFQCKQVEFRTSFSAKCVQASSILPELSIVYSNKNISFGTIDLGHFPNAAAKFGISMWDHLPTYILFDKVTEVSRFPEITSESKVFVPKVTKKLLCQHFDLDRRLIGYLST

SEQ ID NO: 59708 - protein, 305 aa, Zea Mays
MRHTKALLILCPDLLTAWNSRKMVLSALYDFTKLKDELQLCALILSYSPKNESTWSHRRWVIKQVAEQHQDMLELIGNESILVKEIAEKSKMNYRAWRHRCWLIPYMTRKQVLDELNESTRWSELHVADNCCFHYRRSLLLALLDNFFGNEEDSLSWESDICLLWKEELRWDEMLIKRYQGRESLWNHRRFLSHLWIQHLLTVEGNWPATTSQMDMFVIQEIQLLSECLHDPVDEFEESRVQAELSALYIMWITKQVPDVKGKLEERLHFASMGRLKDVLAGACRPEKRFWMNLLNLADQSSDVQ

SEQ ID NO: 59709 - protein, 76 aa, Zea Mays
MLKTELGDELYLDLDDEIRFLVSSTKYPPIPIDQNEDDPPFAPMQIVGSIKGDGLGLLVWWAADEEEGEEAAEEEQ

SEQ ID NO: 59710 - protein, 108 aa, Zea Mays
MAEKEAPRSFLARLPPLDRSADIGNEEKQRCVVITHHADPVLTAPLLIQYEIRLPPLPQSFVSYCAILICTDFFFVVWLTYLTPLSPRHVSSSYTPNTTLQRYINLDR

SEQ ID NO: 59711 - protein, 435 aa, Zea Mays
MMSHRRRSRAAGSPPGDASTGTPPTPEKSGRVRPWAATASNRKVLVFALAFRAANALLVRTYFNPDEHWQCLEVAHRVAFGYGHLTWEWKRGLRSYLHPLLFAALYKTLALLHMDTPWVMVMAPRLVQSLFAAFGDLYLYKLSKLIFNGQVAKWTLFSQLVNWFMFFCITRTLSNSLETVLTVAGLYYWFAAIESSKATSIVSKQHAACEQSIPSRKVALLIAALSCAIRPTSAVTWLYVGLLDFIQMKSKCRFILLDVIPVGAIVLAVTTLLDWWMYGSWVIVPLNFLKFNLLSSGGDYYGTHVFHWYFTQGFPSMIWTFLPFALCGIVKSQEWRLSGLIAWVLGVYSILGHKEFRFVLPVLPLALMFSGYCLASMSQSKGKNQHRKGSLSRLQLSVILLVITNVPMALYMSLFHQRGTEDVMYYLSKEAYDGR

SEQ ID NO: 59712 - protein, 324 aa, Zea Mays
MAGRGEKRRRTGGAHEEPEEEDRISDLPDVLRLQILSLLPLKSAIRTGALSSRWRRLWAYRWPEPSSVSIRLPPGGGAAAAAATAAALAVIDRRGRRRVDGFSLAFHGGQLAQADLKRCVDYAAACEAEDLHLRVDGGAGAGGRGSRGGTRRPGMLTLQFPMGSPLLVRLSVRGLNLTAVNNAMVATLEVVHLHSVFLTDAALRRMVAACPRLRDLDLRYCRRLRRVDFTNVGVPNLRSFTVVDCSRTTELRVPVAPRLRSFRFSGAFLSSNILSGAKASLEHLYLCSGGPETGLPVTNLPYAVPRLSNLTVLTLCSIALQPRM

SEQ ID NO: 59713 - protein, 688 aa, Zea Mays
MAGLEIGPASPGSEGAPSPASSVGASVERPEQSSPRVTKRPGLVMSFSGKRLDQSPAGSPSPSPSLSRPVLVMSHSSNRLDQSPARPVLVMSRSSNRLDQSSPASSPAPVKAPVLVMSGSSNRLDSSHPSPSPSPSPTAAAAAAPVLVLSNSGKRMDQVGRKKYVKQVTGRHNDTELHLAAQRGDLEAVRQIIAEIDAQMTGTGEEFDNEVAEIRAAIVNEANEMEATALLIAAEKGFLDIVVELLKHSDKDSLTRKNKSGFDALHVAAKEGHRDIVKVLLDHDPSLGKTFGQSNVTPLITAAIRGHTEVVNLLLERVSGLVELSKANGKNALHFAARQGHVEIVKALLDADTQLARRTDKKGQTALHMAVKGTNPEVVQALVNADPAIVMLPDRNGNLALHVATRKKRSEIVNVLLLLPDMNVNALTRDRKTAFDIAEGLPLSEESQEIKECLSRAGAVRANELNQPRDELRKTVTEIKKDVHTQLEQARKTNKNVYGIAKELRKLHREGINNATNSVTVVAVLFATVAFAAIFTVPGGNTDDGVAVAVHATSFKVFFIFNAVALFTSLAVVVVQITVVRGETKAERRVVGVINKLMWLASVCTTVAFISSSYIVVGRHFKWAALLVTLIGGVIMAGVLGTMTYYVVKSKRVRKIRKKVKSTRRSGSNSWHHNSELSDSEVDRIYAI

SEQ ID NO: 59714 - protein, 114 aa, Zea Mays
MRRRGLAFSVGPNRGRPSCAGATTVRGPPCLHAEALLPPSRREPRCLSGHLRHTVLPGPPWRSASIYQIHGSARGCGRRTITSIRQRVVSPSDRGMGDTKPTRLLTFTVKPYQL

SEQ ID NO: 59715 - protein, 355 aa, Zea Mays
MLSASVNCRSHMRHIESSNTDGILVPCSYLDSALWILSSRRSDSGRKFNLIFLFFLLRKLILPFYSFTLFCIILPMTMFIPEAELPAWVVCYIPATMSLLNILPAPKSFPFIVPYLLFENTMSVTKFNAMVSGLFQLGSAHEWVVTKKSGRSSEGDLVVEKQPRQQRAGSASNLGSLAKEPSSSLRKDSQRKKHNRIYRKELALSFLLLTAAARSLISVQGIHFYFLLFQGDCAKGNPEKGKKMFCMSASVECLRALFVNARAQITCGSRTVIFQPTCPAVMVERDRVSGELGKGFRNNPSPFTNGASNSERRLCLENSYSRSCSQGGDRCVNRCRYGCCFRSANIFIRRLGLHL

SEQ ID NO: 59716 - protein, 104 aa, Zea Mays
MEISKFRYELCPRYMKERKFWRVYFLLVNSYIAPFEKKYFEELKVKAEEEKKDSQKEASQASTTAEPKDTKVPSKTSSTNPEHDLDVFLLGDLGSDDEASGIGK

SEQ ID NO: 59717 - protein, 144 aa, Zea Mays
MSNSVFPYLSFRCYRALEFYYTLVSLETPVGHVKTISTGDGQVFLQLVLPLAYYVCHHSRLDLFYFDHKSNATYTFSQHLCVEHIIFCRQHSPPYSISGLIVVLYNLSFSFYSTILSYRKSQMPLHPPCFDSMANVFINISVCL

SEQ ID NO: 59718 - protein, 459 aa, Zea Mays
MERYTIINEVGDGTFGSVWRATNKESGEVVAIKKMKKKYYSWEECINLREVKSLRRMNHPNIVKLKEVIRESDTLFFVFEYMECSLYQLMKSRGKPFSETEIRNWCFQIFQALSHMHQRGYFHRDLKPENLLVTKELIKIADFGLAREISSEPPYTEYVSTRWYRAPEVLLQATVYNAAVDMWAMGAIIAELFSLRPLFPGSSIIGTPNQRTWPEGLQLAASMGFQFPQCESVHLSEVVPLASKDAINLISWLCSWDPRRRPTAVEVLQHPFFQPCFYVPPSLRFKSTGYASTPPSAGAKGAVDQKNIRRYYMGTVPNARPTVNYSYLRNNAPARAVGAQRKLELDYQLPETNNHNKVTKAEAMNQSWSRPAAVRSNGNHLANDLNPRVPDLAEKLSQLSMGPNRVSGLGSERFVRTHENAAKRPLPVGSRAWHGPADPFRRPYEMPGDRTLLPRNLVR

SEQ ID NO: 59719 - protein, 169 aa, Zea Mays
MKVLLLRTPRAVATRPQPVAASDRGGGADGGACGGYGGEVRKWMQLVLRRRAPFSDVDCVASPSTAAGFSASTPVGPARRPQCGTGIGFSAAGTGGDGEIFHVRSDSSGTLAQRPLCEAFSGRPDEIERLGKKAEFSFFAPLSAGSRGPSLRSQPHSRPFGLPFIPLPI

SEQ ID NO: 59720 - protein, 90 aa, Zea Mays
MAADMSHRLGWIDDSIKERVFAILKQAKLPIAPPETMTVEKFKNIIAVDKKVADGLLRLILLKGPLGRCVFTGDYDRNALDETLHAFCNN

SEQ ID NO: 59721 - protein, 195 aa, Zea Mays
MSFQNDDKKFQGELFGICNLFRDLSDKLFTSEIIEMHGEHGKSSATEATGIREIVDTDLFGSQENRKSSTATTHTDDQKLVDFGIVYAHRNEDVVNMRTDGREKGGADETVQSSLEELLSKNETKHTAMEKSYSSEEKREVARSYSLEQKKKEFSCIASFMGMDDLEFSKWLLSASPHQRSEVLQDYRRKKKNQK

SEQ ID NO: 59722 - protein, 717 aa, Zea Mays
MAEVLRSRVEDDGNDILCLPIDFQQLQELRMFIEDKLNESPKEALLCMGVAAHLALCSDKDNKRNKINIRLYNTGAAIALKKLKAAFIKKLVTVRGTVLKVSTVKPLVLWLKFRCMKCRKEIPRVFCDGKFSPPMSCTIQGCKSRSFIPDRSSAQLMDFQKIRIQELASADNHEEGRVPRTVECELTEDLVDCCIPGEIVTVTAIVKVLNNHMDVGGGKSRISSQGLYYLYLEAVSVRKLKSHAVSDKEIQASGICHSQSSTVNDDFAVKYKEKYGTDVFRRILQSFCPSIYGHELVKAGITLALFGGVQKNSMDQNMVPVRGDIHVIVVGDPGLGKSQLLQAAAAVSPRGIYVCGNTTTKAGLTVAVVKDSMTNDYAFEAGAMVLADRGICCIDEFDKMFTEHQALLEAMEQQCVSIAKAGLVASLSARTSVLAAANPIGGHYDRAKTVNENLKMSAALLSRFDLVFILLDKPDESLDKRVSDHIIALHTNDVDNFRPNKRTRTGSHFDGDPGLGVGGNSVASRLRLHPEKDKDFTPLSGQLLRKYISYSREHVFPRMSKAAAAILKEFYLKLRNRSASADGTPITARQLESLVRLAEARARVDLRDEVTEEDAQDVVDIMKESLYDKYVDEHGFVDFTRSGGMSQPKQAKKFLNALNKESELQQKDCFSRTELYTIADKISLQVPDLDTLVEKMNIAGYLIQKRSGMYQLVTAPY

SEQ ID NO: 59723 - protein, 163 aa, Zea Mays
MELLPPVPDPWPQVVEQGFTALVAMVQAWESSAPDENKTPKKRFWQSGQSAIAQTISLLLQKAWLFQADNMEGSALPPLSCVNDASVLLEFVMSSVTCMEETESLKVFELVATWANAVANWDSWEMEDQGVFNTIKEAVNFHQRFDLDGLFLKTHFVRCHSTS

SEQ ID NO: 59724 - protein, 52 aa, Zea Mays
MCISTACNTSPLAQPPAPSAACRARRIASVVRPRYPRPQATNDLPRHPSHAV

SEQ ID NO: 59725 - protein, 363 aa, Zea Mays
MIIFDPCLMHLTYCNFYVNLKLGVNQHRERGLNMGLGLQRMNRARRGKLPIVITEGRIRPVAPIVAAKFATECNIAVRNHVLVLKSWKEYEKHPGLFKLFTAKLSAKFDINTEDALVKNACFQMMRNALRQQRYKLKKQYFDPFPLHLVRKTSPIKSTSDEQWNDLVEHWKGPKNMATCEHNKGNRGKVKFHQTTGSRSYMVHVENLGDKYMDQEPDALDLFKECHYSKKKQGYTSTVQLAITQMEDKRSTPGEGEQPMSTTQVVADVLAENTKKNRFLQNVGIQNARPRSSVQNIEAQLEVERKANAELQSLVSIQRERMDVLLKQVHEAELVRIREQEEMKKKQDAMDAQLELMLSQIQPS

SEQ ID NO: 59726 - protein, 167 aa, Zea Mays
MEMWNFFGVPIPADQVHAINDELSSEGAAGDYETRLKQLAKNGVIELSPVSGFPKFDLMLMGMGPDGHVASLFPGHPVVNENQKWVTFVKDSPKPPPERITFTFPVINSSAHIALVITGAGKAGAVHKALSEGQSTSDLLPVEMVSLQNGELVWFTDKPAVSMLSSI

SEQ ID NO: 59727 - protein, 426 aa, Zea Mays
MGRYSGFIAMYATLASRDVDCCLIPESPFYLEGEGGLFEYIDRRLKENNHTVIVVAEGAGQDLIAQSIPAADQQDASGNKLLLDVGLWLTHKIKDYCKSKKMEMTIKYIDPTYMIRAIPSNASDNVYCTLLAHSAIHGAMAGYSFTVGMVNGRHAYIPFHRVTSTRNKVRITDRMWARLLSSTNQPSFLSQKDIDAAREADKAANRMKSREDAKKQSTPVLANGTDGVEAQLAAPILPQQPATDGPVPQPARPDVNNATAPDAGDQEEARTTGTDVAGGTLTQAEVKPTPGTNVSWPTTPPDTPERDVAPAPRTEHAQATEMELDVDTARPEGCTTPPPVQDSEGSDTQSADCRGSPMHGMQAGASVKRDDVAASKSRLFAFRSFTRDKKKVIKPAGAADTASPDSRKTEEAAAENKERRKRFWKR

SEQ ID NO: 59728 - protein, 219 aa, Zea Mays
MLDFSYPRVSSAMRGGFPAVRPGGERVPGGIQWQAGLDPRHHQGAVAGYGAHYGSEGGSSSSARPPVFPGPELPPGGCLAGVPADSSCALSLLSTQPWDAAHSHSHSHAAPTAGFDGGSPVAPSLMAASSYIAPSPWTETDSWGHEGGRSVPQLPPDDVPLGEVHSGSSSHHGQFSGELELALQGNRPAPGSAAPPAPRNNQGSAGTFDQAGNTMDWSL

SEQ ID NO: 59729 - protein, 227 aa, Zea Mays
MFLLLPWSRHHHNGRWEARIGRVLGNKYLYLGTFDTQEEAAKAYDLAAIEYRGANAVTNFDISCYLDHPLFLAQLQQEQPQVVPALDQEPQADQREPETTAQEPVSSQAKTPADDNAEPDDIAEPLITVDNSVEESLWSPCMDYELDTMSRSNFGSSINLSEWFTDADFDSDLGCLFDGRSAVDGGSKGGVGVADFSLFEAGDGQLKDVLSDMEEGIQPPTIISVCN

SEQ ID NO: 59730 - protein, 1639 aa, Zea Mays
MDGGTGPGAEVLSPGEAEWPPELRLPPLPSVPEPPGPPPPAPASASLRLRSVGVAPHLHGEVFDDDPQFLGSIMGAAAPPPPQQQQQQPAAAAPVKRKRGRPPKNRDGAAPVPAPVKPGNKKDEEEVCFICFDGGSLVVCDRRGCPKVYHPACIKRDESFFRCQGKWDCGWHICSSCEKAVQYMCYTCTYSVCKGCIKQGKFFGVRGNKGFCDTCYGTILLIESKEDGAKVGVDFDDIYSWEYLFKLYWLDLKGKHLLTIEELKSAKSHWIVPTTAGRREKEESSDELYDASNGQDATFDISSKKRIQNNSSGKRGQKRKKDGNITSRKCGISINSAGGLPNGSTGEGMALAGDKNWASSELLEFIGHMRNGDNSYISQFDVQVLLLEYIKQNNLHDPRRKSQIICDARLSNLFKKPRVDHFEMLKLLEMHYLVKQASTPNADSQRAIYSDSAQVNNGGHNELADTLGFDRRKAHKKIERELTINPEDYAAIDMHNINLIYLRRSVMEDLIDQVAAFSNKIAGAFVRIRISGLGNKEDMYRLVKVLGTHKVAERYTVSKKTTDYALEISNLEKKEIITMDTISNQDFTEEECKRLRQSMKFGLTARLKVVDVYEKAKIFQSLRFKDLLNTPEEKERMINEVPEVHVDSRMDPSYESAEEPEYKKAVDWTMHRNGPDLLFPGRKGTELNSVENHTQKSLDTSSLPTEDVDHRSGAGSNINLNNMAPEPASLGILSNDTEPEKVWHYKDPNGNVQGPFTLLQLSKWASFFPRDLRVWLTFESEENSLLLTEVLPKQQKDFIQLSTVTTSDKSMWAGSGQDRVNSNANNSSSPMGYNMVYPSALSSPSAECYDPTKDLKPLGGTSPSRSLKDAHALHEVQNQVNYSFTILSSTGSYAPPGSHDGRVSRDRVDEWNSSQDNGGIWRPTMNSSQKTNAQQHPDGCTGKDLMQTESKCSSHLVSVLTSQHSERDPATSLSTTSWPVFRTRCQQEGSSWTSATNAGAHDLQLSIALAKPETCSPTNPVEDRDSSSASALSCQSGAPVCVPQPDPTSTSNSRKIDATMDQHRTCQPDTSSVSFDLLHEPKSGSLFSLKTQDLEFEYPSPIPKQEGKGISVNQSGSTSVAHENLATKTCVRAPTSKIDSLQPLKERSHSTDRDSITQLEHLFEENVIKRNNKVVNPVSDAEGIAVSDVLESLTEQDCEKCSIHGVAPSQKMVPASAEEDQPQCSSPIALSPWGEPSYYQGEAVDSALWGVQDDPGNDMWSMPSPKPGFQPSSGLGADGKDASCIIEEARADPGDGAFVKTLPTQGEKKMEHGNSSASGSGVSERVKPKGSAASGPSLDGSTKVMGWQLPGSSLEGSAKVSGWKPPVLSLEGIANGSGSQASCPSTQRGTKSSGWQRSSSSPDGSRKASGWQQSSTSPEGSGKAHGWQRSGSFTQGGTKAAGRQPSRSCTDRIAKVDGWQRTSSSPEGSRKASGWHSSGRDSSKIASSASENRKLSSSHQATTPTGRHSLAKRQGSSDKGAAGWDEALGNSSEASKRQQGNSDKNAGSGVALGSNRSWHPSSGNPSRGGQGNHQHDRDSHSGDSRRGSSNYPRRSDNRHDHGSGGSSRPSSRGQSQRGLCKHYESGHCGKGSKCQYLHR

SEQ ID NO: 59731 - protein, 699 aa, Zea Mays
MRQWMLRITSYADRLLEDLNDLDWPESIKEMQRNWIGRSKGAELIFSAVDQEGHDLGATLLVYTTRPDTIFGATYLVVAPEHVLLSSLTSEEQRAHVEEYRELSARKSELERTELQKEKTGVFSGSYAKNPATGEIIPIWVADYVLGSYGTGAIMAVPAHDSRDHEFAVKYELPIIKVVSPPNGNCDPVEAYEDDGIMINSSSSSSGLNINGMLSQDAAKKVTEWIENNGFGKKKVNYKLRDWLFARQRYWGEPFPVSYLDDTNEMVPLTEDDLPLTLPELDDFTPTGTGEPPLTKATNWVRTIDPSSGKPARRETSTMPQWAGSCWYYLRFMDPKNCSILVDKAKERYWGPVDIYVGGAEHSVLHLLYARFWHKVLYDMGVVSTKEPFKCLINQGLILGEIEYTAYRDNEGRWVSADSDSSLIDCYQEKVAPDKVTKVGDHYVLKDNPNIRLNARAYKMSKSRGNVINPDDVVSEYGADSLRLYEMFMGPLRDSKTWSTGGIEGVHRFLGRTWRLIVGPQLSDGSYNDGTMTTEDEPTLDQLRVLHRCIARVTEEIQETRFNTAISAMMEFVNAAYKWETQPKSVIESFVLLLSPFAPHLAEELWFRLGHPQSLAYEQFPEAKSEYLEESKLVLPVQINGKTRGTILVDKACSEDDVFQIAASDEKLSKYLDGKGIRKKIYVPGRILNVILDQQKSRT

SEQ ID NO: 59732 - protein, 1002 aa, Zea Mays
MAHLQLSAVAGARPAAAGGRGDEMEDVALLDSYDEEMGLPLPGASGAEAAEAHVRVTGMTCSACTSAVEAAVSARRGVRRVAVSLLQNRAHVMFDPALAKVEDIIEAIEDAGFEAEIIPESAVSQPKSQKTLSAQFRIGGMTCANCVNSVEGILKKLPGVKGAVVALATSLGEVEYIPSAISKDEIVQAIEDAGFEAAFLQSTEQDKVLLGLIGLHTERDVELLSDILKKIDGLRQFGVNSVLSEVEIVFDPEAVGLRSIVDTIEMTSNGSLKAHVQNPYTRGASNDAQEASKMLNLLRSSLFLSIPVFFIRMVCPSIPFLSTLLSMHCGPFLMGDLLKWILVSIVQFVVGKRFYVAAYRAVRHGSTNMDVLVVLGTTASYAYSVCALLYGAFTGYHPPIYFETSAMIITFVLLGKYLEVLAKGKTSDAIKKLVELVPSTAVLVLKDKEGKHVGEREIDARLVQPGDVLKVLPGSKIPADGVVVWGTSHVNESMITGESAPIPKEVSSVVIGGTINLHGILHIQATKVGSGTVLSQIISLVETAQMSKAPIQKFADYVASIFVPIVITLSIVTFSAWFLCGWLGAYPNSWVAENSNCFVFSLMFAISVVVIACPCALGLATPTAVMVATGIGANHGVLVKGGDALERAQNVNYVVFDKTGTLTQGKAVVTAAKVFSGMDLGDFLTLVASAEASSEHPLAKAILDYALHFHFFGKLPSSKDGIEQRKDKVLSQWLLEAEDFSAVPGKGVQCSINGKHVLVGNRSLMTENGVTIPPEAETFLIDLESNAKTGILVAYDGDFVGLMGITDPLKREAAVVVEGLKKLGVHPVMLTGDNWRTAQAVAKEVGIEDVRAEVMPAGKADVVRSLQKDGGTVAMVGDGINDSPALAAADVGMAIGGGTDIAIEAADYVLVRNNLEDVITAIDLSRKTFSRIRWNYFFAMAYNVVAIPIAAGALFPFTGLQMPPWLAGACMAFSSVSVVCSSLLLRRYRKPRLTTVLQITVE

SEQ ID NO: 59733 - protein, 299 aa, Zea Mays
MASCVAAMALVGARPPSHAAGPAAASCSGRAQLSFHRLGARARARVIRAYRRRPHHPSYVPEDGVVLEWLRSAAAALAIVTQISVSLPANAVLYSPDTKVPRTGELALRRAIPANPNMKAIQESLEDISYLLRIPQRKPYGSMEGDVKKSMKIAMDNKEAILASIPEEHKEEGAKLYTSLLEEKGGLQTLLKYIKENNPDKLSIALASSLDTVAELELLQAPGLSFLLPQQYIEYPRLTGRGVVEFTVEKGDGSTFFPTGGGEPKSVATIQVVIDGYSAPLTAGNFAKLINISSVTFSS

SEQ ID NO: 59734 - protein, 446 aa, Zea Mays
MILGGTMAQRCKIEDPSGFILFPLVVHSFDLVVSSVGILSIRGTRDSGLISPIEDPMAIMQKGYSVTIMLAVLTFGVSTRWLLYTEQAPSAWLNFALCGLVGIITAYAFVWISKYYTDYKHEPVRLLALSSSTGHGTNIIAGTSGLVDESGNPTGGLFGTAVATMGMLSTAGYVLTMDMFGPIADNAGGIVEMSQQHESVREITDVLDAVGNTTKATTKGFAIGSAALASFLLFSAYMDEVASFAQMPFKEVDIAVPEIFVGGLLGSMLIFLFSAWACSAVGKTAQEVVNEVRRQFIERPGIMDYKEKPDYGRCVAIVASASLREMIKPGALAIISPMAVGVVFRILGHSTGQPLLGAKVVASMLMFATVAGILMALFLNTAGGAWDNAKKYIETGALGGKGSESHKAAVTGDTVGDPFKDTAGPSLHVLIKMLATITLVMAPIFL

SEQ ID NO: 59735 - protein, 273 aa, Zea Mays
MTRSRANGTASPDLPKPEANSPPDSSKRQRTVSPVDCVMPAEGNQGTSDPSTNRESVELVSHIEEMKLNTTTHVDASSSGYPGFLEPDDVSIECIKISVAPLHQFGRRSSIQHRDCPLQLCCAGLKVQFGVSTKFLDNAGRPKMSIVVEIPENLCKVLEFCDVLARKLSQESGSSSEWRPLIKKYGYINRPTIRLNIPPISNSDAVAFSTDICQREPSGNIQKLAFGNVGATELDSLFVKGSKVDAFFSLELYDYQQNAGIRLVAKRLVIHSN

SEQ ID NO: 59736 - protein, 335 aa, Zea Mays
MVWREFVWGGMAGAFGEGMMHPVDTLKTRLQSQAIMTGAKAQKNIFQMVRTVWASDGLRGFYRGISPGVTGSLATGATYFGIIESTKAWLEIANPNLSGHWSHFIAGAIGDTLGSFVYVPCEVMKQRMQIQGTQKSWASAVAKGNISQTHGIEMYGYYNGMFHAGCSIWRDHGLKGLYAGYWSTLARDVPFAGLMVTFYEAMKKMSEYGKTKYLPHSDLHVSNSFEGLVLGGLAGGCSAYLTTPLDVIKTRLQVQGSTSRYNGWLDAITKTWTSEGVRGLFKGSVPRIIWYVPASAFTFMAVEFLRDHFNDKVDADAHEVTSLSMDTKSEVEKSA

SEQ ID NO: 59737 - protein, 437 aa, Zea Mays
MGDSFDEELETGELDDILSKLKSSVELDHRQAAVWNILGLVLLRGGQIQSAISVLSSLTAVAPDYLDSLANLGVAYIQSGKLELSAKCFQELLLKDQNHPAALVNYAVLLLCRYGSLSAGAGGNVSTGPYVHQKEALVVAKECLLAAVKADPRAASVWVNLANAYYMDGEHKNSKRCLEQAAKLEPNHMPARYAIAVHRIRDAVRSQCSDDQLLWAANEMATVLKEGDPSAVDAPIAWAGLAMAHRAQHEIAAIYDTENINLNDAEERAQYTLKQAIQEDPDDAVQWHQLGLYNICMTRFSRSVNFLKAALARSPDCSYAWSNLGIALQLSDDPSSETVYKRALVLSSTQQLHAIFSNLGILYRQHRNYEFARKMLLRSLELCPGFAPASNNLGLVFVAEGRWEDAKSWFEKALQSDPLLDAAKSNLLKVLTLSTKQ

SEQ ID NO: 59738 - protein, 447 aa, Zea Mays
MGWKVASGCKAAGDKLRLPTSSAAARSRMKLWLVRATTTVLLWTCVVQLTAVGDTWGPRVLKGWPSCLTPREEEAAAARPRPLVVDRAALPPKRIYRNNGYLMVSCNGGLNQMRAAICDMVVIARYLNVTLVVPELDKTSFWNDPSEFQDIFDVEHFITSLRGEVRILRELPPRMKRRVELGMFHSMPPISWSDISYYQNQVVHLNRTDARLANNGLPMETQKLRCRVNYASLKFTPQIEELGKRVIRILRQNGPFLVLHLRYEMDMLAFSGCTQGCSTEEAEELTRMRYAYPWWKEKVIDSDLKRKDGLCPLTPEETALVLRALDIDRSMQIYIAAGEIYGGKRRMAALTSAYPNVVRKETLLEPSDLMFFQNHSSQMAALDYLVSLESDIFVPTYDGNMAKVVEGHRRFMGYKKTVLLDRKLIVELVDRYTNGSLQWDEFSALIK

SEQ ID NO: 59739 - protein, 132 aa, Zea Mays
MNKEYLEEQAAKEALAAELAARGIVVEEGKKKRKRNEDTKSSTPADTPAEATYNMLKRKGLGSKINEGAVGELYKTKDEVESASRKEEMEFDALFGPDNADGETVDDGGYGYGGCGDGGAEAYNGIDDDFDF

SEQ ID NO: 59740 - protein, 194 aa, Zea Mays
MDPTPTAENTTVLGKQRTQSPALRNLVTIQNITDPMSGQATNYNVAMFFFACTLNRWFSKLPLAMNSYTRSSSQSSHPRASQGSDGRVFLENLSPTAWMALTLITSPKGSFLPSHVTAATAGANNLQQFFLATPPTPYACASSSSCPPTHPSPPPPTSPTSSLALILRFPCPGSLARLCDARLHCVRMGVECER

SEQ ID NO: 59741 - protein, 465 aa, Zea Mays
MPAGGFSVSAPSGVEFEAKITPIVIISCIMAATGGLMFGYDVGISGGVTSMDDFLGKFFPAVLRKKLEDKESNYCKYDNQPLQLFTSSLYLAGLTATFFASYTTRRLGRRLTMLVAGVFFIVGVIFNGAAQNLAMLIVGRILLGCGVGFANQSKPTYTTCTAQLCQSRRDWDSVHVAVPLFLSEIAPTRIRGGLNILFQLNVTIGILFANLVNYGTSKIHPWGWRLSLSLAGIPAALLTLGALFVTDTPNSLIERGRLDEGKAVLKRIRGTDNVEPEFNEIVEASRVAQEIFQQFTGINAIMFYAPVLFNTLGFKSDASLYSAVITGAVNVLSTLVSVYSVDRVGRRMLLLEAGVQMFLSQVAIAIVLGIKVTDHSDNLGHGWAIMVVVMAFLSMLCHLKYAIFVFFSAWVLVMSLFVLFFLPETKNVPIEEMTERVWKQHWFWKRYMDDDNHHIVNGKLTGASV

SEQ ID NO: 59742 - protein, 502 aa, Zea Mays
MALRLLLLLVTVTTAADALTPDGQALLAFKAAVLQDPTGALANWVATAADPCSWNGVTCSSPDPGSAQHRRVVALSLPKKRLVAELPRAPLPSSLRHLNLRSNRLFGPIPPALVAGAPALQSLVLYGNALDGQLPEDLGDLAFLQILDLSSNAINGSLPASILKCRRLRALALARNNLTGSLPAGFGARLGALERLDLSFNGFYGTIPEDIGNLSRLQGTVDLSHNHFSGPIPASLGRLPEKVYIDLTYNNLSGPIPQNGALENRGPTAFVGNPGLCGPPLKNPCAPDTMPSSNPSLPNDGDSSAPEAAGGGKGKNKGLGKIAIVAIVLSDVMGILIIALVFFYCYWRAVSSKGSKGHGVAAGSKGSMCGKDCGCFSRDDSETPSEHVEQYDLVALDQHVRFDLDELLKASAFVLGKSGIGIVYKVVLEDGLTMAVRRLGEGGLQRFKEFQTEVEAIGKVRHSNIVTLRAYYWSFDEKLLIYDYIPNGSLSAAIHAAVGWKS

SEQ ID NO: 59743 - protein, 242 aa, Zea Mays
MEPYAAAKSGGADAGTGTGLEDSMRRLGLGDDGEAGEEKLPERPGEADCAYYLRTGACGYGERCRYNHPRDRPAPVNGVGKTAVTVEYPERPGQPLCEYYAKNGTCKFGSNCKFDHPREGGFVPVTLNSGGFPLRLGEKECSYYMKTGHCKFGATCKFHHPELGFLTETPGMYPPVQPPPISSSHPYPHLANWQMGRPPVVPGSFLPGSYPPMVLPHTVIPMQGWNPYVVCFYYHFVLYYFI

SEQ ID NO: 59744 - protein, 248 aa, Zea Mays
MELWKGRQCGLRMYGRIVEIDLKIPPRPPGFAFVEFEDARDAEDAIYGRDGYNFDGHRLRVELAHGGRGTSSFDRSSSYSSAGQRGASKRSDYRVMVTGLPSSASWQDLKDHMRRAGDVCFTDVYREAGATIGIADYTNYEDMKHAIRKLDDSEFRNAFSRTYVRVREYDARRSRSRSRGRNRSKSRSRSHSHSYSRSRSCSYSKSRSPRSRSASESKSPVKASCTTETRKLWPCWTISIHVGYIFVC

SEQ ID NO: 59745 - protein, 81 aa, Zea Mays
MSTTTAKGKGEPQNANDAPLDVQPLTIAYPGEPVVCTPRPIVSHPAYNGGWKVLRHIRPNGRSDFGVATDRPGRRAGCATR

SEQ ID NO: 59746 - protein, 238 aa, Zea Mays
MVRAAEYNNVRSQLTAINRKQSGSLAVRDLSNLVKPEDMVCSEHLVTLLAIVPKYSQKDWLSSYESLDTFVVPRSSKQLYEDNEYALYTITLFAKVVDNFKVRAREKGFQVRDFEYSPEAQESRKQEMEKLLLEQEVMRTSLLQWCYASYSEVFSSWMHFCAVRIFVESILRYGLPPSFLSAVLAPSTKGEKKVRSILEDLCGNVHSIYWKGEDDVAVAGLGGESEVHPYVSFTINFV

SEQ ID NO: 59747 - protein, 533 aa, Zea Mays
MMKFHANPQLQLESKDLAELSIGESDARQEVLEFLDHWGLINFHPFPPAGHEESKPEESQDNSNDEKASLIEQLFKFESVQSYMTPLLNKEDVGAPPPLPSLFPEPVLIENMVAAAEPSVEYHCNSCSVDCSRKRYHCRTQADFDLCCVCYNEGKFDPGMAKTDFILMDSAEVSGASGTSWTDEETLLLLEGLEIFGGKWAEIAEHVATKTKAQCMLHFLQMQIEDRFHDGDDINQNIPVSTEQATTEKAIVETPEKMEVGDKVEGRDNADEKASEKTEGSCEETKTEDANVVNKDTQKSGGKDSGASPSTEEAKQSSDDQPIVKENSVDVDTSGEKLSNVAIDILKCAFEAAGHSPEYEGSFADAGNPVIALAAYLAGLVEDGNATTSFRSSLKSISEVPPALQLASRHCFILEDPPNELKDICVSVSKKNTDADQTKDEDMISNSIANEKKEINEKEDKSLSVEKTNNSSMSQNDHQESNIKSVSRDDCSSVEPKGNNAKESSDSTGIGDMSAIGTTKGSISSMKDSVSCR

SEQ ID NO: 59748 - protein, 413 aa, Zea Mays
MSDEYVDLPVSDEDEEELEDEMDDGDGESGGGSSKKKAKQHVEQLKRLQQKDPDFYKYLEEFDKDLLGFDDDDDEIEKSYQKIYDWQYIFCLELWTSVVCGCSSEEEFRPLAYPLTQIIHGVACLVPSARYFPVRFRCVRMLNCIAEATGTFIPVSSLLLDMLEMKELRGRPDGVGKAVNLFSVKQVDKKTVKTRAFQEACIYSVVDELAKHLTQWSYSIAFFEMSFIPLVRLRSFCKTIKADRFRKEMKDLIYQIEANVEFIKSKRVGIAFSPNDPAVESFLQTEKEERCSPLSKFVATLHQRAQDRMDALDETSVIVGAESSTFSRRLSEAQKQQDEQDDDEGTIAFSKNWLSENKKPKYVLAYLFFFPITWRGKHNHTVVRCAEPQRRIKSDPGRMMMSRLRRIGLRIWS

SEQ ID NO: 59749 - protein, 435 aa, Zea Mays
MKTCIFQILHFLGNEGPRTSDPSRYIRYIYNRVILENATVRASAVSTLAKFGALVDTLKPQIFVLLQRCLFDTEDEVRDRATLYLQTLSGEVAIGNDEKDVKDFLFGSFDVPLANLEASLRTYEPSEEPFDISLVSREVRSLPPKEKAAPGKRPPAGAAAAAAPVSTVDAYQKMLSFIPEFSGFGRLFKSSEPMELTEAETEYAVSVVKHIYDGYIVLQYNCANTIEEQLLEDVTVCVDASDAEEFSEICSKPLASLPYNSPGQVFVAFEKPERVPVVGKFLNLLKFTVKEVDTTTGEADEDGVEDEYQLEDFEIVSADYMLRVVVSNFRNAWENMDPDSERVDEYGLGVRESLAEAVNAVINILGMQPCEGTEVVPKNARSHTCLLSGVFIGNMKVLVRLSFGLSGPNEVAMKLAVRSDDPEVSDKIHEIVASG

SEQ ID NO: 59750 - protein, 252 aa, Zea Mays
MYIGNEQLEYASGALKKFRFLVEQLSKVDPSCMNCDEQIAFWVNLYNALIMHAYLAYGVPENDIKLFALMQKACYTIGGQPVSAAEIEFVILKMKTPVHRPQLSLMLALHKFKTSENLRRYSIDGTEPRVLFALCCGMFSSPAVRIFSAENVRAELQESMRDYIRASVGINDKGELVVPKLLQSYAKGIVEDSLLADWICRHLTLDQVAAIQDTSSSSSHKQRLLGVRSFSVIPFDSRFRYLFLSNNTRCQN

SEQ ID NO: 59751 - protein, 541 aa, Zea Mays
MPSSVLSSDSMHIGLLAAAAHAAATNSRFTIFFNPRASPSEFVIPLSKYIKAVFHTRISVGMRFRMLFETEESSVRRYMGTITEVSDADPVRWPSSYWRSVKVGWDESTAGERPPRVSLWEIEPLTTFPMYPSLFPLRVKHPWYSGVAALHGSWGQQRLHPSLLSNDHDQYQAVVAAAAASQSDGYLKQQFLHLQQPMQSPQEQCNLNPLLQQQILQQGSQQQMVSPDAQNIQSVLNPNAIQQQLQQFQQMQHAHNDQKQKIQPDQPYQVPSSAVLSSPTSLPSHLREKFGFSDPNVNSSSFISSSSNENMLESNFLQGSSKSVDLSRFNQPVVSEQQQQQAWKQKFICSQSMSFGGSVSLNSPTTKDGPVDNKIGRDVQNQTLFSPQVDSSSLLYNMVPNLTSNVADNNISTIPSGSTYLQSPMYGCLDDSSGLLQNTGENDPTTRTFVKVYKSGSVGRSLDITRFSNYAELREELGQMFGIKGQLDDPDRSGWQLVFVDRENDVLLLGDDPWDVWYIKILSPEDVHKMGKPGNDPRYLS

SEQ ID NO: 59752 - protein, 75 aa, Zea Mays
MTPARWRHVRTPRHTPTLPALRFDRSYTQRVWGESTGVVLLEIRFQTRRSYLICGSPITSVQAIRRPSTILAISS

SEQ ID NO: 59753 - protein, 200 aa, Zea Mays
MVRYFRMKGRPALWIPGTDHAGIATQLVVEKMLAAEGVKRTDMTREEFTKKVWEWKEKYGGTITNQIKRLGASCDWSRERFTLDEQLSRAVAEAFVRLHDKGLIYQGSYLVNWSPNLQTAVSDLEVEYSEEPGNLYFIKYRVAGGTRDDFMTIATTRPETIFGDVAIAVNPEDKRYAQYVGKLAIVPLTCGRHVPIIADR

SEQ ID NO: 59754 - protein, 105 aa, Zea Mays
MQLNQVPKMLFILRKNWAPAAFCVSFKLETDPNILLQKAEMALKKYGMNVVVANELANYKDVVVMVTSNGGRTTVSRTSKAEDLEVQLTDLLVKMHSEHIAQPNS

SEQ ID NO: 59755 - protein, 176 aa, Zea Mays
MMGFLARAVQSPDLFQLLAQQQARRRELEGAALLSAASRKRRRPIGAAPANGGLQQQEEEQQQGDDDDPTATRALFAELDERGTTSELENLALNIQGLGKRRQDGSEKQGGRARSQQQGGFETAELTDDFWEELLNEGMKGGAEAETLPPERRRPAWYVDALAQKLSSMSNNTTAK

SEQ ID NO: 59756 - protein, 339 aa, Zea Mays
MWRRCCCNCQVDESDQHENGHVKATINNIDGAIMGLKDSTTGKVEPQDAAPQIDIPVLSLDELIEKTDDFGSTALIGEGSYGRVYYAILDNGTKMAVKKLDSTENEPTAEFLTQVSLVSRLKHENFVDMLGYCMERNLRIVAYEFATMGSLHDVLHGRKGVQGAQPGLALDWMQRVQIAVDAAKGLEYLHEKVQPSIVHRDIRSSNILLFEDFKAKIADFNLSNQAPDMAARLHSTRVLGTFGYHAPEYAMTGQLTQKSDVYSFGVVLLELLTGRKPVDHTMPRGQQSLVTWATPRLTEDKVKQCVDPRLMGEYPAKGLAKLAAVAALCVQYEAEFAQI

SEQ ID NO: 59757 - protein, 836 aa, Zea Mays
MLLPTKVSTKSGGTKDTSKCDSSSSSTSLITLLMGISALKQAIIDLLLDIMVECCQPSEESGSSASTKAFPDSNGASSPPELSVEGDLTEYACSDVYARVESNSDDIRDSPVICNAGLAATEIAVNNIEHSCFPPETSAADLPADEGSEQASWSKCPEQSEELLGLIVNSLRALDSTVPHGCCEPRRRPQAVRKIALVLEKAPKQLQQDLISLVPKLVDGSEHSLAACALLDHLQRPDAEPSLRLPVRAVRWRLKDLGTEVPHCVLDFLSKTIQTQLDVAEAILKDIDSDCEPENNCLASTSPSSTCSTDGLSAEGMYSWQEQAVHGRSHLSDVFALIEMLSMPGLFVEVAQVIERALLRGSFGLQLVAMVLERRHSYRSSSKSGSVVNDSQNKEVLLDGQFEPLSVQENDFTSVLALGEVLSLSTETKVQDFVRMLYAIIFKIYAEDHHRYRILKGLVERATNTSDNCRAVDIDMDVLVFLVKEEYGIARPVLNMMCEVAEVAQADRANLWHQICATEDENIRLREDMEMEQTNFTNEKIALNQRLTELEATIGSLRSELKAERDRFTREKKALSDQMREIENQLEWVRSEKDDQIAKLSSEKRNLHDRLNDAESQLALVKARKREELKKVTKEKNTLAEQLKNAEASRKRFDDELKRYAAETQTREEIRKSLENEVRRLTQTVGQTEGEKREKEEQITRCEAYIDGMESKLQVCQQYIRTLETSLQEEVARHAPLYGVGVESLSFNELEALANIHEQSLRQIKAIQQRKGSSHLLGGTALSHIPALFSPPPPSAAVGSPASRIPASPMAPNGAGMHGNGHHMNSTTGGRWFNPS

SEQ ID NO: 59758 - protein, 400 aa, Zea Mays
MRPFCDQEEETMEHLLVGCVFTRLCKGGELLDRILARGGKYSEEDAKVVIHQILSVASFCHLQGVVHRDLKPENFLFMSKDENSALKVIDFGLSDFVKPDGRLNDIVGSAYYVAPEVLHRSYGTEADMWSIGVIAYILLCGSRPFWARTESGIFRAVLKADPSFDEIPWPTLSAEAKDFVRRLLNKDYRKRMTAAQALCHPWIRGTQEVKIYLDMIIYRLMRAYISSSSLRKSALRALAKALTTDQLFYLREQFTLLDPNKSGHISLQNMKAALMKNSSGAMNDSRVLDFVNSICNIQYGNIDFEEFSAAAISVYQMEGLETWQQHAQQAYELFDREGNRPIVIEELASELGLGPSVPLHVVLQDWIRHSDGNLSFLGFIKLLHGVSSRTIPKVQDNRLH

SEQ ID NO: 59759 - protein, 225 aa, Zea Mays
MGPPQPARPGVINIEACARPIAVDHRISLPYYFRIAGSLLRQANIYRNESNFLDLYVILLRYSSLLCETIPRHRDYHAFKLREKAFFDKLVDVIKELETLKPVVQRQIADHNRGGTVESNMNSLNGDNGTTHRIEQHTPSSYTPQPFVGSTNGASQKSFHAGRQVASLLSVQKQYMNLPYPKEETLARHSILGPNGLNGRWNGPVTGIKVQYPSNFELTQNDITR

SEQ ID NO: 59760 - protein, 73 aa, Zea Mays
MNARHLPFVIANNIHGFCIEMYCYVGVVEYSETFAIINLLTKHPANWKFTSLIFQVTEEELTSFKEHNNLIYR

SEQ ID NO: 59761 - protein, 261 aa, Zea Mays
MATRASKNCLCAGSSSFDDPDVVEVSPATAAAAGWASGHHKRKRSQVVPQEVIEIDDDDPDGVILIGDKAQVEKNKQTAVCPMDCSKHAKSGWVQDIPGPSTYASKYTSSWVDLKVFQDEAVYNYSDGYPFDGFEEDYAYDEDEFEDDGYDTPLIESEFQFSLSAKFDNFNVLHGLEASLPWKHKTAIEIANKTKPSKAVDDKIEEKYKAFKRFDTVDDHSDHYYSKPESRKVQAVKKPSKDWVKRIQHEWKVLEKDLPGR

SEQ ID NO: 59762 - protein, 196 aa, Zea Mays
MARLAVAARAFSAAASGGGVSLVQGASRGIGLEFVRQLLRRSDGGRVVATCRTPGSAAELQKLREEHAPGRLTVLPLDVTDESTIEAAAASITETHGSLDLLINSAGILSIPNVIQPETTLSKVQKSSLMLAYEVNAVGPILVIKHMWPLLKIGGRSETRRGFALVANMSARVSSIGDNALGGWHAYRASKTALNQ

SEQ ID NO: 59763 - protein, 78 aa, Zea Mays
MWQLLFAERNWPLLDHWCQFLQVRHNKAISRDTWSQLLEFVKTTDPQLSNYDDEGAWPYLIDEFVEYLTENGLVQRKR

SEQ ID NO: 59764 - protein, 713 aa, Zea Mays
MLLLRANALAAVPVSFSITPAASYSCFPWPSSSTTAASCSVGSSARLDAAVQYDPLRPGSDAWAHPDGMVTAEGDEEKQRYDTEGESNDWEGEGPQGSSDPEGINVPRQRYIAVPKEALLDAVLSQFASDDDDAADFKRCARCLDAILHAEHKRMLEEMRTSYMLTQRHRDEEEEQDDTDTASGSDYVNGKAGSGFFGITQLDGTLFLTRSVDLRTLLGLTPDPDSQTRVAFATQFQRSFMTLLRNAQFEELSAQDLLLTYALNNDYLLTLPIYVDWKKAAQSNAIIFRRGYATERQKGLLLVEKLDYLQSKLLQNVFFSLSKPLKKPGKWLNEALKRSTDNQGFQIWIDKLRLWLKEQTYADNSLLLIESSSWDKLSSDQLPDADVPIWIAAQRAVSRYEGILSPVGPRGRLLRRLLKWTGLIPSLPEATIKSNNETKHLEGHVRPNFLPRITLANIWEPASRESCNNNIWEMVKASFRILFGRSTLQEPAFQELILLYTDEVVPSETKDEMVPLQLKIYERIPIPDLPVVFPHKKLSFRILDTVRLDIATVIGQLFLLDIVAGTALVILVFRVALGYKQTRDRYQLLVNKTLYEKTLASGFGSVYFLLDASEQQQYKEALLAYAMLLCRKKYEVSSRASIRDACEQFMHEKFEAKIEMPIDKAMETLLRLGLVIELPTDGGSSVIGLPCSEAYRILKSRWDGLLEQDTEQG

SEQ ID NO: 59765 - protein, 1067 aa, Zea Mays
MSDVSSDLGGIRAGPVERDIEQAITALKKGAYLLKYGRRGKPKFCPFRLSNDESVLIWFSGKEEKHLRLSHVSRIIPGQRTAIFQRYPRPEKECQSFSLISHDRSLDIICKDKDEAEVWFAGLKTLISRCHQRKWRTESRSDILSSGATSPRTYTRRSSPLSSPFSSNDSIHKDGSDNYRLRTPYGSPPKNGLEKAFSDVMLYAVPPRGFFPSDSNAGSVHSMSSGQSDNTNGHSRGVPMDAFRVSYSSAVSSSSHGSGHDDGDALGDVFIWGEGTGEGILGGGGSRVGSSSGAKMDCLVPKPLEFAVRLDVQNISCGGRHAALVTKQAKLIDALSHMNIELVACGEYHTCAVTLSGDLYTWGDGTFKFGLLGHGNDVSHWVPKHVNGPLEGIHVSSISCGPWHTALVTSAGQLFTFGDGSFGVLGHGDRESISVPREVESLKGLRTVRAACGVWHTAAVVEVMSVNSNSSNCSSGKIFTWGDGDKGRLGHGDKEPKLVPTCVAALVEPNFCQVACGHCLTVALTTSGHVYTMGSAVYGQLGNAQADGMLPVRVEGKLYKNFVEEISCGAYHVAVLTSRTEVYTWGKGANGRLGHGDTEDKNTPTLVEALKDKQVRNVVCGINFTAAICIHKWVSGVDQSMCSGCRQPFNLRRKRHNCYNCALVFCHSCSSKKSLKASLAPNGNKPYRVCDTCYSKLTKGLETDMHFSAKRAATVPGFSDTIEEDLETRSNAQLSRLSSMESFKHLDSRYSKKNKKFEFNSTRVSPVPNGSSHWSGLNISRSFNPVFGSSKKFFSASVPGSRIVSRATSPISRRTSPPRSTTPTPTLGGLTSPRVPTDGKPTNDALSQEVLNLRSQVESLTRKSQLLELELERTTKQLKEAISIAGEETAKCKAAKEVIKSLTAQLKGMAERLPGGAAKNTKLPPLPGISIPSDISSLAMESVGSPSSSGEQIINGHNGLLASNGPSSVRNKTSHPEVGKNGSRPPDAESCHDAEWVEQDEPGVYITLTALPGGARDLKRVRFSRKRFSETQAEQWWQENRARVYQQYNVRVVDKSTASADNDIAAN

SEQ ID NO: 59766 - protein, 84 aa, Zea Mays
MNPCPTTETECNESVAGRELTCSSTALCYPERDNGSRSGVLTHVPIAPRSSRNNGNLGETLAYREITVGEGNAGGGGLTSRDGW

SEQ ID NO: 59767 - protein, 74 aa, Zea Mays
MTMMAPHPQPLPLPQPPAPFGDTTLTKVFVGGLAWETHKDALREHFERYGDILEAVIISDKLTGRSKGYGFWSR

SEQ ID NO: 59768 - protein, 140 aa, Zea Mays
MHEHSRSASMIDRSGQLSYLPHCHRPVAVSASGQVPQNRTVLMNKTNTQVHRIHYSLSETGFCRVPSDLPRIIYRTLDKILFAKCHSQQTNTLDTDLICREPNTRHKQTFGKGTFAECPSLDERRLLRKDRQQSYIVDDR

SEQ ID NO: 59769 - protein, 53 aa, Zea Mays
MPRAAGPFKVLTKINDNAYILDLPTEFGVSTSFNVADLKPYMAEGEELPSRTT

SEQ ID NO: 59770 - protein, 752 aa, Zea Mays
MMAYLSILLRQDQYSQGPPSEAFQVDSFIAKSYHEDVKISLGLNPKDFLIAIVGNSFSYGDNLMEEALVLQALSPLLQRYRSENSAQSELKVKIFTGNITEKHRMALESVALSVGFPRGAVEHVAAEDKDNLLGTADLVIYYSCLEEQLFPSVLVQAMSLEKLVIAPDLAIIRKHINDGVNGLLFPRKNIGMLAQVLLRAVSNSKVSLSGQKIASAGKAHAKNLMASETIEGYAMLLKNVVKLPTDALSPLTADEIPLALKQEWKWHLFDDVKHLHRVNTSLSGYKILQKLEQEWHSNQMENSSLSTKNINDAFSAIAWEEQRVNEVMDIKRKMEEDELKDRNDQPHGTWEEVYRNVKRVERLKNELHERDDKELERTGQPLCIYEPFFGEGTWPFLHQSSLYRGVGLSSKGRRPGADDIDASSRLPLLNNVYYRDILGEFGAFFALANRIDRIHKNSWIGFQSWRATARKANLSTNAESAILEAIQSQKHRDSFYFWVRMDQDPRNHANKDFWSFCDVINAGNCRLAVLEAFQRMYGVHLDRDLDTLLHMPNDGDTWSVMQSWVLPTRSFLEFVMFSRMFVDALDAQMYDKHHQTGHCILSLHKDQHCYSRLLELIVNVWAFHSARRMVYVNPATGQMQEQHHLSGRRGQMSVQFFSYATLKSMDEELAEEFDLDHPDRRWLWPQTGEVFWQGLYERERSMRQHEKERRKQQSREKIQRIKSRARQKTLGKYIKPPPDDTVVSNDTTTVDL

SEQ ID NO: 59771 - protein, 258 aa, Zea Mays
MQTYFSCISHTACLDYHRRAYMINDLFWQSASIATLRQLGWADDELFLREGARLALRGELRARLGRDVGGDPLDVGAVPLQLLGVRREAGGHVGYADPGVGVLRDALHPAGHGHVLGEHVAVVDAGDLGHGVGVGRVVGVLPVVAGHPEHPLHGVEAEAAHEDVPDEAAPPGAGLDPDGRLRVDGHAVLGAHVADAAGHLAAQRDHGARGGDAGQPPDDDVLARHVEPDAVLVPPALHGHAVVAGDDVAVLDLDTRGR

SEQ ID NO: 59772 - protein, 72 aa, Zea Mays
MFHKLAIISCKTEKASQVFGIVWYGPGQHSLNFCFIGGHPFLTYYMSEVRNFALGKFALRHFDKPSVLLEES

SEQ ID NO: 59773 - protein, 155 aa, Zea Mays
MNQLDSFSDKLVKRILKAHEPYNHNDNTKCSVVSERVSYEFVPERKACSSLNKSVVQNASGCDSNRNKCLASGKAVSKKKDQSTNNSLDKENMSSCGSGGTKVSSPGSLGLAREVDSGNCLSLLDNRNCPMTRTSKANHNNCRQTADILDFNLRE

SEQ ID NO: 59774 - protein, 177 aa, Zea Mays
MAIATTTSSSSLTIRLLHPNPNTNPAPRSLQLLSRRCARAAVAGGAVPYGAAPRRGIWSIRDDLVVPRSPYFPVDSAAGQERGPSPMVMERFQSVVSQLFQHRIIRCGGPVEDDMANIIVAQLLYLDAIDPTKPLDKINVDTDRDYFMSAKEAKEYGLIDGVIMNPLKALQPLPASS

SEQ ID NO: 59775 - protein, 366 aa, Zea Mays
MRGKGDNKTYAFINFRTKEMALKAIQKLSNKDLKGKKIKVSSSQAKNRLFIGNVPHDWTPDDFKTAVEEVGPGVLKVDLMKAPGSGRNKGYGFIEYYNQACAEYAKQKMSTPEFKLDTNAPTVSWADHKNASEATSTSQVKSLYVKNLPKTVTQEQLKKLFEHVGEITKVVIPPAKSGHENRYGFVHFKERSMVMKALKNTERYELDGQLLDCSPAKPPADKKDDTGSSPTAKGRPLPPSYAPLGYGLAGAYNPLGKGLAGAYNSPGNGLAGAYGVLSAHAAQPMLYAPGASPGSTMIPMVLPDGRLVYVPQTAGQQPLHVTSPLPQQGGRRFGGGGGSSSGGKRQRGDDRGSNSNSSRRGWHRPY

SEQ ID NO: 59776 - protein, 429 aa, Zea Mays
MGSSPSKATGEDALVLCKDRMRHIRQAIDSRDALSAAHLSYTQSLRSVGTALRQYAESEISPESSLSISEVDKSPSHSSMASPSPSRAVESVASLGHRASPSITPPSTRIHCMKAAATTPLTFVIDQSTAEFVGRESPVSAFVPPPPPLPPELCTTWDFFDPIDAAGTSSSNNENEVTLNFSRLRDLRESRVAEVVPLKEVEEEIMSRRHTEISDDNTPPEQEREPKQGGTGKPSQLVDTSTKATSEQVAAKLEESEMEKELCAEAEDPSEFITHRAKDFVSSMKDIETRFMRAAEAGNEVSRMLETKKIRLDICAKIPGSPVKLPSARFVSALRVCCNRDVILNQETAQHVSKVVTWKRSVSSLSSSSKSALMTSIMKDDVDDSNSDFVEEFAMVSGSHSSTLDRLHAWERKLYDEIKGRICTRGCPG

SEQ ID NO: 59777 - protein, 722 aa, Zea Mays
MLECATTSATACTRSRCRGSRPTSSRSATCSSTSPALPSTASSSTPAPSRSASRSRCTGSSLQSLSWRMLTISTGSIRCRSSARLQRPCRASGHRLSGLHLHPLLPVREKHPGTTGINEKQSGKPPLPINAVAELRKGSYYASLELVQALCDTSYGLVDIFPIEDRKIALRESLTEINSQIASAEKNGGVCFPMGKGIYRVVHIPEDESVLLNSREKAPYLICVEVLKAEAPSHSKGSSDGHKLSKGGIPLANGDVQLPKPPPWAYPLWSRHETQNYETDRMLKSTSQVIDQAMAQLWETKVKFVNVSFSIEKLGRSRSIVLSETGRRLRHDATDSHDPPGDSQTVADQPIEWVKVTLSAVPGVNMEDVDDNEPTRKKDHRRVPSTIAIEEVKAAALKGEAPPGLPLKGVAQSTQNLDPKATDGGDPKPTDALAGELWAVKRERIRRSSVHGKSPGWDLRSIIVKSGDDCRQEHLAVQLVAHFYDIYQEAGLPLWLRPYEVIVTSAYTALIETIPDTASIHSVKSRFPNISSLRDYYVAKYEENSPNFKLAQRNFVESMAGYSILCYLLQVKDRHNGNLLIDEEGHIIHIDFGFILSNSPGGVNFESAPFKLTRELLEVMDSDAEGTPSEFFDYFKVLCIQGFLTCRKHAERIILLVEMLQDSGFPCFKGGPRTIQNLRKRFHLSLTEEQCVSLVLSLISSSMDAWRTRQYDYYQRVLNGIL

SEQ ID NO: 59778 - protein, 53 aa, Zea Mays
MSWITFTTTSAAEARPDGARARMGTAGQPRRRNPGLGATSRSGGPLAVMADRR

SEQ ID NO: 59779 - protein, 344 aa, Zea Mays
MLLLRANALAAVPVSFSITPAASYSCFPWPSSSTTAASCSVGSSARLDAAVQYDPLRPGSDAWAHPDGMVTAEGDEEKQRYDTEGESNDWEGEGPQGSSDPEGINVPRQRYIAVPKEALLDAVLSQFASDDDDAADFKRCARCLDAILHAEHKRMLEEMRTSYMLTQRHRDEEEEQDDTDTASGSDYVNGKAGSGFFGITQLDGTLFLTRSVDLRTLLGLTPDPDSQTRVAFATQFQRSFMTLLRNAQFEELSAQDLLLTYALNNDYLLTLPIYVDWKKAAQSNAIIFRRGYATERQKGLLLVEKLDYLQSKLLQNVFFSLSKPLKKPGKWLNEFLAGFEKINR

SEQ ID NO: 59780 - protein, 94 aa, Zea Mays
MALVGLEWSHGMTYDDTRHTYMTKRGGYWLGVDRRRRRFSKRWWIVISWSKLNRIDRILITKRCIFFFRSLSRKNLWIKCAWPTNWKVFSGVRE

SEQ ID NO: 59781 - protein, 319 aa, Zea Mays
MADGEDIQPLVCDNGTGMVKAGFAGDDAPRAVFPSIVGRPRHTGVMVGMGQKDAYVGDEAQSKRGILTLKYPIEHGIVSNWDDMEKIWHHTFYNELRVAPEEHPVLLTEAPLNPKANREKMTQIMFETFNVPAMYVAIQAVLSLYASGRTTGIVLDSGDGVSHTVPIYEGYALPHAILRLDLAGRDLTDSLMKILTERGYSFTTSAEREIVRDIKEKLAYIALDYEQELETAKNSSSVEKSYELPDGQVITIGAERFRCPEVLFQPSMIGMEAAGIHETTYNSIMKCDVDIRKDLYGNIVLSGGPLPAIHDWYGGCWNP

SEQ ID NO: 59782 - protein, 766 aa, Zea Mays
MLSSGFSGGGGHGGKGGDGIYNGGHVEGGSAYGHADLPCELGSGSGNVSGSSTAGGGIIVMGSLEQSLPNLSLSGSIEANGGNFTGLMSHATIGGPGGGSGGTILLFVRTLLLKKDSVLSSVGGVGGNGSGGGGGGRIHFHWFDIPTGDDYIPFATIKGTILARGGVSEGQGFSGENGTITGKDCPKGLYGTFCKECPSGTYKNITGSSKSMCSPCPPNELPRRAVYISVRGGVAEPPCPYKCVSDRYSMPHCFTALEELIYTFGGPWLFGLLLSGLLVLLALVLSIARMKFVGTDELPGPAPTQQSSQIDHSFPFLESLNEVLETNRAEESHCHVHRMYFMGPNTFSEPWHLPHTPPEQISEIVYEDAFNKFVDEINALAAYQWWEGSVFSILCILSFPLAWSWQQWRRRKKLQKLREFVRSEYDHSCLRSCRSRALYEGLKVAATPDLMLGYLDFFLGGDEKRTDLPPRLHQRFPMSLIFGGDGSYMAPFSLHSDRVVTTLISQAVPSSIWHRLVAGLNAQLRLVRRGNLNTSLLPVLKWLESHANPELNTYRVRVDLAWFQTTALGYLQFGLVLHAVGGVVAAELQDGCTSKTDQHSVNQNTCTDSQMGHSRTNDVLRKRITGTILNVDNLRMLGGRRGFFYLLSLILHNTKPVGHQDLVGLVISILLLADFSLVLLTFLQLYSYSMVDVLLVLFILPLGILAPFPAGINALFSHEQRRSAGLARVYALWNITSLVNVVSTPPSLSVPGFCSNKFIRLPSSDS

SEQ ID NO: 59783 - protein, 80 aa, Zea Mays
MYCFFSIRQVLLDNVDIKTLQLKRLRDQIGLVNQEPTLFATTILENILFGKPEATKAEVGSTTTSAGAEPRWWQGWKQGC

SEQ ID NO: 59784 - protein, 230 aa, Zea Mays
MNDVMSGPRHLNATGFAYQPLGFSESVKFSEVLQGQEMSQAVPSFMRSAFNSGTQNGRVRPFDYVQRSDATQGYALQQFNLPATEVHSPSSVLMFNQTMVPHAELDGATNREEVHGSRYLSSNAIGREAEPWPSMQQQRASVNGSEPLDTTEASAPARNAESGSVGRGAGRSNCKLFGFSLTEKILGTDGGGVKEGNYEVDRQTPRVLDLFGHGSTPGALHALCAAPLGI

SEQ ID NO: 59785 - protein, 266 aa, Zea Mays
MSSRSGSTGGGSTGGGSSAGGGGAVPLAVLLRREVASERTASERPELHWGLFSQAKKGEDFTFLKPECERVPDVPSSSFSAFGLFDGHNGNGAAIYTKENLLNNILSAVPADLNREDWLAALPRALVAAFVKTDKDFQTKARSSGTTVTFVIIDGLVITVASVGDSRCVLQAEGSIYHLSSDHRFDASKEEVDRVTECGGDVGRLNVVGGAEIGPLRCWPGGLCLSRSIGDQDVGEFIVPVPLVKQVKVSLFNSSHQLRRTALVLL

SEQ ID NO: 59786 - protein, 727 aa, Zea Mays
MLDVCAPHGPAKLPAAFVAGVRVAWVAGRWWWRSVAVGAARHGVTTRASFFGLDSQTRDPSQLLWIGPVPGDIAEIEAYCRIFRAAEQLHTAVMSALCDPETGECPVRYDVESEDLPILEDKVTAVLGCMLALLNRGRNEVLSGRSGVASAFHGSVDSTSDMIPPLTLFRGDMKRCCESMQLALASYLVPSEPRGLNIWRKLQRLKNACYDAGFSRPDGYPCPTLFANWFPVYLSIVSDDSGTDEPEVAFWRGGQVSEEGLAWLLEKGFKTIVDLREEDVKDDLYLSAVQEAVSSGKIEVVNMLVEIGTAPSAEQVKQFAALVSDGAKKPIYLHSKEGVSRTSAMVSRWKQYVTRSERLAVQNHYINGNGKVLTSDKTKQHTGSPSSSMNRTEIGMVTESDRTMNNGESCEIDIETARHNLEVTNALSDDQSTQQGEMLGTGTEPLSNFKLESNPLKAQFPTCDIFSRKEMSKFFRSKKVYPKSVLNSRRQSSSLLVSRRKQNFSTERNGTIDYEAAEFTILESSNGTSFDNDYILSVSSGITDGKPSNNGAFSLIEKKEREVSVTTFDTRASASSSNGKVQVGSQKTAEKNGTPYLERNNSNNVDGSMCASATGVVRLQSRRKAEMFLVRTDGFSCTREKVTESSLAFTHPSTQQQMLMWKSPPKTVLLLKKLGDELMEEAKEVASFLHHQEKMNVLVEPDVHDTFARIPGYGFVQTFYTQDTRYN

SEQ ID NO: 59787 - protein, 212 aa, Zea Mays
MSLTSKAQNNSLSNNVFRGLSDTEIQNSWKSRAEQPQPEPKCEKDPFNSFVADFDTHNLNIAVGKASELELEVSNLKEQLKKITLEKAEMTTKHEKLSAICRSQRQEIQELKLTLVEPTPPSNKVSSRTQDSGSQASTFEDGAQFCHRAPSALHPSSALDPRIPRLHPRIQRSLRTPSVSLHAPSVLCAQSSNPSVLHPSSAASVMNTGSVQ

SEQ ID NO: 59788 - protein, 578 aa, Zea Mays
MALTDATAFPYGLRVLVVDDDPTWLKILEKMLRKCSYEASVAIQILRERRNKFDIVISDVNMPDMDGFKLLELIGLEMDLPVIMMSIDGETSRVMKGVQHGACDYLLKPVRMKELRNIWQHVYRKKMHEVKEIEGNDSYDDLQMFRNGVEGFDERDLFMRADSDTMRKRKDVNKDHADQDSSDGATVKKARVVWSVDLHQKFVNAVNQIGFDKVGPKKILDLMNVPGLTRENVASHLQKYRLYLSRLQKQNEERIMGAARQDFNQKGPSDHLNLRSSFQEQPGNLSNGCQHSSQKVEAQTNILDPHLDDTKTSMPLKVPDKNGISASDAVDPHNITTASPLSGVFSFERMPVNQDRKLSETMILECESWSGSVPPKQFMQYPKHNHERCDLLGDYSCLPKPDLEHPIAPGHLYAPPPVISMSYNVEKDVRDFSDVKPDLLGCMKSLSPALTCTVESVSAQLSDSVVTSTNSDRKFSSVEGLSSIKDCDFDQERNGAILFTSEEASILCGTDFTCLPEDLSGYQLQGVSFGNKGLNSIDLYQCNDTMLIPGLQNNWYDDDVEFSSETVEFPLLDGGLFA

SEQ ID NO: 59789 - protein, 1242 aa, Zea Mays
MGLLSVSRWAFEQGLVCSPNNWNCMEKLLEVLISIRDEVACLSVANLILNSWPSHHRALHVKKTIECAEPVPFAPRGIDILEPKHAKLIFSNKRKSVDDEICQEIGTKKSKHSATLQLNEAKWLALLDGILSLISANTEKAGEYNCSNTVDRCSISEGSAKGLAYNIIDVVISTDTLKSVETAGGNGNDSHHGEILPYDCKATVKEKDGNSDREHPHERRSTRLERLRSRKSGKDENGSDGKDISHAMTQFLESFILKGPSPVEKAYCSGNADASNPDTHNYTSNEEANDLKQFLCKISKNFGPHHIGYMLLEEMAHLKVPFQDYFVKLIELDKLTRGWAEDRSASCNLFLAELYYDRALCSGSPPTSSELSDSSYHLCKIIESVALELPFNISVREIHSTNLDTESSRTGESSSELIERSHENGHINMLNDQKSKHDSSSNMNCAFWIRFFWLSGCLSLSSDCKEKAYKEFNIALSILKNSNKTKSYGEVILLPHTKLVKSLTTDRILREINLIRLESLLWNNDENINKITHTEFMQLLPPLLLSTKDAYVGNAYGPQRESENVISLELSALDVLISACEKAKPMNIQVYLDSHRRKIQVLTVAAGMVGSVTPLKAKGSSNVEFVEAMNRNRLENVVEAVKDVSRNASKAKDIIDQCDNSDGQDGWSPLMSIVGDIQSLLLTIMCAAVKIILSRKLSCSGTSYQVDHLECSCLIDAAIAFCKLQHLDPTISIKTQVDLIVAVHDLLAEYGLCCAGRDGEGEEGMFLKFAIKHLMALDVKLKSQLNSNGMEEDAVPKDVRAEDSVADEPSVSDNKQNSDDEEESELDEIQSCLDSALDQAFFCLYGLKINPDSCSEDDLAVHKNTSRGDYQTKEQCADVFQYVLPYAKALSKTGLVKLRRVLRAIRKHFPQPPYDLFVNNPIDNFLDGPDSCEKILSEICESNESREAILNVLFPGERGYEAFKKLSTASSEPYSDVYENLYYFIAQAEDISATDKHTGFVLKKEGEEFVEQSANIFKYDLLYNPLRFESWQKLSNLYDEVEVDLLLNDGSKHISILDWRTNTDLIRRVEMGRRHSRRCLLMSSLLAKTAPEQSEAHELLALVYYDSLQNVVPFYDQRATLPVKDSSWETFCKNSMKHFEKAFEIKEQWLHAFYLGKLCEKLGHSFSKALSYYNKAMMLNPTAVDPVYRIHASRLKLLYTQGKQNLEAIQESGCCRDLLPTTDLAWLFVNLACYISCLTAVG

SEQ ID NO: 59790 - protein, 618 aa, Zea Mays
MIYDQVCCSGHGKNGTLSALQQSIRPDLITEVELPSCTGIWTVYYKSSRGNTTDNNEYHAYLIISLESRTMVLQTGDDLGEVTETVDYNVQGSTIAAGNLFGRCRVIQVYAKGARVLDGSFMTQELNFSMHTSESSLNSEPLAAASASIADPYVLLKMSDGSIRLLIGDPSTCTISINAPAIFASSSERISACTLYCDRGPEPWLRKTHTDAWLSTDVGEAIDDNDNSSHDLSDIYCIICYESGKLEIFEVPSFKRVFSVDNFVSGPAILFDVFSRNSTKDSGIGDRDASKVSVKKEEAANIKIVELAMHRWSGQFSRPFLFGLLNDGTLLCYHAYYFEGSESNVQCAPFSPHGGSPDIGNATDSRLRNLRFCRVSIDISSRDDISCLVRPRITIFNNVGGYEGLFLGGPRPTWVFVCRQRFRVHPQLCDGPIVAFTVLHNVNCCRGLIYVTSQGFLKICQLPSAYNYDNYWPVQKVPLHGTPHQVTYYGEQSLYPLIVSVPQVRPLNQVLSSMADQELGLHMENDVTSGGDLQEVYTVDEFEVRIMELGKSNGRWETRSTIPMQSFENALTVRIVTLQNTSTKENETLMAIGTAYVQGEDVAARGRVLLFSFSKSEN

SEQ ID NO: 59791 - protein, 271 aa, Zea Mays
MLSEAKFSFLDKTSHIYKEISFLSPTYDHIFPKRVSVVARLSCSSNMLEGDTGCSIWPSSLFLSEFVLSYPKIFSTKCCFELGSGVGLVGICLNHVGASKVILTDGDPCTLRNMKENMELNNLCIEQEDSRALKESKNKVECKYLSWEEVSESDLWGYQPDVVLGADIIYDPVCVPHLVRVLSMLLRRDGRQGGTNGTSVDEFVYETEAPVAYIATVVRNPETFDCFATAAADTGLSVLNITSSTAPSRFLPYMLSYDRSSVQLLRISLLS

SEQ ID NO: 59792 - protein, 426 aa, Zea Mays
MAAESCGSRGASPPPPPSAGGAAGRRRKAEAYAEVLRRIRAGAGGYGAARPGLEDELWAHFQGLPARYALDVNVERVEDVLLHKKLLEQAHKPMNGLVFDVRPAQGFTLEESTGFESTTSFKQEEQDPQSSVFTSRDQRPLHEVIFACDDKPKLLSQLTSLLGELGLNIQEAHAYSTSDGYSLDIFVVDGWEYEADILQSALREGVDKIKYRAWPLVPSMSARMDHQPLEVSPSSDFVQIPADAVDVWEVDLRLLKFEQKLASGSFGDLYHGTYCSQDVAIKVLKPERVSVDMLREFAQEVYIMKKVRHKNVVQFIGACTRPPVLCIITEFMHGGSIFDFLYNRRGNFQLPDVIRIASDVSKGMNYLHQINIVHRDLKTANLLMDDQVVKVADFGVARVKDQSGVMTAETGTYRWMAPELVLLFLY

SEQ ID NO: 59793 - protein, 503 aa, Zea Mays
MASAVQHRGSIPLVWFQETSRLNIRPDIILKPDVDYKATRLHFENLALRYGNPVIILNLIKTREKKPRESLLRAEFAKAIHYINKSLPDDKRLKFLHMDLSKLSRRKGTNVLALLTKVASDVLDLTEFLHCEISTSTKPDDTSSGERTAAKPHDDRSSSDQTECAAKLAPLLLQKGVLRTNCIDCLDRTNVAQFAYGLAALGRQLHALGLTEAQKIELHDPLADDLMDFYEWMGDTLAIQYGGSAAHNKIFCEQRGQWKAATQSQEFLRTIQRYYNNAYTDHDKQDAINMFLGHFQPQQGKPALWKLDSDQHYNIGRQGTLKEEIGRSFIKRSLSDGNILLENNLPVTSCNNETNNTELLPMQQLDDIREPTDSAPEISICEPNPCSSVNYGRVPGRHSISEERQSYLKRLGYPELHSSNFLDLDLLSSSGNSCDEEVFERSSLINSPMDVVSVESSTSYSEQGHTDEGRDDMDLSRSSSQVSDVRDYSDRFAHWVADGGMLW

SEQ ID NO: 59794 - protein, 256 aa, Zea Mays
MKHWFTRISYKNAAIHVINYEAIVLEKLPKYTIRQLFLPEEFRVLIRSTKQPTENTRMKYLSLFSHSHFVIPEIFKYLNKVVVLDDDVVVQRDLSFLWHIDMGDKVNGAAEFCDLKLGEMKNVLGKTAYDPESCVWMSGVNLINLDKWREHNVTENYLLLMQKFEFKDELSLRAAAFPLSLLSFQHLIYPLDEKLTLAGLGYDYGIDEEVARRSASLHYNGNMKPWLELGIPDYKKYWKRFLDRGDRFMDECNVNP

SEQ ID NO: 59795 - protein, 414 aa, Zea Mays
MAWSMIRATGAYQPRGAPSMEAMEEANRTAVESCHRVLALLSNPHGQLVPSRELVATTGEAVARFGSLAAKLSSSNGNGLQGHARVRKTKKPLPIFYSNLFLESSSAVAAAATVAKTPSPSPTTGLQLFPRYHQMEGSSCKDPVRIPAQFPKRLLLENLAAGLEGSSPPAPPVRMVQPVSVAPPAGMPTPALPAAHLHFIQQQQSYQRFQLMQQMKIQSEMVKRSNLGEQGGSLSGGGGGGKGVNLKFDSSNCTASSSRSFLSSLSMEGSLASLDGSRASRPFQLVSGSQTSSTPELGLVQRRRCAGKEDGSGQCATGSRCHCSKKRKLRIRRSIKVPAVSNKVADIPADEFSWRKYGQKPIKGSPHPRGYYKCSSVRGCPARKHVERCVDDPSMLIVTYEGDHNHSRVLAQPA

SEQ ID NO: 59796 - protein, 270 aa, Zea Mays
MFALHGEAGVRGGSRLGRHHRVVPLPVPAGPGGGACQHQRRRRHAHRLLPPHLRAHLLHLPLPGAWCRREGVLAGQRRVPDEADPVQPLHLLGGRRRQATAGGRRRGGAAAAVADGGGRGPLRVGVRADGLHGAHQLLPQHGPQLGAGGAVGGRQGAGAHQVHRRRRRPHLPLPGHPGLHPQGRVRGRRPGARERRRHPRRRPLRPAGEGRRGQPAHLRLHLQVLIHVHGSTISLLAYLLKPVISTSISVLPTCFVFRTKSNKCSHICLV

SEQ ID NO: 59797 - protein, 239 aa, Zea Mays
MMIHQYMAVFPCPVHCLLPSQSKLQTRHFHHNQNSNTCISMAHQRARPIIVDPALQVPNKTEVVTTKEKRSSSWVMLSRSFLEFCLRWDNLPRTLLMYFTNFLSSSEGYFHTVICNSEHYQNTTVNSDLRFMAWDKPPLTHPVNLTTEHFDAMANNGAPFAHSFANDNSVLDMIDAKLLGRAPGRFTPGGWCLGSSVGGKDPCTFLGRSFILRPTKGSAKLEKLLKLLEPDNFRPKQCK

SEQ ID NO: 59798 - protein, 178 aa, Zea Mays
MLGDLLSRILLLLFGYAMPAFECFKTVEARPNDARMLRFWCQYWIIVAMVIAVESVISWMPMYSEMKLAFFVYLWYPKTKGSDVVYDTFLRPIVMQYEPNIEQRLFHLRAKSGQLISFYMKNFADKGTAFFMDVLRYVVSEKPEGSNAESQCDISRHRVFWLLRGRYAPTCTGTNLSQ

SEQ ID NO: 59799 - protein, 267 aa, Zea Mays
MSYNQMRLLSLGTIAVHKQSTALLRKLLVYYYGCSDIMSQSLFIVGEIGGNDYNLPMLSRVPIEKIRSFTPNVIAKISSTITELIGLGAKTLVVPGNLPIGCVPKYLLIFKSDDKEDYEPETGCLRWMNEFSEYHNKLLLEELEKLRKTNPTVTIIYADYYGAAMEIFRSPERFGIEEPLVACCGGEGPYGVSLSTACGYGDYKVCDNPDKYGSWDGFHPSEAAYKAIAMGLLRGTYTQPSIASTTSSCPQLTELGSSVEYKVLYDL

SEQ ID NO: 59800 - protein, 530 aa, Zea Mays
MTHTPAFSQDYMELTSHMGLPDVSIKRFSVTHDIRNLLMFVDVVLYGSLRQEPVFPPLLLLSMSSEIPVVAPNLTVITKYVSDGVHGFLFDSADPSTISSAFIQILGEKKLLDTAYSVALEGKLLSKNMLAHDCIKAHVKLLESVIHFPSYAKLPSSVSKVQERTWLWDPFELKAALENSLLEDESHASTKAVDILREFSQSNQTTYADTNDTSSYDYPRLSDWYDLGEIEIFEDIERREMEEIDERVERPLLSWDEVYKNARKSERLKSEGNERDEGELERTGQPVCIYEIYSGEGAWPFLHHGSLYRGVTLSKGGRRPRSDDVDAVTRLSVLDNPYYRDLLCEFGAIFAIANRVDTVHKLPWIGFQSWRAAGRKVSLSERAEETLEEITSGESNEDVIYYWSPMDMDQTSDFWLTCDSLNAGNCRSLFEDAFRAMYGLPENVLALPPMPNDGDHWSTLHSWVMPTPSFLKFIMFSRIFVDSLHSLNVNSTETTSCFLGASEPEALLLSNPGSPCKCLGLSQWKEDGLP

SEQ ID NO: 59801 - protein, 657 aa, Zea Mays
MASLEAAETSPPSTPTTSASPCPTPRPLATAPPTMGAALLRAARSGDERQLVKALLADPAAPDLETAATAGGNTLLHVAAAGGHVDLALLLLRRAPRLLTARNAALDTPLHLAARAGAHKVVALLAASSSSSSSSPACSLRALTRATNRRGETALHDAVRGGHEAAARALATADPGLVGMCGGAGESPFYMASAAGSLGMLRMLLKAYKDAEEEVPDLGSSIGPGGRTVMHAAVLTSNEMIQELLQWNPTLVKEVDDSGSTPFHYIASVGNISAMKLLLRRDSSPAYSSDSNGLFPVHIAAKMGYGQFIYELCRFCPDCDELLDSRGRNFLHTAIEHKKWKVVWRFSGTADLGRMANVMDSEGNTPLHLAIKNADQMIVSLLMATNSVLPNIVNNQGLTALDLAVLATDKGISYTLVIILRCLAWTGAVLSPRRLDHFIDDFGIGKTSGNELKKFTNIAQNLIVGSVLVSTVTFAAVFTLPGGYISEGHPHAGAPILSHRYTFKAFVMANTLAFVGSTLSTIWLTYAGSEHVHPLLRAIYMFLSVISMEQATRSMVIGFALGAYVVLSPVSERIAIVVCMSTFMTLLLRNPSSWQLWFLFMPIKRRLGWKGAFKTHLPPETRSRLTIGVGSNFACQFLRRMLGMLFTYSFIFLLALL

SEQ ID NO: 59802 - protein, 518 aa, Zea Mays
MPPLVPSLLLPIPALILPAPPRLSRHRCFLPAVSSSSSSSSSPHSREPYRRRRRDTPSQTPTPAPRPSSQPQPPPRRANAATPGARSQEELEAAIYDFMCRSAKPGAFPTREELVAAGRSDLAAAVASSGGWLSLGWSSTAAEGPATTAAPCSSGGGHPDYPPETGVYYRGDLAPVSVEDSEWEDDEEDASPSGRESGTEEASEVRLNAGIEGMLTRLQKDRERARPPPRTSTHDTQGQSDDDAGNSGAPSHTAAGGRHIPRAPENGSVHGSHSQNGTIEGNSTFQGSNDDAWQTWTLGKGDLSHFEAAEVLPIERRKVSRHDDIASVQNDIHRSSNGVAVSDFSSDGVGTGRDEIHSRLQILELDLSAALKTLRSRFDKVLSDLSNSNGATVLDDISDDWEFEETKVMQAQEELRSIRAKIAVLEGKMALEIIERNKIIEDKQRRLDKVEKALSELRTVCIMWANPASDVLVVGSFDGWTSQRKLERSENGMFSLNLRLYPGRYENAARNRRGGFVC

SEQ ID NO: 59803 - protein, 67 aa, Zea Mays
MRRLWRWYQQCLAAHPVRTQVVSSGILWGLGDIGAQTVTYYSASPDRRGHDSSPPDPEIRDWKFKES

SEQ ID NO: 59804 - protein, 109 aa, Zea Mays
MIGIEPELVLFIDCPREELERRILHRDQGRDDDNVDTIRKRFQVFHDSTLPVVLYYDRMGKVRRVDGAKSADAVFDDVKAIFTQLLTTQASQGGNASSRRSNPPLCSVL

SEQ ID NO: 59805 - protein, 93 aa, Zea Mays
MRVERQGHCYCKSPLSLVLRVVGGKNSQLSLSTCYSLNTIFTSLIGLFWNTNYVSDRFMRLSSFHFNANPAGQHHVTKQCASRYSSVLASSNQ

SEQ ID NO: 59806 - protein, 96 aa, Zea Mays
MANSLLVIGSSSLLFLLSCLYLMRPPLEGLFGDRRGERRRRRLEPGIDLRGYLIALHTTDYQQPMLFLNTLAVSVLVVAKLPNMHKVRIFGINAEN

SEQ ID NO: 59807 - protein, 457 aa, Zea Mays
MGGNWSGKESGGRACPPPARPAANPKFEPAASTDYYPTIQNPTPASAVISSPRQSATISSSDRPRNPSPQTIPLATAMPDLPCDGDGVCMVCRVASPPEVDLLTCSTCTTPWHSPCLSKPPALADAASWSCPDCSPDSAAVAAPSGPANTLVAAIRAIEADHTLSDQEKARRRQALLTGDAPDGADDDDDEASDDALEIVGKNFSCVFCMKLPERPVTTPCGHNFCLKCFQKWIQNQKRTCGKCRAQIPAKMAEQPRINSALVEVIRMAKISKNPNSAGSAVPYHYLRNDDRPDKAFTTDRAKRAGKANASSGQIFVTIAPDHFGPILAENDPRRNMGVRVGETWEDRLECRQWGAHFPHVAGIAGQSTHGAQSVALSGGYEDDEDHGEWFLYTGSGGRDLSGNKRTNKEQSSDQKFEKLNAALRISCLKGYPVRVVRRLYMLRVLQLLDLCLTILS

SEQ ID NO: 59808 - protein, 459 aa, Zea Mays
MRRHHHLFVILRRAVASSASQRAQPLPLLHSVALRNGAAGSFSPCFFSSRARSSVGAAKSLVEDEAELSDWISDLKTDSFHLGLSSGDEGDAPSTRRSSVGSSRGGRGGSDSRGSFPRSSTAGGEFSGDRRGGFEQRGRMISSGLDDADSGFGSSRGRRGRGERTSGFVRRGGRGNGFDEEATFRSPREQRSQRGRASGVARRGGRYSDFDQDDGDTGFGSSRGRHGASGQLSVSSHRRGRVSDLDDDEDSDDDLVGFGDLDGKQHHGRRKGGRENTVGLGRGRGRRDLGLSRKGGSYNDFGDYDDGRRRTSDLLQRTGRGSDLDDDEDDDAGPVGFDGYSVRQQGGRRGKMAKSVGPHRGGRGSDTDFGHRQPRGLKKIDFGLSEDDDEAGEVDEEDEPSGFEDDLFEDEGDKEDVGHIIGNKSGSSMLPEDEPAKNESVQGRSAGGGDSYLSQKSYH

SEQ ID NO: 59809 - protein, 692 aa, Zea Mays
MDFGDDVMDGGSDAQRRKKRYHRHTPRQIQQLEAMFKECPHPDENQRMQLSRELGLEPRQIKFWFQNRRTQMKAQHERQDNCFLRAENDKIRCENIAMQEALRNVICPTCGGPPVADDHFDEQKLRMENARLKEELDRVSSLTSKYLGRPITQLPSAQALSMSSLDLSVGGLGGPSLDLDLLSGGSSGYPPFHLLPMAVSEMERPMMAEMATRAMDELIRMAQAGEHLWVKTGGREVLNVDTYDSIFAKPDGSFRGPDVHVEGSRETGLVFMSAIGLVDMFMDSSKWTELFPAIVSKARTVDVLVNGMGGRSESLLLMYEELHVMSPVVPTREFCFLRYCRQIEHGLWAIADISVDQQQRDARFGAPPSRSCRLPSGCLIADMADGSSKVTWVEHMEIEDRVPIHLLYRDLVLSGAAFGAHRWLAALQRACERCACLATAGIMPHRDIAAAGVTPEGKRSMMKLSQRMVNSFCASLSASQLHRWTTLSGPNDVGVRVMVHRSTDPGQPSGVVLSAATSIWLPVPCDRAFAFVRDEHTRSQWDVLSHGNPVQEVSRIPNGSHPGNCISLLRGLNASQNSMLILQESCTDASGSLVVYAPIDIPAANVVMSGEDPSAIPLLPSGFSILPDGRPGASSSRAGQAPSAGSLVTVAFQILVSSLPSAKLNAESVATVNSLISTTVEQIKAALNCASH

SEQ ID NO: 59810 - protein, 133 aa, Zea Mays
MGFMHQQLIEILSYAMVITKNHIFTSGASGTNAAVIRGALRAEKPELLTVILPQSLKKQPPESQELLSKVQNLLEKPQYDHLPLIEASRLCNMDIISKVQQVICFAFHDSKLLMETCQEAMNLRKIVTLFYLD

SEQ ID NO: 59811 - protein, 390 aa, Zea Mays
MSLRKRQRSASSSRLTAFCSPPSPPAPPSTSSSPNPHTFPNADVVLRLFLNPSSPDDVDVKPDIDRHLSAAVSSGTFVDLHVSSASLLRSRYFAALLSDRWPTAATGRLSLAVVAPPSCPRPFDAHIEVLRLLHTLDFAGAIRSPDDALDLLPIALLLLFDACVEACIRFLEAVPWSEDEEARIIDLARLLPADEAADLLARVSPPPVAAGPSAAGVAPRSPSEAMLHGLIHSAIHGHPVHAATKAFVAMLLKDYPSRNCVHKVLDEAFQSRLDTIKELMGKYASPDFRVAVDSDEREAIQRLNLQSAVLNVKHLYWLIERMVDLRVADNAVTLWSDQAALATDLQKLLNDADMWRNMTPGLPMLVTRCTLKLANSVITGETLVPRQESC

SEQ ID NO: 59812 - protein, 105 aa, Zea Mays
MVTQGERYRYLDKIGHVFFSANLASSSPSFLQVSSPPHASLGPRFSCSSSPAPASLQQPARAPSAPASGSDDDRATPALIQQCPRPGKQLIEACNWHRKFARLCG

SEQ ID NO: 59813 - protein, 304 aa, Zea Mays
MPRPPCSPSRPSRDPPSPLPPSSRPRSIDGRCRPAILASLPATRGASLCRIFYLFTSKVPGTEPSRILEPSRILEISHWHLVTVSGGWASDAAGRYRCLELDHPCKAPWCDGPLGALESNGWVYSAHCSFKLFVADASWWCLDGKWLFFWGDSNHVDTIRNLLTFVLGITDTSAVTRQFDAVFTNPIGGAGTLRITSIFNGHWNMSMNYLGLHSLRNRGFRQLIRSYFMSGDRVPDVMVLNSRLHDGCYWTSVRIYAQAADFAAQFWSGVMDKVRARGHAVPRVFYRTQMPQMQGKTTRLPSRN

SEQ ID NO: 59814 - protein, 188 aa, Zea Mays
MNETNQDLIMAEGGVTLLSMTASDAEDPQTLRMVAGAIANLCGNDKLQIRLRGEGGIKALLGMVRCGHPDVLAQVARGIANFAKCESRAATQGNKVGKSLLIDDGSLPWIVKNANNEAAPIRRHIELALCHLAQHEVNSNDIINEGALWELVRISRDCSREDIRKLAYRTLTSSPTLQAEMRRLGIKL

SEQ ID NO: 59815 - protein, 73 aa, Zea Mays
MSLSRNIGGMIAGHVYYFLEDVYPRMTGRRPLKTPSFIKALFADDNVVVAQPPNAGIGAGARFGAIGVDPQAQ

SEQ ID NO: 59816 - protein, 1005 aa, Zea Mays
MPSAAAAVDAEHESFMDVGSHLHHGALPTVSVEAQKVQGSPANALHVMEYLAANVDLAKDLVTRCSAIAQQLMDDDLLGITEDLDKVIKNISNELNKMPAATFESSRFAEPAVSGHLQVVRNQHDLFEQQSFDGYSEGDMPMVVAIERPPKRRTLHNSDMPRLVDFLQGMYQESHEIGGQSFGSLPEVAEYVEPLYDSFFCPLTNKVMVDPVTTESGITYDRKAIEDYFDKFTDGSEPVICPVTKMAMQSKTLRSNLPLKSTIAEWITRNEATRVRIARTALSMATTEAMVLEAIHELKVLARLRRKNRDQMHKIGITKFLARLLDHKDALIRCDSLDLLCLLVEDDTGKEIIAKTRAVSRTIKLLSSSSTDERHASISFLLELSKSELLLENIGSTAGSILILTTMKFNSSSDPIAAEKAGEVLENLEKCPKNIKYMAESGYLDPLQRHLVEGPEDVQMEMVSYLGELVQKQEMTINIAGSASEILIKMVCSGNTAIRKATLDVLVQISSHHPNAKTLVDAGAVPVMVEELFIRKIDDEPMGSKTEAAAVLANIVESGLDPEAITVNKEGHVITSKYSVYNFAHMLKCSMPDTLNLSIVRVLLALTALPKPLATVVSVMKEQDSGQTVIELMGSLTESLVIAAMRLLIALSPQMGHTIAEKLCKAPGQPGRLVKSIGLHGRIMERHAMSATLLAKLPYQHIALNLALINQGAMVTVLAKIEEMQRGETRASRHAKAYMEGLMGVLVRLTTTLYDPDVLLAAMDHNLTSVLTDLVRSAGSDEVQRLAAIGLENLSSQSPNLSQPPTEERRPKKKNILRRLREAHAGRVHDNRRPPAHSRVCPVHRGVCSPSTTFCLVEAGAVEGLLCVLESSENGRVVEAALGALCTLMDDAVDVTSGVAVLAEHDAARHVLRALRQHRDDGRRGGGGAAAGETVTRRCFWAVERFLAHGSERCVREVTSDRALPSLLVGAFHKGDAATKQVAESVLRCLHRMPDYSATYESVEL

SEQ ID NO: 59817 - protein, 229 aa, Zea Mays
MFIGHLDLTFQSDIDSMVEVGGNSYANSIYEAFLPKDHPKPKPDSTMEYRTKFIRAKYETQDFLKPSLRISSRSSFKSTNSVKSVDSNFSSTSRKDISEDTREFVGELNITVVKGTNLAVRDMLTSDPYVVLTLGGQEVYDHDTFSADDIMGEAEIDLQPMITAAMAFGDTSRLGDMQIGRWFTTKDNALMKDSTVNVVAGKVKQEVHLKLQNVESGELELELEWVPIL

SEQ ID NO: 59818 - protein, 109 aa, Zea Mays
MVQIKEFRIVMPMSMEEYEIGLSYTIMKMEQQNTNSKEGVEVLQQAPFHEDAKLGKGHFTSKVYHLQSKIPSWMKGFAPASALAVHEDSWCAFPKSRTVPALQQVLTHH

SEQ ID NO: 59819 - protein, 343 aa, Zea Mays
MAHTSCDGVHHVISVAHGETASTSTSHQDMCSDSDEPHQEDRLSTSTQTLSSESSPSISPTAYSTRNLSFPRRDSIYGHGRSPWNSGLWISFEIVMYIAQVVAAIVILIFSRHEHPHAPLFAWIIGYTLGCIASLPLIYWRYVHRNRHLDQEPQQPPTTYPTLTPSQSSEGRNHRTSGIVLHLGCISISCPRLSVLAYHFKTGVDCFFAVWFVVGNVWIFGGRSISSDAQDAPNMYRLCLAFLALSCVGYAIPFIMCAAICCCFPCLISVLRLQEDLGQNRGATQELIDALPTYKFKPKRVKNWGIDHASSSEHLDEGGILGPGTKKERVVSAEDATCSQVMQ

SEQ ID NO: 59820 - protein, 899 aa, Zea Mays
MDVEKPASKGHGFFALFDWGKKSKKRLFVGSTGSSPNLKNAADGKDIDDSTPSTRSNLILEDTPSLKESTEHSCSSSVIDEEAHSRRSPTVVARLMGLDSMPAASSTESNPMPLTVQPPFQTNSHEDFIGRSYVGSPLKTPGSPIDRFKVEALPPRLAKRTVSVAQYKLLSPMKNPNNISSRNAADIMEAASRIIRPGVENISPYRVHDVGSAIAARAYNPGELIGAQQRSQKLNEALRKCDGPASFRPPSGKPSDGRLRGSEGTSTSRISQANVCVPVGPKVKSGDRLDTARAMHAQEKRGMRKGGRKLETLKNPENNMAKRSGLNRQKDSNQIGTTSSSSVLMPNSRKQNATATKHKVNSNPATPSRQRSNIHQINAHPRKVRVASTFAGNSSQGSRKVDLQPNAHANVRNNSVPKAIPKPRRLQDRRAYSDTSQSSDSINSERSQRRIRHNIVIDEQSSFSTNKKKVSTEIVSFTFTSPVDKSLHGIHFPNHSVFTSPVDKSLHGIHFPNHSVEKQFLGNLNTVSTSSNTSNTKLDVIDGDFLGLLLEQKLRELTSGVRSPYTKTTKGVQAHHTSTAWEDMASACETSSIASTDYDRESLQSFNDGKATLPQTDLASRSLQSSQPVKKYDHDVTDQAEPPERLGRGPLFTWEASISTETCSSSESWRSAKGTRLFGSAEGGRTCDSTRSSKFLEADASSEYSDTASSITVATTEIPRSESNSSCHMDGRQDLQFIREILKASSPARHIFSYLERFGDSGVLDAHVLEELNGDIRLLGGEERKGYRLRRRLLFDCVNESLSARCAYYFNGGYGLWFTGTAVLQSLSAEGIHREMTGLQVGEEWMVDELVYREMSGPLGSWVDFKVESYQGGGDMAAELLGSLIDEVVADLLTTGSFS

SEQ ID NO: 59821 - protein, 90 aa, Zea Mays
MVVMKHEEGAQGSKEGTKHIVIIIAWTILKHWNQCVFDVMSLSELTMLHESNEPCHLWDISWAMLFLSNLKGCTELSPRTLAGLCCFYLL

SEQ ID NO: 59822 - protein, 392 aa, Zea Mays
MGASGPAAPPATHRRRCIQLLLLLALAVAPLGSRGLRVRAAGADTGGLSRDAFPKGFVFGTATSAYQVEGAATSGGRGPCIWDPFVHTPGKIAEDANADVTTDEYHRYKEDVDLMKSLNFDAYRFSISWSRIFPDGEGKINEEGVQYYNNLIDYMIKQGLTPYANLNHYDLPLALQKKYQGWLGPKIVDIFADYADFCFKTFGNRVKNWFTLNEPRIVAFLGYDKGLNPPNRCTQCTAGGNSSTEPYIVVHNILLSHATAVARYRNKYQATQKGKVGIVLDFNWYEPFTNSTEDQKAAQRARDFHIGWFLDPLINGQYPKIMQDIVKDRLPSFTPEQAKLVKGSSDYFGINQYTTYYIADQQTPPQGPPSYSSDWGVQYYFQRNGVQIGQMV

SEQ ID NO: 59823 - protein, 396 aa, Zea Mays
MAIELDDDSCNAMQTADPFRGYSLRHVQQLKIERRLESIESSLKDNHKVEHEEIKKIVTSSNISAPGCVATAMTTMVVGYALGWRGGAWYARRAFRREQQKLMMGHMKSSQNRWHWRPFNRLRNSRRRLRVEAIRTQRTEVPVEESAPARDAAAAAPLDGNGAGADGSVVPSSDDSWVVKLEQSFNIFATDSVIMVLKGVYGDRYYARFFALETIARVPYFAFISVLHLYATFGWWRRADYIKVHFAQSWNEFHHLLIMEELGGDSLWFDCFLARFMAFFYYFMTVAMYMLSPRMAYHFSECVERHAYSTYDEFLKLHEDEFQASRTPGSRRPKIDNLYDVFVNIREDEAEHCKTMKTCQTHGNLRSPHSTPNCLEDDTECVIPENDCEGVVVYKV

SEQ ID NO: 59824 - protein, 160 aa, Zea Mays
MSLGPNICANMTPMERSISAKEPENSEDLPTVVRSSDEMDTRNSGDVRRDTVDTLPESKQSHESCASKFDSGEYQVILRKELTKSDVANSGRIVLPKKDAEAGLPPLVQGDPLILQMDDMVLPIIWKFKYRFWPNNKSRMYILEAAGEFVKTHGLQAGDT

SEQ ID NO: 59825 - protein, 282 aa, Zea Mays
MMVVVRNDIVKLFDTIKSYDDGTFYFDEKHVDATEYKGPIMTSASVVRGVTSFAAVASGKLDIPGDKILGLAKFFLGIGLPGSSKDCFNQIDSLSVLEDNRVFVPLILSLPTKVFSLSLKDQLKVEVTTVFGSAAPLLKVNLVQVLGTDSKVITNGNRELQYDLDKNVHYLDIAPLEIDVGKYSVVFEISLQEQERETVYATGGRNTESVFVTGLIKVDKAEIGISDNDAGTVESVQKLDLLKDTKVSLSANHLQKLRLSFQLTTPLGLTFKPHQVATHLVF

SEQ ID NO: 59826 - protein, 66 aa, Zea Mays
MKGIYMHTELTEDKVAHRQHTARRGRGRNSSSGEKFKAKARVLSPNSAKGTFASPGRSLPTDAIGF

SEQ ID NO: 59827 - protein, 674 aa, Zea Mays
MRIYLEGHFIMNGENEDKDLKLPSRVVSLLFGGDISTSAQTFEKWLSLVRKRSGAFRPSGFPHRGSRIEVMPSGSFSLFGSGDLSEHLIREAPTRKDPLDCDQSPEISLWERLGNSSALDIESSEFSWDVLLSLHHTEHSSSSEQTEDEMNKALEVTVNSGGVVFFALFSSPGNIGVPEAAAVIKFSSSKMATQAERLGYEFARLLGVHTPQARVVYNSSSEWLAIRHAAENARTVAVSNNDEVGEMTCSELLEALELSRCLLLMSYIHGSPLLESSKAFHSREAACVTASSLGRVLMLDLILRNEDRLPCRQLGWRGNPANLMISDKSSLPNLDRLDDFKSSTDSSNQLITHFLHREKRSHSLNGKFGSPGLDPMSPKLEPLINEKENAERTNGDFRIVAIDTGVPRRPPVGRRVKDHERYPKVVELILNSSDYSASILYEISGCKLGHPRPDEVTSSDSCCSLSDEDNAGVIHEFRGSFRAALRDLEGFHLFLLQLYQKLDGVLRVFLSIITKTSEESDNNDAALSDFPSPGASYSTPRLPSKHLNNELHSDSEMLKSAMKSSSVGSRGSSDSVSPLPRESWNNKSFKGSAEAPRSLRMTMKLRDFYKTPKVDPELLKEIEQWNEALKNDVIKFCQENNFHSGFFDGTENNMVADAYELKVSQDIPKLRTPF

SEQ ID NO: 59828 - protein, 676 aa, Zea Mays
MVLQLLPVNSLSCKQIERRSCISLEAFIRDYFLCESPVILSGCIDHWPARKKWKDIKYLESVAGDRTIPVQVGKNYACTELKQELITFSQFLERMWSSDSANLAYIAQHQLFDQIKELHEDIAVPEYCSAGGGKLQSLNAWFGPHGTITPLHHDPHHNLFAQMYDEEPLGGTNCIRQDNRSLSENWSGVGLDHDGLEDDEVAFSDFDNHNTFSSSNSELHLSSSNEHLRNRRACRNHPSFLQPTALAADGLIRSTSRMTDLTEFKVVTTCNTCKPATINRGDDAKSLKNLDCTVPLSNYHPTVAAFPRTRHKGPQHILSWLLPKSKRKPRPDVSPTTVECENMSQLLKDWGVFSLDSLKKEVVEANEHRDAALQEVSEMKLSLGELTTKIASLEAYCSELKKALKQATSAKSMQSHHSKRSSTRSVSGSPLPVSHEVMVEGFVQVVSEARLSVKQFCKALIQQVEEDADNGLSEKLNLLLQPYQITLGDRRPKLVLYHLEALMNQAMYQDFENCAFQKNGPRRCLDPRQERQESFASFVALRNLSWSEVLRKGTRHHCKELSRFCDQKMGCVASALMNWSRPCWAEPLLQCFFVACKCVWLLHLLAFSFSPPLAILRVEEGRAFEQTYMEDVLLDMQRSQDHEPPPSARVKLMVVPGFYVQDRLLKCRVLCSYISG

SEQ ID NO: 59829 - protein, 521 aa, Zea Mays
MRSNRRRLGGRGGGWGGQGGGVSVAASFAALLGCVVALVGGAAGQGPRPPSDYKTLSGAAPLVVAKGGFSGVFPDSSQGAYSFAMITSAPDTAMWCDVQLTKDGVGVCLRDINMKNCTSVDQAYPERKRTYVIDGVRKTGWFVSDFTIAELQSVSLTQAIWPRTRRFDGIYPIISITDFRSLVMPSPVWLNVQHDIFYKQHGLDMRNYILSIKKGVSMDYISSPELGFLKNMSGRVGRKTKLVFRFLEKALLDHSINQTYGSLSSNLPFIKSIASGIIVPKSYIWPVTKDNYLLPSTSIVTEAHNAGLEIYASDFANDRIIPYNYSYDPLAEYLNFINDGGFSVDGVLSEHPITASEAIGCFTKLNSNKTDHGEPLVISHNGASGDYPDCTDLAYHSAIDDGADIIDCPIQVTNDGVLMCMSSTNLLDTTNVQRTTYNSLVSVVPDIQPQPGIFTFNLTWSDINSNVLKPKISSPVSGYFLVRNPRYTNQGKFLKLSDFLAIAMDKDLSGVMIIIECCWLR

SEQ ID NO: 59830 - protein, 178 aa, Zea Mays
MGLLLDGVVMQTILISTGIFLTKQPETRAIMNWVKQEHFTASASLHGGALVANYPWDGTRDTSKHYYGCPDDKTFQHMASVYSRSHYNMSLSKEFEGGITNGAFWYPIYGGMQDWNYIHGGCFELTLEISDTKWPKADELPIIWEHNRMSMLNLLASLIKGFMEGYLQQIRAGLYPAQ

SEQ ID NO: 59831 - protein, 527 aa, Zea Mays
MLLNEIRGKAVMFTGHSLGGAIATLAALHYLCISSSSSPWSPAAPVLCVTFGSPLLGNEALSRAILRERWGGNFCHVVSQHDVVPRLLFCPPDAVPAHIIVGMQLDQWPARTRHTGAVNTVTTRMADTDKNALQQLIQTHMAAVAMEQKLATPETTGGSPYRPFGTYVLCSPEGAACVDNATAAAQMLYATFASRSSPGAESPEAAHSCYGELVLKMPQHLLLKRCLRVDDTRATPNYDDGVSLALEASGIDATVRAHAMEASTARQWLKTSKRAGRRPSLNCACLATQLGRITPLRAQIEWYKAVFDAEMGYYDAFKQRRSPRKYSKVNLNRMKLGQFWDGVLTKLDAGQLPHDFHRRAKWVNAARFYQLLVEPLDIADYHHQGLHRTSGSYMTHGRERRYELFDRWWQEKACTGAGGDITSSMLAASASSRRRSKYAGLTQDPCFWARVEEAREETESARGERDVAELAMKLEELQEFERYSRELVANKEVSVDVLAPQSSYTLWVEEWNQLKLRDEVRTLLLQF

SEQ ID NO: 59832 - protein, 98 aa, Zea Mays
MQPNRGGKLRPRLNTGERPIATSTAREDEKDLKRESKSAENARREADGGWRRAPAVCGTAPAVPPIGSGRGPLSPAPAAKARRPLGAPRQPSSARTVS

SEQ ID NO: 59833 - protein, 172 aa, Zea Mays
MPLNHIPGGAGSEKLLKLLTHHMEEQRKRKALMSCLEGKAMSEFEEAMSQIVGLQELKMQLRRWARGMFFDEKRRAMGLGIAKRRAPHMAFLGNPGTGKTMVARILGKLLHMVGILPTDKVTEVQRTDLVGEFVGHTGPKTRRKVLILSFLFIRKAPSAAQISVSGKLRNKF

SEQ ID NO: 59834 - protein, 721 aa, Zea Mays
MPSTSMNGDSLMRVPASPMSFSSNNISGSSVIDGSIMQQSPPQEQMQKRRSSSVTSQHVIDAGGALHAQKKSRTDVSQGDIMQHQLIQHLIHGQNSLHFQGQQNPQLQAFIQQHKLAQLQQRQQQHLLQPFSQMQQPQVGIPRQPQLRPPLAQTGMQLGGPVRTPIERGVCSRRILQYLFHKRHRPENNSITYWRKIVEEYFAPRARERWCVSSYENRGNSSAAAPQKALDTWRCGICNTHAGKGYEATYEILPRLCQIRFDHGVIDEYLYFDSPNEFGLPNGQMVLEHAKVVQKSVYEHLHVIHEGHLRIIFTPELKIISWEFCSRRHEEYTTRKTIAPQVNNLLQVVQKYQAVVTESGSAGISNNDAQTICNMFVTASQQLAKNLEHHTLNEHGLSKRYVRSLQISEVVNHMKDLIEFSHKNGLGPKESLNSYSKTMAKFQNMHDSRQLMAAANLANNQSNTKLMGTKEEASASATNQTPGVGAIGNNALQHATPLNSYQNMLRSSSANPVLLQQEASSVFKGPTAMHSGIQLEAARSFRGPNQVQFQHPAAIQQQQPMPQQSNFQGFGGVNPQYQHHVLNQLLQEVKNNNHVKAQQLPPDAPKASGGLAPGVAIPNVAAAGEQGQHINSNTRDHNGAVKGAAPAGTGPSNVINNTASMPPGRNNSFKSVSSSPAAATGGIAVNSKVDDSFHQLEDLDLDGLITNELMESGLFGAGQGW

SEQ ID NO: 59835 - protein, 106 aa, Zea Mays
MGLQLLGQDVVDVASVEAGWDQGVNLVRAMAMVLREVMVVVDLEIVVSRGGRKVMERLWEEAMDHVSLTVVVVAVVAILIVRLVMSLVAPLAGPMSATVAQVEVME

SEQ ID NO: 59836 - protein, 765 aa, Zea Mays
MMDGHHQLAMMQQQHQNHGQQQAATSESDARGPRHDELLMESKSGSDNMEGGARSGGSGGEELQEEDLGLRQPARKKRYHRHTQHQIQELEAFFKEYPHPDDKQRKELSRELGLEPLQVKFWFQNKRTQMKTQQERHENMQLRAENEKLRAENARYKDALANASCPSCGGPAATAVIGEMSFDEHHLRVENARLRDEVDRISTIAAKYVGKPAGSLLLLPPNNLSNNVSGPALSSHHHLLPGGTDVFGGLHRHAGGGFDFDKGLVVELAVAAMEELVRMALLGEPLWIPALAVDGATTETLNEEEYARGFFPRGVGPKLPELRSEASREAVVVIMNHVSLIEMLMDVNQWSTLFSSIVSRAATLEVLSTGVAGNYNGALQLMTAEFQMPSPLVPTRECQFLRYCKQHTDGSWAVVDVSVEGQLLRTGSRQGRGRGRRRPSGCLIQEMPNGYSRVTWVEHAEADDMMVHDLYRPLVCSGLAFGARRWASTLERQCERLASAMASGVVVPAAAAGPAAGVVTSPEGRRSMMRLAERMVASFCGGVTASTTHQWTTLSGSGAEDVRVMTRKSVDDPGRPPGIILNAATSFWLPVAPARVFGFLRDDATRSEWDMLSNGGDVQEMAHIANGRDHGNAVSLLRVDNANSNQGNMLILQECCTDATGSYVIYAPVDVVAMNVVLNGGDPDYVALLPSGFAILPDGGGGGGGGSLLTVAFQILVDSVPTAKLSLGSVATVNSLIACTVERIKAAVAADNAGVAAAAAATSHH

SEQ ID NO: 59837 - protein, 271 aa, Zea Mays
MQVAEGRLARMSGFTVFRRILRSDGIPGIFRGFGTSAVGALPGRVLALTSLEISKEMTFKYCEHFDMSEASRIAVANGVAGLMSSICSCSYYVPLDVICQRLMVQGVPGMATYRGPFDVINKVVRTQGIQGLYRGFGITMLTQSPASALWWSAYGGAQHAIWRSLGYGNDSSTKPSQSELVAVQATAGTIAGACSSIITTPIDTIKTRLQVMDNYGNGRPSVMKTTRLLLDEDGWRGLYRGFGPRFLNMSLWGTSMIVTYELIKRLSVKSE

SEQ ID NO: 59838 - protein, 56 aa, Zea Mays
MVPRRRAWWLGGEGGPSEKNSGDSNQAQDVHALTQRAPAMHPGHPETLNSSHRSDR

SEQ ID NO: 59839 - protein, 159 aa, Zea Mays
MDEEEVHIAVGKNSRKEKANILWAAANFPRATIVLVHVHWPSKWMPFMGGKVLYKFADEKEKEMHRGREMKVMVNMLSQYKKMCGTRKVSAHYLTHDDTVAGVVNLIKKLKIKRIVIGSRNMSRQVVVRQCCQVWLVLNGKHISTRIWRGELRYFGIYT

SEQ ID NO: 59840 - protein, 155 aa, Zea Mays
MEGDPACGLALADEEAECSSWDSDDEYQKFIQNMNPPRVTIDNTSCPSAIVIHESVHRRRRSQSTGAWCYVHGDQCKSWVQRQAPIPQDRWIPSRTRRTFVRKAGRHGRHKPQTCQRFVGFRCSRAAGAEIRRLLLLRLRQFCVQRSYNSTATSS

SEQ ID NO: 59841 - protein, 286 aa, Zea Mays
MAKQGKGEGTLLATGSYDGQARIWSRDGDLKQTLFKHKGPIFSLKWNKKGDFLLSGSVDKTAIVWDTKTWECKQQFEFHSAPTLDVDWRNNNSFATCSTDNMIYVCKIGEQRPVKAFSGHQSEVNAIKWDPTGSLLASCSDDWTAKIWSMKQDKCVFDFKEHTKEIYTIRWSPTGPGTNNPNQQLLLASASFDSTIKLWEVEQGCLLYSLSGHRQPVYSVAFSPDGEYLASGSLDQCLHIWSVKEGRILKTYRGTGGIFEVCWNKEGSKIAACFSNNTVCVMDFRM

SEQ ID NO: 59842 - protein, 75 aa, Zea Mays
MVPSIHCRDIASGWIRRRRQSRGREGLLGDERRGLPPRHVRRRRGPVDGCGQERGVQQVAVQLVGKILKTIPKKS

SEQ ID NO: 59843 - protein, 55 aa, Zea Mays
MCSSSISASPSLLITAPCRRLAILTLALTLHRMPLQYSPEEDLQQLITEEKKTPG

SEQ ID NO: 59844 - protein, 89 aa, Zea Mays
MESPAKEEAGGELAMEIESSVTAEDWRRALSRVVPSVVVLRTTAPRAFDTEVAGASYATGFVVDKSRGIILTNRHVVKPGTCGRGGPCS

SEQ ID NO: 59845 - protein, 325 aa, Zea Mays
MSFDKHVVSVGTLVCCQQRRCVNRDWLDLSLNHSVPSSLLILSRAFTVSGKMKPEEAVVATLSSLPDEVVDTVGTVLPSEDSVSERKRKLEFLEMQEELIKEEEKRQEKDDKAKLEEPKATEEDLALKEMTEPTVREKEELKKAKTHDKKEQLCNISQALAVLASVSSVTKERQEFLSLVNKEIELYNNMLAKEGTDGEEEARRAYKAAREESDHAAEAAVGEKVSSALIDRVDAMLQKLEKEIDDVDARIGNRWQLLDRDCDGKVTPEEVAAAANYLKDTIGAEGVQELISNLSKDNEGNILVEDIVKLASQTEENNEAEETAR

SEQ ID NO: 59846 - protein, 224 aa, Zea Mays
MLIYSFFLPGRPPCVDSSSLHLVLPFAASFLTKMSQAKEVRYTARSITPPADRNGTSRSPPPKRRSPSRSPPPKSASRSPRPRSPKRRSTSRSPPRRRGRSRSRDRSRSRSPDDRNPGNNLYVTGLSTRVTEDDLEKFFSKEGKVKNCHVVLDPRTKESRGFAFVTMDTLEGARRSIKYLHRTVLEGRLVTVEKFNMVLGCLYVNLVGPGCAVSNHGCLQRMCS

SEQ ID NO: 59847 - protein, 249 aa, Zea Mays
MRLLLFGGHGTGGWLSRYDVYYNECIILDRVSVQWKRLPTSNEPPPPRAYHSITSIGSRFLLFGGFDGKNTFGDLWWLVPEDDPIAKRDLVPSIDSNSKPSTVTDDNQLLNLKESQALENPITELAKRLGIALSEEVSASFVDEANDKELVELSSRLAGQSLPASDQVASIQVLRDHWKSSPASSLQLQELGPLLRDYQRLILRHYTGNSLPAFREMEALRFFHLKSASQLRMDDIPVLLSEYGRLLST

SEQ ID NO: 59848 - protein, 326 aa, Zea Mays
MCPTKPGRPAQAAAGSGEKSWREQAVAASSLRPVDLDRGTNGWASPPGDLFHLRARGYFSCGGGKRGKAPSAAEWLLRPAGVDWLRSHARLDHVLARHDNRVAAAFRRARLRNDPTAHFLLAVNLQVPGRPDAYSAVFYFAAEAPIAPDSLLGRFVQGDDAYRNARFKIANRIVNGPWLLRATVGNYAACLLGRALTCRYHRGVDYLEIDVDIGSSAIASAILHLALGAVTSVTIDMGFLVESQSEEELPERLFGAVRIARMEMGAARYVELPPNEAMPETVCSGRAGAGFRVSSGKVVNHSRQQDRAGGKVGRSMSCPERERGGK

SEQ ID NO: 59849 - protein, 117 aa, Zea Mays
MTSYCVVAVESVGRQIPIAFLDRVKEDFTKKYGGGKAATAAANSLKREFGPKLKEHMQYCVDHPEEVSKLAKVKAQVSEVKGVMMENIEKVLDRGEKIELLVDKTENLRSQVSNAEK

SEQ ID NO: 59850 - protein, 182 aa, Zea Mays
MCINLTLLASYYAARIMDPKEKPNVSSSPPTPRLDCIKCFDMLWFCYSPFHQMQNYYRYGEFDTCFGKWGDLMGCLALKTKRKAEVEEILIAREKAKPHIWTYRTVDEASENWWRMYKHAVMMSPLPGSAQLPRVPKPTSECAACPSPDGSSAWASAEGGEARRPEPSVREVEVPRPSCSSR

SEQ ID NO: 59851 - protein, 997 aa, Zea Mays
MDDVCEGKDFSFPEQEERVLELWAKLDAFHEQLRRTEGGEEFVFYDGPPFATGLPHYGHILAGTIKDVVTRHQSMRGRHVSRRFGWDCHGLPVEFEIDKLLGITNRQQVFDLGIGKYNETCRSIVTKYVSEWEAMVTRTGRWIDFKNDYKTMDLNFMESVWWVFAQLWEKDLVYKGFKVMPYSTGCKTALSNFEAALDYRTVPDPAVMVSFPIVGDMDNAAFVAWTTTPWTLPSNLALCINANLMYAKVRDKSNGKVYVIAESRLGQLPVKAKASGKKQAPSKGSNAEAAQDGLDKESYELLVKIPGPYLVGLKYTPLFDFFIELQETAFRVIADNYVTDDSGTGVVHCAPAFGEDDHRVCLAAGIFETAGLVVAVDDDGCFIEKISDFKGRYVKEADKDIISAVKDKGRLVSKGSIEHSYPFCWRSGTPLIYRAVPSWFVKVEKIKDQLLECNKETYWVPDYVKEKRFHNWLEGARDWAISRSRFWGTPLPLWMSQDRKEIVVMDSIEKLEKLSGVKVTDLHRHYVDDITIPSKRGPKFGTLKRVDDVFDCWFESGSMPYAYIHYPFENRELFEKNFPGNFVAEGLDQTRGWFYTLMVLSTALFGKPAFKNLICNGLVLAEDGKKMSKSKKNYPSPKDLIDEFGADSLRLYLVNSPVVRAESLRFKRTGVFAVVKDVFLPWYNAYRFFVQNAKRLEVEGLASFSPMEQAVLLKSSNVLDHWINSATESLVSFVHQEMDAYRLYTVVPYLVKYIDYLTNIYVRLNRKRFKGRTGEEDCRISLSTLYHVLVTTCVVMAPFTPFFTEVLYQNLRKVSSKSEESIHFCKFPSTTGERDERVEQSVNRMVTIIDLARNIRERHNKALKTPLKEMVVVHPDNDFLEDITGKLKEYVMEEINVKTVTPCNDPLMYASLRAEPNFSVLGKRLGKDMGKVSNVVKKMTQEQILDFEKSGEISFFGHCLKLDDIKVVRQFKRPENVSEKEIDAAGDGFAINMLLCL

SEQ ID NO: 59852 - protein, 166 aa, Zea Mays
MQADSRMLSQGIQPRYTGMADALTKIIRAEGFRGLWKGVVPNAQRAFLVNMGELTCYDHAKHLIIHKEICSDNLYAHTLASVASGLSATTLSCPADVIKTRMMNQGKEGKAMYRSSYDCLVKTLRHEGVTALWKGFLPTWARLGPWQFVFWVSYEKLRQASGISSF

SEQ ID NO: 59853 - protein, 119 aa, Zea Mays
MGLLPHRVIPLRPASPSSPRAAAPPSVPPRYLEPLLLLLRRRLPSGQRILLLRLRRPPAGGTSSASSASPHVTQRTSLPKSQEPRRSCHRPPLERGGRQEDRTGRHWPAAARRLPRQPS

SEQ ID NO: 59854 - protein, 241 aa, Zea Mays
MWLNDWCRAEMTQKRYHLQIQAVSIVTYVGSLLGIVLMYVWYAPSPACRLNILFITVTLALVQLMTFVSMSSKVKAGYVAPGLMGIYVVFLCWSAIRSEPHTEVCNRKAEVATSADWVNIASFVIAVVVIVAATFSTGIDSKCLQFKQAEGESEEEEEDDIPYGLGFFHLVFSMGAMYFAMIFVGWNANASHTMERWTIDVGWASTWVRVGNEWLAAIVYIWMMIAPVIWKTRQVGSAAET

SEQ ID NO: 59855 - protein, 65 aa, Zea Mays
MESSSSNGSNVPLPASQHPLHVTDADEEDKSVKQLNECATIYLSLQDCLIESNRNWKVCQAFSRA

SEQ ID NO: 59856 - protein, 54 aa, Zea Mays
MRKNVLAKCYGGDITRKKKLLEKQKEGKKRMKRVGSVDIPQEAFHELLKVSNSK

SEQ ID NO: 59857 - protein, 139 aa, Zea Mays
MGIVFTRLFSSVFGNREARILVLGLDNAGKTTILYRLQMGEVVSTIPTIGFNVETVQYNNIKFQVWDLGGQTSIRPYWRCYFPNTQAIIYVVDSSDTDRLVTAKEEFHAILEEDELKGAVVLVYANKQVHSMMLPLQSH

SEQ ID NO: 59858 - protein, 261 aa, Zea Mays
MACQMEASRTQMIQVDVGTPEGEMIFHSAASKLDFKGYQSVYEDTEGDSVHEDNFEALSKLMVKDLVSPVNVHLGQHFTKPPSRYSEGALIKKLEELGIGRPSTYASIMKVLQDRKYVTAKSRVLHPEFRGRMVSAFLLHHFSEVADYSFTANMETELDNVSAGLTEWKGLLKGYWERFSKYCADASNLDGRKVERMLEEKFGPILFPNVDTDNRICPRYIARSLSQQEDETEPTEECQKTFTPRLLGVMPDSDEKDWCCQ

SEQ ID NO: 59859 - protein, 327 aa, Zea Mays
MSGLLNSNLNSSASNLSDSAGRPFTASFSGQSGSIPGFHHSGLHNTHGSYNLPSMPGSLAQRNAAMSGLPSSGVQQPGGSIPGRFPSNNLPVGMPQIPHAHSGVSGRGMNFGAGPAFSSSMNIGGNIQGLSSGLGSGGNRNSVHGMPVSSSIGNSGQRISSVGNMVSASNIGRNIGTGGLSVPSIASRINLNGSGGSGSLNVQGSSRMMNGLLHQQATPQLINMLGSSYPTSGGSLSQSQIQAGNNSFSSMGMLHDASDTAPFDINDFPQLSGRPSSAGGPQGQYGSLRKQGVGVNTLVQQNQEFSIQNEDFPALPGYKGTKTKSEY

SEQ ID NO: 59860 - protein, 313 aa, Zea Mays
MAEALVGLRVAALAVPQPRSHRRRLLPAARLAAFRRDRLSTARAAVAGPPEVDEDDSMSIDNLHRFFDLNVGKWDGSFYQFDAHGRVLQEISTRLSVSTYGEDNLISLLQSLYIKQASSAISIVDEEDSEPEWVEYKIKETNIFTVDKYQQIGFFPEEKAFALRYQTAGMLETVLRVGTLGEDDTGEESPKNLKIPSRKPSIVCENCLYSLEGNGRMRAFHIMDPKGVLDTLLIFHEKRQGSELAQSFKHYSVCTKSASSDRISTVLGRWEGHSVTKRSGVYGATLAEADTAVVLKMGSNGQLIQIDPVRYVV

SEQ ID NO: 59861 - protein, 252 aa, Zea Mays
MASAVCGVTARAHLPSAVPAAARKLFFRCRAASTMNEASASSPDAEEKKTTTVFVAGSTGRTGKLVVEKLLAKGFGVVAGTTDVSRARGSLPQDPNLQLVRADVTEGVDKLVEAVRGVDAVVCATGFRRSFDPFAPWKVDNFGTVNLVEACRKAGVARFVLVSSILVNGAAMGQLLNPAYIVLNLLGLTLVAKLQAENHIRKSGIDYTIVRPGGLTDQPPTGNIVMEPEDTLYSGSISRSQVAEVAVEALDG

SEQ ID NO: 59862 - protein, 353 aa, Zea Mays
MERGKLDKGGYSSISGPRVIEKTFSDMSISGSGFGSGSGLGGLSTDMDSFASKPKGRPSTAATAPGKGFGMKLGKTQKTNQFLESLKAEGEVILEDVQPSAVSTRSSALPPSDPVTVNIEEKLNVVVKRDGGISNFDVQGTLALQVLNDTDGFIHLQIESQDMPGLSFKTHPNINKDLFNSQQILGAKDPNRPFPSGQNETPLVKWRIQGMDESSLPLSVNCWPSVSGNETYVNIEYEASEMFDLHNVVISIPLPALREAPSVRQIDGEWKFDSRNSVLEWSILLIDQSNRSGSMEFVVPPADPSSFFPISVGFSASSTFSDLKVTGILPLKEGNPPKFSQRARLLTANYQVV

SEQ ID NO: 59863 - protein, 69 aa, Zea Mays
MRSGIGCRRFRHKVHERSLLSFFHSGQFLHVSISCCLPRVCSLLIHRVSACSRLPSSRRTCHPKLDPHL

SEQ ID NO: 59864 - protein, 461 aa, Zea Mays
MPSYEGAVKEDGRGKTIWDKFAHTFGKVADLSNADVAVDQYHRFEEDIQLMADMGMDAYRFSIAWSRILPNGTGQVNQAGVDHYNRFIDALLSKGIEPYVTLYHWDLPQALEDRYNGWLDRQIVYDFAEYAETCFEAFGDRVRHWVTLNEPHTVAVQGYDAGLQAPGRCSLLLHLYCRSGDSATEPYVVAHNFILAHAKVSDVYRKKYKAAQNGELGIAFDVMWFEPMTNTTADIEAAKRGQEFQLGWFADPFFFGDYPASMRSRVGDRLPRFTAAEAALVKGALDFVGINHYTTYYTKHNSTDLVGRLLHNTLADTGTISLPFRNGKAIGDRANSIWLYIVPSGMRSLMNYVKERYNSPPIYVTENGMDDGNSPFTSIKDALKDSKRVKYHNDYLTNLAASIKDDACDVRGYFAWSLLDNWEWTAGYSSRFGLYFVDYKDNLKRYPKSSVQWFKNLLASS

SEQ ID NO: 59865 - protein, 888 aa, Zea Mays
MRRFFFFGSPAANAGEGAGQPVNDSRTGHRKTDEGKDISTARLSRSRSRRQKRNKEEPANPKQLRRSMSFSSPARSSCVEERCFSFSGDVPCSLYDESDAPHHAKDVAPDMWSPEGNPFSREYAIRTPKDHSAMENDSPRSKYCSCSAGHSPVSSPVAIQCRSTRLGNLLNRNEVLDRYIDRGHGDAIVDEKQKQCVPTVSNLGRPPRPHSTVPSIPRPFKETTESYPDVDLNDAFLWRLAQEGIGDTHKITTMCSASRRHINMSDASERESATTVEDIYEDLQDVRLPNVICPSTCPNSAVEETDDMLLQRVKEVESRFTIPCGDEYEFSMLRYKSSTSNDMFQLIQQLTEDRKQLAYELSSEIKARVTERFAAKEQYKQLKKELDNRTRRLEKEKSEVQTTLEGEMDRRSDDWSIRLSRFQSEEERLHERVRELAEQNVSFQREVTSLGATKAEALMKAASLETQNSKLNDDLEKLKNEHEKLHYSSTDLQARFAEIVEERDHIREYLKAKEGENKALHKVIARLQTTCNEQERTITGMRQGCIDELGRKFVEYSTNDKTRKLQMELIRLTGVEQKLRGEIRSCNLEVKSLRQENIALLNRLQGAGNGASFSSIRLDQELQARVDNLQMQGLSLLDKISQLCTKLLDLMKHKRHENEYLCGNDVSTFSDYIFEYQSIKGGIEGLKLSLKAINSILAEKQNAKEKSGEIVAEGSPSKDQTLKEEAMLNRVLKEAVLSKEVAIEQLQSDLASSLRIQDVMRNEIQRVQDELSCITHKAKQLELQVSKKDESIDEIQQDFQESAKELAALRGTLKTVTEERDLSWQEAKQLRRNISIMQDEVVSLKKKIEALDEDILVKEGQITILQDSIDKPFDIICSPRSMREFDMA

SEQ ID NO: 59866 - protein, 75 aa, Zea Mays
MFRIFLYAWGLYDEASLLHYYLTYNMFRMFFIIELSQCLESFILIMYVFMPRTHSFYNQLLMILQFINELLGGCA

SEQ ID NO: 59867 - protein, 556 aa, Zea Mays
MSPLEHGEVFVLDDGGEVDLDLGNYERFLDIKLTRDNNITTGKIYQSVIDKERRGDYLGKTVQVVPHITDEIQEWIERVAMNPVDGTEEPADVCVIELGGTIGDIESMPFIEALGQFSYRVGPGNFCLVHVSLVPVLNVVGEQKTKPTQHSVRGLRGLGLMPDILACRSTQPLEEHVKVKLAQFCHVPISNIINLRDVTNIWHIPLLLRDQKAHEAILKVLDIQCVGKVAREPQLSEWTERASRCDRLKSPVRIAMVGKYTGLSDSYLSVIKALLHASVALDRKLVVDWVPSCDLEDSAAEENLDAYEKAWELLKGADGVLVPGGFGDRGVQGKILAAKYARENNIPYLGICLGMQIAVIEFARSIMKLHGANSTEFDPTTKTPCVIFMPEGSKTHMGATMRLGSRRTFFQVTNCKSAKLYGNASYVDERHRHRYEVNPDMVPEFEKAGLSFVGRDESGKRMEIIELPTHRFFVGAQFHPEFKSRPGKPSPLFLGLVAASSGQLDHLLQPGLISSTGRHTCSKGGAQKLKAGHVMKPLNGLVNAHYSATGNGAIPI

SEQ ID NO: 59868 - protein, 95 aa, Zea Mays
MAAQVFQPSYRMPTMSIEEAGLREMKMMERWQERTAEMMREANSAWHKGGDSSSSSMPQGEGGDEDAEEAKARAWDDWKDDNPRGAGNKKLTPCG

SEQ ID NO: 59869 - protein, 101 aa, Zea Mays
MFFLVTLNLQCQVLQNSNACIHVPSFATLPPQYRQFRQTRQCHYSAPTSSTLKLFKKFYSLLFNILMVCLFWYILRYLLGFFQSNVKTLFQEGNYLGQGST

SEQ ID NO: 59870 - protein, 168 aa, Zea Mays
MDSQVFSKIKPGPNQTEHLRLLQLGPGPNDSNRIPWLKGTKLPLDADRQTSSAPGESACKCNHTNYSAGAVSALVSVTLPESVDSDLPLPSDLPSLTVSFASNPAVEPPSSPSLPSFFVSDSAISSTNSLNFLQFLDLVGSFPGSNVNPRPPKLDAWAQTKKALEILF

SEQ ID NO: 59871 - protein, 2207 aa, Zea Mays
MDLAGMKRRELQALCKRHGLPAGGTNADLVGRLDAVLSGPAVVEEEVAGVPARKGCLKQTGGGATEAKKVTFGAEVGKARRLRSRVIWSPVVAKTRGKSARAGTDSAAEDGISADVGADVPVRRSRRNSFNPAEAEEAGEAVAVDRKPKRKNQENDEGVAVIAQARVTRRSNLEWSATVLPPAVEKKRGRQNAAESDVQKSALVEVTARTTRSRSIVPVVVPPTVVENKRRKTGDPQTTVELTMLSDVPRSDFPATRSLRNKIVHVNNSVVDETHTTRQLENKMRPSTRRHQQVASSPEDKGQKIPATSKSPLLRWSRRNYSEANSANSVNIKLAKDSSTAQPLAHHNSHSEDLEKQPAVKEPIKRSTRKSIALAALEKEKDVIEGKNPEAHVRRSTRKSVVQVKDTKSIVEETQYANSEDVAKQPATKGPARGLRRKSVITELHEKEKSLIAEKNMETDEAILTRKPVIPVKNIKAVGEGIQIGKGKDVDKQFVVKQPTRRSSRKSVLPDMLENNSGLLAPKMNAEMNVRRSTRKSVLPDMHNEKQDHHKMARNENLQSGKYQDGEKQQKVKDSIRQSRRSIATVLLEGQNNDEGKKFKNPTRRTTHKSHALNAVEEVSMDHIEVGEEGLKLRKRSRFLLEISSSANVSWKHQNAQISNEKDNTEGSQQASNCTTSKRRSSKKRRTTAPEEVMPFKVANDDIVIMEETKDTLEYNNESSSKVQEICQVNAAREEFSSGPLLVTVAPSDEICTVQSVAVVIPGSESGDDANQSSDKSKQPQEHSVTQTVDDHLSETRSGKLDQSTCITGLVSDNCVVSEDKTLMSEDREEQSPVSGEQRVSLEANANEPEEKNLANVTSTDLHTKSLQHDIDRIAKETDKEHEEKYGVSPIAVEKCVCREASACESARKPLTVIFSNNLHTKHLQHDCDVLIKETGEEVLAQENCNDQPVPAQTDQEIKLNDELADPDVLAQENCNDQPVPAQTDLEIKLHDELADPDHEEQSPVSGERRVSLEANANEPEEKNLANVISIDLHTKSLQHDNGRIAEETDKEHEEKYAVSPIAVEKSVSREASACESAGKPLTVIFSNDLHTKHLQHDCDVLIKETGEDVLAQENCNDQPVPAQTDLEMKLNDELADPEVLAQENCNDQPVLAQTDLETKLNDELADLAMESGCSITERNEGLVAHNLDQEGFLEATPECKQECGLPEETVISSKETGSLLCADQSPIGLESLFSQESIVESVGHCALASATTHTENGFDDSKDCHNKSALENVHVPEPCSHNDTKGGIFKNVDCMHTSQRDDRMEGVPEANTDEEHVLSAFLLDANHLNVVINSEEVVCEGEDSKELLHSEDCKASSEKTDVNDGNVYGISDAVVRCALHAPADDNYEIFLGPNTDVPRQVYNDGCSDVKEDRFASKPWTIDIIEDASVKERSNLKDWQLDSKLEGTEIVESGLYFNKDIGNILHSGSIGEITPSGSGLSKDSSVDYRGEVLDGFSMEASLERSSTRGEQNGCRLDAIENPSITLATSGYKHEGALSEEAVYTKKNYAGTCLSNPRELIMELQSHFSKENINESDPHDSLVFPTAENSADEQLVKVHHGSNLSQLGLTDLLDGPIGCSNTDVLCQCDNHKNQSNEDKVEEVEAVSAAKYIESEVVLLPSQERSNLNNEQLNTKLESPNIMGSCLNCDNDVCNTSDNGSVFVIGKRTPSASGLPEDYPKDSDLQQPVLDSFSVVSSFQDNISGKKTVSGVAGSEILSLSLATPDYKHEDGFSEEAVCRTKNYTGTSSVDPRHLDMEGHSIYSEGGTEKSNLQDNLAFLSAESGKDEPIICHVEKLVDAHASSDTYQGPCQDLGRHEEQESCMSIPMQAKESGGVLRSSHTKGSVTAAQIDLAGDAHLIVSDNAAAKQVFSEEKEETKSISSSDIDILHEKSYSSGHDDHAACAAETQFYHPQKASISDGLHLGPSSLQVESLDALDSDILYVNTGVLEQHHKEGYYEPSVYQITSGICTMSEAEPFEVLETGKDVKTPSKLDEQLNPGLDGDEAEKHSLDCGTDTSPVMSKRTLSSPGSGPCQQYVNESTTSTQSTDNHPNDLPAPRSPEQSACFQNDNDSGSVGICQSSRRRGIDELCGKLQSFKVSSAVKGSYVAMGAPRPKPGDSTSRSAAALLRNIENTTAVKAGRPPVKPNADGKDSSRRALQPISGRPDSR

SEQ ID NO: 59872 - protein, 337 aa, Zea Mays
MALLSATSPAKAHLSALLSCHDEPQQHQHALPVPHPRCFGGGKARRRARGRCAASMRPPDASVAPASAPAGEARRKKKPRVLVAGGGIGGLVFALAARRKGYDVTVFERDMSAVRGEGQYRGPIQIQSNALAALEAIDMSVAEEVMRVGCVTGDRINGLVDGMSGSWYIKFDTFTPAAERGLPVTRVISRMTLQQILARAVGDDAILNGSHVVDFTDDGSKVTAILEDGRIFEGDLLVGADGIWSKVRKTLFGHSDATYSGYTCYTGIADFVPPDIDTVGYRVFLGHKQYFVSSDVGAGKMQWYAFHKEEAGGTDPENGECLEKFSSLTSEIGTASL

SEQ ID NO: 59873 - protein, 268 aa, Zea Mays
MLLHLSIFKAGSTPPPSLTLSFRCHPLSLCSPLYTARPPLPVSLCFILRFPLRQARPAPPLQNDILLPRPLRWGTRRSCTTRSSTSPRTPRRTKSAPRTRTSSRSGTPTSTRRRPGRRPRRASRPSARPTRRSWTSRRTGACSSCATTAGRVRGRAAPSAAPAAAVAEASAPASGRAWRGRAATGSARGARPAHRRGSSRRCTAPATPAGAAPSPSSPAPSCARRRRWSASSSAPSRSSAAAARRRSASPATSSPRTGICSSALFCSA

SEQ ID NO: 59874 - protein, 332 aa, Zea Mays
MAHLVEEINDSDYFSDGVPKEMMRVDDVLVRIANISLIEEKMAATGPGKITNIFPNYLLYEFQGLSGGRIWKAEHDLLLLRGILKHGYARWQYISDDRENGLFEAARRELHLPSVNEIIGAQLNEANGNLEGAQEGQANTTSMSHYKEIQRKIVEFLRKRYHLMERALNMEYAVIKKKIPVPDDITEQGVPAGHAPFIPDISELLRELPNLEPISTNELVSEGTAGQLQVPHLYNKMCGVLEESGAYALSSFFGDKSASSSLANSLRQFETVCENVVEALRPHQNGTGSAIKEELVDAATKAAAAAAPQQDSGHDAPHGQSSTAKADMEIDG

SEQ ID NO: 59875 - protein, 281 aa, Zea Mays
MELTVANIELNGELNALKSEKSDKASLLEKKLTESNTQLEHAKAAVDAIVEQQGMLKCTMSDMEHIIEDLKGKVSKTETRAECAESKCTLLTDTNLELSEELAFLRGRVESLENSLREANHAKVSTAKDIGVKTKIITDLVRKLALERERLHLQIATLTKKNKMLVKKRAEGINGSIKMSKKGTSNHTEFQSTQKAEEICPDSLPSQTVVEKPSDPIDNDESKNQSADVSTSEDDSIREDIHETVCTIEPSLLNRKYIFMAFLVLLAAAVVFLLHEDGSPA

SEQ ID NO: 59876 - protein, 857 aa, Zea Mays
MSRGVPEPKLTAMDAMIDKLTGAIFLFQLTVVVVLGAAGNIWKDMEARKQWYVKYDDNEPWYQILVIPLRFELLCSIMIPISIKVSLDFVKSLYAKFIDWDDDIYDLENDTPARAANTAISEDLGQVEYILTDKTGTLTENKMIFRRCCIGGTFYGNESGDALRDVELLNAVANNSPNVIKFLTVMTLCNTVIPIKSPTGPILYKAQSQDEDALVNAAANLHMVLVSKNGSNAEIHFNRRVMQYEILDILEFTSDRKRMSIVILDCQSGKFFLLSKGADEAMLPCAYSGQKTKTFVDAVDKYAQLGLRTLCLGWRELEPEEYTKWSQSFKEANSSLNDREWKVAEVCQKLEHSLEILGVSAIEDRLQDGVPETIEILRQSGINFWMLTGDKQSTAIQIALLCNLISSEPKGQLLHINGKTQDEVARSLERVLLTMRITSSEPKELAFVVDGWALEIILSRYTEAFTELAVLSKTALCCRVTPSQKAQLVKLLKSCDYRTLAIGDGGNDVRMIQQADIGVGISGREGLQAARAADYSIGKFRFLKRLILVHGRYSYNRTAFLSQYSFYKSLLICFIQILFSFLSGIAGTSLFNSVSLMAYNVFYTSIPVLTTVLDKDLSEKTVMQNPEILLYCQAGRLLNPSTFAGWFGRSLYHAIIIFLITIHAYANEKSEMEELSMVALSGSIWLQAFVVTLEMNSFTSVQLLAIWGNLIAFYVLNFFISSIPTSGMYTIMFGLCRQPSYWITLVLISGVGMGPVLALKYFRYTYRPSVINILQKAERSRGPMYTLLNLESQLRSDKDSMMVAGSTAPAKNKSSVYEPLLSDSPMASRRSLAPASSFDIFQPAHSRTSHPRNIKAN

SEQ ID NO: 59877 - protein, 63 aa, Zea Mays
MVLQNDIDLLNPPAELEKLKHKKKRLVQSPNSFFMVFLFMPFSNSAWRGVANRAEKRPNECTI

SEQ ID NO: 59878 - protein, 52 aa, Zea Mays
MVSCYAALYLKWFRLSAMFVTFGILLPVSLKISRHRRLKRKRERRLLLPLSM

SEQ ID NO: 59879 - protein, 281 aa, Zea Mays
MIPYATAAEAEGALGRTMTWAETACIAPLPLLLLEQFAPSVVLPYKLQPRVRLPPAASLSCYMDAACIFPLAVGLQFVSYPAVAKILRTRMGLPLPSVRETIAQLVVYSLVEDYLSYWMHRLLHTQWCYEKIHRVHHEFTAPTGFAMSYSHWAENVVLSIPALAGPVLVPCHVTTQWLWFSIRLIEGINTHSGYHFPFSPCRLIPFYGGAAYHDYHHYAGGRSQSNFAPLFTYCDYLYRTDKGYRYHKLKQEKLKSLAENSADKGGNYSFDEGKKNRYFCA

SEQ ID NO: 59880 - protein, 74 aa, Zea Mays
MQSPDDCAVSITSIIRHHESEYLSSLEESYLNLSDATFKDLRRKLPVTRTLFPWHNTLAVSLTRDLAKQLALGK

SEQ ID NO: 59881 - protein, 350 aa, Zea Mays
MNDGTRKRVLINAFTVRALRDTFPPARAAGIMALSVTSSYYEMTEIATRILPNIVVLTFDPNSDVRTKAFQATDQFLQIAKQHHEKLNTGDNSVAESTGVKLKPGNAGLLGWAMSSVTQKGKPFDHAPISTANANNSQASTTSTATPDTQASTLAYAPSTSTSLDQAASASARSSVDGWGELEDGNIHEENSSDKDGWDDVDPFEDKPSPSLLSNIQAAQKRPVVQPKQPVANSSKPNPLKAPKSEDDPLWGPIAAAPPKSAVKSADIKPSTSHNDEDDLWGSIAAPPKSSGKPLKPAVANSDDLWGAIAAPPPATKARPLASSGRGRGTKPAQPKLGAQRIGRTSSTGM

SEQ ID NO: 59882 - protein, 827 aa, Zea Mays
MVGAHLAAPTPRCPSLFPVSDSTHLPFPLAAGDPEPGAAHMAGRDERWGARGGPGDTHASTSRAPAGTAGESEGASPDSLRNTPSNIARLEDAIGHCAARRKYLAHTKSPSDGKDVRWYFCNLPLADKVLSSSVPRTEIVGKGDYFRFSERDSLALEASFLEREEVLLAYWWREYAECSAGPRGSLVESDDSAYLYKVEEERVGVPVKGGLYEVDLMRRHCFPVYWNGENRRVLRGHWFARKGGVDWIPLREDVSEQLELAYNCQVWHRRKFQPSGLFAARVDLQGSTLDLHALFTGEDDTWEAWLVFDTGPKLGSNTIKLRRGFSPSESASTKPSQDELRQTKEEEMDDYCSQVPVGHLVFMVHGIGQRLEKANLVDDVVDFRRVTANLAERYLTSYQRSTQRVLFIPCQWRKGLKLSGESTVEKLTLDGVKGLRVALGATVHDVLYYMSPIYCQHIIDSVSNQLNKLYMKFLKRNPGYSGKVSLYGHSLGSVLSYDILCHQESLLAPFPTEYLNMETSDRSQGAKSANEVALHDSGSTRTDMSHMDSIVPSCVLEDSLNNPETGVPRGAVVAEQNEKENRIENHQTVYTEEGTTSGVSTKDAEASHISRSAEDVHEEVLDKEKMIISLEEEVKRLKAKLDQLEQHKHLVTESTSGVEYHGGKNGNHALNFGELFTAQGSINQPYSPQIKYTKLNFKVDTFFAVGSPLGVFLSLRNVRIGIGKGRDYWKDKNIIEEMPCCRQMFNIFHPFDPVAYRVEPLVCEDYQKKRPVIVPYHRGGKRIHVGVQEFTEDISARSQAIACQLKSLKVKAVAALLALSRNDTEGW

SEQ ID NO: 59883 - protein, 59 aa, Zea Mays
MRAPHPIKERPRRLLQHRVLDLEDFAFEVFVRLIKDIKMPAPLEGQSIHGPLACDEGGK

SEQ ID NO: 59884 - protein, 723 aa, Zea Mays
MLQPSTSMNGDSLMRVPASPMSFSSNNISGSSVIDGSIMQQSPPQEQMQKRRSSSVTSQHVIDAGGALHAQKKSRTDVSQGDIMQHQLIQHLIHGQNSLHFQGQQNPQLQAFIQQHKLAQLQQRQQQHLLQPFSQMQQPQVGIPRQPQLRPPLAQTGMQLGGPVRTPIERGVCSRRILQYLFHKRHRPENNSITYWRKIVEEYFAPRARERWCVSSYENRGNSSAAAPQKALDTWRCGICNTHAGKGYEATYEILPRLCQIRFDHGVIDEYLYFDSPNEFGLPNGQMVLEHAKVVQKSVYEHLHVIHEGHLRIIFTPELKIISWEFCSRRHEEYTTRKTIAPQVNNLLQVVQKYQAVVTESGSAGISNNDAQTICNMFVTASQQLAKNLEHHTLNEHGLSKRYVRSLQISEVVNHMKDLIEFSHKNGLGPKESLNSYSKTMAKFQNMHDSRQLMAAANLANNQSNTKLMGTKEEASASATNQTPGVGAIGNNALQHATPLNSYQNMLRSSSANPVLLQQEASSVFKGPTAMHSGIQLEAARSFRGPNQVQFQHPAAIQQQQPMPQQSNFQGFGGVNPQYQHHVLNQLLQEVKNNNHVKAQQLPPDAPKASGGLAPGVAIPNVAAAGEQGQHINSNTRDHNGAVKGAAPAGTGPSNVINNTASMPPGRNNSFKSVSSSPAAATGGIAVNSKVDDSFHQLEDLDLDGLITNELMESGLFGAGQGW

SEQ ID NO: 59885 - protein, 171 aa, Zea Mays
MRGKKFTGSWEIPPIFSWLQQARTNDLQTSPLIFSSNYSEKHQALHWRTGHKNDCLQIISSAASNSVLPAVGIGFVRWFAKASNVHRLLVLDPLGIIKAYRGTMYRLQRSIRSIFIAEAKCSDDFVFSIVFSVIGSVCTYIDMIYGMASAIFVIFMTSFLIDVCDMNDRSF

SEQ ID NO: 59886 - protein, 95 aa, Zea Mays
MGRGKVVLQRIENKISRQVTFAKRRNGLLKKAYELSILCDAEVALVLFSHAGRLYQFSSSSDLLKTLERYQRHIYASADAAVPSSDEMQHRWPMP

SEQ ID NO: 59887 - protein, 922 aa, Zea Mays
MPAPASGGGGGDHLRGHAHLTNCIHLRHHHAHAHAHGASGRRRSPTGSSASASAALMRDLLALQRSRSLRDPSTRRSVDDSASNNRVAADPDDADHSRAGAIKTLLDQLTENPHPKPGRRPRRRFRRSATRRVAQPAAAPRVSVNSSSQEAVCGNRYLFGGTGGADGGVELMQQQQQVSHESHNVCGIPWNWSRIHHRGKSILDMAGRSLSCGLSDPKSTSAARRSEPATSAASCGHVNGSRSHPHFPVTARLTSSSSSDSDSLPLLVDGVRNAVGGISSSFSGELGIFSKSSELDSDLASEARSGQKSRGSHRARHRSFTQKYAPRTFKDVVGQSLVVQALSNAILKKKIGLVYVFYGPHGTGKTSCARVFAKALNCHSPEHPRPCDSCASCIAHNLGKSRSLLEIGPVGNIDLDGIVDILDNVMLSPVKSQHRVFIIDDCNTLPPDTWSVISKVVERAPRRVVFILISPNLDLPHIIVSRCQKFFFPKLKECDIISTLQWISTSEGLDVDRDALKLIASRSDGSLRDAEMTLDQLSLLGQTISMSLVQELVGLVSDDKLVDLLDLALSADTVNTVKTLRDITETGVEPLALMSQLATIITDILAGTYTLTRERVRRKFFKRPTLSKDDMEKLRQALKTLSEAEKQLRVSNDKMTWLTAALLQLAPDKQYVLPSSSPSTSLIQGLFTCPEGDIARNSVMDHSDIYAGARSLARASDLGNQYHRDANPVSGSSNNMANNYHVGRRPGEHTPDSHVLPTGATRVNEGSRYGKTDSEMIWQAVLENVQSDSLRRLLAREGRLISVSLGTAPTVQLIFNSRVNKSKAEKYRGQILQAFESVLSSTIILEIRYESKDDLAAGHAPVISAYPEDGSSNLVKLLKLDLKWIGVLNKIVALLWQTEDKRLSREKVCHHRIKKFLREEKL

SEQ ID NO: 59888 - protein, 78 aa, Zea Mays
MKDPKKNAKVICCHGQGGKVGRGPTSNFFYPYIYVEYTAKLEIKIASIWDQNCSEQPTSTVLAHNPTPRSAKTAHARP

SEQ ID NO: 59889 - protein, 51 aa, Zea Mays
MRDHQTGRMKGFGFVKYSSQAEAEKAVKAMDGKILRGRLIFVEMAKGHESK

SEQ ID NO: 59890 - protein, 407 aa, Zea Mays
MGASCSEASTEFAQGSVAKTHCPEGNTGDAQSKTLQQVSFRLLLPTYLAGGLIGKKGLIIKGIEVETGACIDVGAPVAGCKERVITICALESPDSEYHIVQSALLLIFDRMMEMETNTHSTFEKASQFLVRVLVLKNQFGCLVGLGGSIIKEMVNTTGARIQILDDTEIPACASTFELVVQITGELMNIRNALSLVFWKLRNHIFSNETDYNNSHISSSEIAESNATSQANIYSTIQYSVDNGHKVDHRSPLSYGVDSVEKSFSDLELSSSEIQKPDNGNGVRINNSDSGIQNPSDWNGIVTNNLNDGIISSDENNLVRGAEHAAITRITYETAVSGSILTLVYGDNGSNLAKLTEVSGADIIVYNPPSEGNEAMIVVSGPPDQAQSAQRLLVELILQGHPGTCLSA

SEQ ID NO: 59891 - protein, 498 aa, Zea Mays
MMVLTSVATTSFAILLLFSLPSCLHLRATPFSAEGVGACASSPYSFDTSPDTDSRSGYCTSTRTFHIMRAPSFSPSSDVPFVFPAFATFFLPNLLPPPTVATASRPTLVDAGKVKNRFRTSRGTEASAVPHSGSPPRLPERFAAQSLRIGFNPVDLSARRRHGTPEVAFDSAGAVEAGMGLGEAAGRLLAAVDWEREAYPAYDDFLALPAFVLFFPTVRFLLDRFVFKWVAMRLIHGQGHQRANNDTEEARKKIRKFKESAWKCVYFLSGELLSLSVTYNEPWFTNTRYFWVGPGEQVWPDQKIKLKLKAVYMYAAGFYTYSIFALMFWETRRSDFGVSMSHHVATVVLIVLSYVFRFARVGSIVLAIHDASDVFLEVGKMSKYSHCDWLANVSFLFFVISWVLLRLTYFPFWILRSTSYEVLLTLDKKKHNFDGPIYYYVFNSLLFSLLVLHIYWWVLIYRMLVRQIKTRNVGDDVRSDYERTSIVPHEIHRSRAMG

SEQ ID NO: 59892 - protein, 1301 aa, Zea Mays
MEAAAPDGAAQASPPPAEADRPPEPRPPPLPAAGTHDPHFLSSIIGDAAPPPPPPPLGQKRKRGRPPKRKDGAAVAAGPVVPAPAPALARAARRRQDEEEVVCFICFDGGNLVVCDRRGCPKVYHPACIKRDEAFFQSRSKWNCGWHICSSCEKAVHYMCYTCTYSLCKVCIKQGKFFSVRGTKGFCDTCYGTILLIECKDESATKVDFDDILSWEYLFKLYWLDLKGKLSLTLEELTTAKNRWNVPSTSARKEKEESSDDLYDANNDDDAGSDCSSGKRRRTNSRKKGQKRRKVNRDCSILEKKVELPLRNTESIPVEVPNERVPYPVHTKVPNGRVPMPVDTKVPNEPVSLAANTKWASPELLEFIGHMRNGDQSFISQFDVQTLLLDYIKKNNLRDPQRKSQIICDSRLHFLFRKARVAHFEMLKLLEMHFLTNETSTVTNSSQVTINLNSAHVDTNGHNDTAAKVSPDKRRRIYRKMERDTQVNLEDYAAIDMHNINLIYMRRSLMEDLVDDVKFSDKIHGGFVRIKISDVCQKQDIYRLVKVIGTHKVPEKYSIGKKMTNVALEILNLNKKEIITMDTISNHDFTEEECKRLRQSMKCDLISRLKVGDILEKAKILQYVRVNDWFENEKQRLGHLRDRASETGRRKELREYVEKLQLLNDSEERTRRIIEILELHVDSHMDPNYESAEETDEKGTVGKSVNQTRPDTTISRRISRYLSTVQNHPKKVSDSSHLPKSLSTESAICGSGARSLENSTANRTMYGAGPLSSSVVTMTNDTEPEKVWHYKDPSGNVQGPFTLLQLSNWTSYFPRDLRVWLTFESEERSLLLTEVLSKQQKDFTQAASHTSSKATLVGTGHTRNNPSVDQTNAFSPVGHSVVSSSGIPVQYNKYSVPERESVYSPDDSLSLSTSSVPPKDAYTVNSQAHCQNKHSVFIQSPGSSYGHTDLNHDGIQGGCSGESNHHHSSRALWSPTVAHVSCGRGNVESHQNQHVSWSESQHESKNGSQGGFVKDLNSRQDLSKNLPAQRIGKDVSSPLFAWSPAESRTASSQQEGSCLSSTTNPSFLDELHSSIASAKPKSCAPATPIEDRGSSSPSDMLSHEERVPICSPQSAPLASASDMCKMEEIMNQQRTLVVDTSNASVNQSPESRAFPVSSPDNQDIDREFPSPVPRSENKDIAVDSSELAPASPENITTNLPVSDTCKMEEVVSQQQVIGAVVSNSSDNHSPQSKVSPVSSNNEDTKHKYPSSTPRPENKNPAVDSLLSTSAAPENLTTTSTHDSDTCKMEVQLQDLTVRKLL

SEQ ID NO: 59893 - protein, 126 aa, Zea Mays
MLMRARSKGWRVVVFNSRGCADSPVTTPKFYSASFTGDLRQVIGHILGRYPQSNVYATGWSLGANILVRYLGEETDKCPLSGAVSLCNPFNLVIADEDFHKGFNNVYDKALARALTTIFKKDLNKI

SEQ ID NO: 59894 - protein, 89 aa, Zea Mays
MVRVQTSKGQGNAYFPLKVQAAVYSKQYMDISVPYKDHLYLKKKHKRLRYSRSRVLIQEFTFCNGYKLPSERLGLGLRELDTIELIFVR

SEQ ID NO: 59895 - protein, 104 aa, Zea Mays
MKGIAQASEGFLYLVSAVGVTGARSNVNLRVEHLLREIKKVTDKPVAVGFGVSTPEHVKQIVGWGADGVIVGSAIVKQLCEAATPEEGLERLEEYARSMKAAMP

SEQ ID NO: 59896 - protein, 741 aa, Zea Mays
MADEAEWNEAEAGIAAPGAGVAPPAPGGGEETKRKRGRPKGSLDTYKRRRRRRRTGDLVSAVPAASLGDMGHSCGCIPAPPLPPPCTVYTVRDGGVAITPQSMEDEAEGVEAESGNAGAASAARDGEETKRKRGSPEGSLNERNKDRTPKPKAKGRRRRRTDDQTLSVSAVSLGDLGLGVAAGTRSIRERRPAPNAFFDVGSDSDTEHDDDDDEEQTTIDQANHESAKTGDSVKKGGRPRKMEAGQLHTRTQISNGKSNGHTNGNPAGKKRGRGRPKKLTVEQAITRCQFSNGETNKSGAEAARSKQSRNRRISQNAKKRKRDEGKESMTKKLNKRSKMLTGENALMCHQCQRKDKPRVVRCQSCKKKRFCLPCIEQWYPNLPEDEFAVKCPYCRKNCNCKACLRMRGVEEPPKKEISKENEIRYAFHIVTMLLPWMRELRQEQLEEKEVEANIQGVSMNEIKVEQAEFDLDDRVYCDRCKTSIVDFHRSCKRCFYDLCLNCCKELRKGEIPGGEEVEYVPPEPKGRSYSFGKIHLLKDADRSKNSSNGESYNGMPAVGNSNNGLLLWKAKSNGSIPCPPKEVGGCGSTLLDLKCLFPEKMFAELEYRADKVLRSGTLAKAMVSRSDRCPCFNQSGKIRTESKSVREAASRKGSSDNFLYCPVAIGIQDDDIVHFQMHWAKGEPVVVSDVLQLTSGLSWEPMVMWRALRERSKGKAEDEQFAVWAIDCLDWCEVRSSISNV

SEQ ID NO: 59897 - protein, 298 aa, Zea Mays
MHGLPVRQETFQLAPGMPPLHSSQLSWNNAGEPEGQHIIFELVTRNNKLNDELAEMVVSNSFYEAEAGAFKLFPGILPIGPLSADGAFRKPVGHYLPEDERCVKWLDAHPDASSVVYVAFGSITIFSARQFEELAEGLELTGRPFLWVVRPDFTPGLSKAWLHEFQRRVAGRGMIVSWCSQQQVLAHRAVACFVSHCGWNSTMEGLRNGVPFLCWPYFCDQYLNRSYIVNVWRTGLAVTPDADGIVGREELRSKVEQVVGDADIKDRARVLKDEAHRCVAEGGSSNDNFKKLVNLLSE

SEQ ID NO: 59898 - protein, 201 aa, Zea Mays
MNTKGEILLEQSGVVRSNCIDCLDRTNVTQLMGALLSSESISLSDNIHDTFKKLWVEHGDELSLEYAGSYALKGDLVRYGRQTLPGLIKDGMSALSRYYLNNFHDGVRQDALDLISGYYTVSQGSSSPFHNGVDSSSYLPVASAIIVGGITATTFTLSQVGRNAQHLISSIICAGLTVGVVALVKANGKQFCSRPRLCGLI

SEQ ID NO: 59899 - protein, 432 aa, Zea Mays
MVVALVDMERAFVPPQHFIRLVQRRMERQRREDELRNRSSKKTQEAEQSTSKRAFSPQTDAEQGGGSLKSMKDKSGQQDKDAKEGSNLQVAGPAGEITAGYLLKKSAKTNGWSKRWFVLNEKSGKLGYTEKQEERHFRGVITLEECNLEEVEEEEPSKSSKDSKKANGSEKPPSLVFKITNRVAYKTVLKAHSAVLLKAESMPDKVEWVNKIKAVIQSKGGSFKGPSTEGGSMKQSNSDGALDAMARRPADPEEELRWMSQEVRGYVEAVLNSLAANVPKAIVLCQVEKAKEDMLNQLYSSISGQSNAKIEELLQEDHNAKRRREKYQKQSSLLSKLTRQLSIHDNRASVSSYSNDSTEVESPRTPSRSGEDWRSAFDSSSNGPVATSTNSESRSRSADGRSRRYENGDVSSGANSGSRRTPNRLPPAPPKY

SEQ ID NO: 59900 - protein, 711 aa, Zea Mays
MLCHLFSYLSAIAQRRPSFYGRILPVLLSLDPASSIIKLRVPGAFHALKSAFSACLKCTHSSAEPWRARLLEAQNIINQGGSIEDAANAAKNFGDTSNREESWPLMERSTDGSNKRSLAEDMNHVTEDDVHSTKRARQSIDANEHSEEANKTNFESMSVDISSSQPSSIRTGNSEAVYQLIGMFAALAAQGDRAAGSLQILSYSIASDLLAEVVMVNMQHLPISRPEVDQQQLPSTSSGDGLPLSSFSSLLGILLKGANQIDQDEVSPAKEPALVSSVADDRMILPANSPVPSSVNLPIEENSNSPTVPLCIETTEAKVTSAGGNSSIDIPESSEASHASTEPQGTQEHASTFAGPFPADNFSVGFSLAQSSETRSPSSSTLEANHSQLSSLSSQYVLPKLVVNNIDLSDEAKDLLQKEAFVRILESDKKEASGGSIARLPLLAHLGVEFPLEFDPWVILQKHILSDYANNEGHELTICILNRLYHEAEQDHDFLSSRTATSVYESFLLNIAENLRDMFPASDKSLGKLLCEIPYLPEGVLKLLESLCSPGSNERQDKDIQSGDRVTQGLSAVWNLIMLRPSNRDRCLEIALQSSTHHLEEVRMKAIRLVANKLFPMTSISKKIEDFANEKLNSVLEMTPSGDCVTTEMATPEAHKDIGLENLTASVTGMQTLMSLYFALCTKKHSLLRHVFAIYGNLPQAAKQFINKYQF

SEQ ID NO: 59901 - protein, 318 aa, Zea Mays
MVAVGGVRRKRAWRWAMRAVASAVVWTAVVQVASIAGLFRPRVVADCGGKGGGGAAAGLAALAGEDSAAARLSPPALVPKRIYKSNGYLRVTCNGGLNQMRAGICDMVTIARHLNLTLVVPELDKRSFWADPSDFGDIFDVDHFINSLRDELMIVKELPLKLQLIRTKKRLYSMSPVSWSNETYYLKRILPLARKHKVIHFDKSDARLANNGLPVQLQMLRCRVNFDALRFTPQIEALGRQLISTLQRSGQFVVLHLRYEMDMLSFSGCTHGCSTEEAEELTRMRYAYPWWKEKEIGSEAKRLQGLCPPHARGDYSSA

SEQ ID NO: 59902 - protein, 295 aa, Zea Mays
MARGQRRRRRRRPEPRARASGKGKKARYLSLSDLMVKAEVGATPPRSGCEEAGVKPEEEDARGDGQQRQVEPFAPHHHHEASTLFEALPAPSLSDILGPSPSPSPDGAGSGASGLPGADEEDLPRRALRGRERWVYCSGDSSFSPASTPPATATATTSSPSPPCSSSAASTGASARSLLLKLDYEEILAAWADRGPLYIGAGSDLQLDAAQVASGRAERVRRYKEKRRRRLFAKRIRYEVRRANAVKRPRFKGRFIKEEDDEGELRPTQPASFSLLLPSSPASSPCVSLHGKRTR

SEQ ID NO: 59903 - protein, 398 aa, Zea Mays
MHEITFSTIDKPKLLSELTSLLGELGLNIQEAHAFSTNDGYSLDVFVVVGWHDEETEDLVEAVQKEIGRIEETQAWSSSHSWSTPVEKMQIAENSAADRVEIPTDGASEWEIDVKLLKFGNKVASGSYGDLYRGTYCSQDVAIKVLKPERINADMQREFAQEVYIMRKVRHKNVVQFIGACTKPPNLCIVTEFMSGGSVYDYLHKHKGVFKLPALVGVATDVSKGMSYLHQNNIIHRDLKTANLLMDENGTVKVADFGVARVKAQSGVMTAETGTYRWMAPEVIEHKPYDHKADVFSFGILMWELLTGKIPYEYLTPLQAAVGVVQKGLRPTIPKHTHAKLSELLQKCWQQDPTQRPDFSEILETLQRIAEEVGEEHDGKHKDRTLGGFFSALRGRSH

SEQ ID NO: 59904 - protein, 568 aa, Zea Mays
MGWSNLADLSIYEGKLLGCSYHECRVGLWAADISLIGPYALGVLPKANFFAELVQSMEDNPVKPVDSTANSRPASAMAHSRSSYKIKESGIAQSRVRGSHLTPASTDKTKKDRSSTIPRRPDSSLKSSVQSTTLMRRMKLVDSPSTNTKNVERNVGQRDISLASRAVMANNSATAKKSNLTESALVKDIYTTSQAVSAPIVVPRDILEDKTVSNVRRGTGETAAVPDDFRIPVHRRKPSLSGSAADSDSSSRSVFTEPDVCSEGLSSLKFSFGLTPYHKKEEFGDVDNEGIAQIAEKMERTVSLDHSQQLNDDKSFESPCSTTETAKVKYVRGVAVPLGKTKSLVERWEKRETSSTDYSPQTGSCGDRASRNDNHPFHLAEPSTTFEKDLSTVDEAMAPVNLVRNHDEFLNAVKLRLTKLEMMRHVFEQSGIKGAIAAVAKLPDNAVQADVVSALKGKLDLFNLEFFSNFLPVLAGLLCSKTERHAMVSLEMLLDLIKIFGPVIHSALSANLGVGVDIQAEQRLQRCSRCFNHLQKIQQSLNPLILRGGQTAQLAQELSLSLQDLVVI

SEQ ID NO: 59905 - protein, 1002 aa, Zea Mays
MFVKKLVERASKKQHIGSISSLRPENVSPRLAFHYGVPADAALLAYDPVLHVLAVATRNGQIKLFGRDNTQALLQSPSPLPSRFLQFAEGQGVLLNVNTQNQIEVWDIDAKKLCYLHPAEKAITAFSVLQKSFYIYVGDSSGSVSPLKLDLAQRCLADLPYWIPFTESYGSTTSAGNDVEVVFVSPQPLSESNRVLIIFRDGVMSLWDIKASKAVSISGKTTQQQSQKEAKNVTSACWVCAKGSKIAIGYDNGDLYIWAIPEVTSTQNSSSMGGQNLPIQRLNLGYKLDKLPIVSLQWIPSDGKAGRLYINGFNDHGHLFQVLILNEESESRIVKMVLPIAESCQGMELVTGLSDPNKHRQSALALLLKSGHICLYDDSEIERYLLHSQSRSPPTLPNCSYVKLPYGDSGISVAKFYTSNPAALASLDEDYFSSATKYPCLFSMKGKGQTLTSFTNIHKTRNLYITGHLDGTISFWDASCPHLLQIFMIKQQNKDDTSTGNPITSLQFDMSSSILLSGERSGMVHIITFKKDSSDNIFSFLNAKQGDNYDVRSIKLKGAVTTMSSISKSKHFAVGTEKGIVSVINVEDATILYQEQFECRLPGGIASLQFEIYSHNGYDKDILIIAMEDSSIFVIEEETGKLLNPNPVQTDKPSKAILLQMLELSPIDTPAVSDNQDTVSKESLLLLCTENAIRLFSLGHAIQGTKKIINKKKLSSCCCFASLIHSSSNDIGLILVFSNGKLEIRSLPDLSLLKDAFLRGFVYSRNLNSSSSITCSSDGEAILINGEETYFFSTLCQDEIYRHVDSISTVYRKENSTREDSSFVVKSPKEKKKGLFGMIMKDNKGSKSKESDAIGSEQCIATTSEELASIFSSTNFAPPSEGRNSSLRDDENAELDIDDIDIDDNPQKPKGPHFPGLSKDKISKGLQTLKGKLKPKTEEKISSGNKKTEDETSVSQVDQIKMKYGYANTTNDDSTSVTKMIGNKLQENMKKLEKYRMLATVT

SEQ ID NO: 59906 - protein, 436 aa, Zea Mays
MRSMEKQLEQKNLEVKRLNNERKEALSAQFAAEATLRRIHSSQKDEESVPFDAIIAPLESDIRKYRHEIAVLQDDKKALERHLKLKEVALVEAGNILHTALERALIVEDVQNQNIELKKHMEIYHEENKLLEKANRQKVLEVEKLTQTINELEESILATGEVANVVHFYQNQATKLNEEKRTLERELARAKVYVNRVASTAANEWKDDSDKLMPVKRWLEERRLLQGEIQRLRDRITVAEKSAKIEAQLNDKLKRRLKSLEEDMRNKTSNSSTKEINKQATPKRSLSQPKQPKTMRVLPQLYSPEVVDKRRPISQPRASMVGKVLKQPNSEIEPTKKSTVVKRFDSPGRRTISSKEECPMKNQLWASKTKTDVIVGKENKVQKPNSKARLNASHSQGHVDTKVFDGNDEYGLQNSEHHEAMANERNGNSSSDESSP

SEQ ID NO: 59907 - protein, 771 aa, Zea Mays
MVFNNHTEVNRFYRRYARRVGFGVSVRRSSFSREGTCLYLELMCCKGGRPRYEPKFRKRASSTTNCPAKVRVKLWGDKLLHIELAILDHNHPVSPAMARFLNSYKQLSGPAKRRLRMGGPGTMPVEESSKMPMDKLGELEQLLFGESKHNSFVERGRLKLQPGDSEALRLFFTRMQAKNANFFNVIDLDDEGCTRNVFWADARSRAMCEYYSDVITLDTSYVASKYDMPLATFIGVNHHGQSVLMGCALLSDETAETYSWLLKSWIACMYGNLPKAIVTDYCRGIQSAVAEIIPGVRHRMCLFQIMRKAAERLGGLSEYRAINKAMHKAVYDSLTIDEFEEEWNTLITYSGLQSNDWLRSLYECRSSWVPVFIKDTFWAGMSTTQRNETITPFFDGYVDLKTTLKQFLVKYEMALQSKYEKEAQADFETFHKQRPPVSKFYMEEQLSKVYTHNMFKKFQDEIEAIMYCHVSLISVDGPVSTFNVKECIFFEDGKRTMSKIFAVTYKVDEKNISCICGGFQFSGILCRHSLSMLKFQLVREIPQHYILDRWKKDFRQLHVMRRPPSDLVPNNRMDRYDYLSIRCLQLVDSAVLSDKYRLALRLVRETEKFLLNSNTHDDTQPRIKSRVPKVNKPNIVTGQTMVGAATGNGNDGLKGPEATAVTQVPQSQKGGAEKGIVPTGYIGVPANLQQFVGNQTAFRPSIVYMVPSGVDPHAFGNVMMPVMYQQMFQVPPKPNETVQDTSANGKSKRPRGQKLTETSQQANGTPASASG

SEQ ID NO: 59908 - protein, 690 aa, Zea Mays
MYTVLGDIFKKGDTASNIGNAILYECICCISSIFPNPKMLVAAAETTSKFLKSDSHNLKYMGIDALGRLIKINPDIAEEHQLAVIDCLEDPDDTLKRKTFELLYKMTKSTNVEVIVDRMIEYMINITDHHYKTEIASRCVELAEQFAPSNQWFIQTMNRVFEHAGDLVNIRVAHNLMRLIAEGFGDEDEGADSQLRSSAVDSYVRIVGEPKLPSSFLQIICWVLGEYGTADGKHSASYIIGKLCDVAEAHLTDDTVKAYAISAILKIFAFEIALGRRIDLLPECQTLVDELLASHSTDLQQRAYELHALLGLGKNDVESVMPADASCEDIEVDRNLSFLDSYVQQALENGASPYIPESERSGLTSVGSYRSQEQQETSAHTLRFEAYEMPKPSLPLATSQTSMSTPNTDLVPVSEPGYYKEDHQTSRPQPPSDAVSGEFGVKLRLDGVQKKWGRSTYSSSTPSSSMSSQQTTNGASHSDGGGPSSQPRESSYGSKRQQGTEVSAEKQRLAASLFGSAAARADRKAQASRKTGKDSPSTEKVATTNVAAQSVKEQVIPAAAPPPDLLDLGDETVPSSRPSADPFSQLVGLLGPASAAPALSGTPATTTSTSKAPDLMSIFSDDVPTGVTSSGSTDPTPGDAISVSSHKGATAVAPKKGSSLQDALQKDSTARQVGVTPTGNNPNLFKDLLG

SEQ ID NO: 59909 - protein, 102 aa, Zea Mays
MVGDTIRKVDREVLVDMEQIQYSEKYYDDTYEYRHVVLPPEVAKLLPRNILLSEWRLVGVQQSRGWVHYAIHRPEPHIMLFRRPINYQQQQEEAAAAHVLPK

SEQ ID NO: 59910 - protein, 126 aa, Zea Mays
MHGHTLVVCVVSAHTIIDKSSMHIGRTCIAKCLVGYNTDTVLITPATIRSLTEAKGEESVEQISKMRQMCSCWCFSTIATSLLKHGLYRVTRTPWNGVVLLWCGVGASKRGENHRRFLSLLFWRRF

SEQ ID NO: 59911 - protein, 246 aa, Zea Mays
MSHFGRTGPPDIRDTFSLLVLNISFRTTADDLFPLFERCGKVVDVFIPRDRRTGDSRGFAFVRYKYADEAQKAIDRLDGRNVDGRNIMVQFANHKGRVKEGVEKSRDRSRSRSPRPRDRDDRRRSRSRSRSRERHVHDRDRDYRRRSRSRSRSMSSSPDHKSHRRARDDVKRKSRSKSRSRSRSRSRSYHSSSPARRSASPPKSPPPQRSPTPEKHANGKDSPLSRSVSPSPKRASSRSPGSDSKE

SEQ ID NO: 59912 - protein, 659 aa, Zea Mays
MQDALDHLQSRWNSVQQANKQNMAADASDKSESSLEILVDSGDYQSDGLLDDIIENAFNTEDCMDTNFWENNYHHLFSSSETDDGFELNAATSHVFPISTPEGNVTQISLEQNVCPDQIIDSYCVPEFHQSLSTLCDEEHKCTSGDNSHRTLESEDAGWYNNVPLTIVENHVLKKKNEQVLQHKVSSVCSLNPDEYCNLKGKVHIHDIDVKWRMYAGDDWLLPQKDLTSLTCTDGRNRSSSLEFTVRGLNIQVDMYPNGDVSISRLSVAAEDITLCDQSIHAPWKLVLGCYNSKDYPRESCSSAFRLELESVRPEPQAPLEDYRLHLEILPLQLHLDQEQLNFLINFFKNDSCNNDPHLHCENDTVDVKSTSNGSNMVVDEALLPFFQKFDVKPLILHINYIPRQFDPIALSKGNYAELLNILPWKGIDLKLKHVSAMGIYGWNSIGDTVAAEWLEDISKNQVHKLLKGLPPIRSLVAVGSGTRKLVSLPIKSYKKDRKLLKGMQRGAVAFIRSVTIEAVGLGVHLAAGAHDMLVKTECALTTVPPPLASCEVKRTKHNIRANQPESAQQGMKQAYESLTDGFGRTSSAIIGNPIKVYNRGAGVGSVLATAICGAPAAAVAPISASARALHYALLGLRNSLDPEHKKESMYKYQGPSQA

SEQ ID NO: 59913 - protein, 564 aa, Zea Mays
MEPFSLKSCLLPHSIKDQNTGSWTRFVNDCGTELIRLQIREHKAKNSMAVVRELVGVLKSTKKQIQLAEFKENKWTLKDSNLPISHGTDGSLLDLKGDNHLIKLYRGRKLEYERKCCSAHSEDVSAVTAVKFCAEHPYGKAVALLDTEAQLIMVNEDWLLLPWISISVLFMDGDGGTKLGGGAMVQKGTVFGSDTSMVLETQTVGAGSVASNLAQCGTCSAVFGGDDKEMANCKVEHASSGASRTVVASGENGHTETAGCGGGCGSNCGPMMAEDPKAGNAKSGGCGSGCGGGCGGAGGCGTMANEGQSRSGGVGTLLSSNAMGGEGQQAHSAGCGSGCGGGCGSGMVIEGSKVNNVNAMSGGCGSGCGGGCGSGMVIEGSKANNAMSGGCGSGCGGGCGSGMLIEGSKANNAMSGGCGSGCGGGCGALFNASTAAGEGLHNKSAGCGGGGCGSGCGGGGGCGSGMAIEGFKANHAKSGGCGSGCGGGGCGTLFSSSAAASQGQSRSGGCGSGCGGGGCGTGSMVAEGSNGGNAKSGGCGGGCGGGGGCGGGGCGGGCGAVFNA

SEQ ID NO: 59914 - protein, 229 aa, Zea Mays
MSWRFPLFGSQQQQSDPNFQDIPMQSWYPTSVVGLSSSPATPTSSSSSPHQRASNNLQFSSRGQPSPAEAAEIIAHLKDKSIEELQRLLKEKEAYNAFFNTFDQVKTQNNVRGELRKETLQLARENLEKEQRILELGNQCTIIRTTQLAAAQDRLTDLERQKDDIMRSYSPAALLDKLQTSMAKLDEESEELQQKFLAKDIDFPHLVQKYKKLRTAYHKQALLHLAGQT

SEQ ID NO: 59915 - protein, 230 aa, Zea Mays
MELYLDSWLQAALNPGIEELTLWLFHTRRIYEFPCSLLSDGVRNSLRYLKLRCCALRPTVELAPMRSLTSLHLSFVSIKWDGLKRLLSNSLALEELELVCCDKIVCLKIPSALQRLNSLNIFGCSALKVLESKAPNLSSLSLLHFGGRLVFSRVKTLQMKKLITESTVYDARTRLPSTMPNLETLVINSFDWVCMYVCVCVCVCIYIYIYIYIYIYIYIYIYIYIYIYTI

SEQ ID NO: 59916 - protein, 406 aa, Zea Mays
MLLLQPSAVPAPALRGRPRPRRRLVPPPLASAPASIVVSSDEDAFTRCSGYLFEEGAATESELPTAYDLPGIAAVYRRRPLLVLRRSLQIGTSFGRWFALRYLDRVNERADDMFELRAAQLRRILLELGPAFVKIAQAVSSRPDVVPPAYLDELSLLQDRIAPFSNDVAFNIIEKELGLPLDMVFSEITPEPVAAASLGQVYQARLRSSGKIVAVKVQRPGVQAAISLDIYILRFLASLARKAAKLNTDLPAVLDEWASSLFREMDYREEARNGLKFRELFGKFRDVSVPEMYLEQTRRRVLIMEWIEGEKLSEVRDQYLVEVGVYCSLSQLLEYGFYHADPHPGNLLRTVDGKLAYLDFGMMGEFRQELRDGFIEACLHLVNRDFDALAKDFVTLGKCNLSLQIL

SEQ ID NO: 59917 - protein, 89 aa, Zea Mays
MATVAAAIPHRRGHGVVVPLRAVDWVSYVSIPGEEQVPQDEAHGGCCDEFVRGLGRRLPVNFGVVGPLFPYNVIIYLFCIELVLYSKDV

SEQ ID NO: 59918 - protein, 846 aa, Zea Mays
MPSDKAKAPKKKGEEDPGIPPAPCEGEISHEPHRQRSLNGRTTGPTRRSTKGNWTPEEDAILSRAVQTYQGKNWKKIAESFPDRTDVQCLHRWQKVLNPELVKGPWSKEEDEIIVQMVNKYGPKKWSAIAQALPGRIGKQCRERWHNHLNPAINKEAWTQEEEITLIHAHRMYGNKWAELTKFLPGRTDNAIKNHWNSSVKKKVDSYISSGLLSQVPCLSLIECPAQCDSLSAMDQQNNGGTDCNDQNTSVVLSSDLQVNVDANKKEAHDSHSSLCQGVCYPSTETVGSVLPDDLEMDMDEGSGNSIFADDQTLCSTSNQEQSMVPFVVAQEMPVSVLSSVSSAEQKRHLISDAKSLKSELWKDVCLQTLITGDTDDPDASSRLNNPDSSKMDTNFLKEAYPLHTPNPSSVIETVYEPMALVTISPPFICSDGLSFAPENRSKPGEMSDCEAEMVTCSNNFFGNAEQSAKLASSDDRPEAFTMTESTTNCGGEQLTDAKEPVASTAKERLSKDIETMPDKKKGEGALFYEPPRFPGLDVPFISCDLVTSADLQEFSPLGIRQWMRSTMNVPTPLRLWGSPTHDESPDALKTAAESFPCTSSIMKKRQRSLLSPTPDERIEKKSGIAKGVTDISYMITATCSMNATNDEDIVTESAVCAKQPSLKHLDKKLEFSDINKENSDGASEQAKDAQNTQLVDEQHSSPNVVNPNTDLQDNIQPVQILVEQSSNNLISSDHGAKPSCKEVISSKSKPTKLLVEKSSPCINVDYEYVNLLADTPGIKRGLESPSAWKSPWYIDMHMHFQAEARVLDFDESPAPARTADKKLGSCHRRSVSSPILPSPNLRSFR

SEQ ID NO: 59919 - protein, 1282 aa, Zea Mays
MTFLISRALADPNVDVRGRMINAGILIIDRHGKENVPLLFPIFESYLNKRASDEETYDLVREGVVIFTGALAKHLSKDDPKVHSVIEKLLDVLNTPSEAVQRAVSDCLSPLMVSKQEEGQTLVSRLLDRMMKCEKYGERRGAAFGLAGVVKGFGISSLKKYGIAATLQKNLEDRMSAKSREGALLGFECLCEKLGKLFEPYVIQMLPFLLVSFSDQVLAVREAAECAARAMMSQLTGPGVKLVLPSLLKGLEDKAWRTKQSSVQLLGAMAYCAPQQLSQCLPKIVPKLTEVLTDTHPKVQASGQTALQEVGSVIKNPEISALVPILLSALMDPNAHTKHSLDILLQTTFINSIDAPSLALLVPIVHRGLRERGVETKKKAAQIVGNMSSLVTEPKDMIPYISLLLPEVKKVLVDPIPEVRAVAARALGSLISGMGEEIFPDLVPWLLDTLKSDNSNVERSGAAQGLSEVLAALGQDYFDHILPDIIRNCSHQKASVRDGHLTLFRYLPRSLGGVFQNYLQAVLPAILDGLADENESVRDAALSAGHVFVEHYATTSLPLLLPAIEDGIFSDNWRIRQSSVELLGDLLFKVAGTSGKAILEGGSDDEGASTEAQGRAIIEVLGREKRNEVLAAIYMVRSDVSLTVRQAALHVWKTIVANTPRTLKEIMPVLMDTLISSLASSSSERRQVAGRSLGELVRKLGERVLPSIIPILSQGLKDPSASRRQGVCIGLSEVMGSAGKHQLLSFMDELIPTIRTALCDSTQEVRESAGLAFSTLYKSAGLQAIDEIVPTLLRALEDDDTSATALDGLKQILSVRTAAVLPHILPKLVQPPLSSFNAHALGALAEVAGPGLNSHIRTVLPALILAMDDEDVDVKNSARKAAETVLLVIDEEGVETLIPELLRGITDSQASMRRGSAYLIGFLFKNTKLYLADEASDMMSTLIILLSDTDKATVSAALEAFSRVVASVPKEQLPTHIKLVRDAVSTARDKERRRRKGVPILLPGLCLSKALQPFLPIFQQGLISGSAETKEQAAEGLGELIDVTSEKTLKEVVVPITGPLIRILGDRFPWQVKSAILSTLTIIIMKGGIALKPFLPQLQTTFVKCLQDNNKSVRTRAAAALGKLSALSTRVDPLVSDLLSMLQSGDESVKESVLSALKGVIKHAGKSVSAPIRSRGCALLEDLLQAEADDIRSCAAKVIGTLSQYMDDREIPDLVQILLEVGTSSDWCTRHGALLALSSISMHSPSKLCDLASFPSLVDLLKDSLKDDKFPVREVATRTLEG

SEQ ID NO: 59920 - protein, 84 aa, Zea Mays
MSSPAVRSTCSLPRNFQHNGRGVPMMTTHHQSSTTIGIRGTGQEVGAKAIEVVWVDGDGGHGDEHGYPRPGVDVEACVEIRECI

SEQ ID NO: 59921 - protein, 475 aa, Zea Mays
MGLEPLDRQFPCLLQAQAKQHRTAAPPLPFLFLRILLPFRRPSLFSLVATKTTDADADALRQVPGSVGSFAGEEHPPGDPVLFWCGFIAEVLLWDFPVAKMIRLPMYAAFSLLATASAAYYAFSSREQFYPAMVSLIQKREASVAIFFSFEYTILATSTLSTFVKYIFYVSDMLMEGQWERKAVYTFYLELISDLVHLSLYMLFFIAIFLNYGVPLHLIRELYETFRSFRIRIADYIRYRKITSNMNERFPEATSEELDASDATCIICREEMTTAKKLLCGHLFHVHCLRSWLERQHTCPTCRAPIVPADNGRAASSRQHGAQAGVQPGTATPSSEGAPGENMSRRQAKLEAAAAAASLYGRSFVYPPANTLNRSGSPQPTSSAPQSEASSSNHQSQKDQETQLQNSSDGLVPLPFSADGVVGSGTSTRDLENSLQKAQENFIKSQIEMLQIQLQMVQRGAAGLSSSENTEHTED

SEQ ID NO: 59922 - protein, 714 aa, Zea Mays
MPAALVPYRQDELKILRGDDNPGPYKEHDRVYRYDYYNDLGEPDKGEDHARPVLGGSQEHPYPRRCRTGRRPTETDPNSESRLFLLNLNIYVPRDERFGHLKMSDFLGYSLKAIIEAVLPTLGTFVDDTPKEFDSFEDILGLYEPGPEAPNNPLVAEVRKRIPSEFLRSILPNGSHDHPLKMPLPNIIRSDVLKKAPEFKFGWRTDEEFARETLAGVNPVLIKRLTEFPAKSTLDPSQYGDHTSKITEAHIQHNMEGLSVQNALKKNRLFILDHHDHFMPYLNKINELEGNFIYASRTLLFLKDDGTLKPLAVELSLPHPDGQQHGAVSKVYTPAHSGAEGHVWQLAKAYACVNDSAWHQLISHWLNTHAVIEPFVIATNRQLSVVHPVHKLLSPHYRDTLNINALARQTLINADGIFERTVFPAKYALGMSSDVYKSWNFNEQALPADLVKRGVAVPDQSSPYGVRLLIKDYPYAVDGLVIWWAIERWVKEYLDVYYPNDGELQRDVELQAWWKEVREEAHGDLKDRDWWPRMDAVQRLARACTTVIWVASALHAAVNFGQYPYAGYLPNRPTVSRRPMPEPGSDDYKKLEAGQKEADAVFIRTITSQFQTILGISLIEILSKHSSDEVYLGQRDEPERWTSDARALDAFRRFGSRLVEIEKRIRTMNDSPTLKNRKGPVEMPYMLLYPNTSDVTGEKGEGLTAMGIPNSISI

SEQ ID NO: 59923 - protein, 240 aa, Zea Mays
MSREDGSHELQSECGHHGHILALYTQTRGDFIVVGDLMKSISLLVYKHEESAIEERARDYNANWMTAVEMLDDEVYVGAENGYNLFTVRKNSDAATDDERAKLEVVGEYHLGEFVNRFRHGSLVMRLPDSEIGKIPTVIFGTINGVIGIIASLPHDHYTFLEKFQSTLVKYIKGVGNMSHEQWRSFHNDKKTAEARNFLDGDLIESFLDLSRSKMEVVSKAMGVSVEDLSKIVEELTRLH

SEQ ID NO: 59924 - protein, 206 aa, Zea Mays
MATAPYASSLFLASSPISTAPRIRAGPCPPSAQPSLRLRPRPSPAAAAAVQAEHQPALTAAPKPPALPFRVGHGFDLHRLEPDLPLIIGGINIPHDRGCEAHSDDIGQIFPDSDPRWKGADSSVFMREAVKLMHEAGYELGNLDATLILQKPKISPFKETIRSNLCDLLGADPSVVNLKAKTHEKVDSLGENRSIAAHTVVLLMRK

SEQ ID NO: 59925 - protein, 196 aa, Zea Mays
MTSLTEYYVSLQKIYQAKAEFDCLALEHHVKEILKRIGRDPDSISRAYIKTFCKNSRKLRVSRYRSFEEEFSSPFVPEIQRYFTDEDYSYATNFYILLRAVDRLAANYSRLPGIFDRLKTVAASVASEMGLNGASLSEDLITEMCRFGGAEIHPVAAFVGGVASQEVIKLVTKQFVPLPGTFIFNGIDLKSQVLML

SEQ ID NO: 59926 - protein, 158 aa, Zea Mays
MASDAPAEQPATQQKPTRVSLSYEEISKLFSLPIAEAASILGVCTSVLKRICRTHGIVRWPYRKLVSGKAGDDTKGPDSDKANELLEVSKIAKQKAPSASGPSVVSSSTSQGAAKSQQGNSKAGQFSVSPPTATQTMCLPKMEAMNPMNQQHMSHQRA

SEQ ID NO: 59927 - protein, 1066 aa, Zea Mays
MPPRVQPANMYIPWCSSWIVFVDVRADYGICFATVVPNLLPYAISHLGKKMEGTINACIAGFALLSYVLGLLVSQPQIPLTMNVIFPKISGESAYSLMALLGANIMAHNFYIHSSVVQGQKKSSAVGLGALFHDHLFSILFIFTGIFMVNYVLMNSAAAESTNTLLITFQDVVELMNQIFVNPLAPTIFLVVLLFSSHIISLTSAIGSQVISHHLFGINLPLSGHRLLLKVFAIVPTLYWAKVAGAEGIYQLLIICQIIQAMLLPSSVVPLFRVASSRSIMGAHRVSLHLEILVFLAFLLMLFSNIIFVAEMLFGDSGWMNNLKGYTGSPVVLPYTVLVLVALISVAFSLYLAVTPLRSGSHEAESHEWSVHSQRELLNTSQEREDVKVDNVTYEEDQRSDVVPSPRDVPDSHPELALDYIDTSDTAVESDHDSQQSTAYASTAPETCSSPSFTREESKSVVAVNWPEPLEKVPTSTVMEESTVENVVSRITTERDVLVETDVVSGKDKEDIRTLESEKSIVDSTPYVSDDGPPSLTFSRGKGSDAGNGSGSLSRLSGLGRAARRQLAATLDEFWGHLFDYHGKLTQEASTKKFGILLGIDLRTPSTSVRTDKQAAEILKSPLVRDSMRGAAFLSSSVDMMSPKNETSNLELAYGLQRGPGMGLSSWSQGMQLPNTQLQSSSNSLLEQSARLNSNFSSSYSDNNQFYQPATIHGYQLTSYLKQMNASPSLYSSMPLDPQRLPKSSVSAVPNYADSMMHARNHNLLASLGGTTTQLPATSRVGSMMPERSYYDPSSVDGNENAGSPAYSKKYHSSPDMSGIIAASRAALLNEAKLGAAIGPQSYLSRLAAERSQYASSTARPAAPLAFDELSPPKLQSDIFSAQSSMRPSARSLWAKQPFEQLFGMSSAELSKGDFNLPGRSGGVAKDDFSYKESETKLLQSLRLCIMKLLKLEGSGWLFKQNGGCDEDLIDRVAAAEKLLMQGTAENQLLLHGGDLQQHSSDQAGIQYMRTLPNCGEDCVWRASLVVSFGVWCVRRVLDMSLVESRPELWGKYTYVLNRLQGWTII

SEQ ID NO: 59928 - protein, 135 aa, Zea Mays
MLLRQSSDLQGQEIVNTNFGGDTGDAFEAHEWRYVRTFNGIRIFEDISITNPKVGKVILLKSVGVVSANPDTVFEVVLDLDKHKRYEWDMLTADLELVERIDGYYDVVYGTYEPKYLNWWKCQKDFCFLLDNGFV

SEQ ID NO: 59929 - protein, 2204 aa, Zea Mays
MKERSSLCESAADGNWGLKYKRKRSKLTVSPSNENEATSPTSDSRMSHGSTKKKLKHDNNISPSAKKIRGHDGYFFECVECDLGGNLLCCDSCPRVYHLECLNPPLKRAPPGKWQCPRCRPKKVSLKLLGNADVDTSKREKSTRTYASTASDSPPSHTKVSFKTRNSTQDKTGLNEQGKESSGGTMNGGETSTKNNEVEKKKTLILHLKKRSTKELSENTKPSKSEFVELSEEKIVKHGSVLKLKKHPHRMDLSPSKSKTRRQSSQRESKRSGTKKIKYSMSDDDSVSSSEPSTSLDNSESPPKRKHSDGKAPSSSTKKGKKKVKFVEKKHSEEQGVVGDKMMTTQEDQQVDRILGCRLQMSQINPPSHASLEQFESANLQVDGMVLPHASAGIPNRPHDGTESSRNGTIEDICADESANHSGHNLEMRKDTDSKSHEKESHKREQVKKILSVCSGDETNIMKDDQVVRENVSASKKGEDETSDLPAEKDDTILPVTRACTMIRTNQDHTDESKQHGKIEQITNKDYNDAGYEFLIKWVGKSNIHNSWVSESEVKILAKRKLENYKAKYGMSLINICKEQWCQPQRVIGLRASVDEVEEVLIKWCGLPYDECTWERSDEPTLMKYSHLVTQFKNFECQALDKDVVKDYANARNRHELNVLVDQPKELQGGMLFPHQLEALNWLRKCWYKSKNVILADEMGLGKTVSACAFLSSLYCEFKINLPCLVLVPLSTMPNWMAEFSSWAPHLNVVEYHGSARSRSIIRQYEWHAGDASQIGKTKRSYKFNVLLTTYEMVLVDAAYLRSVSWEVLIVDEGHRLKNSSSKLFSLLNSFSFQHRVLLTGTPLQNNIGEMYNLLNFLQPTSFPSLSSFEEKFNDLTTAEKVEELKKLVAPHMLRRLKKDAMQNIPPKIERMVPVELTSIQAEYYRAMLTKNYQVLRNIGKGGAHQSLLNIVMQLRKVCNHPYLIPGTEPESGSPEFLHEMRIKASAKLTLLHLMLKILHKEGHRVLIFSQMTKLLDILEDYLTLEFGPKTFERVDGSVSVAERQAAIVRFNQDKTRFVFLLSTRSCGLGINLATADTVIIYDSDFNPHADIQAMNRAHRIGQSNRLLVYRLVVRASVEERILQLAKKKLMLDQLFVNKSESQKEVEDIIRWGTEELFGNSDSVDGKDNSEVPGPVADVEFKHRRKTGGLGDVYEDKCIGGSTKLVWDENAILKLLDRSNLPSSMAESTDGDLDNDMLGTVKSIDWNDELNDDPGTNEDTAPIDNDGSEQASESKQGATNRSEENEWDKLLRVRWEQYQIEEEACLGRGKRLRKAVSYRETFATLPNEALSEDSDEGDEPKREYTAAGLALKEKYGKLRARQKERIAQRHIIKNYADDNLEEFMTPYDSIANEPAENPLVIVEDLNSSQLSGAKRFSDSTGEMRQSSKKSKRYSEIPQDLYAKIPGNTASFKHHSKATDVFNPGTPNHLLPVLGLCAPNADQVNSYKNSICAPSIKERKRASGDIVKQLSTPADHSNVHRNEAQSASDKAIFPGASEEALRRISNMIPDSYFPFSHIPPISGKGVDPVENPGPSIASFQGNLGLPNFSLEDNAPLKHIKPIPDIFPSLSLGAHKDYIRSSVPELPDGSLLPNFMADITGTSKQKSFMSGLLPGLGLSPGQPIHSAMPDNHKKVLDNIMMRAQYASNKFLKKRSKLDYWSEDELDALWIGVRRHGRGNWDAMLRDPKLKFLNNRTSEELALRWILEEQKIIDEPMSTSTRRSNSAAFPGISDAMMSRALNESNFSKMRMEQPKLQSHLTDIQLGSSDILSTFPHVDAASYINSGEGGPSQIPWQDFKHRSSYAGDFPAGAFDKLEKPDVGPIPPFMPNPFMTDSIGSLPINRKNNSSIPHSEIRSSSRENILSGVSDGQINLLHEMQRRRRVRSGKEPIEMNLNHIDHSNLQLDNTSDLGGLKPNKLPHWLQEAVRAPSSKPPERELPATVSAIAQSVCLLLGEQEPSIPPFLIPGTPLSRPKDPRINSKKKLRKAQQSNSHVEHSKIGSGEGDCVTTPAPPSIEASPALPVDCDDGEPSLNLKSASLSSSAGSKGLDELPPTFKEANQTVDGSEAVAAKSDAPEIGCQVPGSSPLHDKGSESSGSPVKDTPDAGIRLPGSDNSVMAFSALPLVDEAPGTSSRAADTPVPCDGNESKEDVPLDNAESTRKLEPNG

SEQ ID NO: 59930 - protein, 212 aa, Zea Mays
MKHLIKLFPNKVTLEAPQAEMELSRWNQMLNRDIEVLKGNANISKIRSFLTRLGLECTDPEAILVTDRILTNECIDKIIGFALSHQLKNCTNPDPPLGSVQFALSSGSLKHGVDMLKSIQSGSKSSTKRKSLKDIATENEFEKSLLADVTPPHEIGVTFEDIGALESVKDTLKELVMLPLQRPELFNRGQLMKPCKGILLFGPPGTGKTNAG

SEQ ID NO: 59931 - protein, 429 aa, Zea Mays
MLTVMEHGEKLSGMAHLRELQNTLIQHGSSTHFSPQSKTQGTGALWNLIQLVGEKARRNMVLLMDRDNAEVFYSRVSDIEDLFYCLSHELQYIISREEHPSVQMQRALELANACITIVQAASHYKKDHKEWYPSPEGLITWNSQPVLRSGIWNLASLIMELLGESGAADMSMKSSLWSQLEGLTDILLEAYMCLLTAQFERGQEHGVLVQEYCERRDELLRSLYNLAKQIVEAKYQESRNGADKPDLKESILREVISPILATAKRHEGYQTLWQICYDLDDSGLLRSLMHDSVGPHGGFSFFVFKELVNRGDYSNLLRLGEEFQEELASFLKERSDLLWVHEICLNQFSSASDTLHTYALRRSPDGDASFTTSRKPLSFAERRRLLYLSKIAATAGKDIDYEVKVARIEADIRILKLQKIEGSMQSECD

SEQ ID NO: 59932 - protein, 188 aa, Zea Mays
MCAAQLLCPAADTSAALLCSTSSEGEIPAMLVVQLPPPEVAGEDESNSRGVFVEFMTKVAQFNELVESGERLLGRFREELEYFRRPQISKEADVMNQILKSNCTVRMRSYIETGCRVHCQNISNINQLSSCENGLKDHIKKVKTLLEELECLVENVYGITLTASLSALEVSDSQCLDSMLSTDRCSVE

SEQ ID NO: 59933 - protein, 409 aa, Zea Mays
MSFERVWLYSDLTTRGYRQKVKDIVQGALFPEVGVDKRTGSAGGTGGQVVVRDIELFSYCESCLLPFSIQCHVGYVPSGGRVVGLSKLSRVSDVFAKRLQNPQRLANEICGALHASIQPAGVAVALQCWHIPLPENLECKTLEGWIRTSHSSRSGVFEGESSTFWSDFLALVKLRGIDVEAKDRTVSIPWCPLRSHEVPLSNGLCKKNSTNGMVSAVTSMLLSLGEDPLRKELLGTPQRYVQWLMKFKACNLLDVKLNGFTLSNVSLYERTGGGTTDHGAIRSELHLPFCAQCEHHLLPFYGVVHIGYFGNGSGEGIDRSHFQALVHFYGCKLQVQERMTRQIAEAVYSVSHNGAMVVVEANHICMISRGIEKIRSNTATIAVLGQFLADPSAKACFLQNVLDSVGSAV

SEQ ID NO: 59934 - protein, 165 aa, Zea Mays
MCSICSWPASCRGKPLGYKVDDTKLKRAGLDYWPYVVVKIHDSWDHFCDYFMKQEGDKRLLAFTKRGTHIHSDFSYRPGDWLVFGSETKGLPQQALEDCCREGLGGGTLRIPMVETYVRCLNLSVSVGVALYEAARQLNYEQLQYQPDELPEEAQELFPAEDIYA

SEQ ID NO: 59935 - protein, 308 aa, Zea Mays
MGMNNKEKKKGMNRARPRSMAMAVGVAMAALPRRARARAGGPGLERRRRHAAGSPELLVPAEVEAPGAHHALLLGREPALEEAFERRLLLGAEEEGVAGHEVHGRDVEADGLHHVPRQLPEGEPHEPGRLDHQVRQPAPQLPPHPRRRRAVDLRLLRLHGPQLLLPRGVDLRGGGGGGVPHGDRVLDCLHDHVGPEEDGLSEHDDGSGLVERARDGGARVRAGGVAAEAQEVGVRHGAVEVDPRECDADPEVPDPVGQGHEAVGRHGGAERRLLLQEPPEPERRRRRRRRRREALRHGLSSARPPLLL

SEQ ID NO: 59936 - protein, 204 aa, Zea Mays
MSNIGKSTNILWHNCLIGQSDRQKLLGQKGCVVWITGLSGSGKSTLACALSRELHCRGHLTYVLDGDNLRHGLNRDLSFKAEDRAENIRRVGEVAKLFADAGVICIASLISPYRRDRDACRALLPHSNFIEVFIDLPLKICEARDPKGLYKLARTGKIKGFTGIDDPYEPPINVIKMKDGECPSPKAMAKQVLCYLEENGYLQA

SEQ ID NO: 59937 - protein, 590 aa, Zea Mays
MDALKSTDWNTRKAASLALSSIAVSSGYLVTSFRTSCLRSLERSKFDKVKPVRDTIIHAIQLWKAIPGSHTPEPSEAGSSTKENYFGDHHDARSIHDGGSRDTSFRRTDHGPSVSVISGSSLSSAKRRSPLSINKVAINNAANLQRMKTGDWRVEVSVPKQSMIPLVNNDEKGSSKACSLKDTKRNAYESVDVDSKFDYDIVDDKQECSSVSEVASRSFETKHVTTAQECTEDCDSAEVTEQCPRGRESKSIGSTITDVTTHDTHSCCLNTMNELALVRKQLQEMERKQANFFDLLQEFMASSAENMSVLNLKVHNLENAADKTVYTITQSESRYHLPGSKHFKNQSVSSLPRLSTSTPRSSMDVNYKPPPISELKHEKWMRDLPSRGSNMCCKEGADFRKDHVRSKVRKLGPVSLEGNLGRCDPSSARSRTSGVKGTYPVSFTSSCEQSGLRNALCTSNQPGEFQDTDGMEPAYMEALNCGDYDDLIDLMDRTGPVLEKLSCETTNELLRVIAEQFLNKKFFDLALPWLQQEFLSALEEAATGGSMEPALRIAIAQLGFKLSKAFEVGPCRKISARMCRENETIMTNAM

SEQ ID NO: 59938 - protein, 448 aa, Zea Mays
MTAVQVMVATVRCDEIANEKFGCITSDTEWLDVESAVQSGPVPGFGKKLGNIVDVHLQEYDKEAVYFDEAVRKGKRQHLESRILNLVQPAFQKMLTHLRVKALEKFKTGLNSSLESGKGFAVSARDNTECSLKEFEQGCAVFSHDKDSIPRVWTGKEDVRAIAKEARSAALKLLSVMAAIRWDDEPDRIESILTSTLLEGSVVSKIASAASADPLASTTWEEIAPKHTMITPSQCKSLWKQFKAETEFTITQAVSTQQAHRRGNSKLPPPWAIVAIAILGFNEIMVLIRNPIYLFLLFVGYLMVKALAMQLDVSREFQNGVVPGIISVSVKLLPAIQNLVNKVAAEQQAEHQQQHPHPHPHTQAPGPPQPQMQPPPLLLSPRSPMSELRRLHMPRSPRSPRKVASPAPSSSSSSSAVSSPRHVGEDQKPRPGAVGAPENEATVADSIV

SEQ ID NO: 59939 - protein, 85 aa, Zea Mays
MPPAAFHQRRELLSYEQLCCLDDVNFANAVIFGNKSCYCYQTLNLVLVTVFNLKIQKYSSITWNHSFSWVPNASNASCLIKLILQ

SEQ ID NO: 59940 - protein, 923 aa, Zea Mays
MIAMVSAVEELSWLTSKELGEMLRESDNFVLQSKIEDGGPKQVLVDMEKVVPSLPLHLLAVCLELGQGPDLTYVLRGIRFLHSLSDLASRHTRLEQVLLDDVKLSEQVMDLIFFLLSILAEQKENNNVGASPLVHASLVAGSLHLLTNYFSSQWHELVHILLAHPKVDIFMDVAFDSLHEDVRLLSIRLSSMGFGFFPVGSLESRLAHFICQQCEASLQFLLLLCQQKLFRDRILKNKELSRNGGILSLSHTILKLVVPECLKQSTDLVASISRLKAKILSILLQLCEAESVSYLDEVATNPNNMRLGQTLALEVLNLLKISFGRKINITSDSHDKGKIYPMGSVLISALRLVDVFSDDSNFRSFFLTNTVPFLIQILAAPHDEFVSSWCAVNLPTIEEDASLDYDPFGASEVALLASDNMLTEAKANYSCPFRPSVPSMAYAQTRTSCVVKIIANLHVFIPNICEEQERDLFLQNFQKHLASGSPKLSADLPASSDFKATKVCRNLGFLSDYAKTLVPNLLNGEDLVLLSDFADKLQSWCKSQVAVKVVQNDIPPESMDAMCPVQQLLPTRTSTPASKMNNLPKDAQNMEVSTPVPPINPEGNDEDETPKNTVSRNGGFLQNAVGQDLVHLGVARTTSGGPSAVASGVSTGHQHNRMDLDPASSSVDNFKTPELTKENGLEEDGKGESSMYDERQPKRRKRTLMNNEQIDELEKALVDEPEMHKNPVLLQSWSEKLSLQGPEITASQLKNWLNNRKAKLARIAKERAENADKPSTSHPGESSESAGEDNYLPPAGVMTVLSKGGSLLSPDCTEQTSQAELSPNTTMMVRPFTRSFSLEPGRLVSLVDSDGKEVGRGKIFQAPGKSTTESRVCVVDVTELRTEKWRELPHPSEAFGWTFQEAEARNGGIIRVSWDAVRLFPVA

SEQ ID NO: 59941 - protein, 50 aa, Zea Mays
MPSAFRTTTATLASSAPTLVGLRSFEQEGIALWPSSLPPAYVGLSNCCAC

SEQ ID NO: 59942 - protein, 52 aa, Zea Mays
MENLNLSYTKVCTIPHDLKGSKATISALCTTVSEVTAIQLNHNTLTCMLSLG

SEQ ID NO: 59943 - protein, 178 aa, Zea Mays
MRQCYGTTARRKPCCGMNSAKLYHYRGRNKEAKGYRHKVVKFWDLLSLVYNKDQANGEGAKTTAESSKEMAKENNTRGKDAPYSVSSSSSLKRQRSDDSFNSIWCDKFDMLTSALKDDGPKLPSSVEVLTALQEVEGFDEDTELELYDILTSNARKFESMMALPMERRKRWLMMQLRK

SEQ ID NO: 59944 - protein, 459 aa, Zea Mays
MWKRLLETTKQVVSSKQAIPYAAVTPKPATPAAAPSASKRGAPVAAPKLSTLKSPSYRRRAAAGPATTVTQASLLRLKQAAASKKTNLPSSPPLNDAHALDEDDPPEALTKALMFVIDAPEEVECTTSPEALPEGSEDVGEVARGNKILDFEWFQAEPSRDPLMLWRREVAREKKKHYIFKNVESHHYTNLMRICANKLGMESTIEFLGNLGRETGVKEFNSMIKVCLGKAKACRDIDSAVEYIYRAYHLFNTMKDKGFTIEKDIYDPFLLYLMDTGMFEEFEVFSAFFKEANPKSFSRIAYYEMLLCIRVQDEEKIQELCHSVEDYDEKVHYDLAESYMLAFAESGRKEDLVALLDLVDLSKVSGSKYITNIFKSLGKLELENYVEKLLERMMSKGCADHDISSLILEYTANIPNIMVEDMLVAFHKWHEKFEVAPSIDAYDKIVSICCDSSKVASQF

SEQ ID NO: 59945 - protein, 250 aa, Zea Mays
MSMAEEGSEAEEGSEAEALEKDGSKASSPSGPASRLVSSNAAGVGSLEVGAATDTSNASRQGLDLGKKGPGAMSMAEEGSEAEEGSEAEALEKDGSKASSPSGPASRLVSSNAAGVGSLEVGAAADTSNASRQGLDLGKKGPGAMSMAEEGSEAEEGSEAEALEKDGSKASSPSGPSGLEDEELQVQDAVASGSKRSKDSAAAATRSANVSSPSVVHSHPAILPAPAQQIPEVKQADTTHMHSMPAARFT

SEQ ID NO: 59946 - protein, 538 aa, Zea Mays
MADVDMADLPQTPRSTAGDDDLSLLDGEGDLAAAILARLGGSPREDFQHLCATAAAMAQAVSDQGVPATPVAYFAAAAAALAPLARAGDAGADRHVAGALLAFLSAALPALPAAVVRARGREVADDVMRVLDFPSTPDSGVRAGLRCLAHLISAGDRANWEAVEPLYTVILRLSTDHRLKVRKQSHSCLHDVLLSFQRQTILIPASEAITRSFERFLLLAGGSSAVNTGVSEEGPKGAKEVLYILNALICCLPLMASKPSNTILKYFKPLLDLHQPILIRSLLDILHAVCESPTVQLKSDVLLDLLCSLGLSVSSERKSGDEMASIARLLHVGTKKIYKQNRDICVVKLPLIFTSLGDILSSEFEEARFSSLEGFKGLIDNCIDETLVSQGIAQMKARHQGLKSDPTIIDKICAILEGLLDVRYSDVWDRSFHVISVAFDKLEFSADLLPEAVRNLADMQNLSDDDFSFRKQLDACLGSAVAAMGPKNILEILQIQSISDENEWILPILEKHIVGASLQFFLRDILSMVGAIEKNIPK

SEQ ID NO: 59947 - protein, 273 aa, Zea Mays
MAAAEASRTSEARRDAVFGRWVVFSPARSRRPTDLKSHNPTNPSPGPGADAPPKPSCPFCAGRESECAPQIFRVPPDGSLPWRIRVIQNLYPALRRDVDPPPVPEAEGDVSSDEPGERAVPGFGFHDVVIETPRHDVRLWDLDAEGVRDVLLAYAERVRQLGEHPAVQYVQVFKNHGASAGASMAHSHSQMLGTPFVPPSVTTRLNCMKEIFDRSGNCSLCEIRPKDILISETPNFSAIVPFAASYPFEIWIIPRQHISYFHEIDQDKVRGQA

SEQ ID NO: 59948 - protein, 538 aa, Zea Mays
MQIRLSPSMRSITISTSHGLLDLMRFKVAARHFSYRTVFHTVLILAFLLPFVFILTAVMTLEGFNKCSSLDCLGRRLGPRLLGRGNDGSMRLVRDLYVMLDEVNSEEAPLNLKVPETFDEFIWDMKNNDYDLRSFAFKLKATMESMDKELRSSRLSEQLNKHYAAIAIPKGLYCLSLRLTDEYSSNALARKQLPPPELVPSLSDNSYYHFVLASDNILAASVVVRSTVRSSLKPERIVFHVITDKKTYPAMHSWFALNSLSPAIVEVKGVHQFDWLTKENVPVLEAIETQRTARDRYHGSHRPRTSASDNPRVFAAKLQAGSPTYTNVLNHIRIYLPELFPSLNKVVFLDDDVVVQHDLSPLWDIDLAGKVNGAVETCIGGDSRVMSKRFRNYFNFSHPLIAKNFDPSECAWAYGMNIFDLKAWRKTTIKDQYHHWVKENLKSNFTLWRLGTLPPGLIAFKGHVHPIDPSWHLLGLGYQEKTDVSSVEQAAVIHYNGQSKPWLEIGFKHLQPFWTKYVNYSNEFIRNCHIMEPQFRLS

SEQ ID NO: 59949 - protein, 204 aa, Zea Mays
MALSWSSALRLAVAAVLLVAVVVALFTLPIEKILKDFLVWIKENLGPWGPLVLALAYIPLTVLAVPASILTLGGGYLFGLPVGFVADSIGAAIGATAAFLLGRTIGRSYVLSKCKDYPKFQAVAIAIQRSGFKIVLLLRLVPLLPFNMLNYLLSVTPVGVGEYMLASWLGMMPITLALVYVGTTLKDLSDVTHGWSEISTTRRN

SEQ ID NO: 59950 - protein, 138 aa, Zea Mays
MMTSSACYYLCRSLVRAPPLKSRSAVRCPSAAPPGASGATSTSKTQDPVENQKLCAYLVEKAVNRLPPGAENILGIFDLRGFRVENGDLQFLKFLMDVFYYYYPKRLGQVLFVDAPFVFQPMWQVVKPLLKSYASLIL

SEQ ID NO: 59951 - protein, 615 aa, Zea Mays
MSMAPDHPFDAFVAAARGAITHLHLPVIHIPGSNSSPNPDSKQHHEPEVDCLLHLHVVVTNFFHKPLRSFARCFRPKRRAGKHSPPLYQEPSNGATPQQQLELLLCIAFDAFAHNLHALEDACKHKGEEFAVATRQLEQFVVFRKVIDGKRADFDGFLSNLGFAKVGPPPPPASIMGGASPVPAPAPVSNQEDGAVIGNGERVDIASGTQQQAQKLPARLLNIPLSNVERLRSTLSAVSLTELIELVPQLVSRSSTSADAHPDKKKLFSVQDFFRYAEIEGKRFFEELDRDGDGQVTLEDLEIATRKRRLPRRYARELFRRTRSNFFSKSIGWKQFLSLMEQKEATILRAYTTLCLSKSGTLHKNQILTSLKGAGLPANEDNAAAMLRYLNADSEGSISYGHFRNFMLLLPSERLEDDPRNIWFEAATVVAVSPPIEISTGSVLKSALAGGLASALSTSLLHPIDSMKTRVQASTLSFPELISKLPQIGLRGLYRGSIPAILGQFSSHGLRTGIFEASKLVLINVAPTLPEIQVQSIASFCSTVLGTAVRIPCEVLKQRLQAGIFDNVGEAIVGTMRRDGPKGFFRGTGATLCREVPFYVAGMCLYAEAKKVSSF

SEQ ID NO: 59952 - protein, 849 aa, Zea Mays
MEGAAAVGGATVLGPAGARLSSRLELLDKEWNLIMFQAERNLDLFEPFLAFRRALLKILGCEEHLVKHLFQSASALRKGLRFSLAAAALYELKELCFHRDESTMTNTYLLARLEDAKLLRAQGQHDMAISLGKYILQKLSDKKNLSDVYRLVGKWLAETRSSNSRTIIEDYLRPSIDLSEFEKSTDKRYMSRQCRTHFHLAHYTYSLFRSYEERLSSNEWQAALRLRKYKTRELEILIKRLRSSSKGVKTDYSVKIQELQKQLALDREEAEKIQDDHDNFLNLALQGYQRSIVVGGKYDLQVVFRLVSLWFSLFSRDQVVKAMLKTTKEVQTYKFIPLVYQIASRLGSTKDAQGSFNFQIALASLLKKMAVDHPYHTIFQLLALANGDRVKDKQRSRSSFVVDMEKKLAAENLLKELSSCHGPLICQMKQMVEIYIKLAELETKKEDTNKKIPLPREARSIGQLELVPVVTATVPIDPSCRYEEGSFPHFTGLADSIMIMNGINAPKVIECFGSDGNKYRQLAKSGNDDLRQDAVMEQFFSLVNTFLQNHRDTSKRRLKIRTYKVVPFTPSAGVVEWVNGTVPLGDYLIGSTRSGGAHGRYGIGDWTYLQCREYLMSEKDKRRAFLKICSNFRPVMHHFFLERFLLPADWFQSRLAYTRSVAASSMVGYIVGLGDRHSMNILIDQDTAEVVHIDLGVAFEQGLMLKTPERVPFRLTRDIIDGMGVTGVEGVFRRCCEKTLCVMRANKEALLTIIEVFVHDPLYKWALSPLKALQRQKETVDTDSCLDDSQEPYDGNKDAARAILRVKQKLDGYEDGEMRSVQGQVQQLIQDAVDVDRLCQMFPGWGPWL

SEQ ID NO: 59953 - protein, 880 aa, Zea Mays
MDRSINFRGIAGSAGNIMQGMGKFVFGNEGLDSKEDSYVERYLDRISNGTIPDDRRSAMTELQSLVAESRLAQMSFGAMGFPILLNIFKEDREDVELVRGALETFVSALTPIEMSQGPKTEVQPASVNSDLLSRETENISLLLSLLSEEDFYVRYYTIQLLTALLTNSLKRLQEAILLIPRGITVLMDMLMDREVIRNEALLLLTYLTRDAEEIQKIVVFEGVFEKIFSIIREEGYSDGGVVVQDCLELLNNLIRHNASNQMLLKETMGFDPLISILKIRRGSAFNFTQQKTVNLLAALNTVELLLMVGPSGEAGKDANKNANQTALAQKNILDHLLLLGVESQWAPVALRCMALRCIGNLVLRNPQNLDSLARKQVGEEPHVQPALNAILSIILRTSIAQEFVAADYVFKCFCERNPNGQALLASTIAPHPNQGDIHEPASDMPFGSVLLQALVSSDVNGDMEACCRASSVLSHIIKDNLQSKDRVLQIQLETSTASLGRTEPVLHRIVTCLSIAASMEGENDQNNQLEEPYIQPFILRLLIIWLVDCSNAVNCLLESAVHLNFIIELASNKRYAACVRGLAAVVLGACILYNASREKGRDAFAVADAISQKIGLTTYFLRFDELRKSLAHPLSEQHHRKELSRSSANSMSDFQEIEEDETNKGDQHPVLSEIFDSQFVNLLTKLEADIRENIMDIFSRTKTATAVLPTELEQKNGEVDEEYIKRLKSFVEKQCNEMQDLLARNAMLAEELLRTGGGTTTDTSQKPSSGRERVQIEALRQELEGAKRQIGALKSEKSQIEAEANNQRNLSVKLESDLKSLSEAYNSIEQANYRLDAEEQTKVEKLSTRLAELGEDVDTLLQGIGDDTAIPDDDDEDDEE

SEQ ID NO: 59954 - protein, 493 aa, Zea Mays
MTCATRSPGFLREAELRLLRCTLPSLPSSPPPPASPPPAHPLGPAAASAIAAVEAGDYEAALATAAPHFFPAFAPSRPPGSAAQFYADLGAAARAFLLVDGDGAAAGEGFDCRCAVVLSAAVAALLAFTQQNVTGPPRKFPTFPFSMSSFDERCYSNLGDTWDAWASDNLASFGSHVHGKFSLLQFIVFARLLFTSVQSLDLSDCWSVSWWLFRISMLQQNILDELSSSLFDQVQVYKNKMLDHFGELEKVSTYWDCLLSDGEGSYFVSAAFLEAGIVEYKYGRVDASRLHLNSAQEACGLHLSLTGILGFRTIYQVDAKSQMVLVAKTNKSGPDEGQVTEPTVAQNDNAALKNARSFVPVEDDEFCDILRMPRLVQDGSNSASEDATNPSAKISLSAIQQAAVLAQCLYVSRRSRVDEMSGWEMAPYIESIDSQDESYFVVRSLCDILRVRWESTRSRTKQRALLMMENLFHYIFSFPITGVFAVPGFSLEL

SEQ ID NO: 59955 - protein, 499 aa, Zea Mays
MVAVIAPNVPAVYEAHFGVPMSGAVVNCVNIRLNAETIAFLLEHSVAEVVMVDQEFCTLAEESLKIIGKKKTSAFRRPPILIVIGDPTCDPKSLQHALGKGAIEYEEFLKTGDPEFSWKPPKDEWQSIALGYTSGTTSSPKGVVLHHRGAYLMALSVAIVWGMPEGAVYLWTLPMFHCNGWCYTWALAAFCGTSICLRQVSTKAIYEGITKQGVTHFCAAPVVLNNLINAPASETFLPLPRVVSVNVAGAAPTPSLLGALSIRGFRVTHTYGLSETYGPSTVCAWKPEWDELPLEERSRLHCRQGVRYIAMEGLDVVDPKTMAPVPADGKSYGEIVLRGNAVMKGYLKNPRANAEAFAGGWYHSGDLGVKHPDGYVEVRDRMKDVIISGGENISSLEVEKVLCAHPAVLEVSVVARADERWGESPCAFVTLKDGAAADGSDEAALANDIMRFCRERMPGYWVPKSVIFGPLPKTATGKIKKHELRARAKELGPVKKSRM

SEQ ID NO: 59956 - protein, 239 aa, Zea Mays
MAEQTQPQGEGGASPKHESLMEKLADKLHVGGGKADSSSSSDSDSDERPRPSAPPADELKQPSFSDAAATAAAEAKAKVFRLFGREQPIHKALGGGKPADVFLWRNKNISAGVLGGATAIWILFELLGYHLLTFVCHGLIFALGVLFLWSNASSFIHKAPPKIPEVIIPEDLVVNIALSTRYEINRAFANLRQIALGRDLKKFLMYLSCTRSTRIRLTRMARRGGLKLRSSMPCSMRRF

SEQ ID NO: 59957 - protein, 672 aa, Zea Mays
MMRAELRPERRRPILFRAQPITAHQTTSFLWSTRNAHVAYQTRPHLPHPDATTACALLAAAMLPYSGDHQRSPPPQPPPRAAFSSSLSPSAAPFPAADPVGPGPGPGRDLPTAPSVYTAGGDWGALSWMEPPASYMAPAATPPGYKAVEKEESTHKRGEDPSQCYPGVEGNMLNMSSESSSSNQEDEEELLQSVIQNLTAASSKRSKVEQKNDDGLSNSSQMKFKDINYVRKHFWRSMHEDSEQENADSEFKATVSQVLTNHQEDKVLDNTEVPQASIYRNLWIEAEASACKLKYELQHALLKLETAKGLNDTIKAPDSLEDSKGSNSYIFSNKPQNHGKGTVSCAAAFQGHGGDSRDKQSPVVSRSIFNGVDADVFARFEVLQSRIDNINSLSEIDCGEQKEASKRPYAVEDTVMARLKVLKSRPDNITSLSQGSTKHQLDGSTNSADNVDDTVIARLGILESHPNNEALLGQESSKRQLDARTNREDGIDAAVMARLRILKSRPDNETSMGDANKEQQDACGEQLNGDDLGIVSNGAISNTLSEKCSKFTHSDDHLGEKNSVGVPDTFGDGNSAREKKEVGGSADVATPMRCKGTSDGVSVGSAVHGEDNLGENHVWLQTAGDSHVCTEGSQEAHPISSPVDQYGGSPTEWEHVLKENFFHPGKLANSDP

SEQ ID NO: 59958 - protein, 645 aa, Zea Mays
MNNVSAMWAKVDTSDVRAEEVDPETKRKYASYLLHYLLPCLTQLNKDQMEEREAEAKIRGLQLSELIVEKAVSWNDERVFCNNCKTSIFDLHRSCSNCSYELCISCCKELRGNFLKINCQKGLVPEHKSRGIDYMHGGDCKPPNLENDRETGLSSYQSKSIKWEADPGGTIYCPPSELDGCGNHVLELKQIFETDRLIKLEMEALRLSNQIEPSDISSIDICECSCSANNVSSRKAATRENSTDNNIYCPISDNGGPDDLKHFQKHWVKGEPVIVQGVLSEMSDLRWEPEKMWAEVHDANTSSEMKSVKTTDCMSCCEVEISAKDFFNGYYHGRMYHNLWPEMLKLKDWPTSDHFENILPSHGKTYINSLPFQPYTNLKSGLLNVSALLPGDVLKLDMGPKSYIAYGYAEELIRGDSVTKLHCDLSDAVNVLMHTAKVVPSEEQKEGIRDLKIRHAEQDKKECLGNSSIDGNKTSMEHAHISSVSCEDGGGALWDIFRREDVGKLKEYLTKHSKEFRHMYCCPVEKIFNPVHDETFYLTNKHKRKLKEEYGIEPWTFVQRLGDAVFIPAGCPHQVRNLKSCTKIALDFVSPENIQQCLSLTEDFRRLPVGHRAKEDKLEVKKMIVYAVEHALAILKEPCTPRESA

SEQ ID NO: 59959 - protein, 875 aa, Zea Mays
MAAPLAPLTAAAVLRLGSRGLRHRILLASLRPCSSATPPHRSALPAAARRAPPPPRRFAHTLAASAATAISEGQADLVPGSTTSTKGRIYHETYGCQMNINDMEIVLSIMKNEGYDEIVPDPESAEIIFINTCAIRDNAEQKVWQRLNYFWFLKREWKANVAEGRAKSMRPPKIAVLGCMAERLKEKILDSDKMVDVVCGPDAYRDLPRLLQEVDYGHKGMNTLLSLEETYADITPVRISDNSITAFVSIMRGCNNMCSFCIVPFTRGRERSRPVSSIVREVGELWKVGVKEVMLLGQNVNSYNDTSEVEELEPGKNWQLSEGFSSMCKVKNMGLRFADLLDRLSLEYPEMRFRFTSPHPKDFPDELLYLMRDRYNICNLIHLPAQTGSTAALERMRRGYTREAYLELVHKIRDVIPDVGLSSDFITGRSRQLQGLANAMVKLWEKSSIAKIALKRGVQLTTSERMAEDIKKLTGGVMLSRNNEFIVFYRGKDFLSSELAEVLLERERLAKSLQDEEEARRKAASYFSSAETYAQPTVAGTLGETLEANSKYGTKHDENHADKMARTIEAARHADLVRKLEWKLSLAQKKMEKAERVLGKVETALRPTEDSRPPETITDEERFMFRKLGLRMKAFLLLGRRGVFDGTIENMHLHWKYRELVKILVKAKSFADVKRIALSLEAESGGILVSVDKVSKGYAIVVFRGKNYRRPSSLRPRNLLSKRKALARSIELQRHQALSRHFAKLNRKVERLKAELVQMEDVKEQGDEELYAKLDAAYSSDDEDMEDEDDEAYLKRFDNEVAGATADDDGSDDYTSAADEADYPDSDDEAGDCSEDEGEDDEDEAAAGVSDAGFHGEVVGFSSDTDRRNHDVNEY

SEQ ID NO: 59960 - protein, 957 aa, Zea Mays
MDANVVQRCLEAGGRDFLFHHTSSPPSPTSASAAASSSILQSLPLHVSFDRGYYLLVKAIQELRARKDGHVVTVGIGGPTGSGKTSLAEKVASVLGCVVIVSMEDYRTAPGVDDGISDVNAVDFDALARNLQDLVKGKDTMVPLVDFQEKKRTGWRELRISSSGVVIVDGAYALHSTLRSLLDIRVAVVGGVHFSLLSKVQHDIGDSCSLDYLIDSIFPLFRKHIEPDLHHAQIRIDNSFVCSFREPYYKLKCKNESSDGKKLYSFEQNKVETENFIEMYLRPPFASEEMKIDDWIKVRQCGIRYYLSLGDQRIVDKYFIIRPKAEFEVGRTTLGGLLALGYNVVVSFKRTCTSVNIDQLLIAAETIDTLNETFLVLKGPSRKIVAAEASKLGIKGPWITKSYLEMILESKGVPRLNTPPPVSSKLLTESQEKKIAAPKPIRVSAENITNLDDLMQPWTRSPPKKLEQEHVLAKWQFISDSSSRSNIQLAPLPDSYDLDRGLLLSVQAIQALLENRGYPIIVGIGGPSGSGKTSLAQKMANIIGCEVVSLESYYKPEQVRDYKYDDYSSLDIALLTENIMDIKKRHKAEVPCFDFENFSRKGFKELQVSEESGVVIFEGVYTLHPAIRKFLDLWIAVVGGVHSHLIARIQRDKNRAGFSISQTEIMTTVFPLFQQYIEPHLVHAHLKIQNDFDPVLSPESSLFVLKSKKQVSCQDILKVLDASKVCSSVQNFTDVYLRLPGIPSNAQLTEGECIRVRICEGRFALLIREPIREGNFIIQPKVDFDISASTVAGLLKLGYQAVAYIEASAVIYQDGKILIEVDHLQGVSTPYLQIKGTNKEIVTSAGSALCLDGSYTTKSYLQIILESLPADGNVSIGIHNQQAARLQELVEFIQSQGGSFNSDLSSPIRETSSTDSVIDDMQSRIRKLERWNTINMVLWTILLSALVGYSLYQKKRH

SEQ ID NO: 59961 - protein, 310 aa, Zea Mays
MKIIDFGLSDFIRPDERLNDIVGSAYYVAPEVLHRSYSTEADMWSIGVITYILLCGSRPFWARTESGIFRSVLRADPNFDDSPWQSVSPEAKDFVKRLLNKDYRKRMTAAQALSHPWLRDEHRQIPLDMLVFKLVKAYLRSTPLKRAALKALSRAITEDELIYIRAQYNLLEPDSGDGRICIDNFRMALLQNCTDAMKESRTLEILNALEPLAYRRMDFEEFRAATISPYQLEAVPRWEEIASTAFEYFEQEGNRAITIEELAQEMNLSAAAYSIVRDWIRPLDGKLSFVGYTKFLHGLTMRSGNTRRHH

SEQ ID NO: 59962 - protein, 1171 aa, Zea Mays
MLVELLRREKNAGIKPDEDLDVFMKTSLVAEYIMKILGLDVCADTIVGDEMIKGISGGQKKRLTTGELLVGSARVLFMDEISTGLDSATTYQIIKYLRNSTHALDGTTIISLLQPAPETYELFDDVILIAEGQIVYQGPREYAVDFFGAMGFRCPERKNVADFLQEVLSKKDQQQYWCHYDYPYQFVSVSKFAEAFKTFIIGKRLHQELTVPYNRHHNHPAALCTSSYGVKRLELLKSNYQWQRLLMKRNSFIYVFKFIQLLLVALITMTVFFRSTMHHDSVDDGIIYLGALYFAIVMILFNGFTEVSMLVTKLPVLYKHRDLHFYPPWAYTLPSWLLSIPTSLYESGMWVLVTYYVVGYDPQFTRFLGQFLLLFFLHQTSLALFRVMASLGRNMIVANTFGSFALLVVMILGGFIITKESIPVWWIWGYWVSPMMYAQNAISVNEFHGHSWNKQFANQNITMGEAILTGYGLFKEKYWFWIGVGALFGYAIILNILFTMFLTLLNPIGNLQAVVAKDQVRHRDSRRKNDRVALELRSYLHSNSLSVLPPAGNLKEQKGMVLPFQPLSMCFRNINYYVDVPVELKKQGVAEDRLQLLVDVTGAFRPGILTALVGVSGAGKTTLMDVLAGRKTGGLIEGSITISGYPKNQETFTRISGYCEQNDVHSPCLTVIESLLYSACLRLPSHVDADTQRAFVEEVMELVELNPLSGALVGLPGVNGLSTEQRKRLTIAVELVANPSIVFMDEPTSGLDARSAAIVMRTVRNIVNTGRTIVCTIHQPSIDIFESFDELLFMKRGGQLIYAGPLGAKSRNLVDFFEAIPGVPKIRDGYNPAAWMLEVTSTQMEQILGVDFAEYYRQSKLFQQTREIVEALSRPSSESKELTFATKYAQPFCAQYMACLWKHNLSYWRNPQYTAVRFFYTVIISLMFGTICWKFGSRRGTQHDIFNAMGAMYAAVLFIGITNATSVQPVISIERFVSYRERAAGMYSALPFAFSLVTVEFPYILVQSLIYGSIFYSLGSFEWTAAKFLWYLFFMYFTLLYFTFYGMMTTAITPNHTIAPIIAAPFYTLWNLFCGFMIPRKRIPVWWRWYYWANPVSWTLYGLLTSQFGDLDQPLLMADGVTSTTVVAFLEEHFGFRHDFLGAVAAMVAGFCVLFAVVFALAIKYLNFQRR

SEQ ID NO: 59963 - protein, 313 aa, Zea Mays
MSPFEHGEVFVLDDGGEVDLDLGNYERFIDVTLTRDNNITTGKIYQSVIEKERRGDYLGKTVQVIPHVTDEIKQWIQSVSSVPVDGQTRPADVCVIELGGTVGDIESMPFIEALRQLSFSLGKENFCLIHVSLVPVLGVVGEQKTKPTQHSVRELRALGLTPDLLACRSAQPLIGSVKEKLSQFCHVPVENILNIHDVPNLWHVPLILRNQKAHEAIIKQLNLARSAGPPELRDWTDMAESYDNLNNSVKVALVGKYTNLTDSYLSVVKALLHASVACSLKPSIQWIAASDLEDATAISAPDAHAEAWETLKG

SEQ ID NO: 59964 - protein, 301 aa, Zea Mays
MVKPSSDVSKSMCLDLSVKDKSVKPPRRHSIQTKPGASPRPIPSGTVTPVSGVRSKRSDGQGRFDTPTSEVSMSMSRRKFSTLSSISYWMTQIRLAEAASKHSVSLGFFKLALESECEPLDRMREELKSYVVRHCLATELEDPVKDILQVYDIVDDFEKLKISAEPSEQQKKSEKAARNVSNVSANCNLKPRSLNSGATESKEAGKKEGIQKAKPDARVRGSNNRNPVKCTTAKEVVAKNTGKKTKKEAKGQEEVSNGDSDASSALPDQESVDVVKEITHEDKENMDENEMAMDVAIAQEF

SEQ ID NO: 59965 - protein, 655 aa, Zea Mays
MPFGHTRLDVRRPPQSSYLCCSTTTVAVFVALCLVAVWMASSMLVTPAEFPPFQSKVRPLRPHDSPPATGSLTSADQGDGITTHDDPPPATQQLPPVTDSMDGENQQQELFTTERGPWSTKAEQSNKDAKEQTLTSSSPLSFRWALCNVDAGADYIPCLDNVAAIKKLRSTKHYEHRERHCPEKSPTCLVPLPEGYRNPIRWPKSRDQIWYNNVPHTKLVEYKGHQNWVKVSGEYLTFPGGGTQFKHGALRYIDFIQEAKKDVAWGKRSRVVLDVGCGVASFGGYLFDRDVITMSFAPKDEHEAQVQFALERGIPAISAVMGTKRLPFPSRVFDVVHCARCRVPWHIEGGKLLLELDRLLRPGGYFVWSATPVYQKLPEDVEIWQVKDRVNRVGIAIYRKPTDNSCYEARSETNPPLCGEYDDPDAAWNISLGACMHKLPVDPTVRGSQWPELWPLRLEKPPYWLRGSEAGVYGKPAPEDFQADYEHWKRVVSNSYMNGLGIDWSTVRNVMDMKAVYAGFAAALRDLKVWVMNVVPIDSPDTLPIIYERGLFGLYHDWCESFSTYPRTYDLVHANHLFSKVKKRCELLPVIVEVDRVLRPQGRLIVRDNIETTSEVENILKSLHWEVRMSYFQEKEGLLLVQKTTWRPNETEAKL

SEQ ID NO: 59966 - protein, 406 aa, Zea Mays
MNDLMSVGLHRLWKDRLISKLNPFPAMKHLDVAGGTGDVAFRVLERIKSVSHRAMQGTLTETEEDTHIYVCDINPNMLNVGKKRAAERGYSEEHCLSWIQGDAEALSFEDGSMDGYTIAFGIRNVTHIEKALSEAYRVLKRGGRFLCLELSHVDVPVFKEIYDVYSFSVIPTIGELVAGDRQSYQYLVESIRRFPNQVGDDKIIIPRNSVVEVNQSGLLMETLIDITPKDPLPAPSVGPLDPDCTKEGLILCDKERMKGQQGVSLDALVGIFTRLGRDMEEIGVSKSYKLAEKVASIMEEAQPLLTRIEDLAEEMQPLLSEVRDSDLLKDVETIAKGLADASVDLRRLKSSMLTPENTDLIKQSIFTLIFTLKNIESISSDISGFTGDETTRQNIKLLIKSLSRLL

SEQ ID NO: 59967 - protein, 109 aa, Zea Mays
MVMSLSCDKAVWNAVMNNEAVQDFRRSLHDGKENDRNENTGGPAEVLKWILESAQAKIVEFLENVQKIINMLIHTPEDDDNPDGYSDAVKVSFMLTVFVFIVVAIARIK

SEQ ID NO: 59968 - protein, 55 aa, Zea Mays
MYLRPLLYPAFCVMLLLFIATGGLGNCLVELYIERDMSACRLIQLKVQNYAISLF

SEQ ID NO: 59969 - protein, 501 aa, Zea Mays
MGVCSTRWRRISWHKLAIQLELAPVVIPYTKLRHSKTGTVAMASAGENCNASQFYITLRDDVDYLDDKHTVFGMVAEGFDTLTKINEAYVDDNGRPFKDIRIKHTYVLDDPFDDPPQLAELIPENSPTGKPRDEVAEERLEDTWVPLDQTVAPEELEEMIRSKEAHTNAVILESLADIPDAEVKPPDNVLFVCKLNPVTQDEDLYTIFSRFGTVTSAEIIRDYKTGDSLCYAFIEFDTKEACERAYFKMDNCLIDDRRIHVDFSQSVSKLWGQFRQSKRNAKKDGCFKCGAPDHLARDCDQDGEQKNKGPSYVLKDENTQRGGNHRRSYDLVFDEDEADCSEERDHENGHRRKNRRIDDRKSELPPRGGRDRNSHERTHSDEKGSKHGKDDRNRGDRKHDDYHSYSRSGDRSSGRNDDRDYSKRHDRSRSGEEEKGYRRRDKSDGERHHRDDGYDRRRRDEDSHRKRSPDSKHRREDGGHHVRNQQSDDRSYKERRHRDGR

SEQ ID NO: 59970 - protein, 258 aa, Zea Mays
MHRGRNRSRKPVETQLAPQSQPPAAAAVSAAPPLAAAAAATTNGSGFQNHSLYPAIAGSTGGGGGVGGSGNISSPFSSSMGGSSQLHMDSAASYSYAALGGGTAKDLRYNAYGIRSLADEHNQLIAEAIDSSIESQWRLPSSSFPLSSYPHLGALGDLGGQNSTVSSLPKMEKQQPPSSFLGNDTGAGMAMGSASAKQEGQTLRHFFDEWPKARDSWPGLSDETASLASFPPATQLSMSIPMASSDFSVASSQSPNDD

SEQ ID NO: 59971 - protein, 250 aa, Zea Mays
MTRDDLFNINAGIVRTLCEGIAKCCPNAIVNVISNPVNSTVPIAAEVFKKAGTYDPKRLLGVTTLDVVRANTFVGEVLGLDPREVNVPVIGGHAGITILPLLSQVNPSCSFTSEEVKYLTSRIQNGGTEVVEAKAGAGSATLSMAYAAAKFADACLRGLRGDAGIIECSYVASQVTELPFFASKVRLGRCGIEEILPLGPLNEFERQRKSWRRVSRRASLSSSEAGDGQPNIEIDVACFCFLRTHLVISL

SEQ ID NO: 59972 - protein, 165 aa, Zea Mays
MPLTGWNPLAPVLQTVAAFSRHILIAPDAGLDDHRLRPLLALSLSPPSPAPPQPEVRKEKKDAKEAPLTKEEVGRATWMLLHTIAAQFPDEPTRQQRRDAKELMHIISRLYPCKECADHFKEVLKANPVQAGSQADFSQWLCYVHNVVNRRIIGKVRSQGQKEEN

SEQ ID NO: 59973 - protein, 197 aa, Zea Mays
MTEPSSSYSLPSKKRQRSPDDNEHSLDRGRICLSLDDNLTFNDTMIALQLMRTQFPKLDKVLAQPFILQSQLYSSVKDRTQVDRDLESFKKDKVLRIFKLSSGQDDHAIMFMDDYLKQVSFAIKRSGGKDQDGSEVFEWFERYVVPSKLDVSITQLELCSLLSQGGDVTDKHITLLMNAGLLEVASVDIFYHLSWLC

SEQ ID NO: 59974 - protein, 467 aa, Zea Mays
MEGTGGNKLGVVPRAIQELFSRASEDGSCAYSFSMSMLEVYLGSLRDLLAAPRQPLFRRTECKAAACSSSLSILATKGGAVEVEGLTDVSTPDLKNASQWYRRGRRARSTAWTNVNDASSRSHCLTRITIRRRMRHGGGGGVSKLWLVDLGGSERLLKTGASGLTMDEGKAINLSLSALGDVIAALRRKRPHVPYRNSKLTQILSDSLGDGSKVVMVVHVSLSEDDVGETVCSLNLAKRARSIEPNREIPQDLKTLKQKRVAELDREIRAAEEELKRLDEQIRRAEEKEISLEEEEEEEEEKKLFASSVCQALSDDEKGSPRSTLVVVGHTDAAESPRATTEKAKGRRPPPARGHGGSAAPHFMSSTVCSRQRRYPPPAAELSGSQNAAARASRSASVALSSGVHKLRCLRVNKSDQVNVISNSSVDSTAASAPPPRRRESCFGSRPVLQRAAAPLHLHRRRMSSLT

SEQ ID NO: 59975 - protein, 284 aa, Zea Mays
MSLYFAPAFFSHLLGKCLKQKYPIVEVTKLAFVVLGTFALVWWPFLHSYEAVQQVLSRLAPFERGIYEDYVANFWCSTSVIIKWKKLFAIKPLKLMSLSATILAFLPSFVQQVKSPSNLGFLYSLMNNSFSFYLFSYQVHEKSILLPLLPASLLALEEPRMYGWFVYFALFSMYPLICRDQLLLQYIAVLSLFFLIYYSPGGSYGKRSNISCKAKLVLSLPFLCSLLLHITYLQIEPPKRYPFLFDALIMFVCFSQFVILAVYTNYKQWMLDSNSRSIGVKKDL

SEQ ID NO: 59976 - protein, 110 aa, Zea Mays
MLEYREHLVREKWIQIETAKIIRERLRWCYRIEGINHHQKCRHLVDQYLEATRGVGWGKDARPPELHGRYQLPCLGPETETHPVQGAPALTSVGSPGLAAPGFPSLNDAT

SEQ ID NO: 59977 - protein, 372 aa, Zea Mays
MILLLPMVTMIVLIFSFAWLELVSHRSFMPKLLMCNSQKGWPFFQRLLVALLKFMEPYLRNAELPEAMDLLYKGTMRVLLVLLHDFPEFLCDYHFSFCDVIPSSCIQMRNVILSAFPRNMRLPDPSTPNLKIDLLAEISIAPRIMSDVDGALKSKQLKTEVDEYLKRPEGSSFLSDLNQKLLLPQNEASVAGTRYNVPLINSLVFYVGIQAVQQLQLNKANPSASVQQINHISPMDIFQIGTATDIFRSLITSLDTEGRYLLLNAIANQLRYPNSHTHYYSFITLYLFSEATQEITQEQITRVLLERLIVNRPHPWGLLITFIELIKNPRYNFWSRSFTHCAPEIEKLFESVARSCGAKVVDEGISVQDGSH

SEQ ID NO: 59978 - protein, 88 aa, Zea Mays
MAPTVLAGKIDPALFEVLYASQHAIFFFARVPQIWKNFTNKGTGELSFLTCFMNFAGSIVRVFTSIQEKTPLSGILDSDCSYHFLFSF

SEQ ID NO: 59979 - protein, 61 aa, Zea Mays
MQYILDPGGCTCTEERMQELADDRRYLGRLKLNRPRRVAHYYTTSMICSSSNKRNIISLVW

SEQ ID NO: 59980 - protein, 456 aa, Zea Mays
MDQFAVFSAQFDVRLIWLYAVMAFGLKFLSGRMVCFVRVRPSPSGQRNVTGFSITCGHSRRVRILKIIKEVFDETLMVFYRADSRWRSGVEESRRPVDGHQLRADRGQPAVAGEGVVPGPVDAGEQGEAVRRGPVRAERVRRHGCGVRGGHRQRERVGDGGAGGGAGVGGAARAAVPPGHAHHLHHRRQRGAQGQRQRAQGEPPAGHAVRVPGADRGGPAGPGERHHGALAGHHGQHLPALRRRVRPRRRALPPAAPGLPVRGAVPVPHQLLPLLRVQGRPGQRAAGVRPVPARRRRGHRRQHGAQVRQHAVRPGRLGVRRHPEAGPHRRRRQGLRDRVAVQGGPRRGRRHAGVRQDVHRQPAAEDRDGAGHADEAVGARRRLRVRALQREPQARPGLRTELRLALPRRHARVRCRPAGIPSTHGLFTRHQRGGPFLRLHQPRCHCIDHSQLILRA

SEQ ID NO: 59981 - protein, 51 aa, Zea Mays
MMLGYYTFLSTYIDPILRSWVESLPPRDKYQWKRYLEAWRYGAGLDYRQGE

SEQ ID NO: 59982 - protein, 609 aa, Zea Mays
MSAPEFRTSYQQVSSSQPPENVGQLKVCRCGSGDSNFQITNKSDAGENSPTTCPSCQVLKSGNLLLSSKGIGWTVWKKRWFILTRTSLVFFRSDPSVPPPRGSEPIVTLGGIDLNNSASMIVKEERKVITVIFPDGRDGRTFTLKAETIEDLNEWRSALENALAQAPSVANTAGQHLAVSTDITEPVEAAVEQLEDKSVIGRPAEFALVDADGTTAFLEKALKFIEDYGVKVEGILRQSADVEEVKRRVQDYEKGKNEFSPEEDAHVIGDCIKCILREMPSSPIPAPCCTALVRAYRTDKTRRLDAMNRVIYEVFPEPNRQLLQRILKMMQIVGSHKAENRMSPSALAACMAPLLLRPLLLGECEIDSEFNMAGDGSFQLLQAAAAANHAQAIVIIMLEEYDQIFDDIEDGSYSSDAYTESDIDKEYSTDNDIPEDDGSYGCGEDVEEDLNDDTEHSSGIRIDNADDKVNNNKSSTTCDDNDKVVQPPAARAMRIEHGVPMDDSNQISSLSKVDDTSKMQSNSSFTDHIQKPNADSSYLSAKFTEKTGGSTYESKRNSWGRTSARKGLSTEEAGCCSDNDEAHIAKLENKKTHLQSKLTEEKTQSSRQI

SEQ ID NO: 59983 - protein, 1401 aa, Zea Mays
MTRAAAEAAGEVVVEEDLPPSCDPQTQARWYQLEALERALAGNTLVFLETGAGKTLIAVLLLRRFAHRIRSSPPPSFAVFLVPTVVLVNQQAGVIKEHTDLRVAQFYGDMGVDFWNADTWRGRIDGAEVLVMTPQILLDNLRHSIFRLRDIPLLIFDECHRATGNSPYACILKEFYHPQLNSRPSDSIPTIFGMTASLIARNLALDKYSEEISEFENLMNAKVYTVASESALLQYIPIATTKIVEYDDYIVTSELYSHTIRCLNKLETKHLEILKGKLHGSPLENSEKRIKKLNAMFLYCISDLGVWLAAKAAEILQSNKESCVSFWGEELDEKLEGFVRNYVRDVYSDLSEIILKMTKRGVQRHIGEDFAEDLQDGLLTSKVYFLIKSLMGYRHMQDLRCIVFVERVITSIVLEALLSTINQMSGWSVRYMASGRNCGLQHQSRNKHVEIVDSFRSGKVHLIIATQILEEGLDVPSCNLIIRFDQAATVRSFIQSRGRARMQHSDYVLLVRRGDVNALSKTQKFLKSGQIMREESQRLESTCCQPLLNTLCNEEFYGVESTGAIVTLNSSIQLINFFCSKLPSDEYFKPLPRFKIDKALGTCTLHLPMSSPVQTIYAEGKVSIIKKVVCLKACRELHAVGALTDYLLPESSVPCEDEPDIVVDKYKNGQPDYFPEQLVDNWSSFSRRGFYYCYMVSLEGCSKTTPAEIVLAVKCDMGSDFISNSFKLWGVQDYLSFTMRYVGIIHLNQEQVIAARRFQTTILSLLISNDLSEVSNYIKNLLEMPASPGAVYLLLPVVSGKIDWRSIKFSASEMPEATNMDMRHCYPCKDTGIVQTKDGTFCSCMLRNSIVCTPHNGMFYAVCGFLDLNANSLLHRSDGSFLSYKTYFKERYNLDLRCEDQALLEARKLVEVRNFLHKCNYKKEKERSGKSVVELPPELCIVVMSPMSAITLRSFTFIPSIMYRIQCMLLSMNLKMQLGPSMQQFDIPALKILEALTTKNCQEEFSQESLETLGDSFLKYITTQHFFVKYKHQHEGMLTKMKKNVISNAALCQLACSNNLVGYIRSEAFNPKTWIVPGVGYDICDRSLRKLKSKRIADSVEALIGAYLSTAGEQAAYIFLKSLGMDIEFHKMPIERVITIKAEEFINVKSLELLLDYSFNDPSLLMEALTHGSYQIAGTTPCYQRLEFLGDAVLDHIFTDYFYHQYPECTPELLTDLRSASVNNSCYAHAAVKAGLHKHVLHSSSALHKRMADYLDKFEQSFSGPSHGWEAGISLPKVLGDVVESIAGAIYIDAKHDKGVVWRSMKRILEPLVTPDTLQNDPVKELQEFCDSKGYTLEYTVTRDNGVSSVVAEVRTEGTTYKATRTGFSKLDAKKLAASSVLRDLKAADTKQYSANGISCT

SEQ ID NO: 59984 - protein, 350 aa, Zea Mays
MDPSDSNSAAGGKTQNVSVPPVEGVAGGGTSYGWVDGGLRGTNIGAGVIDPTKVHSDDLLHVWSMPSTANVSQQEAPRPLEKVNLLAARNERESFQIALRPKVSWATSGIAGSVQIQCTDLCSSSGDREDQHSHSSIPMVINVVPGVPDALVPIDPLSPQISIQPGETAAVWVSVNVPCGQPPGLYEGEIFITAVKTELDSRTESLPKSEKCRLYRELRSCLDLTGPRDYSSPEEMVQRLTSASTVLRRVLDNPALQDCQENNGFGDMMDEDVINNISVRLKLSLTVWDFTLPVTPSLPAVFGISETVIEDRFCLEHGTEGWYSALDHHFRWLLQYRISPFFCRWGDSMR

SEQ ID NO: 59985 - protein, 335 aa, Zea Mays
MVCKRWNRLLSGNYFYSLRKKIGVAEEWVYVFKRDREGKISWYAFDPLHQLWKSLPPVPQEYSEALGFGCAVLSGCYLYLFGGKDPLRGSMRRVVFYNARTNKWHRAPDMMRKRHFFGSCVINNCLYVAGGECEGIQRTLQSAEVYDPNRNRWACVTEMNNGMVPFIGVVYDGKWFLKGLDSHRQVTSEVYLPSSNTWSAIDDEMVTGWRNPSISFNGRLYSADCRDGCKLRVYDENTGTWTRFMDSKHHLGSSRAFEAAALVSLNGKLCVIRNNMSITLVDVSNPTMSVETDSARMWETVVRKGQHRSFVANLWSSIAGRNLKSHIIHCHVLQV

SEQ ID NO: 59986 - protein, 138 aa, Zea Mays
MRLPSGRLPDVSNRSSQRLGEEEQHGTAAVARKALVLSHPNPAAVQGGGDPIGVQASTVHPSIQFQSADEKGKFDELVEEKGVKVLIDPKALMHVIGTKMDYVDDPLKSEFVFVNPNSKGECGCGESFMTTGSKGSPS

SEQ ID NO: 59987 - protein, 635 aa, Zea Mays
MDPEKQNEMSLIDKRELVYEVARWPQGAMEILRCWTRRELLELICVELGKERKYTNVPKAKMIAYLLKLVSRNSGKNGQLKNDNPNVMLLGQDNKDEIQMKESDEQSRPLKTANSDSSISREACAGSSVVCSNVACQATPNAGDKYCKRCSCCICNKYDDNKDPSLWLVCSSDNPYSGCSCGVSCHLNCALKNKRAGIVKNGCNKLDCSFYCVSCGKINWLMRCLQKQLAIAREARRVDVLCERLSLSHKIIQGSERYKEIASIISSAVKTLEIEVGSALDQVSVITGRGIVNRLTCGAEVQKLCSSTLEIVDSKVDNILEFESNNSPKLLGPQPQILFHEITPFSVVIVLNYQHDIGKEQIDGSKIWHRSARVCNYSSEPTCHILRPNTRSLVSGLSPSTEYFFKVLPFSSTHGFTEWETKCSTRSLDHGSSQCSTQNSESMCLKDDSMQHHKKDLNVQNHQRTIQYDSPKGSTNSSENNLSCDRYSKRAKVARLDGASDNDESQLPPTSEVLPFASSNSSPSEAPSKPDLLIGTPDSASKNYVEQQYEYCVRVVRWLEHEGHMDNDFRVKFLTWFSLKATTQDRRIVGAFVDVLIGDPASLVGQLVDAFKDAICIKEKPSQAQQKDACCKVWH

SEQ ID NO: 59988 - protein, 293 aa, Zea Mays
MYSTNVVISNLTFKNSPFWNIHPVYCSQVLVRHVTILAPLNSPNTDGVTPDSSTNVCINHCYVRNGGDVIVIKSGWDEYGISFAQPSSNISISDITGETRGGSGIAFGSEMSGGISEVRAVGLRIVNSLHGIRIKTAPGRGGYVENVYIADVSMDNVSMAIRITGNYGEHPDDKYDSTALPVISNITIKDVVGVNIGVAGILEGIQGDNFSNICLSNVSLSVQSAHPWNCSLIEGYSNSVIPESCEQLRSNCRQTSICYDGSSSSVMSVQQPRHTSPTSRLLDLFTGVGFILV

SEQ ID NO: 59989 - protein, 579 aa, Zea Mays
MDLLSRGAVFKALVFLCFIRSSQGGDLNLPPLVKASRFQSEAYDYIIVGGGTAGCPLAATLSHKYKVLLLERGGSPYGNRNITLLENFHICLADVSPQSPSQAFISTDGVINARANVLGGGTCINAGFYSRAKPSFVQQAGWDAELVNQSYPWVEERIVHWPKVAPWQAALRDGLLEAGVSPYNGYSYDHLYGTKVGGTIFDDTGRRHTAADLLAAGNASNLRVLLHATVDKIVLARKHGGGRKQPRATGVRFRDENGAHHQAFLTRKRGSDVIVSAGAIGSPQLLLLSGIGPRGQLSRHNVSLVHANEHVGEGMSDNPMNSIFVPMKSPTKQSLIETVGITDAGVFIEASSGFSQSDDSIHCHHGIMSAEIGQISTIPPKQRSLDQIQEYVRNKHSLPKEVFDGGFILEKIDGPLSTGSLVLADTDVDSNPSVSFNYFQHPQDLRRCVYGIQTIERILKTNHFANLTANGAGYPMETLLNLSVSANINLIPKHTDDTTSLEQFCRDTVTTIWHYHGGCHVGKVVDRHYRVIGISGLRVIDGSTLFSSPGTNPQATVLMMGRYMGVKILRERLGRAAGV

SEQ ID NO: 59990 - protein, 1201 aa, Zea Mays
MVETRRSSAAAAGKRTSPSPSSSSVPPPKRSKAESSGSPTASAPGRAEEDSVAGAAPARSAGSVDDAAAVAQKDQGVDKPSSAAAESSKRRKEQEQQQPAVPWAKLLSECSQTPHYPISVDQISVGQSKNCNLWLKDQPVSKVLCKLRRLEQGGPCELEVIGKKGMVQLNGRSVSPGTKVPLTGGDEVIFSSCGKHTYIFLYPLNDKVPKTVLSSAVSLLEAPVASVKRIRTDKRTGDTSAVAGTEMMTSTSNQKDVAAVPPASAGENSQRVVRPLASSASDKLKGRAVSPEKEFANGENANEVNSNIEDSPMVVAAAPISPDAAANDTCQQNGFVSDSHLGAEIALEDQRDHIIRELNASTNVPPSRCQAFKDGMKQGIINPSDIDVTFENFPYYLSENTKNVLLSSAFIHLKKKEFIKQFVEISSINQRILLSGPAGSEIYQETLVKALAKHFSARLLVVDSLLLPGAPSKDPEFQKDVGKADKSGDKAAAEKFAIYQKHRSSLADTVHFRRPAAPTSSVNADIVGTSTLHSASLPKQESSTATSKSYTFREGDRVRYVGPAQPCSLSQRGPSYGYRGRVMLAFEDNGSSKIGVRFDKQIPDGNDLGGLCEEDHGFFCSAELLRPDFSAGEEVERLAMTELIEVISEENKSGPLIVLLKDVEKSFTGVTESLSSLRSKLESLPPGVLIIGSHTQMDSRKEKAHPGGFLFTKFASSSQTLFDLFPDSFGSRLHERSKESPKTMKHLNKLFPNKILIQLPQDEALLTDWKQQLDRDVETLKAKSNIGSIRMFLSRNGIECNDLEELFIKDQSLSNENVDKIVGYAVSYHLNQNKIETSKDAKLVLTTESLKHGLNMLQSMQNDNKSSKKSLKDVVTENEFEKRLLADVIPPNDIGVTFDDIGALENVKDTLKELVMLPLQRPELFCKGQLTKPCKGILLFGPPGTGKTMLAKAVATEAGANFINISMSSITSKWFGEGEKYVKAVFSLASKIAPSVIFIDEVDSMLGRRENPGEHEAMRKMKNEFMVNWDGLRTKDKERVLVLGATNRPFDLDEAVIRRFPRRLMVNLPDASNREKILKVILAKEELGSDVDMDSLANMTDGYSGSDLKNLCVTAAHYPIREILEKEKKEKNLAKTEGRPEPALYGSEDIRPLSIDDFKSAHEQVCASVSSDSANMNELLQWNDLYGEGGSRKKKALSYFM

SEQ ID NO: 59991 - protein, 311 aa, Zea Mays
MTTESALLYLDLPCSVSMAAAVQPLTDAAKDFLAVKYKDLIKFQDEVMNIPRAGIEAILSSNDLQVASEDTIYDFLLRWARAQYPKSEERREVLSSRLLPLVRFSHMTCRKLRKVLACTDIDHEQATKCVTEALLFKADAPHRQRALAADAITCRKFAERAYKYRPLKVVEFDRPYPQCIAYLDLKRDECSRLFPAGRIYSQAFHLAGQGFFLSAHCNMEQQSAFYCFGLFLGMQEKGSTSVTVDYEFAARTRPSGEFVSKYKGNYTFTGGKAVGYRNLFAIPWQKFLADDSLFFVDGMLHLRAELTIKQP

SEQ ID NO: 59992 - protein, 1053 aa, Zea Mays
MTGSKPAPAASQNPSAVPHRRPPPPPPPPPPPPVTAVARVREEGELSSGADDDETLQTQLGAASILGKFVEAGSQVPSASLLGKGSNTLIVSNALNHKASAPSYKKIMRVNQGQFKPGTNRNLSWQKPVSSDNLLITFSDDDSGADSGKTGRDKVRKASSQGTQRTGNSMQTRIMREEVSQQKNLGSKVGPAHLPAFPFTHRNVGAGRASGNTFFRKELPVRQVNPLKSKQKVQNGVGVHSEDHRLEILRHKIAAKENELKGQKRPLSAVATKNADFSSNQPRLPSEKIRLEASSIGEYSRFNSLSEHSGGPNKRLKLNQQYNQFCSDLTPLAPIGSISGKTNVQSSEVTNRSENGITMNLNVNETDTTDTTELADQIQQGGATKSLRHHKDSGGAENHVMLESHDGLAAQPPFTDTQTIPEDTSALAPVTSAQARQQVLAVGTSPVLDGTPQLQPGKENDECLNSSGQIGVETQNTILFSLLEMEELQDKELEDAQEHRQKCEAEEREALRAYRKAQRALLEANERCAILRRKREICSSQVHGLIAENSSLVQSLSIRNPEDGLAMPSLLNSQIHAVSQIPENQGGRHRLCPEEPSQQQIDKHEDEARPHYCDKLAASTADPSSVSAVNADSILSDYMEDDLLFPTRQARSECALDVENQMEETIHVYAEENRQVSGDGGEDYELLEASLRSRLVERFGKKSCLNGTIDEGTEGLAVGKVAAEHGKQSAYVGHQLQEAEQNIMTTTLEGTMELENDGAEKTVGLSNSCSGPSMGNCDPEDNISSLKELCMPLVMDSLIFPSSAPLNAARQIKRAFPGICKELSDYKNDHLTSDAVSEVTGSVQDMIHDLVGENMKMLPTTQNDNNMVHSVIDPFWPFCMFELRGKCNDEECQWQHFEHHDWRKLELTKHSMISVSGQIPYGLSQYILPVPVYRVGSNLIKADLNLTQSVLASSLWQYWQRGFCASFPLPLSVQRVLPSDAPFFQAGDGRIADFDRNRQLLKFRMLDSRKVGRAHCIAVIITSQKWHTYWSLVLYTKLILEVFCSFYSCIMAY

SEQ ID NO: 59993 - protein, 255 aa, Zea Mays
MHVIHGASRRPRRMLALGSNRASMHAHSLPSKRRKGKLTTRLREAFKKPAPSSPFQATQPQATAQRCVWVCVCARDQTPTSPHPRPIPTSPPPPPPHGLLPRDLNALGSAWGERMPELRSGVRQSRLRAKKVEDLVVQDPTDNLVVAAPTVAGRRGRGRGGRGGGRGAGRGRGGRGRGVPVINLDPDQPLEVLPGAGVGARAAGGAQPIEDIANKVLKMDGGSAEKIAGGEDEGTTSPVPEKPLGCSYVKELWIL

SEQ ID NO: 59994 - protein, 561 aa, Zea Mays
MNGSDESSFEDFEILHGDMQGLTDTMSFLKSLSGLVGNDLRSPEKQTRERAAASVLFDWEEEIYVARAPGRLDVMGGIADYSGSLVLQMPIREACHVAVQRSDPTKQKQWKHTQARQLANGGAVPVLQIVSFGSELSNRAPTFDMDLSDFMDGDKPISYDNVKEYFSRDPSQKWAAYVAGTIFVLMAELGVRFKDSMSILVSSSVPEGKGVSSSASVEVASMSAIAAAYGLNIAPRDLALLCQKVENRVVGAPCGVMDQMTSACGEANKLLAMVCQPAEVKELVNIPTHIRFWGLDSGIRHSVGGTDYGSVRVGTYMGRKMIKCAASNLLSELLLSCTSTQPGDSSPDEYEGHGVDLLKSEASMEYLCNLPPHRYEAVFAKEIPETITGDAFLEKYGDHNDAVTEVDPKRSYCVKAPTRHPIYENFRVEAFKALLTAAKTDEQLSALGELMFQCHYSYNACGLGSDGTDRLVNLVQEIRHRKSSRAGGPSLFGAKITGGGSGGSVCVMGKNCLKSSEEILEIQKRYKAATGYLPTVFDGSSPGAGKFGYLKIRRRSTSPSD

SEQ ID NO: 59995 - protein, 72 aa, Zea Mays
MRRTWDLTAAAKFVSPPRRWWGDDGLGYGFRGVSLGYIWARNDPEAWGWGPQPMPARIPGRTLSSSVCCAKI

SEQ ID NO: 59996 - protein, 68 aa, Zea Mays
MTQPGRNLEGLPRSKLDHCISTHLLLSPYFRYIVILFSHIRALLLVLQLCIYLIKVEGYHMPLFSNIR

SEQ ID NO: 59997 - protein, 289 aa, Zea Mays
MTAADAHYTTSTVITELKQFLRGSIAIAMEAGRMDQPFMAAINSQPFVEDIEPVKKASGDMPATTGSGCFECNICLDFASEPVVTFCGHLYCWPCIYEWLRPGVESAASDNSSSARRQCPVCKATLSTDTLVPLYGRGGNSKKSLDGMAIPRRPMVHRETVEEQQNAQSNVNDQHYHQSMEDNSQRQPLLQAHHHPIPTGFDFIYPPAPVGRGLIHSTAGGVLGGMAEIVLPLALRGQMPASLYYTNPYHAATQNVNPRLRRHQMEIERSLHQIWFFLCVFVVLCLLLF

SEQ ID NO: 59998 - protein, 102 aa, Zea Mays
MRFKRKKTSQFTSDYSMQLNASRIKVLQAQDDLVTDMLKSASKELLRISRDHLTYKKLLKTLIVQSLLRLKEPAVLLRCRKEDLQLVDLVLESARNEYANKA

SEQ ID NO: 59999 - protein, 131 aa, Zea Mays
MPRLPGSQPAPERRLAVLLSHFHPCCEPPRTIACVASVECLRTAAEEEAEMQLSLSTSPCAGGEKGGSSGGGHCVFCNIVAGTAQAFKLYEDDMCLCILDAKPLTSGHSLIIPKSHYPSVQTTPPTMHSMC

SEQ ID NO: 60000 - protein, 384 aa, Zea Mays
MEYWPTPEEQRKYMVNPNKSKRMLTNNIYPSIRMPEFFEKIVVHTLSHNFRNATRLERVQLRFPIKAHSALVKIIYAGVNASDVNFSSGRYFSGNPKETASRLPFDAGFEGVGIVAAVGDSVSHIKVGTPVALMTFGSYAEFTEVPAKHLLPVPRPDPEVVAMLTSGLTASISLEKAGQMTSGQVVLVTAAAGGTGQFAVQLAKLAGNKVVATCGGESKAELLASLGVDRVINYRNERVKDVLKKEFPRGVDIIYESVGGEMFDLCLNALAVHGHLIVIGMISQYQGEDGWKPKNYTGLCEKILAKSQTVAGFFLVQYAHLWQDHLNKLFDLYASGKLKVSLDPKQFLGVASVVDAVEYLHSGKSVGKVVVCIDPSYGQIVAKL

SEQ ID NO: 60001 - protein, 401 aa, Zea Mays
MVNALNPADRMAVKDEIIADLVNQCRSNQQKLMQFVSSTGDEDLLKQGLELNDRLQSVLTRHDAIASGSPLPVETPIREPQREDPNPEPSTPITHDNKAQVEEDEDDEFAQIARRKNKSVICGDEASSSAGDQALVPVDPALSEVSSVESNAIVPLGATSVSGTRTKEQDMIDLLSLTLYSPESSEDSSTQNQNGSQPSVTSNGSETLPSYQPAVANGANYPANTQVYPTNQGYVPYNNYVAPWAQTGPVAQPGAYSTQTQQYVSSNPAPPWAMPASANSANPFQPVTYQTPNTPPAASVAPSAAPSAQHVPSPEPTPVQSYNFSIPQTYTGSNVATNARVNGNQRPKETPVAAARPYYMPDNLFGDLIDVKSFGAGSKISRSTSMPSPKGGGQPMIGRNK

SEQ ID NO: 60002 - protein, 239 aa, Zea Mays
MGTAAVVEDTIRVVLTCLPDPPFRTTGSSRPYQSPSGGGGGGDRISRLSDAVLSNIVARLPAKDAARTTALSRRWRRVWASTPLVLDDSDLLVFHDDGGCSTPNCTGSGSSLRGESRISSSSTAHYPPPWASPSTSSTSPPSAPSTSVSGASRTPPPSREAAPPCSPASRRLDSALPSSTPGTSTTCSPAAPCSRSSPASPASTSQTLSGSAAAASGALSSGSPWPMSSTWSSPRASSA

SEQ ID NO: 60003 - protein, 808 aa, Zea Mays
MCLTEDFIMWTPMHYTLLTLLRLIAIILFFIWRIRHPHADGMWLWWISIVGDFWFGVTWLLNQVAKLNPTKRVPDLSLLRQQFDLPDGNSNLPRLDVFINTVDPINEPMIYTMNSILSILAVDYPIDRTATYLSDDGGSIIHYEGLLETANFATLWVPFCRKHSIEPRAPESYFAVKSRPYTGNVPDEFADDHRRMSKEYDEFKVRLDALFTKIPERSDAHNAEAKEGVKATWMADGTQWPGTWFDPAENHKKGQHAGIVKVMLNHPGDEPRFGGPASAETPLDFSAVDVRLPMLVYISREKSPSHDHQKKAGAMNVQLRISALLTNAPFIINFDGDHYVNNSQAFRAAMCFMLDRRDGENTAFVQFPQRFDDVDPTDRYCNHNRVFFDATLLGLNGIQGPSYVGTGCMFRRIAVYGIDPPRWRTDAFKLVDNPSKFGSSMLFINSIPSAANQEWSMASPPAHEESVMEELNNVMKCAYEEGTEFGKEIGWVYNIATEDVVTGFRVHRTGWRSMYCRMEPDAFRGTAPINLTERLCQILRWSGGSLEMFFSHCPLLAGRRLNLMQRIAYTNMTAYPISSVFLVFYLLFPVIWIFRGEFYIQKPFPTYVLYLVVIIAMTELIGMVEIKWAGLTLLDWIRNEQFYIIGATAVYPLATLHIVLKLVLRGNGVSFKLTAKQATSAVNEKYAEMYVVQWTPLLIPTIAVIAVNVGAIGAAIGKAVVGGWSLLQMADASLGLVFNAWILLLIYPFALGVMGRWSKRPYILFVLFMIGFAVVAAVVVAIHAARTGSVRFHSGHSGGASFPTSWGF

SEQ ID NO: 60004 - protein, 254 aa, Zea Mays
MSAAVACAERATNDMLIGPDWAVNIELCDIINMDPGQAKDTLKLLKKRLASKNTKVQILTLYVLETLSKNCGDIVHQQIVERDILSEMVKIVKKKPDLSVREKILSLIDTWQVAFGGPSGKYRQYHAAYQELRAAGVDFPPREENSVPLFTPPQTQPLRHPHLYTPPGQSYEDAAIQASLQSAPPASALSLSEIQSARGIVDVLDEMLNALDHRHPEGVREEVIVDLVGQCRSYQSRVMDLVNSTGVLFSVMMT

SEQ ID NO: 60005 - protein, 135 aa, Zea Mays
MMVAEKPALGFQAHGDGDDELELELASPAPPPRKMHSLEFEHIGSLAAVAESLAPGSRWQRALTSVRVVIFQAKINVLLPFGPLAIMLHYLSGTHQGWVFLFSLIGITPLAERLGYATEQLACYTGPTDVTFFLF

SEQ ID NO: 60006 - protein, 746 aa, Zea Mays
MSEFLDLELQDGIRMPWNVIPGTKQETVNCVIPVSAIYTPLKPISDIPVLPYSPLRCRMCRSILNPFSIVDYVAKIWVCSFCFQRNQFPQHYSSISENNLPAELFPQYTTVEYISSTETGPIVPPVFIFVVDTCMIEEEIGYLKSALAQAVELLPDNSLVGFITFGTYVQVHELGFGLLPKSYVFKGTKEVTKEQILEQMCFFAGKKMPTTGVIAGTRDGLSSESISRFLLPASECEFVLNSVIEEIQKDPWPVPADQRASRCTGAALSVAANLLGVCVPGSGARIMAFVGGPSTEGPGPIVSKSLSEPIRSHKDLDKDSAPLYDKAVKFYDQIAKQLVHQGHVLDLFACAVDQVGVAEMKVAIEKTGGIVVLAESFGHSVFKDSLLRIFQSTDDNLGLSFNGILEINCSKDVKVQGIIGPCSSLEKKSPLSSDTVIGQGNTSAWKMCGLDRKTSLCLVYDIAKKDGPDSIAQSANNQFYFQFLTYYQHNEGQMRLRSTTISRRWVSGDNHVEELVAGFDQEAAAAVMARLVSFKMETEVDFDPVRWLDRALIRLCSKFGDYQKETPSSFSLSPRLSIFPQFIFNLRRSQFVQVFNNSPDETAYFRMMLDRENVTNTVVMIQPSLISYSFQSGPEPVLLDATAIASDKILLLDSYFTVVIFHGVTIAQWRNAGYQDQEGHEVFAQLLKAPHEEANLIIKERFPVPRLVVCDQYGSQARFLLAKLNPSVTYNSDNPSPGGDVIFTDD

SEQ ID NO: 60007 - protein, 52 aa, Zea Mays
MMVTSSLWNFQSVWWQVIAHGHILTLRRWRRGRDRTRERRHERHMVIIFCWL

SEQ ID NO: 60008 - protein, 487 aa, Zea Mays
MVRLHQLLSRTLASHQILASATSSVRSTPRLLLPLRLPPPAPPPHGRTLLPIIVAASRQYASSTFGRRGRSTRPPMLLRRKRARSPTRKGPGELRVQIGIEEALPDDPGILSIAETLRTDVGKAVKLALNDLEGSDYMTRDPSICNVDKYASIEVSVLLCDDDFIRKLNKEWRDEDHATDVLSMSQHIPELDIPILQLGDIVISVDTARRQAEERGHTLVDEIRILMVHGLLHLLGFDHEVSKVAEEEMEKEEEHILNTLEWRGKGLIKSAYDIATVMEHLQNSVEADSNIEKVILQEKHQPKLSHIICDIDGTIMDYEGGLHEKSIGSLREAIATGVNVIMVTGKSRASTIRTFKLLDFREKGDFISETSPGVFLQGSLIYGRDGKKVHRAELDLDVCKEALLYSLKHRIPLVAYCEEQCLTLFEHPFVELLHTVHNENKVKVMHSIEDLLEYSSIQCCCSMLPLDTPLVDPDGDATINVAASVDL

SEQ ID NO: 60009 - protein, 453 aa, Zea Mays
MQLPHASRSGPNSSPPVVVAGSSSSAPASRQQQSEAPRGRTLAPWPRFAAPRSLLSTMDVDNICDIDNNVSNEDEIHGIGGGGDVNGNDSDHMEEEDHVLTPTGSEVNVRKNKSIDGDNRVVKRLLATKSTSTSTSKFMASAFKATRSNKSTDLVPQPQVSKVAQDASASASENASIAASVQISTEDDCDEELDVKKKKLTSWVWEHFTRWCDSSDPIICTMAYSMRDKFDKYWEMNNMALAVGAFLDPRYKHRMVELYMSKMYDSEMAELEKMTFMNVINELFAFYSSTINAKSTNKGTSSKDSVASKNVVLMDDDDENEVNLDELYAATNNVKKVSELDLYMSDGLVKANEGDAPFDALSWWKGQVTNFPILSSLARDVLSMQVSTVASESAFSSGGRVVDSFRSKLKPKIIEALVCTKDWKLASDKDLEGEIKTISEAMNAMEVDDEVAT

SEQ ID NO: 60010 - protein, 504 aa, Zea Mays
MIHDTSSSRASTACHYSPSLVAEEQLHGSKDTLTLKGEKALLELLLGMALDQHVDGRKLITQQEAEDSDFESYLREATSRVLYQPTFISEEDDDDDSVSESSSASLAKPAGTLDLGKLTEEPQLDVPQPHRRSVDPNHSYDQVFIRSTRLLERRSKKRNGGHRALDNGVACSGVNSKRKDKFGRVLDPDEPFRLFLRDRETTEFLTAKEEKQMFSQIQNLMKLEGAQRNLQAQCGREPTVEEWAQAVGMSCRELQSCVRTGRRCREKMARSNFRLVIHVARKYEGCGLDIQDLVQDGCCGLMKTFEKFNPSKGCRFPTYAYWWIRQSIKKSIFKNSRLIRLPESVYALLRKVGKARMECIMDGEQPTNEVVARRAGITIEKLAKLRAKTRKVRSMQDRVWSDDGVTYQEITEDPNIEGPEVSVDRLMMRQQVRSFLTGILSPREKEIIEHRFGIHDGQPKTLHVIGDMYGLSKERIRQVQNKALDKLRNSISAQGFHVYFDLLT

SEQ ID NO: 60011 - protein, 156 aa, Zea Mays
MTGMVVAWRQIMHRSICIRMSSLQDYHMDIKAAKKAVIEGFRRTDESLLQESTKGNWQDGATAVCVWILGQTVVVANVGDAKAVLARSISTEGEGVVDETKSQLKAIVLTREHKAIFSQERSRIQKAGGSVGSNGRLQGRIEVSRAFGDRQFKKVC

SEQ ID NO: 60012 - protein, 1370 aa, Zea Mays
MFKLHRHRSSDRVGERFDFRFSNFRAVQVPAISDRLFLSIVSVDNGKTIAKSTKVASRSGICQWPDTILEPIWFSKDQVSKEFQECQYRIIVSLGSAKSGILGEILLNLSNFLNLADPTAISLPLKRCNSGTVLQLKVQCLGTKSKLSGVRSLRDMAPRLDDRSPTPTNDELDNRSDCSDGMFNKGVHSSSENHLGGTYQDESGNMETGFSASGSHRSSNSGDSTADRTNFSPRVNSNGGLFVGRQDSASSYASYVSAGGGDDGLRSNNSSFSSRTSGPNLLQGSTPKTFSNDLSQLSMGASDSSKDFLEAAEETIEELRDEAKMWERHSRKLKADLEMLKKECSEKSKQHAELAVELSAAQAERDSYRHEIEELKSSLQDVNTRQTITGTPKRSDWIDLQKELEGEVKFLKESNTDLTIQLNRTQESNIELLSILQELEETIEEQRVEISKISKVKQTAYPENGLLVKKDREWAKKLSMKEDEITIPREKSDRALNIGNADGAASNAIYLDLEKENEILRAKIQELEKDCSELTDENLELIYKLKENGLTKGQVPHIANNNELQFKKLTSRIHQLEEDLRNKEMLRDDSFSESSMSNADEIQRKCADLELKVLNFRSQTCELEEKFRKCQEELEQRNLELSALRRKINGLHSNELEVCESGATWKYQARIADLEDTEPETDTLKARFELQLQENDDLRRSKVEMQNFISEFQAEKSQLEERLSASLKESSITSKCLDEVRKDILVLSSSIDSHVSTNKLLERNLVELESCKAELELHVSELEQENIELSERISGLETQLTYVTNEKESSELQLHDSRSLIINLKDKVECQQSEMETQRLQFKQKQQESQRRLCEAQDDSEVLRRSNCKLQSTVESLIEECSSLQNLIADLKRQKLELHGHLTQKEQELDESKKKNFEFSKTVEFLEAKLLSLQKDISSKEQSLLSELENIFQEHMEQEERINRAHFMLNKIEKEKTLEVENLEREVVSLAAQVSSTHEERESATLNAIQEVSVLRADNAKLEANLQDVSEQLRCYESQLEDLRKESKSKIKGLVDSLNASKQSEEMLTSDAEHMKKLMEAAKSNEDALRKTSNELELKLKSSDYVKQQMLEEISGLKLQVQKIMNLQDEVSKLQSSLDEAKFEKGKLEEFVRSVTEECQELKAQKAMLTDKVSYMQETLRNGEEENRNRIAMHAKLMRLESDLTALEASHVHEAELKNELSRIKRSNSEYQRKIQSLGQENEDLTRRVQIMEKGFERMSHAKENLGKQEIGGDNQEAIQSTIQLLEIKLAEALEENKIYRAQQKSSMSEGQPAGGDGKEGNTDRILQLEGELRDMKERLLNMSLQYAEVEAQRERLVMELKAIKKGRWF

SEQ ID NO: 60013 - protein, 1125 aa, Zea Mays
MRFISVPQDEEYYPVLAMIINRKGSDVNDLSLFGYDSSSCVINHLSSYSEIGPLVLDVSEIPETFGFALLLRVGDALLLDLRNPTNVCCIQRVSLTTNLIGEPITVEDPCPGLDVDDDVAACALLELRDSGNNIMKDDGYMDIDGVDSRSNVKPRIVCSWSWEPPDPVRRGCARLLFCLDDGEFHILEFTLDVEGAKLYTFEYIDRTLPCRPLFWMKNRMIIGFVEMGDGMIFKLGHRRLLHKSTIQNVAPILDLAIADYHGEKQDQMFACCGMSPEGSLRVLRNGVNVDRLLKTEAIYQGVTGLWTLRMKATDAYHSFLVLSFVEETRILSVGLSFNDISDAVGFQPDVCTLACGLVADNLLVQIYSKGVKVCLPTVYAHPEGAPLTSPICTDWYPAITISVGAVGHNIVVVATSNPCCLYVLGVRSSSSYQYELYATHHVQLQYEVSCISIPQEDCIHDNVSFSCGEGDDICKNPPPKVNVCKFAVIGTHRPSVEIISLEPGEALRVLTIGTVSVNNALGAPMSGCIPENVRFVAAERFYILAGLRNGMLLRFESETRDYLPGFLYKDSSIPSVNTFLQLISIRRIGITPVLLVPIHDSANADIIVLSDRPWLLHAARHSLAYSSISFLSASHVTPVSSVDCPNGLLFVAESCLHLVELVHGKRLNAQKFSIGGTPRKVLYHNESRTLLVLRTGLNGASSSSDVVQVDPQNGVLLSRYKCEPGETAKCMQIAKIGNDQVLIVGTTKSAGRPMMSNGEAESIKGRLIVLSLEAVESPRESSSFIPTFSFNPSSHSGSPFHEIVGYTTEEFSSNSMCSSPDEFSCNQIQAEQMTGQLRSLTQYILNGAVLALCPYLDRYVLAAAGNMIYVFGFTNENPHRIKKCAVGRTRFTITCLKTFASRIAVGDCRDGVLFYSYNESHRKLELVYSDPAHRLVGDIALLNCETAVVSDRRGSISVLSCTRLEVSESPQKNLAVNCSFYMGETAMSIQKAAFRYRLPIDDDTDPVLETVYNCIVASTMLGSLFVMIPLSSEEHQLLQDVQEKLSVHPLTAPVLGNDHAEFRQRGTPSVVPPILDGDMLVQFLELTGEQQQAILTHALPGKGQHRPLSVFQVLQTLERVHYALN

SEQ ID NO: 60014 - protein, 171 aa, Zea Mays
MSDVENPGVGGKPPPYKDPDNGSQRFLLELEFVQCLANPTYIHYLAQNRYFEDEAFIGYLKYLKYWQRPEYIKYIMYPHCLFFLELLQNANFRNAMAHPTNKELAHRQQYFFWKNYRNNRLKHIIPRPPPEPAPSQAPATLPLQASVPTPVAPPVPAPTSSMPPVVAGWAN

SEQ ID NO: 60015 - protein, 310 aa, Zea Mays
MELGLALRLVAPPPLLPCLSRRALSLPPDFVSSRVLRGRRIHASRLKHGAGVVCNAIMTYSGVEEEEMVEEEMEEEAEPAVSTRPRLELIEKPDRSLALLDEYESEELGTSLCANHRSGYVAVLGKPNVGKSTLINQMVGQKLSIVTDKPQTTRHRILGICSEPEYQIILYDTPGVIKKEMHKLDSMMMKNVRSAIGSADCVLVVADACKTPEKIDEMLEEGVGNKDIGLPVLLVLNKKDLIKPGEIAKKLEWYQKFTNVDDVIPISAKFGHGVDDIKEWILSKLPLGPAYYPKAGTTGLWRNIFSKARE

SEQ ID NO: 60016 - protein, 1099 aa, Zea Mays
MEVDPSPSSRSPRPPPPPLAAMPSYFDPESSGRREEYRRYRKRLSSSNVSPLLGRSLSKTSGPRLLYDGESIPRQPNAGLLLEDIKQEAADYSNVESLDGLRLFGSPKRTSLDGGSASGAAYSSGRQAVRQTLKPVKLEDDMYVPHEGETPSTMFATLLDSGIQGLMHFPDVIQQFERTCRNASESIRSAATGKLRVVEEKLMQQNAQLLLDEAASWSLLWHIYGKEHEELSGELLVPPITSHQEACRFVAADITAQLCLRIILWLEGLASEALDLEKKVRGPHVGSYLPSSGVWHRTQRYLKRNNADSTIVKHVDFDAPTREGAQLLPDDKKQDELLLEDIWTLLRAGRLEEASDLCRSAGQAWRVATLCPFGGINMFPSLNALHKNGKYRTLQAMELESGVGRQWRLWKWASYCASEKIAEQDGGRYEMAVYALQCSNLKRVLPICTDWESACWAMARSWLDVQVDLELSQYQTSRPEKQLDDDMNGAQSSVGPESWPYHVLDQQPHDLTALLQKLHSSDLVHETVSRACREQHRQIQMNLMSGNISHLLDLLWSWLSPAEENHNNTARPLDDPEMIRFGAHIVLVLRHLFSDGMDDELDEKLVTVGDLIINMYVRYLFSEDQEELVGIYASQLQHDLCITLFVEMMELRLNSSLHTMYKLFLSAVEYLPFSSDNVSKACFEEIIERVLSRSRQTKPTKYDGDFSDVAHQHHLQSLQKAMVIQWLCFTPPSSIPDFQMISWKLLIRALTHSNTLFREFSLISMRRVPELPAGPHKLLAILAEPLKQKENLISREDPEVSDNLPEFEDWHEYYSLDATYRSWLKIEMMNAAVSPEMLSAEEKGQAVAAAKETLNLACSLLRRDGRPWLYAVESSPFESPDVIFLELHASAMLCLPSGECMLPDATSCTALTSALYSTVSEDDVLHRLLKVDVQVSSRDPCCIEVALRCLAAEGDGYGLHEANDGGLLAAVMAAGFKGELSRFQPGVSMAISRLDAWYSDRSGSVESTAAYIIRGLCRRCCLPETILRSMQACIALSAAGDDLDYSLDKCDELVELVGSAESGMMHLFSQQQLQEFLIFEREYLICTMEFEEDRLPCDG

SEQ ID NO: 60017 - protein, 531 aa, Zea Mays
MTSKFGLAGGIPERRVRPIWDAVDSRQYKPALKLCTALLAKHPTSPYALALKALILERMGKPDEALSGALNAKELLYSDNIFHFDDLTLSTLQIVFQRLDRLDLATSCYEYACTKYPSNLELMMGLFNCYVREYSYVKQQQTALKMYKTVGEERFLLWAVCSIQLQVHFSSGGVKLLALAEALLKKHINSHSLHEPEALSLYVSILEQEKKYDTALEVLSGDLGSLLGREEDKLRLQGCLLAQASSYLSASEIYQKVLESCPDDWESFLHYIGCLLEHDVNLPKPSTGEHTCPSCSVDSALSNKTSLDKELVESRLTSALSFVQSLQENNSSDCVRGPHLAKIEIERQRCLNGNPDNIKLMEALVQYLHRFGHLSCSASDVEIYLHMLSNNEISELLDEITRSFDASSISVNTLGSTITLFKVQELLGTSFTKPTSELEGIAKRMVDTFYKNLPLSNYLDPQESMYGEELLSMASSILVQLYWRTRDLGYLLEAILILEFGLTVRKYVWQYKVTLVHLYSYLGALPLAHKW

SEQ ID NO: 60018 - protein, 159 aa, Zea Mays
MVQPSAPFPCGCWLPPPATSTREHHPFPSPGTTSSSLLPATSMAVGPYELPAPRALSHGARPLLLHGRQSSAVRHSGPSMACDPSTPVSSSTIRSSTTHLPHGMLDMEHMDMNDVVLETNPKMMDRSRGRSSSRCHLTKNTNLVFDSKQALTSNYHGLQ

SEQ ID NO: 60019 - protein, 222 aa, Zea Mays
MVTDVCCVAPDFHARYKSLERTYHYRLLAGPESTSVFEKNSVWHISEDLDIQSMKKACSILVGHHDFSSFRAAGCQANSPVRTLDELSVTEVFPFMFFPSSVERSELELSNVSLVYSRKPDMESSGKGSDGSCTSSVKSDFENGKDFGKRSRHRCFVVTARARSFLYHQVRLMVGLLKSVGTGDLTTADVERILDAKTVTAAPSMAPSCGLYLANVKYDLNT

SEQ ID NO: 60020 - protein, 125 aa, Zea Mays
MYMLIQNCWLHMSQKKIFLQLKNQKKEGLITPTLSFSFTVRTQLGISFLSSSSVRSMTSHAMKLLEMKVTTMATQIAKGQGNHLKWYLCIIKLTCKLSFNPCLCSAFVLLELFWNHFDSPPPTQM

SEQ ID NO: 60021 - protein, 313 aa, Zea Mays
MKGLSGAKLLVVHPSSNKSPGGAGSPGAVLGARRRVCAAVFLACFACVSLATTLLSAARDPAGAGARSAAFAVPVAAAAREGQGLPGHVFDALVQYASAGGNSTASMPGADVRAIAAVLRRRAPCSLLVFGLGAETPLWRALNHGGRTVFLDENQYYVSHLEGRHPGLEAYDVAYTTTVREFPDLLDSARAARGAECRPVQNLLFSDCRLAINDLPNQLYDVSWDVILVDGPRGMSAIFTAGVLARTRAGEGVKTDVLVHDYEREVERACSREFLCEENRVVETSTRSLAHFVVRGGSSARRDAFCSGTAAAH

SEQ ID NO: 60022 - protein, 1117 aa, Zea Mays
MFAKRLFHRALGVGRGGGGGASAPAASPADAIQMDAQISTHCGVPYTASLLAFDPVQRLLAVATLDGRIKIFGGDNIEGLLISPKSVPYKFLQFITNQGLLVAISNENEIQVWNLEFRQLFYSSQWDVNITAFAVIERTFMMYLGDENGLLSVLKYDVDDGKLQIMPYNVHIHSLIERSGVSLQDPQPIVGILIQPDTFGTRLLIAYERGLLVLWDVSEDRAVSVRGYGDLRMKGQINGAQGDSGEDQLNTTIDDSEEEREICSLCWASREGSTVAVGYITGDILLWDMTTKSSRQEKQSDVSSNVVKLQLASGSRRLPVIVLHWSAGSAVHSNKGGHLFVYGGDDMGSEEVLTVLSLESTAGLESVRCMSRTDLKLDGSFADMILIPDTGVPDKSRTSALFILTNPGQLNFYDGGSLFSVQNSKEGTPLPEAQKFPVAIPTLDPNITVTGLYSLTESEFPNISLKKFCARKNAGHFISENMKWPLTGGVPNEMSLDEDHAVERIYIAGYQDGSVRIWDATFPVLMPMFVLDGNVADVNLDGANASVSSLAFCSLSMTLAVGTTSGLVRIYKLREHTGGSSFHFVSEFKQEVHVVHHGKGFHCYVAFLSANSSVLSLLFMASGGLLAAGYQNGQVAMLDPSQLSILFTVDGASGTNSPVVSLGIYSVAASAAKADQSKKDNPQNATLSRDVLLSLTKDARVTVLDCTTGVMINSHIIHQKQSSAISMYVIDAESDETQTQLSEDKIPSQGQTGKDGNDLDKIQTQGIEKHLKNASQLSQNGGSDSLLVVCCEDVLLLLSLASLIQGSSKHLQKTKLAKPCCWSAVFKNMDDKVCGLILAYQTGTIEMRFGPDLAIVAETSLMSLLRWSYKTGMEKSTSSSNGQVTLVNGSEFAIISLMASENDLRIPESLPCLHDKVLAAAAEAAMSFSTDQRRKQNPAAGIIGGFIKGMKGKAEENAKMRESLTLRAPSEQLESIFSKEPFAEPSIPDLDDPMEELSIDDIEIDDEVAVALAQAASSTSQGNKRTAVEEERAKLFEGSNSADKPRMRTQQEILTKYRFGGDAAAAAAHAKDKLMQRQEKLERISQQTAELQNGAENFASLAQELAKTMENKKWWKL

SEQ ID NO: 60023 - protein, 65 aa, Zea Mays
MPSAPAAPAPCPGRRCPCRARPQLRTPPPRTPPPSAPVAPTASGRPRRGHPRQQVRQLCTGIYEK

SEQ ID NO: 60024 - protein, 61 aa, Zea Mays
MTFRDCLTQHVEQVDYEMALDYAMQSGVSEEPREAIYLNSLEGSYKFVDLQSPVFVFRFVH

SEQ ID NO: 60025 - protein, 134 aa, Zea Mays
MLTEAPFGAWCCAGPAPPAAIFTRCTSPPPPPPPPQERATELVVVKPPRSHNQPQGHRVLASSGSRSPPSSRSAIAITAASVEANPATRPQIENATGRRRLEGPSSELRIPGPPSSRRGERVDKRSKPPAMRAV

SEQ ID NO: 60026 - protein, 204 aa, Zea Mays
MELLPPVPDPWPQVVEQGFTALVAMVQAWESSAPDENKTPKKRFWQSGQSAIAQTISLLLQKAWLFQADNMEGSALPPLSCVNDASVLLEFVMSSVTCMEETESLKVFELVATWANAVANWDSWEMEDQGVFNTIKEAVNFHQRFDLDGLFLKTHFVRCHSTRYSFCHGSVLIHAGHSSRSKVILSPYMVRLVVLYSKHNLPSV

SEQ ID NO: 60027 - protein, 259 aa, Zea Mays
MDLKKLLDNDQHPLHRCEAKWWTIPRPVDNCRWEGRHGSLALLPQQRPPAPFLARREMDRRIHGSLVSLPLVLPGSPLHDTRPQPLLRCGEVPPPRPDAPKMWSKSTSMMHADSGLVGTSRWSTTFFLKMVWSYTNLWGEISALASFREVDLDSAAQKKWRLQLSTSAASPSHGGCEASAEAVAPDEPCGTFYCALLLLLPSRCIPVRFACANGRATSTGVLPCVPHPGHSMLLTMALRCDSAEWQDARLAELPSHYNA

SEQ ID NO: 60028 - protein, 66 aa, Zea Mays
MGYDVMPSDDAGRFVCNYVYYHSLKFAEKHGITSLFVHFPLFLAIDEEVQMQFVASLLEVLASLNF

SEQ ID NO: 60029 - protein, 254 aa, Zea Mays
MEDRHCSSVVIECSSSGYGICSGSCLMSIVTKYSEKIILTESDAKPRTSRRKEKLKIPANAKRKDNVDCSSEWQGPPPWDPSIGGDGYPKFLCDVMIEGLAKHLRCVGIDAAIPSSKKPEPRDLLNQTYKEGRILLTRDAKLLKYQYLAGNQVYRVKSLLKHDQLAEVINIFQLKISEDQLMSRCTKCNGSFIQKPLTLEEAVEASKGFQIIPTCLFNRNLEFWKCTDCNQLYWEGTQYHNAVQRFLSVCNISD

SEQ ID NO: 60030 - protein, 384 aa, Zea Mays
MSASPELYRPAEAPAFSPSCATQPLVFAGDDYCCRTPTGSGICYLREPTTCPPAPRKPPPPPPMCRKRLFQAADQQLAEAGPVPVISIRLDELERLFRPCPPPTTTTTDKRRRSGSGPSPRSATKHAKTLDIEAEGEQVGEAPWGKEDVAIADGIPEFLKRSILLQTFGVQGHHTCQEVEHVVIPPHVPPEVEHELPEPEKAQRDIFAFFRGKMEVHPKNISGRFYSKKVRTELLQHYGRNRKFYLKRKRFDNYRSEMARSLFCLCPLGWAPWSPRLVESVLLGCIPVIIADNIRMPFPSVLQWPEISLQVAEKDVANLEVVLDHVVATNLSVIQKNLWDPVKRKALVFNRPMEVGDATWQVLRELEVLLDQSQRRRYGGSWRA

SEQ ID NO: 60031 - protein, 663 aa, Zea Mays
MEGHVAMGWKDPNPGQESSMVFQSRAVRPDTVEGHSNEDVEAGFEKHGLSAALNSPQHEGRSLPLTPQFGQNSSPGSSLAERMQARAGFKVPKLNMPFSTVAGDDSSVPGAPSPYLTIPPGLSPATLLESPVFISNALGQASPTTGKLFLFGSTNDNDPIRPGGPPVGDGTDAFSFKPLDLKSSHYTAEVMKEQNTQSSVKTEAKTQAVQEANLLGQLNQQNHDGQTNMNSDGARDSKLSRLASGTGAGNEHASPPDYGQRAEEADAREDYPAAMAVTAPAEDGYSWRKYGQKQVKHSEYPRSYFKCTHPNCLVKKKVERSHEGHVTEIIYKGTHNHPKPTQSRRPGAGAHPLGGGAQADAADNLQGSQANAAEANQAWRAGVQDGVDATSPPSVPGELCDSAASMQVDCAARFGSPEGADVTSAVSDEVDGDDRVTLTHGGANAAEGDELESKRRKLESYAIDMSTASRAVREPRVVIQTTSEVDILDDGYRWRKYGQKVVKGNPNPRSYYKCTQPGCTVRKHVERASHDLKAVITTYEGKHNHEVPAARNSGHPSAAAAPGAGGPRRQEHPSVHDGLMRQHLGGCGVPFGLPPPPPPPRDPLAPMRNYPTYGFTALGAGSTSLPSLPMLPVLAPSSLHQHPLLRHRQAVQAAGLAWRPRPT

SEQ ID NO: 60032 - protein, 347 aa, Zea Mays
MDGSISSALALLVLALHLAVDGCSAVNFEGSVLLKFQSRVEEDLYGAMVSWSPGDGDPCSWNGVRCADGRVVMLNLKDLSLKGTLGPELGTLSHLRALELSNNFFSGAIPKELSALAMLEILDLSNNNLSGEVPQEIAEMPSLRQLSLSNNCFQWPLIQHSYGNFDQENGFNIYDNLGRGNMNQRAENGLESGSSSHENKKDTSNLSARLHSQYEAINPAAHLSQRRLLQDSNLAAPSSANDLVPAAVPVPSTGTGSFSAFSPNNAPAPAVNPPSRPPTVPSTTAGEVQERRSMKWLYFIVLPLVVLLIGIACMLLLCRTKSGTTIGPWKTGLSGQLQKAFVTVATL

SEQ ID NO: 60033 - protein, 280 aa, Zea Mays
MRELRQAGGSPSGLHHGNMVLYGAEPGSTTKRQRASHSIPLQSAGLQSPMMPSHSVSSAKWGPLQARGTKARTPIPLALPSVDPSSLINHKVYTRWPEDNNFYEATITRYNPVTGEHGLVYDMGTQAESWESVRLCDMAPEDIRWGFDGHLSNRDVWSPSGPMLMRHMTNNGAMAGSIKGRGRLSINETIKDYAPPENGTNRNFDHVDIPNTGSVVMEVKRVLFNPNMPEIEKARKLLKDQEQSLLDAIARLDEASDSDNEDMAMEGRMGSAGERNGITT

SEQ ID NO: 60034 - protein, 246 aa, Zea Mays
MRCEPRSYDKAGDGAVRIGDPEAVGEAAGPAVREPGPGARVPEGGLRGVGRPDVRHQGERVPAVPAPGPRRRPPRAHRRRRHRAAVPGRPGERPAAAQGRGVGGRAAHAPRHRRQRRRPAGGHHQRAVQERHAPRAHAPRRQPHVRRVLLQPGRRRRHLPGARARRRRRGGPRRGRVPELRVRGLHEPVRAPQVRGQGAQVRGHEVGHRHRVRKTAFRCRLPSWRQALRLERTTYVHVLIVAQLCV

SEQ ID NO: 60035 - protein, 141 aa, Zea Mays
METFYGHLYCGKKFKVKSSIKYRTINPEWNEELTLSITNMMNPVKIELFDHDTFTKDDSMGNAEFSILNFVEIAKQDLSDVPDGTVMKTIHTEKGSCLATDSHITCKDGKVSQDILLRLRDTETGDLVLRLTWVNIPGVAR

SEQ ID NO: 60036 - protein, 153 aa, Zea Mays
MNPPHPEPGLPRRHHHMVHLHLDPRHHHHVHIHLRCCHHHHHGTHLLAPAPPARLNDNQQRHPAPVLFPNTYPNPSAAPGQPEPPRAAVREDVEDLDPEPGLLHAEEEEEEDEEPVFVLTDEWAEFFAKSEAKRRLGNRSPLAAKQQKKKSRK

SEQ ID NO: 60037 - protein, 599 aa, Zea Mays
MGSGASRLLTACACSRPPPAPADDGPCLDDALGHSFCYAASSAAAAAAGHSSSFRHAISGAALSANSSVPVPIYQSSVAGGMPPQYHSAFHTSSSFSSAPLQLSNLSSGPLFLSGPIDRGAQLSGPLDQAVPFSGPLPAKPTKPARPSSSRGFSRRFRKPSFGSLRRSISEKNRPCVVPLRREDGVQWAHGRAGEDRVHVVVSEDQRWLFVGIYDGFNGPEAPDFLVANLYRFLLRELRGIFYKEADPESKRLWQFLADGEDEDSELDFSGSGRFALSLARLKEQRHPLWAHAAAAGDGQSGREWGVKRLTAAPAVRDHRAVLSALARALATTESAYLDMTSQSMGSHPELAVTGACLLVVLLRDDDVYVMNLGDSRAIVAQRRDDEDCLIGSIPVEDIGVGLEIETRIPGYSAIGLEALQLSTDHSTSVEEEVQRIRREHPDDDQCVVNDRVKGRLTVTRAFGAGYLKQARFNDGLLEMFRNEYIGDTPYISCTPTLCHHKLSIRDQFLVLSSDGLYQYLSNEEVVLHVENFMERFPEGDPAQSLIEELLSRAAKKAGMDFYELLDIPQGDRRKYHDDVTIMVISLEGRIWKSSGTYV

SEQ ID NO: 60038 - protein, 224 aa, Zea Mays
MGAVLGRHDTHKRSSHGSKLEVKMVDAMQQRASHGTSLKSFDSIIMKFPKIDESFRKCKTIFEQFDSNGEIDKEELKHCFQKLEISFTEEEICDLFEACDINEDMGMKFNEFIVFLCLVYLLNEAAVLEAKIKMGLGNLEATFETLVDAFVFLDKNKDGYVSKDEMIQAINETTTGERSSGPIAMKRFEEMDWDKNGMVTFKEFLFAFTRWVGIDENEDEDDDE

SEQ ID NO: 60039 - protein, 128 aa, Zea Mays
MPPPHGNPSCSRRLGRIRRRRSLLGFLAPSTSPAASSLRRPARSQPVRRLPGKRGWRKWGRMSEERPVPRRESPWGLPEGDTRQPKAHRCNDRAEDVVQACFEGNPFKTVPGPFKLFWQCMRSKPGDE

SEQ ID NO: 60040 - protein, 230 aa, Zea Mays
MDLPPGAGRRTTYSLLPQFPDDAAAPAPAPANILQRQSSGSSYGAGSSISTSSDYPFHLQPPASAAGVAPPGSAAAPPGAAGSPCKSWAQQAEETYQLQLALALRLCADAACAADPGFLDPGDSGSGRGSGNGRAFPLAQPAPSAESLSHRFWVNGSLSYNSTIPDGFYLIHGMDPFVWSLCTDVQEENHIPSMESLKSVRPDDPSIQAILIDRRTDFELGVQLPMKRTC

SEQ ID NO: 60041 - protein, 94 aa, Zea Mays
MARKLRFFKEQMSKADIGPTQLNETHLDFDDLEIKLGELEAELTEVNANNEKLLRTYNELLEYHTVLQKLKELLHHNKGNWRQINLVKLHWRAL

SEQ ID NO: 60042 - protein, 424 aa, Zea Mays
MQDLVLYKSRCENRLNEITERASSDKREVESLAKKYEEKYKQVAELASKLAVEEAAYRDVQERKVELHDALIKMVQGGSVDGLLQVRADRIQYQLEEMEKALSERCKHFELKFKPSASVELPSGWEPGPQEGLIEWDEDWDKFEDEGFSIVKDNGTIQENPVSAENGKVPSLWDDGDMSPVASSNGHIKEERRYSGGDQVAESEIAYDFGDESVRSPGSAGRSASGSPFKSSGFGMHDSSPSKRESYSDHGGSESVFGDKFADETSWNFDDQDTDSVWGSTVLNTEADQRGGTHNSFFGSEAGSPSGASVFGKKRNSFFDDSVPSSPAYTSGFSPKFGESRDDSSSYNFGRFDSFRSQDTGSFPQESRFSRFDSISSSKGENVSGFDTGNSSRNFGRFDSFDDADPFGSSGPFKASGSRSPPKF

SEQ ID NO: 60043 - protein, 198 aa, Zea Mays
MAPLLTLDALLFHMIGGQMKRFAKARKDLLVAVNEIVRHMFDEIDYILEGKNAERFATLYSHGSSGVNSEASTSIKVPKVYWNYTCKTILTLEWIDGIKLTDAERISKANLNRKRMIDEGLYCSLRQLLEEGFFHADPHPGNLVATEGGSLAYFDFGMMGDIPRHYRVGLIQMIYLQLQMRCGFPLVMSGGNQMISRP

SEQ ID NO: 60044 - protein, 2589 aa, Zea Mays
MASSPVKFFSVFLAVSVVGWIVFTFASRLLAWFLSRVFSASVGFRVAGFNCLRDVTIKFCKGSVESVSIGEIKLSFRKSLVKLSFGVISKDPKLQLLINDLEIVTRSSSENKKIRKSAKPRSTGKGKWLVTSSMARLLSVSVTDLIIKVPKGALDIKELTVDTFKIAGPNHTLGVKLHLLPLNILLGDLGLTTDPMGSCSLFDAFQSDQASVSNSEKSLAPFVCEDLLVTCNLGHEKEKGIKIINLELKCGYAIANIDERMFHKKRTIPEYNTVSLNTGDSITDTSALKQTSKSKSILPLLKKHMLTFPDKVSFSVPKLDVKFRHLHEGLSVDNNITGIQFTCAKSLPQDDFEEATPHFDVQIDLSEIHLIREGSSSLLEVLKVFTIASLDVPVDPFLPIRAEIDAKLGGTQCNIMLSRLMPWMRLHSLRTKGMKLSKRNSNQEISQKKEMKPILWTCTVAAPEMTVLLYSLNGLVLYHACSQSSHLFANNIASKGIQIHTELGELLVHMEEEYRELLKENIFGVDTYSGSLMHIARMSLDWGYRESDVQDMVETSRNALVFSIDISDMEVKFGFKHLESIVLNLMSFRTLFKSLQLSGGSAKEKNLERKGEKKMKGVKKLKLSLQKFSITYCGDANIISMPIADPKRVNYGSQGGQVIVSVSADGTPRRASITSVLPDCHLRFSASLVISHLSMCIDKERKTTEAELERVKAIYEELPEDRSGVRVTLLDMQNAKIVRRSSGHAEVAVCSLFSATDIYLRWEPDAHLALYETFIRFKHFLHHNVSQNSEKMINTEVASTKSNEHGNITAGFINSQKSNRKGSIFAIDVDMLRVSAELADGVEANMHVQSIFTENAKIGVLSEGLSLTFNGARVLKSTRIQISCIPFSTGSLLDAKIEPSSKRDWVVQGLDVHICMPYRLPLRAIEDAVEDMFRALKLVSSAKRSIICPDEKEKSRKVNSGGSKFGSVKFVLRKLTADIEEEPIQGWLDEHYHLMRNKICELGVRLNYLEEAISGSVDPSNHSSERKVLYNGVEVDIHDTTALQKLQEEIHKQAFRSYYVSCQNMVLAEGSGACSEGFQAGFRQSSRRASLLSLSASDLDVTLTRIDGGELRDYTSPLFSSLSGKCQGRIVLAQQATCFQPQIHQELYIGRWQKVTMLRSASGTTPAMKMYSNLPIYFQKGEISFGVGYEPSFADISYAFQVALRKVNLSTRASCSGLAVQLPKKERSLPWWDDMRYYLHGKIILYFNETKWKFLATTNPYEHVDKLQIVSEYMEIQQTDGRVDVSAKEFKIYISSVESITKNRRIKVPSRVPRPFIYAPLFSLNVVIDWQCESRNPLNHYLHALPVEGEPRKKVYDPFRSTYLSLRWNFSLRPLQSQYGNGPPPPFYGNNSMLRGIMSGSPCKMTDDDFPTMNLGAHDLAWVFKWWSLNYSPPHKLRSFSRWRRFGIPRATRSGNLSLDKVLVEFFFRVDATPCCIRHAPLSEDDDPAFGLTFKMSNLKYELCYSRGKQQYTFDCKRESLDLVYRGLDLHRPEVYLMRDNNLSSVENVSKVRTMVQQSHGKFVHDRCNMGNFQEKHEDGFLLSSDYITIRRQTRKADPERLMGWQDTGRSHEITYVRSEFEDDSESDHTLSEPSDDDDDFNVVLADNCQRVFVYGLRILWTIENRDAVWSWVGGISKAFEPPKPSPSRQYAQRKMIEERNAEGSKVPQDSSSSIHVGSPSVQHLDASGSSSSLHSKANRSSDVAVNHDIFDDSDKGGTAQYMVNVITPQFNLHSEEANGRFLLAAASGRVLARSFHSVVHLGKEILEQALGTSSAQILELQPEMTWNKSELSVMLKDVQAHVAPTDVDPGAGLQWLPKVLGSSEKLKRTGALLERVFMPCQMYFRYTRHKGGTADLRVKPLKELRFNSPDITATMTSRQFQVMFDVLRNLLFARLPKPRKNSLQYPSDDEDIEEEADEVVPDGVEEVELAKITLEQREREIKLLLDDIRSLTGNGDNGTDHCHSAEKGDCLWMINSGKASLVEGLKRDFANLQKSRIFASSALRKALSNASQSHLEKEKNKTTSCAMRISMKISKVVWSMLADGNTFAEAEINDMVYDFDRDYKDIGIALFTTKYFVVRNCMVNAKCDTLLSAWNTPPGKINMLRVDAKQGAPKDGSSPLELFQVEIYPLRIYLSEAMYRMMWDYFFPEEDDSQRRQEVWRVSTSTGPRRTRRLSSGVDAVTSSSYSVRDHELPGKSSTTVSTSTNVSSWQGILSDNSQVSKFQSIKANMVCGSHQELHRSSSFERNWEESAAESVASNDVVSLLNSSIVSSKVDASNSVLENPVVGSEMWRSKTKDSKPAKSGRLSHEEKKLGKSNDEKKTKPRKSMEFHNIKIGKVELLVTYEGSRLAINDLRLLMDTFHKAEFTGTWRRLFSRVKKHIIWGVLKSVTGMQGKKFSNHRETLEGSIPENDLNLSDSDVGQPGRHDQLTASWLKRPGDGAGDGFVTSIRGLFNTQRRKAKAFVIRTMRGEGHNDEYQDEWSESDGEYPFARQLTITKAKKLIRRKFRPRVQKNPGLSMQDSLPSSPRETTPYQSDSSRSSYEDFHEQ

SEQ ID NO: 60045 - protein, 132 aa, Zea Mays
MYYRRYCSKVKEQCSADMIHAEDAFKSSWIYHAEVMMAEFCTVCIEKNLIDKMIDLPWDSEEDKHLHKFLFNSAREVRMKPNDSLLVVYYLGIQVSGYAEKPFILNGTGVAQNGPAKRSVSGYAGYQPRITS

SEQ ID NO: 60046 - protein, 378 aa, Zea Mays
METERFALNKVHIQSSNAPRKNEGLVQQSISANRQKNGTSIRHSESLTTFAQRTVGGFPPAPSTEEKFKAARPLSNTEAAPRKEGIGQRISNISILVPKRTENTNRDVAKKEVGTSSPLPPNPANAMHKGNDKVGRPMENTQVPMQRFGSPSMSTAAVGMDRGTPRSSIPSPSITIRRPNGIVRPPKNISVSSKKPDAGDVSPAIGKEKEQGGRLLQANISTDQKLVMSKPPAVEKAAHGSAERTEKVSRDGVPDVAKKEDKKSDRHEKKKRKEKDKHKERKKEKEAKKEKEKHNYKEHDKTRENNISYPVDSLNLKPSAPPVAPPVDGGKSVVPDENLKKRKNHETNGYLQIADAMDKKEREKSRRQAHKRAAASSF

SEQ ID NO: 60047 - protein, 413 aa, Zea Mays
MDSHGHVSGGKRKGKRARKPEPPVLASPDNSHDHKHHDTAPSSSPLSTAAVAASDSPDPEPASSSPAPRRRGRKSRRIRNGTHSEVDAAPSPSPPPRRGGPKGAPNGAVDVAEPSRRELAVKMVEVPAAVEPLRWDQVVKVVPSMDAVVKVFCVHTEPNFSLPWQRKRQYSSSSSGFIIGGRRVLTNAHSVEHYTQVKLKKRGSDTKYLATVLAIGTECDIAMLTVEDDEFWKGVSPVEFGSLPALQDAVTVVGYPIGGDTISVTSGVVSRIEILSYVHGSTELLGLQIDAAINSGNSGGPAFNDKGKCVGIAFQSLKHEDAENIGYVIPTPVINHFIEDYKKSGEYTGFPILGIEWQKMENPDLRKAMGMKANQKGVRIRRVEPTAPESGCLEPSDIILSFDGIDIANDGTG

SEQ ID NO: 60048 - protein, 201 aa, Zea Mays
MSGMSDSAGGVRAGAELMVQQFHLKVLHAVLAVRTPRPHAFAAPAAASFRRRDRWFHLPLHDPPPPPEAADRLDELVPGEPLVVDVLLSPAGSVGARGEVVERWTVACEPWPDAAGGEEVAVNRAYKHCFTLLRARTLKMDLADSLHSPHAIHHGKMIWMMWITISTLMMLILQSPNLGELMGRKQVIRLVHHPINLKTHK

SEQ ID NO: 60049 - protein, 520 aa, Zea Mays
MAGHRNSHGKRQSDFTENGGSKRRNPGDDTYAPGPDDTVYRYLCASRKIGSIIGRGGEIAKQLRTETQAKIRIGESVPGCDERVVTIFSTSRKTNTIDGAEDEVCPAQDALFRVHERLASDEGLGNEDSEEISPQVTVRLLVPSDQIGCIIGKGGQIIQGIRSETGAQIRVLSNDHIPACAISGDELLQISGDTVVVRKALHQVSSRLHNNPSKSQHLLASSLTQPYPGSTHLGGSSTAPVVGITPVIPPYGGYKGDVAGDWPSLYQPRRDESSAKEFSLRLLCAAANVGGVIGKGGGIIKQIRQESGALIKVASSNSDPDDDCIITVSAKEFFEDPVSPTIDAAVRLQPRCSEKSDLESAEQSYTTRLLVSTSRIGCLIGKGGSIITEIRRTSRANITGGLDVARNALVQIATRLKANFFEREGSLSAFPPVIPYHPLPAGVSDEPKYLGRDTKPVGHYLYSSGFRTSDDTIPSDSYASYGGSQAPGRGYGAYSGYSARSSNSGLSGHSSLHYGKRHGY

SEQ ID NO: 60050 - protein, 568 aa, Zea Mays
MRRAGVGAGGGRGLEEGLAAAVRMLRPTLRQVRASGQVVPKLFPSPINLRFFGIEAGQSSNILRQKEIENGSRQIKWEQPTLSFGDMGRPFLTRSQSALESPQCTRRDDNKDPTTDSTSESFSEACLSMSLGIANNVNRMEATSTAERPVLLSTTAIAEGRELATTLSPFQHAQRARHFLTRPPRIGEGAAFDPTRDMFPHLRVARPPADGRGRNQLLPRYWPRITDQELQQISGDSNSTIVPLFEKVLSASDAGRIGRLVLPKACAEAYFPPISQPEGRPLTIQDARGKEWHFQFRFWPNNNSRMYVLEGVTPCIQSLQLQAGDTVTFSRIDPGGKLVMGFRKATNTVSLPDSQISAIANGSLLSETLFSTANENIGVVSGYPGFLHSIKGAADLHPNSLYDHHMNLVDGDVSWNKADKFGSRPDEGSLQFLQKRSHNIGSKSRRFLIDAEDAMELKLTWEEAQELLRPAPTAKPTVVMIEDYEFEEYDEPPVFAKRSIFTIRATGEQDQWIQCDDCSKWRRLPLNVIVAPKWTCTDNSWDSKCCSCSAPEELTPRELQSVLQQYEE

SEQ ID NO: 60051 - protein, 82 aa, Zea Mays
MILMTAAITPTNRLVRASDLITSQWLQITWPIFIDNESGCLPALGITRKRKFEEILVTKICSDSFSALPQECTYSSRFYSLE

SEQ ID NO: 60052 - protein, 79 aa, Zea Mays
MLSRSDVVKKMWDYIKGNNLQALLFQSPSRNRLYAYPLWPIARVLNCSSNQPITVSNWKNSRALLTCYVGLLENRRERK

SEQ ID NO: 60053 - protein, 698 aa, Zea Mays
MAAAEPCCISHAFERATRQEPGRLAVIHAAASGADSEERRFTCGDLLAAVGSLSRRIAAALGSTATDTRRDREQGSGFRAAGAVVPRVVGVYASPSLEYVAAVLAVLRCGAAFLPLDPSWPEERVSWAISASNAALVVSSVGSRGATLFESSACPVLRFYGGIRRRFRDGNGGDDGEELVWPCEHEWHRKFCYVMFTSGSTGKPKGVCGTEKDDVLLFKTSVSFVDHLQEFLSAVLTCSTLVIPPSEWRANPASLANLIKVYRISRMTLVPSLMEIILPTLAEKLSDGCNPLKILIFSGEVLSVSLWKRVYEFLPEATIINLYGTTEVSGDCAFFDCKKLPTILEQEELNSVPIGFPISNCEVSLVTNDGLSDEGEISVSGACLFTGYLADPMTSNCPEGSEVLAYYRTGDFARRLKTGELIFLGRKDRIVKIYGHRFSLEEVESTLRDHPDVSDAAVTFQSNGSLDFKAYLVLRSNNKFLKCTQGYSGLHSSRDIIAPLRNWLIMKFPLAMVPRLFIPMKSLPLTLSGKIDYVKLSSLVCAFEPCEIHPESSPADPHMQVIKKAFSDALLVHEVSEYDDFFSLGGNSITAAHVAHKLEIDMRLLYIYTTPSKLFHGLLGEHSHVIPPTPEFHNRKKLRKYASISDSFGPVSEYLDSNFHDQGQISKEGAYDHFAGNHWQTMDTKFSLTKGVVYWPLQ

SEQ ID NO: 60054 - protein, 814 aa, Zea Mays
MDLDPEGIFRDDSDEDEDSVQEREANKEMVVYLVDASPKMFTPATTQDNEKQETHFHTIVNCITESLKTQIIGRSYDEVAICFFNTKEKKNLQDSAGVYVYNVGDREQLDRPTAKLIKDFSLIEDSFMSTIGSRYGITAGSRENTLYNALWVAQALLRKGSVKTVSKRILIFTNEDDPFGTITGAVKTDMIRTTLQRAKDAQDLGLSIELLPLSPPDDQFNMSLFYADLIGLDGDEMTEYLPSAGDKLEDMTNQLRKRIMKKRRIKTLSFAITNDVCIEVNTYALVRPTTTGTITWLDSLSNLPLKVERSFICNDTGALLQDAQTRFQMYNDTIVKFSVRELSEVKRVASHHLRLIGFKPLDCLKDYHNLRPSTFIYPSDERIFGSTCVFVALHSSMLRLGRFALAFYGNPTRPQLIALVAQEEVTSSGRQFEPPGMHMIYLPYSDDIRYPEEVHVTSDDAPRATDEQIKKASNIFKRIDLINFSACQFANPALQRHYGILEALALGEDEMPDIKDETLPDEEGLSKPGVANAIEEFKTSVYGENYDQEEAEAAAGKASRGNASKKRKEVTDAAAQISAAYDWAELADNGKLKEMTTVELRSYLTAHDLPVSGKKDVLISRILTHLGFMLRVLLHAAKWLWLQMSLETGEADEVMCWAILVIYRVTSWALGTRFRFQPARPQPALEAAQPRLRPQTARPHSASAGDLLSAQPRLRQCDRPPAPRYAAGPSPPSSLFPPPVRPQASAPPCHRPLPSAHCAALHGQAPVPTCCRCIHLPGQAPVRRRIHLLPLPSTAQIHPLPLLPLTVNHLCGWE

SEQ ID NO: 60055 - protein, 99 aa, Zea Mays
MANKRQRDARKRFREANPDLFPPQTAPSADGTKNKSKKKKNKSMFKKANKGGTGRFKHPLRVPGMRPGERCFICKSTDHVAKACPEKALWDKKKGGANC

SEQ ID NO: 60056 - protein, 176 aa, Zea Mays
MPSAEAMRLFVKILEEEDPGWYSRVPEFNSEPIVDIQMHKPKEEPQIVPASTNGTSISEPKIISENGSSVETQDIDVILEGLSTVSSLDEWTPLAISGHRPKPRYEHGATVLQDKMYIFGGNHNGCYLSDLQALDLKNLTWSKIDAKLEAESSDSAKTSQIAPCAGHSLVRFCTTS

SEQ ID NO: 60057 - protein, 149 aa, Zea Mays
MVPGVGLVHAPFSVRFPTSFFKQACELAPIFTELVDCVSLDGESLQAALSRTKQVHEFTARLLDIHDKMMLINNKEDLPKLAQQSTSPYPHDIAPTFRRPDARHSAQCPAAMARSPMLSARTPALTSWNIIAMFPPTLENEPLMWKTRS

SEQ ID NO: 60058 - protein, 74 aa, Zea Mays
MQHPISSWHLSKQPLIRTGNRPLLQKSHLCRSHQVMKCNDYVFLFLINNDATVTTKKKVLLKNAVTSTYPPLVQ

SEQ ID NO: 60059 - protein, 265 aa, Zea Mays
MVSASAPPPQAQSDAAGSGEEVSKKVRKPYTITKSRESWTEQEHDKFLEALQLFDRDWKKIEAFVGSKTVIQIRSHAQKYLLKVQKNGTSEHVPPPRPKRKAAHPYPQKASKNDSSSIHRNSGMNVPVSSWAHSSIPQAVASSMVKEDLGAGTPGSNNFCSSSTEGLPRTWQPGETNDPINQIPSLRLMPDFAGVYSFLGSVFDPSTSGHLQKLKEMNPIDVETALLLMRNLSINLTSPDFEDQVLPIRDASTQQSRPEVRTTIL

SEQ ID NO: 60060 - protein, 440 aa, Zea Mays
MGDEGWLCPACDCKLDCIDLINELQGSDISIEDPWEKVFPEAAAMANSSKQDEAFDLPSDDSDDNDFDPNMPEEHVASKEEGSSEEEEDDDGGSDSDDSDFLTCSDDLEPLIDKKNVDDLGLPSEDSEDDDYDPAGPDSDKDVEKKSNSDESDFMSDSDDFCKEIKKSGGHDEVSSPPLPDVKVGDMEKNTAQSNTTSSADDPMETEIDQSVVLPVSRRRQAERLDYKRLYDEAYGEASSDSSDEEEWSGKNTPIKSNEEGEVGSPAGKGSRVAHHNELTTQNTKESLHSLHGSVDEKHGDLTSNGSNIKDRKGHFGPVISQKLHEHFKTQPYPSRSLKESLAEELGLTFHQVNRWFENRRHFARLASSRKGISPDKHSPQNTNSPVTPSMQPKEPEGTVMEESNVCINRDATISKKAVSSKVGSRKNLSKSSPKSRVRS

SEQ ID NO: 60061 - protein, 64 aa, Zea Mays
MWTVELRAPVDGMDGGQRCSGGDERRRRRDNVGRRRRTTTRREERRGRARQPGEMVHELGVELL

SEQ ID NO: 60062 - protein, 109 aa, Zea Mays
MQDLVLCSPSISNSQSHSCTLLHQPEKTYLPCSALTCFPLEHSRDCTHSFQPVLEFFCIGTLTQSCLSLFLIYLYSQVICEQPKVTHTKAFHHLSLEYSNAVLARPCND

SEQ ID NO: 60063 - protein, 161 aa, Zea Mays
MSLAPSIPSIKVKVGAVSVAPPHRACRSFAVIRSSKAEGPIRRPAAPPLSPPPPMPPKTPALSTPPTLSQPPTPVKPAAPPTSSQPMPPSPEPKPVDATAQMRKPVAGAMTLEYQRKVAKDLQEYFKKKKLEEADQGPFFGFLPKNEISNGRDISLQIDLA

SEQ ID NO: 60064 - protein, 525 aa, Zea Mays
MVVYPLRLATMFHNSIILQSLLIWGTSLLMGGHPALVSFAISCLSIILMWIFSICLPVVVAFALPYMCPFPIPYVANPWLTIGLFGSPALLGAFIGQHIGFILLKRHLRRVHSKAKTGITPSMIENVTDLEAERWIFKSGFVQWLIALILGTYFKVGSSYIALIWLVSPAFAYGFLEATLSPVRLPKQLKVVTLVVGLVAPVVSSAGLAVRMADVIVGSIVRIDRNPGGLPDWLGNVIVSVAIAVVVCSTFVYLLSYIHISGDKRILGLLLSLSFGLSIALASSGIVPAFTEDVARSVNVVHVVDTTGVHGGHIEPVSYISLFSNTPGKLTNELVDLGGEEFSCGRNMTTDLVTFTVKYGCWSYKESSTGWSRSEVPVLLVESDSVIGGARQTVVSVDTKSSTRWTLGINKDGIDDFTVQVDSEKIVLPGDKSEIDGWHTIQFAGGKNSPTKFQLTLYWSSSKPSEREAKQAADAPLLVKLRTDVNRVTPQVARVVEKLPRWCTPFGKSTSPYTLAFLTALRVDI

SEQ ID NO: 60065 - protein, 397 aa, Zea Mays
MELLETKKLEMEVETQLVLEARSGLEGSIEHLVEEDKLEEGTLSIKGEVLTKELADLLELVRLKEAEIAENNARIHEVQERISAVVSRFHGSQSDVDLKLNSLKEAQCKLDLETEALVLKKNEIDNFISLTEQKDSELREIIGACFSEAKTCQQSVEIRRKLASSILKSREDRIGLLKMEEEILQDIQMLRQKITDARTTLQEVSSRRTSIQQEMDSFKQKLSFIDKRGPELEAEKKVAAAARNFKEAGRIAAEAKALNSEKNELRGKLEKAATDLELIEKDIAATTDKIQECEGLVVLKEKDSALTSYKRLRLDCAAARAELTAATEIHDNEEVEILRKEAETADSKAMELKTCYDLQVEDNDFMFQPVVPIAFITNSTGQHLVEIASSFGLSPQK

SEQ ID NO: 60066 - protein, 79 aa, Zea Mays
MNRIKKYFYKIHKIIRFVINLGFARATGRVRRGSAGWRKAGSRLRTASAWLERRTAALVNSDDERQLRRRTALAMSEES

SEQ ID NO: 60067 - protein, 155 aa, Zea Mays
MSHVAPVMAIVTAIISIVMDPWHDFRASHFFDSSTHIIRSSVLLLLGGALAFFMVLTEYVLVSVTSAVTVTVAGIVKEAVTILVAVLFFNDPFTWLKALGLAIIIFGVSLFNIYKYKRFKKGHHSEDAGTNIQSYNGTSKYVILDDDTEDQDDSG

SEQ ID NO: 60068 - protein, 645 aa, Zea Mays
MEEKAMANGAATADVAAPDNKDNTKEEASESKEPAANQDADDQNKGLENGAEGQSGGDVNMADAEVTEEGDGDPGVAKQVDSEDIKTDADTKEDGNAKAEEVEDVKMTEADTGSTEVKDKEEKGDEVVDTTVDKQDESKEQEEGVSAEQDEKQGEEAEEKGKEMDADEKQEEEAEEKGSADEKDEDEGDQKMEENKEETPKNKKARSARDRSQGNDNKHDGSKSREAKSLLNTPSPYGTDRPQRERKIVERLVEVIEKEPNRNFVVEKGRGTPLKDIPSVAHRISRKKPSDLKFLHSILFGRKGKAVDFKGHILQFSGFVWHESDEKHRVKAKEKLDKCVKETLLDLCWTLGIPTPKANIRKEDIVSKLLDFIAEPHSAADSGLSDDQGSNSKKRKRGGESARKTPDSTPSRSRKKFINDSTSSKRQKKALEYDTDEDESMKSDSEENRDEDSDEAGDKQEGDYVSGKEKAGKFSEVKESSGKKKANTGSGHQSGPPKKIIRSPVKKVSSKIHEEKESPNNSAKVFSRKKKPTAEKEIKEKKSSGKKVTKGKGESVEAVLPSKDDLRKTITEILKKVDFNTATFSDILKKLDNHYKMDLAPKKEAIKVMIQDELTKLSEEDEGEGAGDTEKKQQQPQAKEIEASR

SEQ ID NO: 60069 - protein, 975 aa, Zea Mays
MTAIAMRLAVSLTDCKTWKSLNSENTSAADASVQSLIEFIGTCQSGMYNCVRQYIKSLGPHVTSAKKSSATATDDDFLITASAVTLALRPFDSKKAKGGVDLNGASKKYFTLILTIPDLCKRMPPLLLPALKHFSVLQPSLNILLISKDKIFEEIIKLEQSEVSASIIPCSGWALGNIVNLATNHDDLSNSGCFIQELDFCLYVDVINCISENLLESFEKSKGTSQNVGNITFHADTSVAEEEDTNDDCRMRTLFMDLLKPIYQQWHLRKLLMLAKEDFPCRRATDYDPNLKNIHFRILKLSDVICFYYHMLRIFSSLNPSIGAMPILNMLAFSPGFLVDLWEALEMPIFGPPIQNSQETGHEKQLATSSSGVQVSSMRQRRNAKDTANRWSNVLQKITGKSNDSEEGTLSDSILFSHESNDDALTSWDIEAMRHASEGIGKDLMCIMYLFCAIYGHLLLVLDDIEFYEKQVPFTLEQQRKIASALNTFVYNSFIQNSGSYSNPLVDVAVRCLNLLYERDSRHKFCPISLWLAPARNGRIPIAAAARSHEAAFGIFPGIPHRSSVLTTLPHVYPFEERVQMFREFIESDKASRRVTGEVSGPGPGSIEIVIRRGHIIDDGYRQLNCLRSKLKSCIHVSFVSECGLPEAGLDYGGLSKEFLTDLSKSAFSPEYGLFSQTSASDTSLIPSNSAKLLDNGIDMIEFLGRVVGKALYEGILLDYSFSPVFVQKLLGRYNFLDELSTLDPELYRNLMQLKHYDGDVEDLFLDFTVTEELGGKRIVHELRPGGKNISVTNENKLHYVHAMADFKLNRQILPFANAFYRGLSDLISPYWLSLFNANEFNQLLSGGLQDFDVDDLRNNTKYTGGYTESSRTVKLFWEVIKAFKPTERCLLLKFVTSCSRAPLLGFKYLQPSFTIHKVPCDVTLWASIGGQDVDRLPSASTCYNTLKLPTYKRSSTLRSKLLYAISSNTGFELS

SEQ ID NO: 60070 - protein, 115 aa, Zea Mays
MPPASIVPVIGDLRSNRLVCLRRDRGSYRAFVSVDEVLDLCVTGAEYEGSRAAQAASSWAEQTGESKRMDQELEPQVSHSENLYRADLPALGFVVVVRFSMRLVIDTAISWSQFS

SEQ ID NO: 60071 - protein, 264 aa, Zea Mays
MATVLPLKPVQTFEAGQDIVEQVIRSPMDLIRRKCTCKKSGCLKKYCDCYQGGAGCSINCKCDDCRNPFGRKVGVILDGKSSLTAPILHERNGTEVDSSDEEDDFYMNRQLSPIPPSPVSRESSFQQETLVGVEVQTMNGHLYPKPLTQVRPEPSSWQLSRRPIEEPRGEIWRFSRRPSEDGTSDAMEVHAVAPRESKKAAEVRGDRFGIPRCIEVMSAMAELSPVEKSLAPDVFLDASNREIFLSLSVDIRPIWLRRKMKSLV

SEQ ID NO: 60072 - protein, 391 aa, Zea Mays
MAAAAICVEDEAACAAAECAGIGNLDLAAAGAGAGGKRSVYLMDCAPVWGCASTRGRSTEMEDACAAAPRFADVPVRLLASRRDLDRLGLDADTLRLPAHLFGVFDGHGGAEVASYCRERLQVLLRQELRLLSKDLGETSEADMKEHWDELFTRCFQRLDDEVSGQASRLVGGVQETRPVAAENVGSTAVVAVVCSSHVVVANCGDSRVVLCRGKEPLELSIDHKPDRKDERARIEALGGKVIQWNGYRVSGILAMSRSIGDRYLKPFVIPKPEVTVVPRAKDDDCLILASDGLWDVVTNEEACKAARRQIQVWHKNNGAAGASWSLCDEGDGSTTDPAAQAAADYLVRVALKKGTEDNVTVIVVDLKPRKKSSGATRSIGRSGSITVELS

SEQ ID NO: 60073 - protein, 118 aa, Zea Mays
MIEHDGSAKGIVFSQFTSFLDLIQFSLERSGIKCVQLNGAMNITEKGRAIDTFTHDADCRVFLMSLKAGGVALNLTVASHVFLMDPWWNPAVENQAQDRIHRIGQFKPIKLSRARNAD

SEQ ID NO: 60074 - protein, 1145 aa, Zea Mays
MAAVGVGAADERWASLCNCVVNFLLEERYHLTALELLQELQEDGRSAHALRLRAFFSDPALFPPDLVARSSSAPPGADPQILLEEKIAAEEKLALTEYDLRLAKEDLSQLKLELQKQKESSPDDSNGLLLGASIREGYTRQQENWDVKISALGPLKDNERKDLNCAVKEYLLLAGYRLAVMTFIEEEKISILQENETLLKDNERLNAENDSLMKSREGANSQVAALRKSLEAAHKDIKDKEKMIQDLRQSLDVQRKELNDCRAEITALKMYIEGTQSIKQLFVGTSDGVKSHSFANSVGASSLNNEDEDSKGSEAITNKLASAVNITDDTQKDRQVLESSAEGSSVSETPVSFTAVENDSYGTSKEDKSVSNISSNNVCFQSNLHGASMTGKSQGSSDGISMYLSIEKLESPSKQKSSDKIALETIKIVSDALPKIVPYVLINHREELLPLIICAIEKHPDSDVRDSLTHTLFNLIKRPDGEQRRIIMDACVELAKSVGEMRTETELLPQCWEQINHQYEERRLLVAQSCGELAVYVRPEIRDSLILSIVQQLVEDAATVVREAATHNLALLLPMFPNLDKYYKVEELMFQLVCDPSGAVVEVALKELVPAVVRWGDKLDQISRVLLAHILASAQRCPPISGVEGTIDSHLRVLGEQERWNIGVLLRMLTELLPFIHQKAIQTCPFASADPTSSTPENFSASCLKSYATGDSEWSAFEWMHTDCLPDLIKLACLLPVKEDNLRTIITKYLLEVSGLYGKDYLEHIMLPVFLVAAGDIDSGDFTYFPLSIQPKVRGLRPKTSTAEKLAIMCVFPLLLSGILGSPSSRQQLEEYLRKVLIQNTKDGSFSMHHTTEIINAVRFLCLFVEHHSVIFNILWEMVASSDTSLKINAAALLRALVPYTDVKIASTHILPALVTLGSDQNLKVKYASIDAFGAVAQHFKNDMVVDKIRIQMDAFLEDGSHEASVSVIRALAVAVPHSTDRLREYLLTKIFKMTCITPVGNDIERRRERANVLCEALRALDATDLPAMGIRDLLLPSIQNLLKDLDALDPAHKEALEIISRERSGGTLESISKVMGAHLGIASSVSSFFGENSLLTKKEGGEEHDPAGPTAPEQNLQAQPESTRFGRIMRSGFGDILRGQSKGQ

SEQ ID NO: 60075 - protein, 926 aa, Zea Mays
MRIAFLVLLVLSLFLLPNGIGKSLAARPSVVNIGSILRLNSTTGGVSDVAIRAAVEDINSDPTVLNGTTLHVQTRDTNCDDGFLGMVQALQFMETDVIAIIGPQCSPIAHIISYVANELQVPLMSFASDATLSSIQFPFFVRTMPSDLYQMAAVAAVIDYYQWKIVTAIYVDDDYGRNGIAALDDELTARRCKISFKIGFRSNAKKSDLLNLLVTVSNMESRVIILHTGSEPGLKLLSLANGLNMMGNGYVWIATDWLSAYLDANSSVSAETINGMQGVLTVRPHTPKSKVKSNLVSKWSSLSKKYNHSDLRTSAYGFYVYDSVWTVARALDAFFDDGGRISFTNDSRLRDETGGTLHLEAMSVFDMGNKLLNKIRNVNFTGVSGQVQFNAQFELIHPAYDIISIIGNGMRTIGFWSNYTRLLSTVLPEDLYSKPPNTSLANQQLYDVIWPGETAQRPRGWAFPSNAKELKIGVPNRFSFKDFVSKDNATGSMKGYCIDVFTQALALLPYPVTYRFIPFGNGTENPHYSQLVQMVADNDFDAAIGDIVITMSRTKAVDFTQPFIESGLVILSPIKKHITNSWAFLQPFTLGMWCVTGLSFLVVGVVIWILEHRINNDFRGSPRQQIITIVWFSFSTLFFAHRENTMSTLGRGVLLIWLFVVLIIQSSYTASLTSILTVQQLDTSIRGLDDLKNSDYPIGFQVGSFVEEYMIKELNISQSRLKALGSPEEYAENLKLGPKKGGVMAIVDERPYVELFLSTYCKIAVAGSDFTSGGWGFAFPRDSPLQIDLSTAILTLSENGELQRIHDKWLKTGDCSTDNAEFVDSNQLRLESFMGLFLICGAACVLALLIYLGITIRQYLRHEQPGPAISVDAGSSTSKRSLRKFISFADDKQPPPKKKRAMSLSRSSMPTMPMSNRPGADIDVES

SEQ ID NO: 60076 - protein, 378 aa, Zea Mays
MGAVTSLLYGAEDPSIAGMVLDSAFANLYDLMMELVEVYKIRVPKFTVKMAVQYMRCVIQRRAKFDIMDLNVVQFAPKTFIPALFGHASNDMFIQPHHTDHIHQAYAGDKNLIKFEGDHNSPRPQFYYDSVSIFFYNVLHPPQFPSTCTHKLDKYYNLGAFKGAAGTNESLLYEIINGLRAAGTDAGSSSAATASFTNATKSVVELLTERVNQLSVKNDNDLVSQSLPALPLLLEIFNSTRVQDFLLDENHNLTEMDGNTGECHLEDKSNRQTDECCSYTSSNRESWGRCSSLGGASDGLSSGEQPEIPNHKLKSLTLRALATPLRRVQRKPLAIPKEKNRSLWKRLKKERQQMGENISQRLRLCLQGQARHKRTKSS

SEQ ID NO: 60077 - protein, 865 aa, Zea Mays
MATAVASQPCHLPLSAGGDPRCAASTSNVHTLEKVYGFRFICRSIVDVKTHKFHSRISKRKCYLRNSLSECDRTIHSGRWLEFRRHKGVFQRTRRMVHIIPLASDGDGNHISVNGALQVGSTSNIDEIKLKLNKALQSEDISNGLVQSIHDAARSIELALIEHSKLPKSSWFPKTWLGVENNAWIKSLSYQAAVDSLLKAVIDVSSRGNDRDRDINVFVQRSLSRLLTPLESVIKNELSKREPALYEWYSSDQNPLVVRQFVNIFENDPMFYSATAICLEGEPMNTSESDLSLLMLGLICLAAITKFGSAKVSCQQFSSMVPDIIGRFMDMLLEFAPLSKAYNLAKDIGLRREFLYNFGPRAAVPKLGNDHGLEISFWIELVQKQLLWALDREKIWSRLTTSESIEVLEKDLAIFGFFVALGRSTQGYLSFKGLTDLDDSLNGIVRYLIGGSVLYYPQLSSISSYQLYVEVVCEELEWLPFYNDDVLSAKTDTEGREEVPKGEVISRVLNVCSYWMTSFTKYSSWLENPSNVKAAKFLSKGHVMLSDCMKELDISRNMSNDSGFLEPEEELDTGTELASFDKSLENVEEALVKLENLLQELHVSSSHSGKEDLKAACSDLEMIRRLKKEAELLEASFLAKAEYLEADASSGSLSPAEEGPVKTSSRTNDTSAPQKTGSRVDNKRRPFWDFFGRSLKVDPALADQDLITVANVEKEGMESNDILRFEQLRRELIELEKRVQKSADEAQKEETVLQGTQLLAIDTGAAMGLLKRALIGDELTQKEKQALQRTLTDLASVVPIGILMLLPLTAVGHAAILAFIQRYVPSMIPSTYAPGRLDLLRQIEKVKEMEVAEGSSEDILEELNK

SEQ ID NO: 60078 - protein, 281 aa, Zea Mays
MANPLAGLQDHLKLARDYALEGLYDTSIIFFDGAIAQINKHLTTLDDALIRTKWMNCKKAISEEVEIVKQLDAQLKSLKEAPGTRRSSSPPIRSNKSFVFQPLDEYPTSSPAPFDDPDVWAPPRDTPTRRPTRGQSSARKSSQDGAWARGSSRTGTPSRSAKPNGIKGGAVKSTASNSSVRKGKQSSNKADSTSSDAEEGKSKKGQYEGPDMDLAAMLERDVLDSTPGVRWDDVAGLSEAKRLLEEAVVLPLWMPEYFQAHIDGNDMAFLVLYHGHSLRYA

SEQ ID NO: 60079 - protein, 305 aa, Zea Mays
MLEHAAEPEFILAGMTPEQLKCFSSYIEKQKIVKQNEVSEKVEKALVVAGLSSRDVTPFLKVRVIGLVNKHSASTSSNKEGLITIWNPTEMQKDNLVEGQAYSVMGLVPSNYCTEIMYLHARGSSTTWKPLASAQTTDFKPFFTPRRAIELLKFGEVPISSEFDIAGLILYVGNTYLCNNKKKQWLFLTDGSKFVSGQGCEEQDCLLAVSFSSATTDEDSTLFSYTLSGNTVGFSNLVKRQKDETRQVWVAEATESSSYTLSNEIPRKSHLKEAAVLAERWASRSYHKIQELKERVLCIVGNAGV

SEQ ID NO: 60080 - protein, 178 aa, Zea Mays
MTEIIVKALEITGQRGIINKGWGGLGTLAEPKDFVYLLDNCPHDWLFLQCKAVVHHGGAGTTAAGLKAACPTTIVPFFGDQPFWGDRVHARGLGPPPIPVDQFGLQKLVDAIKFMTKPVVKDKAVEVAKAMESEDGVTGAVRAFLRHLPSKTEEPSPPQPSGFLEFFLGPLSKCLGCS

SEQ ID NO: 60081 - protein, 336 aa, Zea Mays
MQLWETSGHAANYKENMFVFEIEKQEFGLKPMNCPGHCLMFANRVRSYRELPLRMADFGVLHRNELSGALTGLTRVRRFQQDDAHIFCREDQIKDEVKAVLEFINYVYEIFGFKYELELSTRPEKYLGEIETWNKAEQQLTEALNEFGKPWKINEGDGAFYGPKIDIGVFDALKRKFQCATLQLDFQLPIRFKLTYSAEDEAKIERPVMIHRAILGSVERMFAILLEHYNGKWPLWLSPRQAIVCSVSSGSVEYAKQVLAMLHEADFHVDIDVSDRTIQKKVREAQVAQFNYILVVGAQEAETGNVCVRVRDNADLATMSVDGLITRLREEIVAFK

SEQ ID NO: 60082 - protein, 976 aa, Zea Mays
MWAPSRGSSSGSGRRTWRRRIADYLADDQTDVSDNESFITAHSDEHAAPASGAGGMLPAFLADQGDLVEVMLELDEESMVVRSVTPTAAALCGPTSLPLPGARSLSRCSSTSSRIRRKFAWLRSPSPRPPAATAASDQQVVVREAALAARERRRAQARLDRSRSGARRALKGLRFISRTTGSSDADAGAGAGLWRGVEERFNALATDGLLARDDFGDCIGMVDSKEFAVGIFDALARRRRQNLERISKDELYEFWLQISDQSFDARLQIFFDMVDTNVDGRITREEVQELIVLSASANKLSKLKEQAEEYASLIMEELDPENLGYIELWQLEALLLQRDAYMTYSRPMSSGSAAQWSQGLSGGAGAGGQPSAQQQQGVASRWRRWSPRRAAARARVAAAESWRRAWVLALWVAAMAALFAWRFVQYRRSAAFRVMGYCLPTAKGAAETLKLNMALVLLPVCRNTLTWLRSTWARFFVPFDDSIAFHKIIATAIALGICLHAGNHLACDFPRLIASAPEEYRLVARFFGRDRPSYRGLLAGAEGVTGIVMVTLMAVSFTLATRPFRKREEASRDKKKAAACACRGVPLAGFNAFWYSHHLLIVVYLLLLVHGWFMFLVDKWYQRTTWMYISVPLALYVGERTLRAFRSKAYAVKILKVCLLPGNVLTVTMSKPYGFRYRSGQYIFLQCPTISPFEWHPFSITSAPGDDCVSVHVQTRGDWTQELKRIFVENYFTPCVPRRAAFGDLGAVDHKTKSPPRLLVDGPYGAPAQDFRNYDVLLLVGLGIGATPFISILRDLLNNIKLADELMDLAMETGRAEDSASNLSASTASGGGNKRRAYRTTCAHFYWVTREPGSFEWFKGVMNEVAEMDNKGVIELHNYLTSVYEERDARTTLLSMVQALNHAKHGVDIVSGTRVRTHFARPNWKEVFTRIASKHPNSTVGVFYCGRPTLAKELKKLSLDMSHRTGTRFDFHKEYF

SEQ ID NO: 60083 - protein, 545 aa, Zea Mays
MDYVVARMQLQQAAVPPPVHSIADHRPPPVSQRTRGSATMQRQRREALEQEVAELKQQLSNEQTVHQILERALQPSSSMALANIPAFIPTKAKELLAELLLVEEEIARLEDQIKRMKKSAATQQQQQQQTEHCKSMFFISQAMDGEAYLSTVVNNKRHSLASSSDGHAVLEKKIAQHELPITKKSPTVIAKRRARDQQQPPNKLSERILKCLVCIFMRLLRSSRASESAAGNLGGFRMDMGLVNVAAAAAAKEKERGQQDHYGIFGIQDSMVRDIGPYKNLVRFTTSAGSGSGSGSGSLDLHLLSRGFSASPLVSKLREMLEALQQVDVRSLNHHQRLAFWLNIYNTCIMHGILQHGLPSNSDKLLALKNKATINVSGQTFNALVIENFILRQPSSVKQELWQCDVDVEEEQAVREVYGLKTSEPNILFALCCGIRSSPALRIYKADRVLVDLDKAKLEYLQASLVVTSTRRLMIPSLLHSNMHDFAKDTESLLRWICEQLPTSWSIRKSMVDCLAAITNNNNKLEEVVVDVIPLDYDFQYLLPM

SEQ ID NO: 60084 - protein, 1327 aa, Zea Mays
MASDDGDKDILLLVHQVPLDMEDVPAPRLAHLLAPLHRAPPPPPPPPFRSPPPPQAAASAEHRLSFRGWLGIPRHWDDWVAKLRPLHARLWRRLGIHDAVLASTLRFKRDASAILHLASFWSPATATFAFPWGEATVTLQDVALLAGFPALGAPATAPLPPQWRPDEAALNGVRLGFNRSACKKAHHSAWVKHFLTDDNADTVFEHAAFLALWLTRFVLPGHPESTMRQAVFPIAVRLARGDRVALAPAVLASIYRDLREIKAFLIATGAAATTGNADMISSLSVYSPLYILQLWMWERFPALRPAKVNPLVDGDPLAARWHDLSRKLNPAQIREALSTGCNFVWQPYVSSMEHTGWVHSSDLAEDDELASLAQFLHPCELVGMDCIEQYLPHRVARQFGLDQDVPADVHRANQDWAIAWQTYQLEGKNVAFFIPHSEPGITTRYAQWWRQQLLPSGIDAATASAPVEWKTSKRKVKKTPAAMEAEAEKERKMKKARVSPTYTDKKRKLEELYDAKLSDWLPTARNEISDTTSDMESEEALLPNVGTTNDDIVLLMPRKQTTTAPVRALMDNDMILALGERGNFMVDEPPDIQSEPEAVVPATLDEEIVKIPEVISLDIPDKPEEGATAVMEEQKEATSVSDRSEEASALVIGEVEEKVAIEGAICVTGMNPSGNNSATVMEADERNAVPKEFGRAAKEVIEAVPQSQHEVNAGVINNSHDVVALPEEAHPVQPTNNSGGCPVVSCIMEDSKVAGDSGKIDYEYFCDFVEEQREIPCVQEISGENSRMGEKEREETSHESPQLEIVECVQDIVLRETDYDVNQKIVYPAVEDVATSDSMSTSLLGVPEPENAELNKHPYLAIKDEEDIPMEAARGEVAEMEQISTSAKGGAEEHGDFSELDHMGRADAKLHLHLNSEVPEKIDEIECKEVAGTMRLTGRYSDQKLGDVPEVGYTEDENIRGLVVNTSDRKPSEVSQVEPAKLEHSKDLVKEETDKSENIPGLECIGLEETRGDLMEECANTKSDNVPELENTGLGGTHGPIEDTDGRLKEIHDVNAELDKHNVHESDIDRSEDIMQIDPLTQDKATWLAKEETEDKTTKVQEVKYEQLRNEPPIQEDSKEKPCADSKDLSENVVVQSKEVDKLKQAGEGCQALMEKDMENASGAFVLEQTEDGHRKSLIETSINNDSEITLVEQLDGQSESLTRTGTVEIHGETIKAQDNEFYKDVVEDSNDSTNEKDVVEDSNESINAKMPCSSATVQLKEDKMEVFHEGKMEEPCAQDAELSNQREPSSDATAMEIEWLWNRTAESYAKTWRQQQWKAATHWIVD

SEQ ID NO: 60085 - protein, 271 aa, Zea Mays
MAPPPSMPAASDRAGPGRDAGDSSSLRLRRAPSADAGDLAGDSSVGLRENGEPQPPTNPPPQEQQQQHEMLYYRASAPAHRRVKESPLSSDAIFRQSHAGLLNLCIVVLIAVNSRLIIENLMKYGLLIRAGFWFSARSLGDWPLLMCCLTLPVFPLVALMAEKLITRKLIGEHVVILLHIIITTSAIVYPVVVTLKCDSAVLSGFVLMFLASIMWMKLVSYAHTNYDIRVLSKSTEKGAAYGNYVDPENMKDPTFKSLVYFMLAPTLCYQA

SEQ ID NO: 60086 - protein, 271 aa, Zea Mays
MQLIYLAKKKDLLVMSMFNHLTCLLMVKEGVIDREEFKKIMALMRSFNRQGSTHKDGLRIGLKVGKPVENGGVVEYFFGSDGNEPLHFDKFSKILKELHDEIIQLEFSHYDVKSSKTIPAKDFALSMVASADMNHINKLLDRVDSLVKEPDLKDIRITFEEFKAFADLRRRLEPLSMAIFAYGKLNGLLTKEDLKRAAQHVCGVDLTDRVVDIIFHVFDTNQDGNLSPEEFLRALQRRETDIREPTIPGPLGFLSCWFSGRKCSSLKHVVI

SEQ ID NO: 60087 - protein, 281 aa, Zea Mays
MSQTGEAQVPLLQTQEADAEWSSKPRRIALFVEPSPFAYISGYKNRFQNFIKHLREMGDEVLVVTTHKGAPEEFHGAKVIGSWSFPCPLYQNVPLSLALSPRIFSEVNKFKPDIIHATSPGIMVLGALAISKMISVPMVMSYHTHLPAYIPRYNLNWLLEPTWSFIRCLHRSADLTLVPSVAIAEDFETAKVVPANRIRLWNKGVDSESFHTKYRRHEMRVRLSGGEPEKPLVIHVGRFGREKNLDFLKRVMERLPGARIAFVGDGPYRCTIPQSLAICFF

SEQ ID NO: 60088 - protein, 170 aa, Zea Mays
MAAAARVSEVKAEGLLRGACAALAAAAALLVGLSTQTETVLLVRKKATVKDVQALWVLAMAAAAAAGYHLLQLLKCLYLGRVGGARPCRRSSRALAWTCLLLDKACVVALDGAHAVQWTKLCNIYTRFCEQVAGSLVLGMLAAVGTAVLSAASARNVFRHYSSLETYAAH

SEQ ID NO: 60089 - protein, 128 aa, Zea Mays
MVGGVDRSSNVRDRLLRPEVIAEPEITVTERTVEDECLILASDGMWDVISNDIACNVARQCLEDGNPPPADPTAGGGGGAPAAGVVVVAAREAEPRCLRAASLLARLAIGRETQDNVSIVVVDLKHRD

SEQ ID NO: 60090 - protein, 218 aa, Zea Mays
MLRSISFPTSIDSIALDPRSHIFYAGGRDGKIYVTAMGVDLSFHGRDESSILGALDDHSKAVTSLASSRDGLLLVSGSEDGNVRVWDTRCQQVTRKFKHSQGPVTNVLIVTPQRVNLPPLQPLRKVRSANGEAERQAVLLHRPENDVPIPGNKTFIFMERYLDELQKHGGSSRLFDFGPNAQNGTPNQQGTEWRDRYLELQDLFVHEVLHQMPSSRNP

SEQ ID NO: 60091 - protein, 428 aa, Zea Mays
MSSGGEKMLLFGSFTEDETKLLQGQPLKSPTKSVSKECERTEIQFGTLNLSVLNLEKISTSSVVLPAKSAKGETSAITKENACNNEKKAAGSSLSNGGPVLANGCPPVNVPANNGLFENVKTEAVVPPVIPVKIISNPTPQMTLETHKDGTKPTESRKLNKEREITENGSPIVDKHIVAAPAEEAVTSLNKKASQNMPLLPHGLRNTGNICFLNATLQALLSCSPFVYLLQDLRNRRIPKVGYPTLSAFVELISQLDVPDESVIKKNEKVITVAAKPLNPAMFDAVLRNFTPDVPAGITARPRQEDAQEFLSFAMDRMHDELLKLNGDGLNSKEGMVVSSADDDAWETVGRKNKSAIVRTQSFVPSELSAIFGGQLQSVVKAAASATVQPFLLLHLDIFPDAVQTLNDALRLFSTPESLEGYRTAAGK

SEQ ID NO: 60092 - protein, 271 aa, Zea Mays
MENNQEIEILCRLDLYIPKDNSKSSPVVAFVTGGAWIIGNFPQGTISDMVSDASEAISFICNNVVSFGGDPNKIYLMGQSAGAHIAACALLEQAIKESKGENTYWNVAQIKAYFGLSGGYNIQNLVDHFHERGLYRSIFLSIMEGEESLPHYSPEIVAKKLSAETISLLPQIVLLHGTADYSIPSSASETFADVLKQAGGKVELQLYKGKTHTDVFLQDPLRGGRDKLVEDVLSVIHVDDASARERDASAPTPERLVYEWQIKLARQISPF

SEQ ID NO: 60093 - protein, 443 aa, Zea Mays
MDREFPAYLVLDNNKRIKGQSLSRTRLPANKYYQLISSEEAKGANATVTQAKLCIGGSLDKAKVKGKIVVCVRGKNARVEKGEAVHRAGGAGMVLANDEASGNEVIADAHVLPATHITYADGVTLLAYLKATRLASGYITVPYTALDAKPAPFMAAFSSQGPNTVTPEILKPDITAPGVSILAAFTGEAGPTGLAFDDRRVLFNAESGTSMSCPHVAGIAGLLKAVHPDWSPAAIKSAIMTTARVQDNMRKPMSNSSFLRATPFGYGAGHVQPNRAADPGLVYDANTTDYLSFLCALGYNSSVIATFMAGAGDGHEVHACPARLRPEDLNYPSVAVPHLSPTGGAHTVTRRVRNVGPGGATYDAKVHEPRGVAVDVRPRRLEFAAAGEEKQFTVTFRAREGFFLPGEYVFGRLVWSDGRGRHRVRSPLVARVVNTKKKHISIA

SEQ ID NO: 60094 - protein, 352 aa, Zea Mays
MATTTAAARWSFPARLQLLTSRRFCFPASSAAPPSSVAGFSWADALRVAGDGGRGDESDLSGYFRKVKSCNRGMDKKGQFVKFSVEDQVVGYIHKGFIEHIRDFHDVFTIVMDDNGSNTVEHVSLQSSLRTPEDRTHAIGSVIKSLGELIPGIRNELYPVTSSYGMPVYFSLERAAAPYFGIKAYGVHMNGYVEKDGQKFLWIGKRSDVKQTYPGMLDHLVAGGLPYGMSCKENIIKECEEEAGITRSISTNATSVGAVSYMDIEGFRYKRDVLFCYDLQLPADFVPNNEDGEVDSFRLVPVIHAANIIRRTDFFKPNCNLVIIDFLFRHGYINPDSRCYLDLLQSLRSGDL

SEQ ID NO: 60095 - protein, 1023 aa, Zea Mays
MPPHGTRGGTSATPAIPRASKSSVSKRWLRLRFQVHELLPAGPTSPSRGKVQVVINVHKAALHFMDGIRRYHLSPELIEEGFCISPDELAAITGIREDSTILKSHGGISGISRKIKASLDDGIKETEIATRQKLYGSNKHTEKPPRSFWTFVWDALHDLTLIILIVCAVVSLMVGLATEGWPKGIYDGLGIITSILLVVLVTASSDYKQSRKFMELDYEKKKIYALVTRDRKTKRVLIHDLVVGDILHLSVGDVVPADGLFISGYCLVIDESSLSGESEPVDVSEEKPFVHAGSKVVDGTAKMLVTAVGMRTEWGKVMDTLSADGVDETPLQVKLNGVATIIGQIGLAFAILTFLVLLVRFLVDKGMHVGLSNWSANDALTIVNYFAIAVTIIVVAVPEGLPLAVTLSLAFAMQKLMNDKALVRHLAACETMGSASCICTDKTGTLTTNHMIVDKVWMGDVSKSVNSDTNMNELKDATAESAVDLLVQGIFVNTAAEIVKGDDGRRSILGTPTEAALLEFGLGLQGDLYGEYNKMARVKIEPFNSVKKKMSVVIQLPNGGLRSFCKGASELILGQCDSFLNSEGNLAPLSEMQKQNVLDIINSFGSEALRTLCIAFKDLGEIPDDQTIPEDGYTLIALFGIKDPVRPGVRDAVMTCMAAGIKVTMVTGDNINTAKAIAKECGILTEDGIAIEGRELHDKSMDELKEILPKIQVMARSLPMDKYKLVTSLKSMYQEVVAVTGDGTNDAPALSESDIGLAMGIAGTEVAKENADVIIMDDNFSTIVNVARWGRAVYLNIQKFVQFQLTVNIVALIVNFISACIIGTAPLTAVQLLWVNMIMDTLGALALATEPPNDEMMNRPPVRRGHGFITQVMWRNILGQALYQLLVLGTLMFNGKRILNIEGPNADRTINTLIFNSFVFCQVFNEINSREMEKINVFRGILKNWVFIGILTTTIIFQVIIVEFLGTFANTVPLSWELWLLSAILGSVSLVISVILKCIPVESRKTDIKPHGYELIPEAPETV

SEQ ID NO: 60096 - protein, 323 aa, Zea Mays
MDAGEVRHWNADVNGVSIHVAERGPEDGPAVLLIHGFPELWLSWRHQMAALAARGFRALAPDLRGYGDSSVPSDPAAYTIFHIVGDIVALLDHLQLTKVFVVGHDWGAMVAWHLCLFRPDRVRAAVVLGIPYFPRGPRPMTDSFAKLGDGFYINQFQEPGRAERAFARYDVATVLKKFYALKIDEMIAPPGVEIIDFLQAPSSPIPWMTDEELGRYAEKFEKTGFTGPLNYYRMLETNWRLTAPWSGSKITVPAKFILSKNDVGLQSFGTEKYVKSGALKENVPDLEISIIEGHHFVQQEEAGTVNSEILSFLGKFPSEGGSA

SEQ ID NO: 60097 - protein, 108 aa, Zea Mays
MALDGAVGYLSLSLAPSPLPLLLYKGQSSLLPSSPCPKLSLTSHSHVHADHWSVASSPSAEARRSPPRSRPPRAEPLPQRSSTHAAIPRPSLAPRSPCRSCHLFVARS

SEQ ID NO: 60098 - protein, 343 aa, Zea Mays
MLKPERWHACFDSDGKAICFRKALKFIVLGGVDPSIRAEVWEFLIGCYTLSTTAEYRGKLRAARREKYRYLIKQCQSMHTSIGTGELAYAVGSKLMDVRTLPKETEGGEVSTSQQAEHEVPCSLAENSNLIYGSGCTTRPHKRKICSKSAETVGFNQHNDNSRGSGDCDVIGEPRYDSDAFIDFPSLTGTNLVANGDGDSNGVEENPCNFLVSEHRVRPHDEHMHSFQINNNIDLIIESNTFSNDIFRPSSSDSAIFHSDAYKHDRWLDDTGYSEEIIDSLRISDAPESDLVDGMKSNGSIADKDRVSEWLWTLHRIGMFIFLIHTIAVVSCDCILVRDKKNF

SEQ ID NO: 60099 - protein, 81 aa, Zea Mays
MELSHPFDCAVATSGIDNTIKLWTPDANATSMVAGPELDVLSAIENNQRTLCRKRQIVLPFEFLERVRMREFSESFECNQS

SEQ ID NO: 60100 - protein, 84 aa, Zea Mays
MAWPWSPPPRQTARFVVVVVVAVVLLFAAAPWPRAAAQAGYHVVSVSGTGGQLSARLELTGAGQKAELGPDVRRLSLTARKMIF

SEQ ID NO: 60101 - protein, 866 aa, Zea Mays
MDIVCEVCGVVGYRQLLIQCSNCKNAARHLYCLDPVIYDASAIEWLCDDCPPKHNEETQKAVGAVGPTMNTMECLDLSMGKDGCSFSQNCVEGFTQGTKSDFFSSINDVETSYPFVKGSSCPTLPNMEQKDGVLENAEQPHLLEMVNLDGTSHSLVDPPLEIKEQGAEAGLFASVEDVEQTHPILTDETSPIWSSEEQVDGSCPASESREQPVPFKVVILGPWHDVPNSILRSRPPSNYSQSMQGSDLYVGNVDVLDLSKEQLDSRLKPEEQGAEDGLFASVEYVEQTHPNFTEEKVDGSIPTPASSEQPDQLEVVRPWDDAPNSTLRSKPPSNYSQPMQGSDLDVRNMDALDPSKEWLDSRLLSNTVEPSSSSNGGGTSVEKDNIEKTERLSGIDTVTPGLDNVQGSNPSAEPSSSSTGEGNSAVEKHSAEMTECLLGMGILNPALHNVQVLSPSTPKECLVSSADKSDVANRSDEINHSLDDFNQSNPKPVLKGRVSKMMCPRLAFQLPKVLPVCEHHKREMSLPSKHVSPRKATKSSFRKQYEGPNRHVSRHTEHQKTKLVMKDRNTGPAHMRSCRPTKQIDCTCSSASLDSSTKTKEVNDAEPRCSKSVKTFENVMAKKRKRPILSYDEDAKAMQMEVRMRRRHRESGVMKLRRSTENSDEAMCPGNSNNQLTNDHTKARKQRRANKDNKTPPVNASVPCTQIDAARLASDQQSFICTRPIDRPYWTGIMKIGQEYISLVAHLSNQACKKVQELSMSLPPLMKVTKHSKLKAWPGRWKASEPTAECVGLYFFSDNMRELDQLVHYLNDHSLVLKYVVGFAKLLISPSVFLPEQCQTFQGKRYLWGVFKRRMNTGRIHHVNAK

SEQ ID NO: 60102 - protein, 538 aa, Zea Mays
MRCFLSRQVLPAVWARGSLVGGREATHASTSPNWRGHTTPHHSSVQPLPLSSPLLPKQEQRDARARATSWWNLAASRGRSRAEPWFRREIRARRPPLAASVPEHYQDYTSTLKMAIGLLAFESHQGLWNSGYYSQLFGIGGVLITLTILMLSTGYFGGIGAPFAPYFWPYLGQVPKKRERKRPVRVYMDGCFDLMHYGHANALRQAKLLGDQLVVGVVSDEEIVANKGPPVLSMEERLTLVSGLKWVDEVVPNAPYEITEEFMNTLFNKYSIDYIIHGDDPCLLPDGTDAYALAKKVGRYKQIKRTEGVSSTDIVGRILLTFRQKDADTDLSVVVAEKSGEKSNDEVKSQLSHFLPTSRRIMQFSNGQAPSPGARVVYVDGTFDLFHAGHVEFLRSARQLGDFLLVGIYDDESIRDRRGCRPIMHLHERTLGVLACRYVDEVIIGAPWEVSKDMITTFNISLVVHGTVAEGNSAGEIDPYAVPKSMGIFQTIRSPKSITTLSVATRIVDNHEAYKKRNLKKKASEDRYYTQKKFVSGD

SEQ ID NO: 60103 - protein, 544 aa, Zea Mays
MLQPYSASSSSITLSMRATPTHQRRARPPPPSCLATRHLRRRRAPAGINRVPNLGSAVSTKKAGMSKDTFINLDVSHHRAVAVVRLLRIEKGKAFVDLLNEKANDSGDKEIGYVQRTLGFSTRYLEDRDIRLVTVIVAGTVRWKRYLDYLIMSLCSEEKVFREMEPLLLQILRIGFFEILKLDVPAYAAVDENVRLAKVALRPGAGNMVNAILRKLVLLKETDSLPLPKIEGDDRAQARALSIIYSHPVWMVRRWIRFHGKDEALRLMNWNNSDPHFSLRVNTSKGYTRADLVKRLESLQVHYEESIMDEFVRIREGMQQVLKAGLLKDGICAVQDESAGLVVSVVDPQPGETIVDCCAAPGGKTLFMASRLSGEGKIWALDINKGRLRILMDAAKLHGLDDMITDIHADLRLYAKETTVKYDKVLLDAPCSGLGVLSKRADLRWNRQFENLEELMCLQDELLDSASMLVKPGGILIYSTCSIDPEENEERITAFVQRHPEFALQSVCGYVPREFITDEGFYSSNPTKHSMDGAFAARLVRSTH

SEQ ID NO: 60104 - protein, 425 aa, Zea Mays
MVTPFEKTKIAAYIVGAITPCMRLYAYLGKELMAFLKQDENHPYKKWINTYASSDFENNALQIEELLDKLSVSLTGEELEIIGKLYQQAMKLEVEFFSAKLVDQPVVAPLSRYCDPKYKLLIFSDFDLTCTVVDSSAILAEIAILSFQKASQSGIDNNLDRAKSGELRNLWNMLSKQYMEEYEECMERLLPPEESKSLDYDKLYKGLEVLAEFEKAANSRVVDSGVLRGMNLEDIRKAGERLILQGGCKNFFQKIVKTREILNLDIHILSYCWCAELIRSAFSSAGCLDGLNIHANEFAFEESVSTGEIDRKIQSPLDKVEKFKSIRSDADSTVPFLSVYIGDSAGDLLCLLEADIGIVVGSSTSLRRVGRQFGVSFVPLFLGLVEKQRQLMDEDASVFKPRSGVLYTVSSWSEIHAFVLGSDFS

SEQ ID NO: 60105 - protein, 354 aa, Zea Mays
MCTRMSFTGSAPESSDPNKQPAKKQTRQWAAWTHQEEENFFNALRQVGKNFDKITHRVQSKNKDQVRHYYYRLVRRMKKLLGPRFSLDAKNSKDTIAAMLRWWSLLEKFSCSASKLHLKPRRFKTFVEALGKQLLKDRNKSRKKHSRVDMCISSPSPVISKAPGDETPPVKFLSIDSQNGSRVASPKGTIFKRIAEPISNKSGTTKGDLSATRTVKQKRKAGGAVASAAYKKWERAAMAGVSLVADAAEELERNTINPGMLCNVDARTLTSSSDRLSTGDGISTNHMKETDSQAPVKLKLQLFPINEATRKALEKDDHNPHLELTLSSRKKISSVLEHLNRKWEMDNKRYCCSR

SEQ ID NO: 60106 - protein, 66 aa, Zea Mays
MQAYRESMERLLIYNNKMPAGHSGPGSPWSSFEDQALVVLVHDMGENWELVSDALNSIIQLKGFGS

SEQ ID NO: 60107 - protein, 64 aa, Zea Mays
MLLEMFGVVVRAVLLSHQVMGSKQLLHIYVGRLASAYPFTDATHVGASSSFTEGSYCYSSTCYI

SEQ ID NO: 60108 - protein, 610 aa, Zea Mays
MARRDHDDDDEEEVEEEAYDLDEEEDDEDEEDDYEEEARRGKASRGGGKGGGGRKRSREDNFIDDSAIEDEDEDDDDDGGGRPRKKGGGGVRGFFDEEAQVDEDEEEEDEGEGEDDFINDAGADLPDEDVVRGSRRHSIPMRDEEEDIDEIERQVRERYARSTHIEYGEEAAEVEQQALLPSVKDPKLWMVKCAIGHERETAICLMQKFIDRSDLQIKSVVALDHLKNYIYVEAEKEAHVKEACKGLRNIYASAKITLVPIKEMADVLSVESKSVDLSRDSWVRMKLGIYKGDLAKVVDVDNVRQRVDVKLIPRIDLQALASKLEGESVKKKAFVPPPRFFNIDEAREMHIRVERRRDKESGEYFEWVDNLKFKDGFLYKSVSTKSIHTNNIQPNFDELEKFKKPGDDMNGDMASLSTLFANRKKGHFMKGDAVIVIKGDLKNLEGWVEKVEDETVHIRPKISDLPKTLAFNEKELCKYFKPGDHVKVISGVQEGATGMVVKVEGHVLIILSDTTKEHIRVFADHVVESSEITTGITRIGIIGKMEILLLGVAVQLTSQEPHKLGHTKPPHLDQGGQTLQELVSMMLLLPGITMQMPQVHTCLPRLLANQ

SEQ ID NO: 60109 - protein, 455 aa, Zea Mays
MNCSSCCAAATPSSPALLARPRGGLAASCSTTTANQKVLFLGSKQFPRITYSRASSRLSRREVIAFAGQQPWDIGRFVKTLYFFNGPPNLLKIVESIISSFTGPASSEVPKKMETSDVVLVTGATGGVGRRVVDVLQKKGVPVRVLARNVDKARSMLGPDVPLIIGDVTKEDTLDPKLFKGIKKVVNAVSVIVGPKEGDTPDRQKYKQGIKFFEPEIKGPSPEMVEYIGMQNLINAIKSSVGLSEGKLLFGFKGNLSGEIVWGALDDVVMGGVSESTFQILPTGSESSGPTGLFKGTVSTSNNGGFTSIRTKNFTVPEDLSAYDGIELRVNGDGRRYKLIIRTSYEWDTVGYTASFNTTKGGWQSVKVPFSSLKPVFRARTVTDAPPFDASNITSLQLMFSKFEYDGILNPTFTEGPFELPFSSIRAYINEPITPRFVHVSSAGVTRPERPGERI

SEQ ID NO: 60110 - protein, 115 aa, Zea Mays
MHQRKAEMARQSDAFVALPGGYGTLEELLEVITWAQLGIHHKPVGLLNVDGYYNSLLTFIDKAVEEGFINPSARRIIVLAPTAQELMDKLEEYEPYHDRVASTLNWETTMDHLAY

SEQ ID NO: 60111 - protein, 139 aa, Zea Mays
MLALTASASSASSHPYRHASAHTRRPRLRAVLAMAGSDDPRAAPARSVAVVGAGVSGLAAAYRLRQSGVNVTVFEAADRAGGKIRTNSEGGFVWDEGANTMTEGEWEASRLIDDLGLQDKQHLTPNTSVTLSKMEHQHW

SEQ ID NO: 60112 - protein, 204 aa, Zea Mays
MMLLLTSFSIVISNFGPFITSLYCLGLFLGTIYSVPPFRLKRYPVAAFLIIATVRGFLLNFGVYYATRAALGLTFQWSSPVAFITCFVTLFALVIAITKDLPDVEGDRKYQISTLATKLGVRNIAFLGSGLLLANYIAAIAVAFTMPQDFRCTVMVPVHAVLAGGLIFQTWVLEQAKYRKDAISQYYRFIWNLFYAEYIFFPLI

SEQ ID NO: 60113 - protein, 928 aa, Zea Mays
MLRAAAAAAAIFPARVAAAPAAAAAEELRYPLLRVIGTLRGSRGSVLLGRRVRFCSNSSASDSEVAAADAEANAEDATVAEEEAGSKASSAIVPTSTNIDDCLSVIALPLPHRPLFPGFYMPIYVKDQKLLQALIENRKRSAPYAGAFLVKDEEGTDPNIVTGSDSEKSIGDLKGKDLLKRLHEVGTLAQITSIQGDQVVLLGHRRLQITEMVEEDPLTVKVDHLKEKPYNKDDDVIKATSFEVISTLREVLRTSSLWKDHVQTYTQHIGDFNYQRLADFGAAISGANKLLCQEVLEELDVYKRLKFTLELVKKEMEISKLQQSIAKAIEEKISGDQRRYLLNEQLKAIKKELGLETDDKTALSAKFRERIESKKDRCPSHVLQVIEEELTKLQLLEASSSEFSVTRNYLDWLTVLPWGNYSDENFDVHRAQKILDEDHYGLSDVKERILEFIAVGKLRGTSQGKIICLSGPPGVGKTSIGRSIARALNRQFYRFSVGGLADVAEIKGHRRTYVGAMPGKMVQCLKSVGTANPLVLIDEIDKLGKGHSGDPASALLELLDPEQNVNFLDHYLDVPIDLSKVEVTDAALLALIENYCREAGVRNLQKHIEKIYRKIALQLVRQGVSNEPDQESLGVTVNEESNSGDSITAKDEIVKDPAVEDASVANNVTNPASEEANEVNLTTEAPKEDSTSKGNKKTDGVAEDAADKATEKVVVDSSNLGDFVGKPVFQAERIYEQTPVGVVMGLAWTAMGGSTLYIETTKVEEREGKGDLVLTGQLGDVMKESAQIAHTVGRTVLLEKEPDNHFFANSKVHLHVPAGSTPKDGPSAGCTMITSMLSLAMGKPVKKDLAMTGEVTLTGRILPIGGVKEKTIAARRSAIKTLIFPAANKRDFDELASNVKEGLEVHFVDTYSEIYDLAFQSDAGTEMI

SEQ ID NO: 60114 - protein, 879 aa, Zea Mays
MDRSWVHARLFSHEYINGVKEFMSFIHGKFGEDEEILCPCSRCLNQKYQHQALVERHILMNGMESTYTRWIHHGENLDVYGLLNESGMTEDNSYDDGNLNGLLQDLDSAEKDKQDNENENDPEPNDKDSFFKSVMKEAKRQLYPGCTKFSKLSFVVKLLDMKSLYRICNSAFSAILKLLGDAFPECNTLPKSYYEAKSILKKLGLGYESIHVCYNNCVLFRKEYSKLDNCPICGLSRWVDVEGKKIPQKVLRHFPLIPRLQRMFVNKETAEQAQWHKLKGNPKENEMSHPADGEAWQDFDRKYPNFAKDARNLRLGLATDGFNPFSEKNTKYSMWPVLVVPYNLSPWACMEESNFMMALLIPGPTSPGKDFDIFLEPLIEDLLELWTGVPTYDALTGQKFNLRAAVLWCIHDYPALGTLSGRKTKGFFACIHCDKQPLSYSLRSKIGYFGHFRFLPVGHRLRKNNEFVGLHESNDPPGKFSMEELMAELERVKHVRPGKQQGSRKRKRSNLDKDHVVIWSRMVSLWKLPYWKNLKLRHNLDIMHIEKNICENLIGTILNIPGKTKDTIKARFDLKDMGIRKELHFRGNVDSCEMPYARYTLPTEYKKAFCDFLREVKFPDGFASNISRCLNAEGTKLQGLKTHDCHILLQRILPVAMRGFLDKDIYEALADLGKFFRELCSRTLKKDVLAEMRKEIPIILVKLEKIFPPAFFDVMVHLAVHLPDEALLRGPVHYGWMYPIERRLYTLKRYVRNRARPEGSIAEAYIADECLTFCSKYMDDVETKFNREPRNKGFSNEEAYTVDVFGHGVNFTSAPELVYDDSAIDQMVWYVLNNCSQVDKYMRMFRDELERDGMPNIERTLRQGFQTWFRTHILRMRNI

SEQ ID NO: 60115 - protein, 405 aa, Zea Mays
MVQRDHEQKSQIVERRIRDDAALEEAKRKEQAVKEEKLRQERAQQEAEARQKEAAKLAAEARKTAFEAAKKEAAEKEAAEKEAAKLRDAAASQPSPNSQNNTAEGIKVFGDKYALEAESRRHALVQNQVPENIHHSKEFSKYDRQIAKSISKLMPTTDSVRTRASELVKALNGQDCPRPISCCLFANKIISIVKSRNTKDKTFGNLAFACGYVMLLVTNQVPDAMDYLLAEFNRVCIYTVPKHMHALNAQARNRDYYRLIGYQEENGQLESTESYLTYVVAYVKLYAAMIQTEIKGVRHPHGLAEGWKWLAMFLNSLPATTATACALHAFLKMAGFALHKKYGSQFMKILDVISRCFLPALKEQGNKMQAEAVNNLQNYLNDKIYLEEPEGQYLVQQLLSKELFM

SEQ ID NO: 60116 - protein, 208 aa, Zea Mays
MGSFVKLARRAVETDAPVMVKIQELLRGAKDVMSLAQGVVYWQPPESAMAKVEKIIREPTLSKYGSDDGLPELREALFEKLRRENKLTKSSVMVTAGANQAFVNLVLTLCDAGDSVVMFAPYYFNAYMSFQMTGVTDILVGGSDPKTLHPDVDWLEKVLKENDPIPKLVTVVNPGNPSGAFIPRPMLERISDLCKNAGAWLVVDNTYE

SEQ ID NO: 60117 - protein, 201 aa, Zea Mays
MMNSQKLQLPVQDLMSLRGRSFIISKVAAHPSSSRRRRPRGLVAAAGSDDDECASAGGESESSSSGGKDDGGGGLSREDLERLVGSDEDAKFNGLDLANLIRKKYGRSYDVTLIKKEFMGRNLLAMNVMWKYREQRSFPLSEEEYLLRLDDVANTLKCWGAVAHVRNTLEKLKERPRIGKAVSIFIDMDQTGGRSNEWIYK

SEQ ID NO: 60118 - protein, 818 aa, Zea Mays
MADGAIVVAICQYGGEFTSGPSGNLIYRGGEAHAVDVTHDSSLESFKDELSKVFHVDVTDMSLKYFLPNNMKTLITISCDRDLQRMVGFTANAAHVDVFLISRQENRSTITHSGATSGSVASGDKRKRPTPKNKVIRSSKPATSAACNALQAITDNVRQPISVITENEDNRVFQLEFGNDITFTTTAGGASFTSDILDQQKLVLVDNIPKEAVSLFDDAFNPYVSSEIMHEPPQEPNNPIVLWDDIIKGVGQEFDNVKDFRAQLCKYAIGKGFVYRFIKNETTRVTVKCGAEGGCTWRLHASESSRNKKFIIKRLTDEHTCGGGSGEGQRRATRQWLTTIIKEKLHDNPKFKPKELVKELFEEYGVTLTYSQVWRGKEVAEKELYHAVRETRDQLPWYCQRLEETNPGSISVLSPVLDMKTRRFFVALHACLHGFINGCRPLLFLDKVPLKATNEYKLLVAAAVDADDGVFPLAFNVVEDENYDSWGWFLMHLKIALQTHNYPCNGMTFLSNGQMGLDAAVSHVFEDGEHAFCLHHIIEEFKGELRKGPWSQQIREGMVEDFTRAAQACSIEDFNASIESIRNISSEAADWIIASKPEHWSDAIFRGFRYDHFSLNIVDAFDNWIPAKKESSIVLMVDSLRIKIKEVIESRLEACKVWQGPLTPTMEYKVQDEMLKAGKMTVLCSSDTVFEVRGNAVFVVNIGNWECTCRRWQLSGLPCMHAIAVFNRLGRCFYDYCPKFFRIESYHLTYSGIIFPIPDLDSVDFSAGANLLPLPPKRRTSDKPRRKRSNPNKISTLTRLCSRCKQTGHNKATCEVQF

SEQ ID NO: 60119 - protein, 174 aa, Zea Mays
MTDRNPAAASSKRHCDLSLDDPTPSAKLQRCSEPSEPTPAGKPNGGAATGEESEMMAGARNPRAQRYLVAVEYIGTRFSGSQKQPNQRTVTGVLEEAFHRFIGQPVSIIFSSRTDAGVHALSNVCHVDVERISKRKPGEVVCTQNSFFFLTLITDQALSTSLDTLNLFLFLIFA

SEQ ID NO: 60120 - protein, 660 aa, Zea Mays
MRRMDGFISSSLALVVLALHLSVDGCSAVNLEGSILLKFQSRVEEDPYGAMVGWSPRDSDPCSWNGVRCVDGRVVTLNLKDLSLRGTLGPELGTLSHLRALVLSNNLFSGSIPKELSALTMLEILDLSNNNLSGEVPQEIAEMQSLRQLLLSNNCFQWPLTQHSYGNYDQENDFNIYDNLGRGNMNRRAENGLESGSSSQENKKDTSNLSGNPTQLPSQHEPRNTASHLTQRRLLQDSNLAAPSPANALVPAAVPVPSTGTGSFSAFSPNNAPVPAVNSPSSPPMVPRTTSEEDQETRSIKWLYVIVLPLVALLMFGIACMLLLCRTKSGTTIGPWKTGLSGQLQKAFVTGVPKLQRSELEGACEDFSNIVASYPQYTVYKGTLSSGVEIAVVSTMIISSKDWSKHSEGRFRKKIDSLSRINHKNYINLLGYCEEEEPFMRMMVMEYAPNGTLYEHLHVEGFDPIDWNGRMRVIMGVAYCTLHMHELSPPITHPDIKSSAILLSEDGAAKIVDMSVWHEVYSRENVPNDDDLVDHPERVAADPAGNIYSFGLLMLEIISGKPPYSKEKGSLLNLALECIRDNRNMSCLLDPNLKDHKEKDLEIICDLLYECIQSDPKKRPTMREVTTRLREVLSISPEAATPRLSPLWWAELEILSVEAS

SEQ ID NO: 60121 - protein, 409 aa, Zea Mays
MPVDGGIPNSFGGAEQTAKKRKKPGSSSGRANSSGTANTAGPSPSSAPSTPSTHTPGDAMSVPQLQQNGGSAKPMVMFGSDGTGSLTSPANPLDDMDPRDNLGRCMDASKGFGFSEVAKARASAAKVVCCHFSADGKLLATGGHDKKVTLWCTDSLKPKSFLEEHSFLITDVRFSPSMSRLATSSFDKTVRVWDADNTDYSLRTFTGHSASVMSLDFHPNKEDMICSCDGDGEVRSWSINNGSCLTCVKVFKAGATQMRFQPRKGKYLAAASEKAIYILDGETQHACRSPLQGHNKNIQSLCWDSAGEYLASVSEDSVRIWSFSSGRDGEFVHELNRSGNQFHSCVFHPTYQSLLVIGCYESLELWDIREKNTMTFNNAHDGLVAALAASSATGKVASVSHDRTLKLWK

SEQ ID NO: 60122 - protein, 172 aa, Zea Mays
MLRHAARRLVSRAVAPPTARRALATAEVPAEAVEDSTFVEAWKKVAPNIEPPATPLSLMQPRPPTPATIPTKLTVNFVLPYKSEIANKEVDMVIVPATTGQMGVLPGHVATIAELKPGVLSVHEGNDIDPALVQKGLAEFTAKLGSASTDLEKAEAQIGVDVHSALNAALTG

SEQ ID NO: 60123 - protein, 305 aa, Zea Mays
MSSQTGGGKESDAGPGQHRQMQSLARQGSLYNLTLDEVQNHLGEPLLSMNFDELLKSVFPDGVDSDGAVTGKPDRTSSLQRQGSILMPPQLSKKTVDEVWKGIQGGPETSTVVDGLQRRERHPTLGEMTLEDFLVKAGVVTEGLVKDSADFPSNMDTAGSSVVVAAASSLNPGAQWLQQYQQQVLGSQQLSLAGSYMASQLRPQPLSIATGATLDSIYSDDQITSPSFGALSDPQTPGRKRGALGEVVDKVVERRQKRMIKNRESAARSRARKQAYTNELENKVFRLEEENKRLKKQQVLCLVLS

SEQ ID NO: 60124 - protein, 182 aa, Zea Mays
MEYLLGLVLALLGGSVKMQDYSDERKSQILDVVKSLAGGFDMDVIFTRTDGFTMTQEWLLLDCLDLNLRHGWIAARDLLTGPEVSFESLTLASNEPGFPHAEEIKNFLRGPQLTPIGLVSLQEDFVENVPCILFWNKHYHTIVMVKTQLLMYFITLGDMLAAFYFSFLTHFGLMQINGVLNS

SEQ ID NO: 60125 - protein, 647 aa, Zea Mays
MSKLEKGIDANEETKTLNPCWSAYNIADRRAPPVYVNLFTGQATTQFPSMTETVRGGILADAMGLGKTVMTIALILSNPRGEFSNCIKGDTRYLGDRATRGYTSTSSVRGGTLVVCPMSLLGQWKDELEAHSAQGALSVFVHYAGDKTSSLMLMAQHDVVLTTYGVLSAACKTECNSIFHRMDWYRIVLDEAHTIKSPKTKSAQAAYRLKSECRWCLTGTPLQNNLEDLYSLLCFLHVEPWCNAKWWQRLIQKPYENGDDRGLKLVRAILRPLMLRRTKETKDKIGNPILVLPPARIEVVECEQSEHERDFYEALFRRSKVQFDKFVAQGSVLNNYANILELLLRLRQCCDHPFLVISRADPKKYADLNQLAQQFLEGVQQSSSGRQNVVPSLAYVEGVVEEIRQGATMECPICLESASDDPVLTPCAHRMCGECLVSSWRTPDGGPCPLCRRHISKSDLIILPAQSRFQVDAKNNWKDSCKVKTLVTMLESLQRKQEKSIVFSQFTSFFDLLEIRFTQKGIKFLRFDGKLSQKHKEKVLKEFSESQDKLVLMMSLKAGGVGLNLTAASNVFMMDPWWNPAVEEQAIMRIHRIGQKREVRVKRFIVKGTVEERMQQVQMRKQRMVSGALTDEEIRGARIEHLKMLFK

SEQ ID NO: 60126 - protein, 662 aa, Zea Mays
MATYYSSQGSEREPSQNMYSRDPGNGTASYPPLPSALGNLLYLNSPASGGPYTDFGGVQQDCIEMPEPGHPSVMSHDSSAREIEPDMLGQQRRSFGLARGMKDEVLMRMMDGSGSHSSAADAIHDDAPNGIQLDFGVLGSHGPPAQGGQGSLSLSLNTHIMAPALPYWPVVKADMLSPHSYDHGCGGGSGGLGSEPSRAIRNSRYLKAAQELLDEVVNVWNSIKQKAQKEQVEAGKTEGKENEGGGPKSEGPQESGANAAPELSTAEKQELQNKMAKLMAMLDEVDRKYKHYYHQMQSVVSSFDMVAGAGAAKPYTAVALQTISRHFRCLKDAINDQISVIRKKLGEEESSSGREGRLTRLRYIDQQLRQQRAFQQYGMIPQNAWRPQRGLPENSVTILRAWLFEHFLHPYPKDSEKLMLARQTGLTRNFELVHQRPRPPLETHDRGHVQGRDRRHRARLQLLLRQRASRKQGQDGVFARQGGPPGEKLLHAAGRLREQQPAERATRRSQHEGHERRRRRRWSAHGVIPERAWPRPRPRRQLHEPDAQGAATERRRRRPPPPPQRRGAAPGRERPVHGVPPGGAGQVRQRQRVAHPGAAALQQQPLGSARSAELPRCRNRCRRRRHLQCHRRSSRCQRGVAGLRVHEPDGSAATVRAVAPSP

SEQ ID NO: 60127 - protein, 763 aa, Zea Mays
MTRRVRRRTCREREGRVVRGAWCVVSARPEGEDDAAAVEVDWRALPDDTVLQLFARLNYRDRASMASACRAWRALGSSSCLWSTLDLRAHRYDREVASSLASRCGSLRRLRLRGHEAAEAVPALCAHGLREVVADGCRGLTDATLAVLAARHEDLQSLQIGPDPLERISSDALRHVALCCSQLRRLRLSGLREADADAVGALARCCPLLEDVAFLDCGTVDETALAGIHSLRFLSVAGCRNLKWATASTSWTQLSSLIALDVSRTDVSPSAVSRLISHAKTLKLICTLNCISVEEEQLHNPAVFSNSKGKVVLTINSDIFRSFETMFPIVDAKEHGVFHQCNWSHKDKIAGDITTWLEWILSQSLLRIAESNPQGMDGFWLQKGTTLLLRLLKSLQEDVQERAATALATFVVMDDETANVDPARSEAVMQNGGIRMLLDLARCSRESAQSEAAKAIANLSVNTKVAKAVADEGGITILTDLAKSMNRLVAEEAAGGLWNLSVGEDHKASIAVSGGIKALVDLIFRWPAGTDGVLERAAGALANLAADDKCSLEVAKAGGVHALVTLARSCKLDGALEQAARGLANLAAHGDNNDNNAAVGQEAGALEALVQLTGSQNEGVRQEAAGALWNLSFDDRNREAIAAVGGVEALVALVQQCLNASEGLQERAAGALWGLSVSEANSIAIGQGGGVAPLLTLARSEVEDVHETAAGALWNLAFYSGNALRIVEEGGVPVLVKICSSSGSKMARFMSALALAYMFDGSS

SEQ ID NO: 60128 - protein, 419 aa, Zea Mays
MRILAIDGGAVSFIDHTLKHALQTSILITYPTDSRSMNMLDSEKWSMRNDINVLIFSHQFISNVSARIFDSHCEFKIVEEIPLQLVTSTSAHRPLFHAKWNAENYRSSSATRYWLQVFVLDSHGVKISSEQRPFSVEGKMAIPTSPWTNYLLFEVQWEGMYQVLLWSNLAFTIVLLFIPKLLYHFVRRSSSYQRWAVSIPSSSIQQRKPYFWLVWFLMEGTRSKPFWFSMVTYVLWLIEMPWFWGHATSENGEIAQMYLSGWSVPIHDGGLTGNKLSNPDVLVITLPFLYLVLVPVIVLTYGLFAEKATVFLQHRRRVVYSLDSTNVHAESPRLLPVAPRASLMKFADKMVSMVIQFCGSWTRRALLLACLITAAIHLKLCSKLMSAYGTVPVALSPPLTWIPLLLLGGAAYCTVLHAD

SEQ ID NO: 60129 - protein, 381 aa, Zea Mays
MKRVSSHVSLASEAEINLDLSRLVIDKPRFTLERKRSFDEQSWSELSHRQNDGFDSVLQSPAFPSGGFDSPFSVGTHFGGPHPLVNEAWEALRKSVVYFREQPVGTIAAVDHASEEVLNYDQVFVRDFVPSALAFLMNNETDIVKNFLLKTLHLQSSEKMVDRFKLGAGAMPASFKVDRNKNRNTETLVADFGESAIGRVAPVDSGFWWIILLRAYTKYTGDVSLSESPECQKCMRLILNLCLSEGFDTFPTLLCTDGCSMIDRRMGIYGYPIEIQALFYMALRCALQMLKPEGEGKDFIEKIGQRLHALTYHMRNYFWLDFHQLNNIYRYKTEELLSWQRQPCYDGFPVVCPWQLHCHCIISSHPRTVSCYNGSDRGKVG

SEQ ID NO: 60130 - protein, 481 aa, Zea Mays
MLGTSVIIPSALVPQMGGGNEEKARVIQTLLFVAGINTLCQSFFGTRLPAVMGGSYTIVAPTISIIMAGRYSNEADPREKFLRTMRGTQGALIIASTIQIVLGFSGLWRNVVKLLSPLSAVPLVSLAGFGLYELGFPGVAKCVEIGLPEIILMLIFSQYLPHAVHAAKPVFDRFSVIFTIAIVWLYAYILTVSGAYKSARTKTQLHCRVDRSGLVGGAPCVPYPFQWGAPTFDAGESFAMMVAAFVALVESSGAFIAVSRYASATMIPPSVLGRGIGWQGIGTLLGAFFGTANGTAVSVENAGLLALTHVGSRRVVQISAGFMIFFSVLGKFGAIFASIPLPIFAALYCILFAYIGACGLSFLQFCNLNSFRTKFIMGFSLFMGLSVPQYFNEYTSVAGYGPVHTGARWFNDMINVPFSSKPFVAVLVAFLLDNTIQVRDSGVRRDRGYHWWDKFRSFKTDSRSEEFYSLPFNLNKFFPSV

SEQ ID NO: 60131 - protein, 332 aa, Zea Mays
MSSEKVPPTPHRIPPSPSRFAPSPQIARVGSVNLSIQQILRATQNFSPSFKLGEGGFGMVYRAVLPDGNVVAVKRAKKDQFAGPRDEFSNEVDLLAKIDHRNLVRLLGFTDKGNERIIITEYVPNGTLREHLDGQHGRVLDFNQRLEIAIDVAHALTYLHLYAEKTIIHRDVKSSNILLTDSYRAKVSDFGFARSGPSDTEKTHISTKVKGTAGYLDPEYLRTYQLTPKSDVFSFGILLVEILSARRPVELKRTPEERITIRWTFKKFNEGNTREILDPLLEDHVDDEVLEKLLSLAFQCAAPTRDDRPTMKEVGEQLWEIRKEYGKSVRKV

SEQ ID NO: 60132 - protein, 751 aa, Zea Mays
MGKQKGRASSSGMAASLVPHAHGAVPTVGFGGYHGAVRVEPAAPSDPDAPIRLTPDVDGEVLQNLKRLGRKDATTKIKALSTLSILFGQKPCEEVVQIVPQWAFEYKRLLLDYNREVRRATHEAMSSLITAVRKGIAPHLKSLMGPWWFSQFDPAPEVAQAARRSFEAAFPQSDRRLDALMLCVKETFLYLNENLKLTPQALSDKAIPMDELEDMHQRVMSSSLLAMATLIEILLGVKLQSCDGESTNTENKNMSKVRSTVLSSAEAAFCMHKCFLDVLKSKSSVIRSATYSLLTSYIKHVPHVFDEETMKKLSPTLLGAFHEKDASCHSSMWDTILVFSRKFPEAWSYCNIHKVVLSRVWHFLQNGCYGSKQVSYPLLVQFLDSMPPKAVMGQQFVFDFLHNLWAGRNQRQLSAADSLAFCGAFKQSFLWLLKNASRYSTGDSSDDVPIKLITDVLAKIVWRDYLLLSGDTIGGGVLLSRKTSGLAANMHYPTYYLQDLKKCITEILDVIADTENHLLNISCQSLLSDCLDIIQQGEKLSKFQNHVEQLVSFFLSLDQIVVCKGELWPLERLAKPLVEQSLPAIKFMDTPCLVKLLSVLVEIFGPTPLFFKTCKENDEKLDIKSYLEFFNDELLPWCLDGKYSTCNSKIDLLLSLFQDESFFDQWCSIIKCTTTEQKQSVDDKTSNILGRYELLTLLLQKIREKIAGGKLRNLQENGYLLQHLRLDILDSTAASVLCDLPASDCQVSFIC

SEQ ID NO: 60133 - protein, 980 aa, Zea Mays
MWGRSTRISINIALTELNIRTPERAQTNLLVGVGSKHRHSVYLSEHLEKYGIPVPSYALVNREYPDQELDYFIEQEDFVEVHGKRFLKPFVEKPVNGDDHRIMIYYPSSAGGGMKELFRKVGNRSSEFHPDVRRVRREGSYIYEEFMPTGGTDVKVYTVGPGYAHAEARKSPVVDGVVMRNPDGKEVRYPVLLTPTEKQMARDVCNAFRQMVCGFDLLRCDGRSYVCDVNGWSFVKNSYKYYDDAACILRKIFLDAKAPHLSSTIPPTLPWKSEPVQPTEGLTRQGSGIIGTFGQSEELRCVIVVIRHGDRTPKQKVKLKVTEEKLLNLMLKYNGGKPRVETKLKSAVQLQDLLDATRQLVPPTRSGRESDSDADDIEHIEKLRQVKAVLEEGGHFSGIYRKVQLKPLKWIKVPKRNGDGEEERPIEALMILKYGGVLTHAGRKQAEELGRFFRNNIYPGEGTGLLRLHSTYRHDLKIYSSDEGRVQMSAAAFAKGLLDLEGQLTPILVSLVSKDSSMLDGLEDASTEMDEAKARLHEIIISSEKAKNTEGPVEFPWMVDGAGLPANASQLLPKMAKLTKEVTSQVKLLAEGEDERLALTSTFSKYDQAKALGKTTIDVARIAAGLPCGSESFLLMFARWRKLERDLYNERKDRFDITQIPDVYDSCKYDLLHNAHLNLKGLEELFKVAQILADGVIPNEYGINPKQKLKIGSKIARRLLGKILIDLRNTREEAISVAEPKFIEDEALFLPTKEAEHQQKVHVRNEDGRRSSSTSEKSLDQEDEDDRETKYRLDPKYANVRTPERHVRTRLYFTSESHIHSLMNVLRYCNLDESLQGEESLVCQSALDRLHRTRELDYMSNIVLRMFENIEVPLEDEKRFRIEMTFSRGADLSPLEDKTSESSSLLQEHTLPIMGPERLQEVGSCLTMDKFEKMVRPFAMPPEDFPPAAPPQALGYFSKGAGVLERLASLWPFHKSANGK

SEQ ID NO: 60134 - protein, 57 aa, Zea Mays
MPPSLPWAQTRCRSARRTGSGGPGTPAVHTRRRFPQVCSNVCGDRVRSELLVHICSN

SEQ ID NO: 60135 - protein, 342 aa, Zea Mays
MAEPTPPSLPSSDCADVLVGSSAPSFPYIRGWSFTSDSGAAMGSVEEHLQPKVCVQTSTSAGLEQILPWLFYHKVVGVAQFLLFVEGKAAKPNVAGVLESIPGVKVVYRTKDLEERQARSRIWNETWLSGFFYKPCNYELFVKQSLNMEMAIVMARDGGMDWIIHLDTDELLYPGGAAEYSVRRLLAEVPRDVDMVIFPNYESSVEHDNIKDPFSEVSMFKRNYDHLPKDTYFGMYKEATRGNPNYFLTYGNGKSAARIQDHLRPNGAHRWHNYAKSPNEIKLEEAAVLHYTYTKFSDLTSRRDRCGCKPTKEDVKRCFMLDFDRAAFIIASTASEEEMLRW

SEQ ID NO: 60136 - protein, 238 aa, Zea Mays
MPPSPPTPAAPKTIADFFARPAKRLRAAPAASLSSNSSPSSLSPEQRRRADTNLALARARRNLRLAESKAQASGGAPKLEELLVEETWAEALRGELRKSYALELCRFVAHERLHGPLPVYPPPHLVFHALNATPFDRVKAVIIGQDPYHGPGQAMGLSFSVPEGIKIPSSLGNIFKELKKDLGCTVPSHGNLERWAVQGVLMLNTVLTGMIISSIRTKDPLSFLVLIKIYNLNQTELL

SEQ ID NO: 60137 - protein, 258 aa, Zea Mays
MPKGSSPAKTAAPTPSRGSSPTVKSRPWKPSEMPGFSLDAPPNLRTSLPERPTSATRGRPGAPSSRSCSVESGPAGRPRRQSCSPSRGRTLSGSVPSGSSMPAVRRSHLNGGDSVNPVQMGNKMVERVVNMRRLVPPKHDDQRSSLNSVSGKTSNSPDSSGFGRTLSKKSLDMALRHMDIRRSIPNNLRPLMTSIPPSSVHSARSGSTRSRPMSVSDSPLATSSNASSEPSVNNNLMCLDGIYMDDELCSDRAGPYGR

SEQ ID NO: 60138 - protein, 207 aa, Zea Mays
MMSKEAVVNAFLGCFMHVGLALVLAVYLPVAFVCRLLHRLLVRPFARGEDLRGKVILVTGASSGIGEHLVYEYARHGACVALVARTEVALRAVAKAARDLGAPDVLVVPADVTKVDDAKRAVEETVAHFGKLNHLVANAGIWSSCFFEEITNITAFHNVIDLNFWGAVYPTYFALPYLKASRGNIVVTASVAGRVPTARMSFYNVRT

SEQ ID NO: 60139 - protein, 362 aa, Zea Mays
MIVKEKSQKIATMQNEAKGSLAAEEQASKANALAIELKKQTEKLKKDITEQKIKKAALEARAGNADKKVQELNMKLEKLQRTSSDQKRRIQKTEHALKAAEEELMKAQLETTTKVKQLREVHGAWLPPWLATHAARSMEVMSNHWNEHGKPAFDSFLQKASEKTVQTKKWAEPHLETAKTKWMPVAKEKWVTLKKHAKPYVQMVSEKSLEAYQTSSDFVRPHLVNAHQVVDPYFQEAKKLSKPYVDQIATATKPHVEKVRTALKPYTERARHVYGQFLETATTYHQQAQATISDYLHRHEFTKQFVTKELVWYLASALLVTPFFVLYTLLTETFCTKKKKKTPRSSNTNHGHRRHKRRHADK

SEQ ID NO: 60140 - protein, 585 aa, Zea Mays
MNRIPSVSLRGGGANEDAAAASPPPDPAALSRWVRAFCVIRFDLERGQLVEACFPPDALTAPGSGLDRLVAFSSFPDSMSHHLPRHRSSVHDSLFSFRIPDPSSPRRAFLYGFVFNRQRQDERLPRGGEQKSVVILSHAPYSSLFRLLLQILGPLCFDVGPSALAMVASHVAVWPAPAPGHPMELPIGSAALRVHLPPAADDPGPPPALLPANPSVPYGLFHDADLFAAFRGLLLHLWTLWELMVVGEPILVVAPSPAQCSEAVSALVSLVAPLLYSVDFRPYFTIHDPDFARLNVLAEGEVFPPMVLGVTNLFFLKSLKSIPNVVSVGSPNPYSTRVLPVGGQSPGNGMNGTPGKLKLEKLAINKFSPTSLLNSIKLRREGPLSLMTEHKEALWSTYSPTTKPDTSVLNRLIDAGVSPRIEESMSVVNNEILRRHFLELTTNFLAPFGPYLRTTTPSEGTSPFVDPPLLPPFHADEFINGLAARGPGKFLSKRMRSNWLDLYRRFLEGPNFMPWFRQRRAAAEQEQQRLWRQARMNVDIEKLMSNMSEIERIDSFDAVERYLLREMEASPRHLGAQKIQGVPIA

SEQ ID NO: 60141 - protein, 422 aa, Zea Mays
MLNSSPDARPDITQVWFRINELLPLELQKDLPDGSPSGSAFESHTATDEVSMRPQQMSGSSSRENIKNTSLSDSSNIMVQSPLKAIGNMGSMGAFWSTQHAQELSFADDKEPAFDKEPIDQVRSKQSQAKNQNTAARNSSRKSLSASVDSSPGDFEIRFSANGSESRLEETKTVITENKTKIQTTAFNSCASDFDNIKMNSRNTTDSINITSKLKELQLEAEVTLLKEQLKIANLEKEEISLKFDKLSAICSSQRREIQELKQALAAAYVTPPAKQFRENSSVEVTPPSKSLDTPPREKIEGTPPELRQGLFTSSPGTPSPDLKTWSAFLEEPKSQAAVKSVHPRSVRTLRASNSNKASSLGQSNISSSTDPFAFGQDSFKAAPSGTVLPLLSNMGNTSQLSNLNIEEKKDGSYQPDGWTGF

SEQ ID NO: 60142 - protein, 361 aa, Zea Mays
MVGIHWYGYGNWEKIRLDPKLGLTTKIAPATLGERETFLPRAPNLDNRASALLQKYAKFSGKSLKVKGNTRQTVNNDSNSGVRSMRGRQKDVPEKDDNKPNKDDIQKRRVIVEAEAREEGEISESEAETRYRQDKEEKWLEWCSEVLDEEQETLKRLDRLQNTSVNLPKEKVLSRIRKYLLIIGDKIGEVVRQHSESYRQSRMVMRLWNYVATFSNMSGEQLHDLYMKLSQDQLEGGVGPSHGGNFTSIPPNKGGNSNQLHPSRNQRPTRSLQYNSESFHNESSGSSEAWKRRRRADTDNQFDTQPLCQPPIMTNGNRLQESSSSAGILGWGPVEIRRYGNERPKRAVHPSHFPTGHGPLL

SEQ ID NO: 60143 - protein, 376 aa, Zea Mays
MGDLKEVFRSLQELFPEVDHRILKAIAIEHRKDVDSAVVTVLDEVMPFMTGSAGVDGSVGNLSSMDGSVGNLFGNHSTHEVGSSSSVWRDICINEIDASVYSVQYTSYGDVKTGKQENINNTYVGRLASIEGVNEQLNLHSYPIPNGGQHDLLPNLDVLSSNTDPEKTLANTDNEVGYSGLFSECFSQPPTGEDGGNIIAPQPCDQDPNGMIPVGDYFPQNSSMEFFSGYEDYNFDDGLLPIGSNDQISFRILGTEKDPFAPVLDVPGRDKEESSTETSGFIESSNNVADMLPDLNLNHFTSTASTHSNHSVSIESLEDSVADARSNKERAAHAVVLMLLLGFDRRRLQVQGDTVQYGCSVEGAVLGSFDVRSSGS

SEQ ID NO: 60144 - protein, 340 aa, Zea Mays
MAAAGDPPPPIYAEGAARTRGEISPHFQTYARDDDAKLETTRARLSNILKRHEDLKERLSRDSDKLIFERLQKEFEAARAAQTEEISINDDEWNDGLLATIREKVHMEADRKAMSNQVNVPADLSFQSRTTYRIRNKVIYCLDGARIGIQYETFFAGEPCEIFHCVLESKSFLEKMIMIEHTLPFFLPVRELESDLLSSNSIKFIDHLEEILQAYIDRREQVRLIKELYGNQIGELFHSLPYNMIEFVLEDFECKVTISIRYSDLLQTLPSQARVLAWPLRSAKKISTRSSSASAAQPVPFHLSYAEEALKTLCLPEAYADIVLELPHALKRILSSRDSD

SEQ ID NO: 60145 - protein, 374 aa, Zea Mays
MGSNTERARKALGAMKLIGFSKKQAIPVLKELLKIFNNNWEPIEDESYRALADAILDRQDSKQTPPSQQGTQAAHADLEPLRSTRDDRQQYLSASLDDTCEDDNETPLVKRPRMGTANFRPELQPPQQSSVSTQGALPASPQTSRRQTRSLTVEPHAAGHEYPLAVNDALVVKEPKPEPQIDRAEDFVAGPNATQLNDGSSEQTSGFGARGNIVHQAQSLGRSLQAAAVCKNGVGSTVQNTHETSIVEVDVASSANGEVKMSLKCSLGSSNFSISMEEVFKMVEEKCLHSYKMLPSDLSIGKLLSEPISCEAAVGISDDVAGGSSVLESSEPCLQNSLVAWNPELAHCNQKTTHDTTDISKGEERRQFHVLVQE

SEQ ID NO: 60146 - protein, 518 aa, Zea Mays
MTSQLQSTLLLLPLFAAAALGRGGDASTAPSLEFHHRFSAPLRRWVEARGRALPGGWPAPGSAAYVAALAGHDRHRAVSAAGGSSSDAPPLTFAEGNATLKVSNLGFLHYALVTVGTPGQTFMVALDTGSDLFWLPCQCDGCTPPATAASGSATFYIPGMSSTSKAVPCNSNFCDLQKECSTALQCPYKMVYVSAGTSSSGFLVEDVLYLSTENAHPQILKAQIMLGCGQTQTGSFLDAAAPNGLFGLGIDEVSVPSILAQKGLTSNSFSMCFGRDGIGRISFGDQESSDQEETPLDINRQHPTYAITISGITVGNKPTDMDFITIFDTGTSFTYLADPAYTYITQSFHAQVQANRHAADSRIPFEYCYDLSSSEARFPIPDIILRTVTGSMFPVIDPGQVISIQEHEYVYCLAIVKSMKLNIIGQNFMTGLRVVFDRERKILGWKKFNCYDTDSSNPLSINSRNSSGFSPSTSENYSPQEARNPAGVSQLRPLNNSAPAALYDSLLLMLILVHLAVN

SEQ ID NO: 60147 - protein, 129 aa, Zea Mays
MTSRAAAEAALLLPLRLHSAPLRLRFFCTSASRLRWACSAAALLAVVSLVTAICAMPDAGAGTNVEADAGALRLEIEALRLKVARLESLLEANSKALDIKASILEEDNKLNEAMEREIQLLTNGPDRTK

SEQ ID NO: 60148 - protein, 282 aa, Zea Mays
MDRDDGGFMKFPSRYTVAKSKQETTPETAGLDLYDGRWLPGSGRRGRGRGSRGGSRGGRGRSRGGRIPRGVSSSSRIEFKGGIVASDKAPRKNVRRGRGRGRGRRRGRRTVRPRQPSVGRARSIPKENLLGSFSMLSSSKAATIEESPRSSGADEWGLETRTTYTECDENSSGSQSEDNEENGQPMDDDYEDQVPDYSIGYSTGSRHHVMMSMMDHDSDEEDEDAEGDENVEEDADLAVDDADVEMDEDDEIGDDGEDGGVGGEMNADEDPDATSYSSDYSD

SEQ ID NO: 60149 - protein, 401 aa, Zea Mays
MSRRTSQRPMRIPWTGSATGRHPQVLALPPWSPPSTCSILGVLEWGLQWMLSTPPWIQFTLNCPKWRSNGPMERALTASPGPASLTRANRHRRAHLRPSASPMAHVLGPAFPLLTGTVDLGPMWSISTSRSREAAEPARADRSYTARPMLKPVAARWDQPRTGTSDNSKHSLAAAPTADSKVASLRAYRHARGLCQYCAEKWSKGHKCAETVQLHVVQELWDMLSVDQPESKGEFEDSVDQLMLLLSKESMSANTLSKAFRICGQLQGMEMLMLLDSGSSHSFLNSVRTTDLSGFVPLDTPLSVRVANGNVLLCSVELPNAEWSVQGVTFSSTFKVLPLPFYDIILGMDWLENLSPMTVDWKHKWLSVPLAGSTVLLQGCHPLVPVGTLLEVPQVAVNSAE

SEQ ID NO: 60150 - protein, 74 aa, Zea Mays
MRRKHTKSIKSKFNDLMSTHPPLNEAYSDVCVFSTHAAFSLRSSICYIDLSNLPAELKKLKHKKCLVQSPQLLH

SEQ ID NO: 60151 - protein, 88 aa, Zea Mays
MEFQHYRDNGMEEEARCKFGLVLYTLDRLCKAVESHAKETGEWLSLRQDIFDLSKLDMGMPDKMIVVSRLKWMYNCLLPFSSSRLPRL

SEQ ID NO: 60152 - protein, 384 aa, Zea Mays
MASSPDLFPNVTFSDVSEAAAGPAAEGATAAFGLGAATGAPRLSLVKAEAEPTVEIDLADAQVFKLGPTEWLCVCDESEAKDGVEESFSRAIKVVLRTEAESKAFSLAFQRWQHQVISGKAGERLENGSIIASKNKFDTKIEASSAKMYFHYYGQLLHQQNMLQDFVRTGTYYAAVMENRSDFEGRVVVDVGAGSGILSLFAVQAGARHVYAVEASEMAEHAQRLISGNPSLGHRITVIKGKVEEVVLPEKADILISEPMGTLLVNERMLESYVIARDRLLAPDGKMFPTTGRIHMAPFSDEYLYVEMANKALFWQQHNFFGVDLTPLHGSAFQGYFSQHCAKVAYHCSRIPYNSLVPTTMCAFTAIVCHGRPRNNWPSSSRSP

SEQ ID NO: 60153 - protein, 502 aa, Zea Mays
MESESSAQIKDENKDVDSDDRPGMPAAVSVYEQKVNSKSTARKVKRQPEISNSEMVTRKKAKVTKDPHHDGSTTSDVKQQACTCGVKTEKKKRKSSTTKVIPKLLFVDHFCKEKYVSAEEGKVSSNIGTTTQGDTTQADLSSKGKSCRKIGIQQALIEECKSTKVANDTGSDKFSHSVNNVIDLKDKLSHCLSSRLLRRWCMFEWFYSAIDYPWFAKSEFVEYLNHVKLGHVPRLTRVEWGVIRSSLGKPRRLSKQFLHEEREKLSQYRDSVRQHYAELRSGVREGLPTDLARPLAVGQRVIACHPRTRELHDGNILTVDNNRCRVQFDRPELGVEFVMDIDCMPLHPMENESLRQKNIVNKYLSEVKLEDQMNDLGSGGAARFASNVNVNCGDAAFQIPSSHPVNSLTKQAKAKATVNEVAIAAQQAMYNQPCSLSQIQEREADIRALAELSRALDKKEALLVELRHMNEEVSRKQKDGETVRVEAFQDAICYGACAAKRF

SEQ ID NO: 60154 - protein, 124 aa, Zea Mays
MFKSSVVLIRLCTSCLDPNSNILKFPFYLKKISSLDICFATVLLHASLSVHLPLTLLLSELCTSTSLSSICTRLSFFSKPSFLFLAASSHWKKILPPPSLSISSPCDFFPSAAFILTSYHRPWR

SEQ ID NO: 60155 - protein, 133 aa, Zea Mays
MGRQLESLSRGLGINIPIQITEGNKRPEPPIQAAKFASEGGITLRQHIPIFNHWKEYKKRENEPIIRNYIGKVTANFTVDSESKTVEDACLDMLKSGQRQMRYRLKQKYFNGIPANQVRTTSPIPSMSDNDWR

SEQ ID NO: 60156 - protein, 522 aa, Zea Mays
MMSSTGGESKLESPLLGLPAPGSSAGSGHSHGEAVSGQLESILSDASLPWRRRMLSASMVEMRLLVRLAAPAVLVYMINYLMSMSTQIFSGHLGTLELAAASLGNTGIQVFAYGLMLGMGSAVETLCGQAYGAHKYEMLGIYLQRSAVLLCVTGVPLAVIYAFSEPILVFLGQSPEIARAASVFVYGLIPQIFAYAINFPIQKFMQAQSIVLPSAYISTVTLVLHVVLSWVVVYKVGLGLLGASLLLSLSWWVIVAAQFAYIVMSPRCRHTWTGFTWQAFSGLWGFFKLSAASAVMLCLETWYYQVLVLIAGLLPNPELALDALSVCMTVNAWVFMIAVGFNAAASVRVSNELGAGHPKSAYFSVWVVTGVSTLISLVLAIVILCLRNYISYIFTEGEVVSNAVADLCPLLAITLVLNGIQPVLSGVAVGCGWQEFVAYVNVGCYYIVGVPLGAILGFVFKLGVKGIWSGMIGGTFMQTAILVWATLRTDWNKEVEEAQKRLNKWADSKTTEPLLVGFGDGN

SEQ ID NO: 60157 - protein, 314 aa, Zea Mays
MMTEMLKSKQHAGKLICSSMGARMDSEPKSWRILADVLYDLGTALEVVSPLCPQLFLEVAGLGNFAKGMAVVAARATRLPIYSSFAKEGNLSDLFAKGEAISTLFNVMGIGAGIGLASTVCSTTQGKLIAGPLLSAVHIYGVIQEMRATPVNTLNPQRTAMIVADFIKSGKVSSPAELRYKEDLLFPNRVIEEAGSVKIGQPLRKVFSPRLVEQLRATFPGEKFLLSQKSNRTYMVLERSASGEDALRGWLVAAFASEMERSGAGSRDDAVLSEAYEKMERVFPTFVSEVRSRGWYTDQFLDGNCSRVSFAKFR

SEQ ID NO: 60158 - protein, 784 aa, Zea Mays
MGCSASKCCSQLKCSLCSNGCLGQAPDSPRESRGKSSRGRGRVDSSGSDDSSGDDLGEDDDAFNHMNATRESTAGISRLSRVSSQFLPPDASRKVQVPLGNYDLRYSFLSQRGYYPESLDKANQDSYCVHTPFGPSPDDHLFGVFDGHGEYGAQCSQFVKRRLCENLLRDNRFRTDAVLALHSAFVATNTQLHADNLDDSMSGTTAVTILVRGKTIYVANTGDSRAVIAEKQGDDIVAVDLSIDQTPYRFDELERVKECGARVLTLDQIEGLKNPDVQCWGTEESDDGDPPRLWVQNGMYPGTAFTRSIGDSVAESIGVIADPEIFVLDLNSNNPFFVLASDGVFEFLSSQTVVDMVSKYKDPRDACAEIVAESYRLWLQYETRTDDITIILVHINGLTDKESTQTVTKVTLQPSQQVVGLAGPESPLIVSSNTNNQRSKHDLSRARLRALESSLENGQLWVPPSPSHRKTWEEQAHIERVLHDHFLFRKLTDSQCHVLLDCMQRVEVKPRDIVVQQGGEGDCFYVVGSGEYEVLAIQEENGKEITKVLHRYTADKLSSFGELALMHNKPLQASVRAVTSGTLWALKREDFRGILMSEFSNIPSLKLLRSVQLFTRFTVLQLSQLAESLVEVSFADGQIIVDKNDKFSSLYIIQRGRVRLILATDQMTSDTWDLISAETKQAQSSRENGNYVLDIDEGGHFGEWSLIGETIAFTAIAVGDVTCSTIMKEKFDSIVGPFPKLSQADSKIKESLVTLENVADGDFPFRRVKLSDLVRGMENVHICC

SEQ ID NO: 60159 - protein, 69 aa, Zea Mays
MYFICRHSRKPWLKFMNGDNQHLVSPEAIDFLDKLLRYDHQDRLTAREAMAHPYFLQVRAVENSRTRAQ

SEQ ID NO: 60160 - protein, 684 aa, Zea Mays
MSLDNISGEVCNKILRKCGGVPLSIITIASLLVGKQREDWSKVYDYIGFGHEDNEVIGNMRKILAFSYYNLPPYLKTCLLHLSIFPEDHKIEKNSLIWRWIAEGFVIGREELGLFEVGESYFNELINRSMIRWIELSSRSKIRDGCGIHDMVLDLIRTLSGEVNLVTVSDVEQQCTTSSSYSPVRSISARRLAFHKKRSIEHNPGTEIGQVRSFNAFNCSGSRMPRLLSFRVLRVLALENCNFSAGNCCLGNIGKLHQLRYLGLVETSIRDDLLPGETGHLKFLQTLDVRRSGIKILPASVGELMKLMCLRATEGTRMMAEIGKLASLEELEVHSVDKSPNFATGLGQLTKVRVLEIHFDEMDESTEKALMESLRNLRKIQSLQIWSKKERTIDLGGLLEDWTPTPSDLRQLMLCGIHLPRRPSWIDPSCVPLLSYLSLTVQAVQVQDLEILGRLPLLSYLYIWSEGINCLSYTATSRDEFQNLRHLDTNLEIMCGQQGALPMVEKLTCRASMGKYVAFARSSMPFDDGSVVNPATVAEAELPVILPLDIGWPVNMPCLRGITYLLDYQDCSAKEWAHVETLLLHVRKIHPNCPPFRIKKNCRDKKITLIDAFSYLEAVKDVFKGNPSKYSEFFDLMIDYKRDRIKIKDVIIRLKTLFTGHDPNLILDFSVFLPREWAITLGDL

SEQ ID NO: 60161 - protein, 106 aa, Zea Mays
MSFFFRAASRQRPLPQEIARSLKDSLVALDTKTGAKALEDAEKNILTLRHTLAGDGEVEPNQEQVLQIALEICKEGVLSLFVQNLPSLGWEKGSCPLLVYFVETEG

SEQ ID NO: 60162 - protein, 72 aa, Zea Mays
MKNYFESIECSATNDCIVRVLHVDNVKHNLLSPCIIDKSEGHWHGNLAKRYNLSSSEATKRVRSIMNFVFWF

SEQ ID NO: 60163 - protein, 391 aa, Zea Mays
MMMDKLEVPRRKVRKDWYVGLNPDPVDRSHPDVNDSSIAKVATSNETPLIDQNKSGSMKGGEALKNSSEQHSAETKLNSTQVQENVQLPNNVNDTHSESISSVTTKAENTSQTHTQRRLLETADKSDDQTGSSETHESDSGAKAAATVENSEPLDEDADASFDLFRDPEDLPDEYNYDYDDYVDDRLWGDEDWKEQEHEKEEDYVSIDAHILSTPVIADIDKDGVQEMVIAVSYFFDHEYYRDSDHAKELEGIDMGKYVASSIVVFNLDTRQVKWAADLDLSTDAVNFRAHVFSSPTVVDLDGDGYLDILIGTAYGLFYVIDHRGKVRNKFPLEMAEIHAPVIAADINDDGKIEMVTTDSHGNVAAWTAEGEEIWEVHLKSLIPQVHYGFG

SEQ ID NO: 60164 - protein, 867 aa, Zea Mays
MFTHHKYSNKGQMNSERNVKIISGRDGQKKGNSQYGQIVHMPKDMVTTVNGNVDAKFEDEVRVVKNDRFQRQRESWGGECKKGSKPWPGRKAATVDELVKHMSNVPSYLQRKETSDHLQDKALNVGVLEWGLLANWSQQEKHKLTRSYGPSPPNTSRSVLFPSPSHSSPSPSSRSLESNQSTPMSGHHHSSIRAQQNRLTDKHHERARCPPSPNSAVLSLLSGHGTHPCPENGHNYVGLGLSNVSLASDSLGSSSRSCGRHEMVGDEETRRKTEDVVHHCSRRLFADSDNIGKHFFASNTNDSMCNDPEQSIGLNGENFESLTSDAVMDTARNDSKSSDYLLEDIEPSLEFPRIPYSCPLPIIDSAAKEIGITSTEAGDAKVSKNSNRNQSAMNVTENPPQYSAKFSDKMPYCHLGSGMNRGSCSSSLKESPHIRQPNIVPPVDKTGDRSSPNSKGRRSPLRRMLDPILKPRHSSPVRPSFVPKCQLPVNTTKQSLDLGKSVPHNVQRSARYIQKGNDSATTRQALLQLAWKNGLPLFILSYGDSDILAATVRRKGIPEKDGLESTYAVFTVEEPKKKSGAWIKTGGKNKKHHLLSSIVGEIKVARRKSRCHHTTDVHVHREFVLVGSKFLPSSEESGDSNVSGELAAFISTLPQQEAETSKQSSSQNTRQRNSMPIGCGCPPLGNFHPSTRSANSASANVVAVLPDGFHGTITSGQPLPLIERWRSGGACDCGGWDEGCMLSVLTDASEENDAIQANQAKDGSQRFELLDQGRSREERHAFSMTSFKEGLYTVEFRSSIALLQAFAMCIVMLHGRYPRRTQVGSQAEQEHDLLAGHELKAMAASQGRRPPTSYVPHRPPLSPVGRA

SEQ ID NO: 60165 - protein, 395 aa, Zea Mays
MSAATTGPAPSVATPMAPPPSYPASSTASSSISASAEEEEDLYGRLKSLQRHMEFVEIQEEYVKDEQKNLKRELLRAQEEVKRIQSVPLVIGQFMEMVDGNNGIVGSTTGSNYYVRILSTINRELLKPSASVALHRHSNALVDVLPPEADSSISLLGSSEKPNVTYNDIGGCDIQKQEIREAVELPLTHHELYKQIGIDPPRGVLLYGPPGTGKTMLAKAVAHHTTAAFIRVVGSEFVQKYLGEGPRMVRDVFRLAKENAPAIIFIDEVDAIATARFDAQTGADREVQRILMELLNQMDGFDQTVNVKVIMATNRADTLDPALLRPGRLDRKIEFPLPDRRQKRLVFQVCTAKMNLSDEVDLEDYVSRPDKISAADIIEFKCGVKDYRFKVHLAF

SEQ ID NO: 60166 - protein, 1049 aa, Zea Mays
MEMGKAAAVVLAVNGKRYEAAGVDPSTTLLEFLRTHTPVRGPKLGCGEGGCGACVVLVSKYDPATDEVTEFSASSCLTLLHSVDRCSVTTSEGIGNTKDGYHPVQQRLSGFHASQCGFCTPGMCMSIFSALVKADKAANRPAPPAGFSKLTSSEAEKAVSGNLCRCTGYRPIVDACKSFAADVDLEDLGLNCFWKKGDEPADVSKLPGYNSGDVCTFPDFLKSEIKSSIQQANSAPVPVSDDGWYRPRSIDELHRLFQSSSFDENSVKIVASNTGSGVYKDQDLYDKYIDIKGIPELSVINRSSKGIELGSVVSISKAIEVLSDGNLVFRKIAGHLNKVASPFVRNTATIGGNIVMAQRLPFASDIATILLAAGSTVTIQVASKRLCFTLEEFLQQPPCDSRTLLLSIFIPEWGSNDVTFETFRAAPRPLGNAVSYVNSAFLARTSLDAASKDHLIEDICLAFGAYGADHAIRTRKVEDYLKGKTVSSSVILEAVRLLKGSIKPSEGSTHPEYRISLAVSFLFTFLSSLANSLNESAKVNGTNEHSPEKQLKLDINDLPIRSRQEIFFTDAYKPVGKAIKKAGVEIQASGRQSYPNTQINMFISSPYPFSSAYSTTKSFSDPPFCHLHLNIFSAENSNKLHPLTFLAPAVSLQDNAFNNIPFTDTGEAVYVDDIPAPKDCLYGAFIYSTHPHAHVKSINFKPSLASQKIITVITAKDIPSGGQNVGYSFPMIGEEALFADPVAEFAGQNIGVVIAQTQKYAYMAAKQAVIEYSTENLQPPILTIEDAIERSSFFQTLPFVAPKPVGDYDKGMSEADHKILSAEVKIESQYFFYMEPQVALAIPDEDNCITIYSSTQLPESTQNVVAKCVGIPFHNVRVITRRVGGGFGGKALKSMHVACACAVAALKLQRPVRMYLDRKTDMIMAGGRHPMKVKYSVGFKSNGKITALHLDLGINGGISPDMSPMIAAPVIGSLKKYNWGNLAFDTKVCKTNVSSKSSMRAPGDAQGSFIAEAIIEHVASALSADTNTIRRKNLHDFESLAVFFGDSAC

SEQ ID NO: 60167 - protein, 64 aa, Zea Mays
MRTMKSLRFALYASREEENLGDVLVRVVACMRRVMAPPKRVYVPCMFERTPPRKEKPQTVQTRI

SEQ ID NO: 60168 - protein, 1298 aa, Zea Mays
MRGVRGLIGRFGSSNKRNITILKNVNGILKPSRMTLLLGPPSSGKSTLMRALAGKLDKNLKVSGSITYCGHPISEFYPERTSAYVGQYDLHNAEMTVRETLDFSRRCLGIGARYEMITELARRERDAGIKPDPEIDAFMKATAVQGQETNIITDLTLKVLGLDICADVIIGDEMIRGISGGQKKRVTTGEMLTGPATALFMDEISTGLDSSSTFQIVKFMRHLVHVMNETVMISLLQPPPETYNLFDDIILLSEGYIVYHGPRENILEFFESVGFRCPDRKGVADFLQEVTSKKDQQQYWYLDQEQYHYVSVPDFAERFKSFHACQQMQKELQIPFEKSKTHPAALTTKKYGLSSWESLKAVMSREQLLMKRNSFIYIFKVTVLIILAFVSMTVFLRTKMPHGQIADGTKFFGALTFGLITIMFNGFAELQLTIKKLPVFYKHRDFLFFPAWTFGVANILLKVPISLVESVVWVVLTYYVMGFAPAAGRFFRQFIAFFATHQMAMALFRFLGAVLKTMVVANTFGMFVLLIIFIFGGFVIRRNDIKPWWIWGYWASPMMYSQNAISINEFLASRWAIPNNDTTIDAPTVGKAILKSKGLFTEEWGFWLSIGALIGFIILFNSLYLWALTYLSPSSGSNALVSEGEDDVNEIALKERSRDARSEDEISQVVYGDLGTNGATNTLVQSRVTLPFQPLSLCFNHVNYYVDMPAEMKEQGFTESRLQLLSDISGAFRPGVLTALVGVSGAGKTTLMDVLAGRKTSGAIEGDITLSGYPKKQETFARISGYCEQTDIHSPNVTVFESITYSAWLRLSSDIDDGTKKMFVEEVMALVELDVLCDALVGLPGVSGLSTEQRKRLTIAVELVANPSIIFMDEPTSGLDARAAAIVMRTVRNTVNTGRTVVCTIHQPSIDIFESFDELLLLKRGGQVIYAGELGRHSHKLVEYFEAIPGVQKITEGYNPATWALEVSSPLSEARLNMNFAEIYANSVLYRKNQELIKELSVPSPDYQDLSFPTKYSQNFYNQCAANFWKQYRSYWKNPPYNAMRYLMTFLFGLVFGTVFWQKGKNIDSQQDLYNLLGATYAATFFLGASNSITVQPVVSIERAVFYREKAAGMYSPLSYAFAQTCVEVIYTILQGILYTVIIYATIGYDWKADKFLYFLFFMTACFNYFGLFGMMLVACTPSALLANILITFALPLWNLFAGFLIVRPAIPIWWRWYYWANPVSWTIYGVVASQFGENQGELSVPGGKPVVVKQFLKDNLGIQHDLLGYVVLVHFAYIIAFFFVFGYSIKFFNFQKR

SEQ ID NO: 60169 - protein, 97 aa, Zea Mays
MDCCTFPVISLQSAHQRGSLASDHPGSLFLVSSPCKARTSNKEEAPGHPGSLFTCTCVRVYLCIAVPSLSFGLARSVYVKPCCYTVVHNNYMYFLNI

SEQ ID NO: 60170 - protein, 490 aa, Zea Mays
MDLQVPQGNNCAPLAAFSTVTERVRAPSPSSCSQDIYLKVEQAAAEAKPLANLLLRVAPINVGSQRLLVKRVLLLFSAPACRESSSRSSTQGPLGAEMSDSNDFVELLWENGQAVVHGRRKQHPQAAFPPFTCGAASSSRAQENQPGTTDPVSLFKTGGLFADFSSGLDAARGNGDLDDTVPWIHCPIVEEDSAAPAPALAEGYSPDFFSELHAAALAAAAAETNLSPLPPPVQHNRSTPVATTSRGPEPSKEAPRIPVPGPGSRPEPQSEFAATRKPRPESGGEGLMNFSLFSRPAALVRASLQRPPPPQTGTDKVSNVTTSTRVESTVLQSASGPRIAPVFTDQRTAWSQSKEVRFSCAPALAAGNLHQDMPLGRPGNNMTPQGKMETKKACEVAVATPSLCSGNGESWREQKRKSQAECSASQDDDLDDESGGMRGSGGRGTKRSRTAEVHNLSERRRRDRINEKMRALQELIPNCNKVRRSISTIF

SEQ ID NO: 60171 - protein, 172 aa, Zea Mays
MDLPRNQTPLNRSHHQRTTIRVLLRCSSTTEAQSEPHRLARTERTTREKLMGRNRKVKKRQFLQLQNQVRLPRRARMTMILMRTRLMILTRTRQTILMRDSSDEDDTSDDEEEDTSTPKKHEAGKKRAAESFVLKTPLSDKKAKVATPSAQKTVQVAFSTWPWGPSAVIFFL

SEQ ID NO: 60172 - protein, 2140 aa, Zea Mays
MLGPPDFYPQTLNCPEETLTKDYVQYGYKETVEGIEEAREIVISQIPYFCKPDVVIKCKEALKKRLRAINESRAQKRKAGQVYGVPLSGSLLIKPGVYPEQRPCNEDTRRKWVEALAQPNKRLRSLSEHVPHGYRRKSLFEGLIRYNVPLLRATWFIKVTYLNQARPAPNSTSVVASDNQRSNQWTKDVVEYLQQILDEVCSKEGAIVPPSFKEQSSPGLAAGTNQIKMKTESSPAGDSEEPLVHFKWRYMVRLIQWHLTEELLVPSVLIEWLSNQLQERDSDDVLELLLPIILGLVDTITLSQTYVRMFVELLVRRLNVDRPKRFSVSSVIAELLRYMVLAVPDTFVSLDCFPFPSFVVPDVYGRGALLKITSGGGILCSKRRDAYRYLSCGYAVSSIQKRAHDLAAVANPSLQARGAAKVVQALDKALVTGNLSVAYFSLFNDLSDALMEERWIKEVNPCLQSSLMWIGTVELSLICSIFFLCEWATCDYRDCRASPSQNVKFTGRRDLSQIHMAVSILKNKMDEMNNLSRPKSSTRITLNKVAKGSLNDACLTAAAVDDSSGLRSNAKNVDEKKDTNDIFESPGPLHDIIVCWLDQHEVSNVAGFTRVDVLIAELIRNGIFFPQVYVRQLIISGITDKNDTMLDVERKRRHHRTLKQLPGSSLFDVLEETRTAEEQQLYEMMSTYSSERRLVLSELSCGHSFYASGRGEYTSSSCIRKQSDLPVASEGDKHGRVLEQVEDVKALLSSLLGFTYPPLVESKLCEIKTSFQESVTSTLTQVETGEAKSGCEDCMRSKGQKLDDSATPFQGFPLIQSGEEDIWWVKKGTKLQESFNVEPVQKSVKQTSRGRAKVVRKTQSLAQLAAARIEGSQGASTSHVCESKMSCPHHEPNNDGDNVKDFDHTRAANVTAIGKSLKRLRLLERRSVSSWLLKSIRQLVDGNGMTASKATNSISILPLQPDDKTASKWRLGDEELLSVLYVLDTCCDSVSGVKFLIWLLVKIRGVGSSGQPGRTYMLMRNRDHQVCQVNEALVFSSLLRYENILLATDILPDVLSALVNRNSMSATTRHPGSTAFAYVRYFLKKYRDVASVAKWEKNFRTTCDQRLLAELDNGRSIDGDLVSSSGILAGEEIDEQVRQKLNGRSSRLVQNMKEIVQRQADGIQRSLKEKKVLAGAAPRNPLTFEKEDSYQIAHDIVLGLVECIRQNGGANPDGDLSIVASAVSAIVVNAGHMIAKHLDFAGGNYQGVNSVATSLNFVRHTLLIHINSLCLLKETLGDRFSRAFEIALAVETSAAVTAAFAPPKMHRNQFQPSPEAHDAYGNHTSELSNSGKGFVGRTAKVSAAISALVVGAVVHGAVSLERMVATLKIKDGLDIMQLLRGLKSNTNGVSHPTGGFRIENSTEVSVHWFRILLGNCRTVYDGLIADILGDPYIIALSRLQRMLPLTVIFPPAYSIFAMVLWRRYIFNCEDPQLYQSFSNAINDITRHQPFREIYFRNTHRLYNLLASDVGDSKFAAMLESHSPDRNSKILPFIPLRARLFLDAIIDCNTPTIQGDGASEPCDPKDNELKLSERLMQLLDTLQPAKFHWQWVEMRLLLDEQALMEKVAAGKTTLESLRSLSPKAEGFALSDSEKGFTEVILSRLLARPDAAPLYSELVHLLGKLQESLVMDVKWILQGQDAILGRRSTRQQLVHIAQRKGLSTKAQVWKPWGWSSLLSDAIPNKTAKRKLEVTSIEEGEVVDDTVDAKRTTKTPPHSVDRSFEGIRSINKYLTEKALAELVLPCIDRSSADIRGILSVDLTKQMGAISEHIKAIALNGAKQAGSVSSGNEVPSNKSSGRRGIRGGSPNIGRRAPVGNDPSPPSASALRAALWLRLQFIIRLLPVIMADRSMRHTLASAILGLLATRMIYEDADLPLPPTNATALRRDVDSLLEPPLDVLLDRPGESLFEKLLCVLHALLGSYKPSWLKSRSASRSSIKSQRDFSAFDNEAAEGLQSALDHMELPETIRRRIQAAMPLLPPSRRPCMQCQPPQLSLAALSPLQSSTSGVGPQQKSSCVSWVPTNVSVRSKAALPSHDPETEVDPWSLLEDGTNCPPSTASGSNGSSGVTGDHANLKASSWLKGAVRVRRTELTYIGSVDDDS

SEQ ID NO: 60173 - protein, 67 aa, Zea Mays
MGPTHGGDLSECSRGLLTTNYRDSSSHGVVRYIGGFDILASNLGDSKGLHSRVKSPSNSTDPGEAPG

SEQ ID NO: 60174 - protein, 973 aa, Zea Mays
MEQLRTFGRELAMGSQGGWGQSKDFLDLVKSIGEARSKAEEDRIIARELEHLKRRLADPDVPRRKMKELLLRLVYAEMLGHDASFGHIHAVKMTHDESLPLKRTGYLAVALFLDERHDLVILVVNTIQKDLRSDNYLVVCAALTAACRLIGEEAIPAVLPQVVDLLVHPKEAVRKKAVMALHRFYQRSSSSVSHLVSNFRKRLCDNDPGVMGATLCPLYDLISEEPNSYKDLVVSFVNILKQVAERRLPTSYDYHQMPAPFIQIKLLKILAVLGSGDKQASGHMYTVLGDIFKKGDTASNIGNAILYECICCISSIFPNPKMLVAAAETTSKFLKSDSHNLKYMGIDALGRLIKINPDIAEEHQLAVIDCLEDPDDTLKRKTFELLYKMTKSTNVEVIVDRMIEYMINITDHHYKTEIASRCVELAEQFAPSNQWFIQTMNRVFEHAGDLVNIRVAHNLMRLIAEGFGDEDEGADSQLRSSAVDSYVRIVGEPKLPSSFLQIICWVLGEYGTADGKHSASYIIGKLCDVAEAHLTDDTVKAYAISAILKIFAFEIALGRRIDLLPECQTLVDELLASHSTDLQQRAYELHALLGLGKNDVESVMPADASCEDIEVDRNLSFLDSYVQQALENGASPYIPESERSGLTSVGSYRSQEQQETSAHTLRFEAYEMPKPSLPLATSQTSMSTPNTDLVPVSEPGYYKEDHQTSRPQPPSDAVSGEFGVKLRLDGVQKKWGRSTYSSSTPSSSMSSQQTTNGASHSDGGGPSSQPRESSYGSKRQQGTEVSAEKQRLAASLFGSAAARADRKAQASRKTGKDSPSTEKVATTNVAAQSVKEQVIPAAAPPPDLLDLGDETVPSSRPSADPFSQLVGLLGPASAAPALSGTPATTTSTSKAPDLMSIFSDDVPTGVTSSGSTDPTPGDAISVSSHKGATAVAPKKGSSLQDALQKDSTARQVGVTPTGNNPNLFKDLLG

SEQ ID NO: 60175 - protein, 506 aa, Zea Mays
MEEPGREGDSPGPPWAPSESSAFRAFVTAVGERAVASPSGSDNGDSVCSSNLRAVRKRPFVARLTTYIIQTFEKCNPEFKYSESLNPKRFLTNPAVPVHNHGLDNANSDLILYVNLELLNKKSSRRYVVQEMLGQGTFGQVAKCWDAETNSYVAVKVIKNQPAFYQQAIMEVSLLRLLNEKFDPDDEHHIVRMLDFFLYQNHLCIAFEMLGNNLYELLKRNSLRGLQMKYVRTFSRQILDALIIMKDAGIIHCDLKPENILIAPTVKTAVGVKVIDFGSVCMEGKTIYSYIQSRYYRSPEVLLGYPYTTAIDMWSFGCIVAELYIGLPLFPGASEYDVLCRMIEIIGGQPPDDLLREAKNTGKFFKHVGSIYPSSEARNGASSAYRILSEDEIEARDSKKPKVGRWYFPRGRLDRLIYTYPWKNLSEGNLPETEKADCLALVDFLRGLVEFDPNKRWSPLQNHYMFFTNVKTYFRPRIIHSSLVKPSLVLTSLFRRPHEFLLDVLQ

SEQ ID NO: 60176 - protein, 176 aa, Zea Mays
MPPNPITSKSSVVVFAVTSFVDVPPTVAETKLNFLKSYKRPIPSIYSAVLQELLVQQHLMRYKKTYQYDAVFALGFVTVYDQLMEGYPSNEDRDSIFKAYITALNEDPDQYRADALKMEEWARSQNGSSLVDFSSRDGEIEAILKDISERAKGKGNFSYSRFFAVGLFRLLDFALH

SEQ ID NO: 60177 - protein, 553 aa, Zea Mays
MPLGTEVNGAKIAPTFSSHSDQIEPFSQSEFFPAASMTDAVSTQVSAPCSETNNQLVGQSHPLPHNYPQNIFSAGFTAQDPIEGSKFVANQLYSLCRDYMHDGLLTSGYGTQNRTYKGMNHLNSTCPPYDPLHPFLPVSNNFDYQAQCDIYSNQGCPDTCNDICAYECECLSEEVVAAEELNQRGISTCPQVLGWDGKAVSAIHQQNMCSTDYFQISDRDEDSENDQMKHGTHSNASDSSDRENGIVDPRHTQHAVGTENNTKDQCSQPKKGVFSRLSVRKELTSQDATGSTLNQLVSSLVRKTEQWSHNNRPIEDGLIIPLIGEQADCSHAALNLLSELELDKDVSIEPQLPFLNFKRRSEAGKVDANLGKEISGKMKRRKLVRPSLGENNDSTNFGEQLIGNCTQDKNQNHQESENHFDIDLNIPAAPIDDGPVEVNRIAVCPSVVIKVQTEKPYEIDTNKVNSNVMETTEEHDPSSAPTQKVIPDFNMADLNTMDESKLRTILEHTSSLLQALAEVKNGESNNCEQAKSSFEDKKVNMAYSDGATKSECD

SEQ ID NO: 60178 - protein, 203 aa, Zea Mays
MHSDRERGCKTWVISQFLRLAASNWTGEGSFLFTSSTALYDCSDNSMCNEDCLSVPIGRSPRTDILLKVENVVLEAGGCVLRLAGLYKIDRGAHVFWLRKGTLDTRPDHIINQIHYEDAASLAVAIMKKGLRSRIFLGCDNKPLSRQEIMDAVNNSGKFDTKFGGFTGTDGPLGKRMENSKTRAEIGWEPKYPSFTEFLGISS

SEQ ID NO: 60179 - protein, 500 aa, Zea Mays
MPSTSGPVAVASASASAKAAPSPDVGISPDLYPSEDDLAYEEEILREPFKLKGWWRYLVARAAAPFAKRAVIYERALKALPGSYKLWHAYLRDRLDHARPHPIDHPAYSSLNNTFERALATMHKMPRVWVLYLTSLLDQRLLTRARRAFDRALRALPVTQHDRIWPLYLRLASLPACPVETSLRVFRRYLQFDPSHAEDFINFLVSTNHWQEAANRLASVLNDDGFRSVKGKTRHQLWLELCDILTKHADEVAGLKVDAILRGGIRKFTDEVGKLWTSLADYYVRRGLFEKARDVFEEGVSSVVTVKEFSVVFEAYTQFEQSMLAAKLEAAEEEGAEDVNEGGGKKSGIDNLSKKFLDGFWLNDEDDTDLRMARFERLLDRRPELLSSVLLRQNPHNVEEWHRRVKLFEKDPARQVATYVEAVKTVDPMKAVGKPHTLWVAFAKMYEKHNRLDSAEDIFKRATQVNYKAVDHLASIWCEWAEMELRHNNFDKAIELMSCC

SEQ ID NO: 60180 - protein, 357 aa, Zea Mays
MDLSRPASSDLSLGLHSHAHAHARVHAAAAPLRLFDDAKPERLVAGEADAERDDGDGGDQHFSLLGHSLCVKRPRRAVNGGGGGGGETSSCSSTSPALRPAKRQAAGEDSGADLETRRAAVRSWGNQSLAEADPDVHSLMEQELARQVRGIELIASENFVCRAVLDALGSHLTNKYSEGAPGARYYGGNQHIDAIERLCHERALTAFGLDPACWGVNVQPYSCTSANLAVYTGLLQPKDRIMGLEPPSGGHVSHGYYTPSGKKVSGASIFFESMSYKVNPQTGYIDYDKLEERAMDFHPKILICGGSSYPREWDFARMRLVADKCGAVLLCDMAHISGLVAAKVRRLLLPFRLSFHA

SEQ ID NO: 60181 - protein, 139 aa, Zea Mays
MQEYLNHFLGNLDIVNSREVCKFLEVSLLSFLPEYGPKLKEDYVTARHLPKIEMDSKERYCSSCCFSFCSSSWQKVWAVLKPGFLALLQDPFDPKLLDIIIFDVSPCTDRDGDDQTTLAKEIKERNPLHFGFEVFRFHL

SEQ ID NO: 60182 - protein, 474 aa, Zea Mays
MSLDQLADPANSTCAQVIHSKSEICSHRWLPGSSNRNCKKQKYTNDDFKGKDLEIGGPRNLYMDHQSSPNERPIKAADHENNSKESMIENLEEPTVRAADLIGSMAKNMDTQQAARAAEDTPNFSSKVPEGKGKNDQHDNYVLPSLELSLKRSRSCGDGANDTVNDDEQRNSALRRSNLSAFTRYHTSAASNQGGTGLVGSCSPHDNSSEAVKTDSTYNMKSNSDAAAIKQGSNGSSNNNDMGSTTKDVVTKPSTNNERVMLPSAIKANGYTSTFHPVQQWMVPDNATAGKAKADEVANNAGRNSHPGDVQSNLTQQHRPTLHYVHFENSGSGALQCGSSNVFDPPLEGQATNNYGVKAGSNSGSNKGQNNGSTAGASTAAANAGRTDTEIRAIDKSGPGGGSGSGNDTYVRRLAASMTPRQEQLKKYREKKKDRNFGKKVRYQSRKRLADQRPRVRGQFVKQAVQNQEGDGER

SEQ ID NO: 60183 - protein, 426 aa, Zea Mays
MDPPPVSPDRWGPSQGAGVGPSGLRRYGLNFSASSLLQAPIAALLEYSGVVQSGPALAAHHPSAGPSSPLSASEVDGLLSAAAAGDGEVSIRIQGGPGDTEATGGPDAGTSSEDLIEATAGSEVDQASAAGRGAGATDAEANGGGAGTSGNGGGDRAYQRYDVHHVARWFEQILPFSLLLLVVFIRQHLQGFFVTIWIAAVMFKSNDILRKQTALKGERKISVLIGITVIFMIHVFGVYWWYRNDDLLRPLFMLPPKDIPPFWHAIFVIMVNDTMVRQAAMAVKCMLLLYYKNCRGRNYRRQGQMLTLVEYLLLLYRALLPTSVWYRFFLNKEYGSLFSSLTTGLYLTFKLTSVVEKVQSFLAAVKALSRKDVHYGSYATAEQVLAAGDMCAICQEKMHVPVLLRCKHIFCEDCVSEWALSFCEEA

SEQ ID NO: 60184 - protein, 335 aa, Zea Mays
MFCLRGYWSPSLAPVREGPVRHHIKFNSVVVCGARGPRPRYPRVWKTRKKIGTISKSQKLVECIKGLSNVKEEVYGALDSFVAWELEFPLIVVKKALKKLEDEKEWKRIIQVIKWMFNKGQGKTMGSYYTLLNALIEDGRIEEAEELFGMVFSRYMEGLPRTFFMRMISFYYSVEAYDKMFEIFADMEELGVRPDGSIIRMLGDVFQKLEMMDKYEKLKKKYPPPKWDYRHIKGKRIRIRVYPDSNPEVAAKGDPDTDELEELESTHLNNELDEAASSGLDRSVLDDAASGDLEYITHVVILPRHLCFGLTSQNPCRHTSKTWASLSSEVFYYLE

SEQ ID NO: 60185 - protein, 50 aa, Zea Mays
MRCISPAIDIAFSRANIYLSLPLFLKKRRRRERKTTTTRLHCIALQRKVF

SEQ ID NO: 60186 - protein, 363 aa, Zea Mays
MINKRNGKNSTRLVISAVATVGALLLVALMCFWGCFLYKNFGKKDMRGFRVELCGGSSVVMFHGDLPYSSKDILKKLETMDEENIIGAGGFGTVYKLAMDDGNVFALKRIVKTNEGLDRFFDRELEILGSVKHRYLVNLRGYCNSPSSKLLIYDYLQGGSLDEVLHEKSEQLDWDARINIILGAAKGLSYLHHDCSPRIIHRDIKSSNILLDGSFEARVSDFGLAKLLEDEESHITTIVAGTFGYLAPEYMQFGRATEKTDVYSFGVLVLEILSGKRPTDASFIEKGLNIVGWLNFLAGENREREIVDLNCEGVHTETLDALLSLAKQCVSSLPEERPTMHRVVQMLESDVVTPCPSDFYDSE

SEQ ID NO: 60187 - protein, 932 aa, Zea Mays
MLPSSRSRSGPNESPISRGRPSTASSNHRPSTPSSNHRPSTPSSNHRPSTPSSSHRPSTPGGTRRSSVGTPSTPRSRSNGAGPFKSEPNSPPSAAAQKPRLSFDRSPRSVDTKPVVERRVPKIGTTPEKQLRREAELQAQLESTHEDLKKAKDQLAFILGERDRLVGELNEAKRVADETHEKLQDALMAKRWAEEATEIEKFRADELEQAGIDEAQRREEEWQREIECVHGQHAADLETLVNTTEELERLRRDLSMVNDAKKAALGHADDAMKIAEANAEKVEILSNEAARLKGLLDSSAASEESKSREAELLVKNLRSEVSSLKGKLEKAIVLEERLAEAEKIIEELKSEIADAQKVKADICLQLEEWKEKSGSLEMKLVGVTLSEKLKSDSLASTTEELDKVKSILQDRELEIDVLKGKITAMEIEVARLLADVTDSNEHLDASQQEVFGLQTTIDVLRNKLDAAELAASEALDNERTAITKIEGLAEEKIKLISELDDARDREEREKMAIEDLTAALDKASCEAQEAHDRFQKKEDDYEHALAQIGDLKMSAKTMEECYSVMLDEAKHDITGLRETVEKLEAEVSKCREECECKELDLITASKQSEQEIAALKEEAQHLSASLQVAEHELEAVNEERERFQEKLACTESAVAEANHAVQEAKAEKERLQEKLAHTESEVAVANMAAHESKIEFDRLQEKLTYTELVVAEANKAVQEAKAESSHLKERLLDKENALQSITQENDEFRMREADAMKKIDELSALLAEAMTKKHPEEEEKLVVVDEAHNSMRDEVICSVAENGDTEETDDKKPKLEVEAVDMKSNGQSKHEEKDDSKVEQEELKTELSLQESKKVSFDKDTWTKNKKQETESPNDELGSKKVSSSTENASRAIIPEDTATKVSASPTKPQHQKKNKPLLKKFGSLLKKKNSK

SEQ ID NO: 60188 - protein, 70 aa, Zea Mays
MQTRTEEDRTCHFQVVTFLFSRAHPTFLLLLNDYVRECFVDVERDYLCLTKQYPRLAITPEFSKVGHFVH

SEQ ID NO: 60189 - protein, 346 aa, Zea Mays
MDPLSVLRDYAGRNELDKIIFSGDEIHFGSDYTFPASTPTAFASKQSGRPYPLSAAVFLAQHHDLKHTDFIQAARLRRIPPVSLPDRKTFLDFLRFGHNSLPSADPLLPSAFQPQEPHLHPPSPPPEDPAATEEATTGKQIRALERPFKDRNSILDARGRDFLAVFHAAVRRQDEQLKGGGKDAAPSSRPNSGSVAAALAKPKVLDRSLGDGVVPIILVPSASQTLITIYNVKEFLEDGVFVPSEERMRATKGGKPESVTVQKKLIRTERAGGAGGAVSFEVRDKPASLKSDDWGRVVAVFVLGKEWQFKDWPFKDHVEIFNRGDDVWLSWLQGRSSKHRFNRACT

SEQ ID NO: 60190 - protein, 377 aa, Zea Mays
MKMVEESKNERLKMLLDKTNELLEGIGKAVQRQKDAEHVSQHEGSEVPKGSESEDCSQISGVKSESPGESPSDDDADFAGSADESKFNAGRRLDFTVHSIEEKVTEQPSALEGGELRPYQLEGLQWMLSLFNNNLNGILADEMGLGKTIQTIALIAYLLENKEVAGPHLIIAPKAVLPNWSNEFKTWAPSIGTILYDGRPEERKLLREKNFDGLQFNVLLTHYDLILKDKKFLKKVHWHYLIVDEGHRLKNHECALARTLVSGYQIRRRLLLTGTPIQNSLQELWSLLNFILPNIFNSSQNFEEWFNAPFACDVSLNDEEQLLIIHRLHQVLRPFLLRRKKDEVEKYLPVKTQGSDQRLCRICQCNLGNVATTPIYL

SEQ ID NO: 60191 - protein, 133 aa, Zea Mays
MASVGGELAKVRAWGTAAFGVVELARDHSRDAMEMGWVAASSVDMRRSLGMVETGGILAEVVNFTEEASTSTTLDPTGFQVLFRGTHWLRFWAQLQKDEADGVLIKNVCRRLESVAMQFCVNFGWRFSNRIAL

SEQ ID NO: 60192 - protein, 408 aa, Zea Mays
MEDALAPPSVAPTPSPLAAAAVLTRRRSHLDSASFRTLSRLFSHCLHINPSPCGISPPVPEPVAADFVGGDPDDSPERPNGADFDRLKDVQIEAADAGGPSLHGTVHQPAAANSTLDLVEAEAEALQLEGADAVGVVESTSCMTRAEAGESAVLVVESTSCKTTAEVEESAVGAGLAMVGDVSLKSVESLLETKVDESVEVAVGDDEGCLLFEAMLTNFTGLIDDVDAGAIPTQRCAVSGGDLQNSKASEDLKQLGDRIEEGEPLRNCDNGQNDGGGFEEGEIEGEFQDLGSEESGNSEHGDEDGEDEKLEDNSISRGSGPNKSCDYGTQFGNLQSIPETGNDHLILNRDAIVRGDAQISVTRAQAVTYDEVVDWNETPLPDNETVNPGKKRKRILTEERKAKKTKIK

SEQ ID NO: 60193 - protein, 52 aa, Zea Mays
MPISSLLALPFSAWRPCVRLDGSAPRQVEEAPPKGGTGRQPQQQASSPRAPS

SEQ ID NO: 60194 - protein, 404 aa, Zea Mays
MVTASLFSLPSLRVLSRTSAHGPRFQILAARKPVESSTATSGSRRGGSKGAGLLSVLDRAMADEEEYRRARAQVQRKGVEVEGYAIEGISVGGHETCITVPSLNVAFDIGRGPQFAVSQDYLFITHAHLDHIGGLPMYIATRGLYNLKPPTVFVPPCIRDDVEDLLQVHRRTSQIELKVELVALDLGETYEIRNDLVARPFQTYHTIPSQGYVIYSIRRKLKKQYAHLKGSQIMKLKQSGTEITDTILYPEVAFTGDTKSDFILDPRNADALRAKVLITEATFLDDHVDVEHAREHGHMHLSEIMEHFQWFRNETIVLTHFSNRYSLEDIRQAVSRLQPKLNSKTFSSFQNKVEEPCITMLWGTGQRDTQSAYTHAHGVLHRMEYDRQALKWHMFLWINFFTYI

SEQ ID NO: 60195 - protein, 334 aa, Zea Mays
MAAAVEGVRHRTLEANGVRLHVAEAGPEEGSAPVVLLLHGFPDLWYGWRHQMSALAARGYRAVAPDLRGYGDSDSPPDASSYTTFHVVGDLVALISDLGQRQVFVVGHDWGATVAWQLCLLRPDLVRALVNLSVVYHPRRPEMSPLQAIRAACGEDHYMCRFQEFGVAEAEFALYDIKWVFKKTFGMRKPAPLILPKDKSFFDSLDSDGTCPPWLSEEDISYYAEKFAKTGFTGGLNYYRCIDRSWELSAAWTGAPIKVPSKFIVGDLDITYNAPGVPDYIHKGGFKASVPNLEDVVVMEGVSHFINQEKPNEVEQQLLESMVYLVGEGSHLKK

SEQ ID NO: 60196 - protein, 1367 aa, Zea Mays
MATNRPRSAETRPGSSQLSRFADNASDNVKASIRTIDRPGSSSHGPGFTLSTGDFPTLGSEANSQRGHSSKGRPISSSGKEVSQGEQVKSLTTGNGELISQSNNQPVDIMKTEQHAHTGGAPVLATNVPNEGLQPRPYPPNFPMPHPQFDSWRAPPGHPPEGMWHRGLVPGGPYRPVGPPGSFPVEPFGYYGQFPPNSEVAARQGPGHGGYQAKNGDVYHPTPPNSYIMNQPVIPVRPVYQGPVPYDGYYGPRAHFNNANVRDPHFVGGPGILNQFPNQNDRFHPGHPQNRPGRHETVPREQLEYDKIHVFHRGNPGSLHDNSDRLGGSREFERNAQPASPLLPHPDGNRTDVNMRTDTRDTFSESERTRVLTKSVPNQRGSVGTEHLSVYDNAHSHHRETGDGTLRKKFKEDGSAALHPVIKKNAALIEKIESLNNKARNVDARNLPESASSKEFNKHKKSTDVSSNDVMGMACKSDPAVSVSCVSPAVQRLPNVPIKGTILGPAHPQLTEFSKAEKLGDSISDHVHRKSDSSRNSYHGPSKDRPANKFGSHGRGESSTTDLRNNIDHGQQPEIASQLQPAIVPDDMPASLDYESQRAKMKELAAERAKKLKAEEEERIKNQKAKALAKLEELNRRSSVLQKKSNDIKVETYDAHDKQHAGLDVTAKLDTSTEPHDVIAPDRLTDLLPPNDPNHTMVHIQAQSTAQSHALDGGKDPDAHATSSLVKNTHSNMEPVVQKSISQLHDITVVKAKQGYRKRHVSEEKISDEKASASITTRNITKNVDVLIDTVTAVVAPHDDPPTQNKKGTRHLRSKKKLDDAPVTSKHPPVVLNEPNTVKVSTEPKTHTGGVIISSSIVPTEGTIVTVGSITVGGISLKPMNQERVKSPDGTNNTESSQPRPQQTRKSGKHQHVLRPVEKPHGNDGILCAPVKPPVPNEHSDGAMPTAAVADLTKPVGKAINDGENVTRTKRAEMERYVPKPMSKELQQQNPSDDKEAVDKPSGAKSHPAAEPKKTSKAHGGKSNPSWRKRNPDESALVAPNSVEQADVSYESKEVQNFTYQKQPVELGKQDTQLKFSVDAAAENSSAPVQTVPLSVGGAKQHSAANRQRRQHVKAQRNEASGYSNESKGSEGKNDVVYQSATPVMDSNSSNHRNVPRSDVKNSGVVSHSRAWKPKTNSHPQDSSDGKIAVDGQVDSHGGRLEMNTSKGSDTITHLVTSSEPTKRSDGKEVSHSKHENLAREDGNQKGETEQEQANPTLRRQGQPNARYHRGGGSHRGRGGYDTGRPNHVTNVERRKGGSHLEYQPVGPQNKAADFQQSLGMEERTEGPPASGQAFRQRGHNRGLRPAGRFVQRNPASTPTTNSHQNE

SEQ ID NO: 60197 - protein, 150 aa, Zea Mays
MMRETYMDVLPPVDHIAASRSGGWFPGAARLWTAAENKQFERALAGLDLCRPDWEKVARAIPGRTVREVVSHFKSLQVDVQQIESGLVPMPVYGAGAGSFTLQWDGCYGPADSRHNGYRFGSGGCGRRHHGRTPEQDRKKGVPWTEEEHR

SEQ ID NO: 60198 - protein, 65 aa, Zea Mays
MDRRKVIMQRIEGALWTQEPVRVAQEGKITVSALWFDVGGIIFSSTGDVQEFMLLYVNLKCDITS

SEQ ID NO: 60199 - protein, 309 aa, Zea Mays
MPLTRVAADAFGVLTIALFALFAALGLFCIFQSVYFRCRIRRGPSFLPLGYFNGPWVTRIALILITIWWGVGEIVRLSFLKKKLFSSLTWQRNICDVYILSNLGFAEPGIFFAFAFLLHGSLQKRELGTLNQRWNWKTMAYLLVFCIPVFSVQAILVFVGPRFVREENHDLGRRKIAKYFIRTYTPVGDTSVCTYPLFGTLFLGLVDAFLMSYVSYVGLRVLSLVINKSLRRRVYLLMLSVLCFLPIRVLLLGFSVLLKPGHVAFEGQRDIAEMVPYDDYYYEGTSLVANQSFREIERNSDTSTKPGSI

SEQ ID NO: 60200 - protein, 618 aa, Zea Mays
MRHSRQRGKFQNLATFILSAGVAVAFASHGVHFVKLQSASALLHRPLAHCGWCALHGSTKSEPLLSVDFSALPSYFWSLHYAVALDSMYLPPMIRHSWLLVGGSEEIYPHTPLYVDSGAQSSGFATTNMDSNEPCRVVPNYMPLEQGAGLVVHGLRLKKHQRRRRTMRHPQNWRCLIARLPYNGIGMKQSTSAMQTGVKLRSSRQESPVEPVQPKAALGISLDLLENMDESDVSTPMGSTRRKRSLKSPVERMNEKLALAEVRQDIDSVHSKANLLVFQADRCWREEGAEVMLELSETNKWCIVVKIQGVTRYLLKPSDMRSYVINRHTQAYMWTVDDAWKLEFTDRWDWLLFKELHVVGCERNSQGKAIPIPGVHEVSGEMEGIVTDPFLRPVPDYIRMVDDEVGRALSRDSIYDMDSEDEQWLIQLNHSDSDPNSSQRNHISYEDFEVLISIFEKDAYNNPQGKNDLSELLSRYPALLKDDNVHAVYGYWTSKRSKRAAPLLRVFQGAPIRRGHLPQKSAMKRKRSFKRQKSRAGRGKHEALLQDNAEDEAALQRVAQADRAAKRALETAIQLRNRAQSLMTNAELAAYKSIMALRIAEAARISDSSRDIVCTILD

SEQ ID NO: 60201 - protein, 515 aa, Zea Mays
MVPSEPQTVVENKHSTSVGAEELLLTKDESTSTTVVQGAGSLMSPKGVQEEASFMGKGKGGEQQLGYQPNVYVSQPHTPFSGGYSNHLDQWEGYPYAVSAEGLDAAYPVTYGAYSPLSAIGDSHTYFSLLCPLSRPCYQPPASPNMRYSSPVTPSFYQPFGSFNGVPMQPSSFPGFFGQGNIPLTSRMHQESMSNSGSHKAFQQGGKFGGSTQSWSTASCKFGTFKDEKCSPDFLNEQCRGPRATKTRKEVGSSSTEDKNKNVLPIADSDKYNHPGFVTEYKDARFYVIKSYTEDHIHKSIKYNVWASTPRGNRKLNAGYHEAKAKEDHCPIFLFFSVNSSGHFCGVAEMIGPVNFDKSVDYWQNERWNGQFPVKWHIVKDVPNNIVRHIILENNENKRVTNSRDTQEVKLKQGLQMLAIFKNHEAQTNILEDFDFYEQREKAMLDDRQQQKPECSDTGKQVQASAPVDIVTDRRGHAENSGSGRPLEGKRVIARSPFMTNPEQQLGPFLKPFQG

SEQ ID NO: 60202 - protein, 888 aa, Zea Mays
MEGTLVQSAVVPTVYRSSSGRFRVRARARTNATMVRNMPTRTLTLGGFQGLRQTNFLDTRSVIKRDFGSIVASQIARPRGSASRGVVRAMFERFTEKAIKVIMLAQEEARRLGHNFVGTEQILLGLIGEGTGIAAKVLKSMGINLKDARVEVEKIIGRGSGFVAVEIPFTPRAKRVLELSLEEARQLGHNYVGSEHLLLGLLREGEGTDVRYDVQVIRMVGESTEAVGAGVGGGSSGQKMPTLEEYGTNLTKLAEESFGRQDQIERVTQILGRRTKKQPLPNWRAWCWKRLLLLRGLLSVLPMGMFLKQFEGKKVITLDMGLLVAGTKYRGEFEERLKKLMEEIKQNEDIILFIDEVHTLIGAGAAEGCIGATTLDEYRKHIEKDPALERRFQPVKVPEPTVDETIQILRGLRERYELHHKLRYTDDALIAAAQLSYQYISDRFLPDKAIDLIDEAGSRVRLRHAQLPDEAKELDKELRQITKQKNEAVRGQDFEKAGELRDREMELKAQITAIIDKSKEMIKAETESGEVGPLVTEADIQHIVSSWTGIPVEKVSSDESDRLLKMEETLHTRIIGQDEAVKAISRAIRRARVGLKNPNRPIASFIFSGPTGVGKSELAKALAAYYFGSEEAMIRLDMSEFMERHTVSKLIGSPPGYVGYTEGGQLTEAVRRRPYTVVLFDEIEKAHPDVFNMMLQILEDGRLTDSKGRTVDFKNTLLIMTSNVGSSVIEKGGRKIGFDLDYDEKDTSYNRIKSLVTEELKQYFRPEFLNRLDEMIVFRQLTKLEVKEIADIMLKEVFDRLKAKDINLQVTEKFRDRVVDEGYNPSYGARPLRRAIMRLLEDSLAEKMLAGEVKEGDSAIVDVDSDGKVIVLNGGSGVAEPLEPALST

SEQ ID NO: 60203 - protein, 888 aa, Zea Mays
MPNSNFTRLVLLCSRRFFSVVRRTAETLSAIKKGTVLATSTFPRWFADVFAFGSVPLRTYLPDGDVDITVLGNTWLNSTFIDDVRSMLQSEQENCDAEFKLTGLQFINAEVKLIKCVIENIIVDVSFNQIGGVSTFCFLELVDRQIGQNHLFKRSIMLIKAWCYHESRILGAHHGLISTYALETLVLYIFNMFHKSLHGPLEALYRFLEYFSKFDWDRYGISLNGQVDLSSLTVEPTDVQGESLLGKELQQGYLDRLVVIPNEFDGCGTQFRQKFLNIIDPLKANNNLGRSVSKANFYRIRSAFSFGAQKLGQILLLPSEYIRDEIYGFFANTLKRHGNGERPDVDTCSSFHPSRGPESALTEDGSKFKFCCMNEGENGSSCQCHSSKLPDKDSSVTDAHKNSGKYLPGLVQDISWNKIWFMEYASDFKEHTSTLASLSSHSPCSQDNSNGSSDECFENYAAEEDLHQNVPQQIYPEHPSHILTNSTSANILDFSSSCFGDESDWTAPRAGKKLLPPFLLSNMLDLSGDLELHLGCLRKVQYHLESLFDELLQAVEEACLADVLDEDSFKMSDIILKLKTSTRSSSLSLVSSTDSERRKLSHVYCSHSTGDDLQLSHAEVQVDMVWQQNVPLSPNGSTFTPSPSNNSDNYHVSWFCFSPTSHGTGTYIPNMSYHTYRERMMLERETIRARKQRQRFPDRRYYSAEQGFADSQTEDSVAQSGTNQSPTKQNSAQQSGYSSKSSISDGDFVRFKEHVATNGGTKQAVGRDFVEKGRHTTPPSSPPMTVLLQNGQGKPTCQPSSPVTADLFNAAKSLEFGSLGPFSLGLPSTSTQFEEEFPALPTRKRAEGPISVAPSAKAVETKSRSEESEEMFRLRNESDFPPLQAGCR

SEQ ID NO: 60204 - protein, 100 aa, Zea Mays
MRTTHIGSSACPRPRRVRSYSYTKFWFCLAWRLILLCPSLCTRPICRVVRFRSCLEAENSCRGVVCSKLISNSDKLTIKSHMISNIHCCPRWYSISTNLV

SEQ ID NO: 60205 - protein, 54 aa, Zea Mays
MDQQRTSLFLVSDMQAGREKMDWVARMQAGSFPRVQSTYLVGLDVGGAATHHKL

SEQ ID NO: 60206 - protein, 346 aa, Zea Mays
MHHLSHQFLILFRLWASGDRSLSLSAFLMIREVASLLPDCLDHCLTKSYNTYLASTNLVNDRNTKHIYFLMDCLVELYSLDVQKSYERAIISVEQLNAILRQASKTKEKEDLRKIDNWQYISCVNLWVRFLCCHYKDYNLHPLFSQVLQVIRGVAHLFPGTRYLPLRLKLVQMLNELSTCSQMFYPIPSLLFDCLELREVSQKEQTQRTKINFSSLLKVPKNLLKSRDFQEECILSAIQILSAHFAQWSYHVSFPEVATIPLVLLKRLHEQTTVESLRRPIKRLIDQVTENKDFIERKREVVSFSPNDKASVDSFLQEEKVSRTASFTRFYASVAENRQPKWRKTL

SEQ ID NO: 60207 - protein, 1928 aa, Zea Mays
MTFFLYLTSSGVTFCYVSYCVGEDIDDLEYTPKPEFEGYFRVKNVQTELDLLKAWFSHMQEVKPGIYVTYNGDFFDWPFLEKRAAHHGIKMNEEIGFQCDNNQGECRAKFSCHLDCFAWVKRDSYLPQGSQGLKAVTKAKLGYDPLEVNPEDMVRFAMEQPQTMASYSVSDAVATYYLYMTYVHPFIFSLATIIPMSPDEVLRKGSGTLCEMLLMVQAFKASVICPNKHQADLEKFYNNRLLESETYIGGHVECLETGVFRSDLPTKFQLEPLAYEQLIGNLDRDLHYVIAVEGKLDIDSVTNYDEVKDAIEQKLVALRDHPIREERPLIYHLDVAAMYPNIILTNRLQPPSIVTDVDCTACDFNRPGKNCLRKLEWVWRGETYMAKKNDYYHIKRQIESELIQSGGIASSKPFLDLSKPEHLLKLKDRLKKYCQKAHKRVVDKPITEVREAGICMRENSFYVDTVRSFRDRRYEYKGLNKTWKGKLAEAKASGNSMKIQEAQDMVVLYDSLQLAHKCILNSFYGYVMRKGARWYSMEMAGVVTYTGAKIIQNARLLVEKIGRPLELDTDGIWCVLPGSFPENFTFKTKAGKKLTISYPCVMLNADVARNNTNDQYQTLKDPVNKTYTTHSECSIEFEVDGPYKAMILPASKEEGILIKKRYAVFNEDGTLAELKGFEIKRRGELKLIKVFQAEVFDKFLHGSTLEECYSAVASVANRWLDLLDNQGIDIADSELLDFISESSTMSKSLVDYGEQKSCAVTTAKRLAEFLGDSMVKDKGLHCQYIVAREPQGTPVSERAVPVAIFETDPEIAKHYLRKWFRFSSDANIRSIVDWSYYKQRLSSAIQKIITIPAAMQKISNPVPRVLHPDWLHKKVREKDDRFRQRKLRDIFSPLAKEEGLHNLNRTGDMEDLLISNKDLRKNPSHGLDIDKENNPNGASVGSGLNISKKQQNCMTGLNVPCTSQIQNAASYETVDKGTDYQGWLDAKKRKWKYVREQKKRRRLGAAATFDDPNALLSARHANQLPVNSRNRSTFFQKQELALFRSHWQIIQLASSTVPGHFFAWVVAEGIMFKIPINVPRTFYLNSKAPVTEEFPGRRVKKILPHGRPCFNLIEVVTTEEQFRAEGKKLAAHLAEPDVEGIYETKIPPELNAVLQIGCVCKVDKSAKRRSIQDGWDLAELQMKTTAECSYLEQTFSFFYLYHSLSEGRAVYVFYFPTSFRIHAVIVNPFRNKEISPSFLEKQFGDACQALGSVPENLSFHVDYQTSIDAGSKYAQRMLLEYRQQHSGPVVGIIECPKLQAIKVAIRALDDLPCVTIPSNARDNNYQALGWQATAGRTSMQRCAASTQWFNERISLAKYAHVPLGNFELDWLLFTADVFFSRALRDQQQVLWISDDGIPDLGGTYEGETCFADEVIQPALTYPGAYRRVSVELKIHHLAVNALLKSSQVDEMEGGSIGSFGNDVPPGSNATETDFDDASLCIPAFQVLKQLIQRCISDAVSSGNVFADAILQHLYRWLCSPRSKLHDPALHRLLHNVMKKVFALLLAELRKLGANVIFANFSKIIIDTGKVDLSSAHAYCDSLLRTLQTRDLFEWIELEPLHFWHSLLFMDQYNYGGIQAKTQNVDSSDGDNDIDIVSSWNMAEDLPKDTQDHFVLIVSEFLYIPWKFMKEQVAAQATIRDDTSCTPSVTIMAAENLEGQVIEHLRDKISNYFADKLLRTVSDILHHFKGKSKHESDEPAKSDPHTHKGDAALEFIKHICAVLALDQNVQHDILRMRKNLLKLVRVKEFAPEAQFQDPCASFTLPNVICSYCNDCRDLDLCRDSALQGQEWRCAVPQCGQPYHREQMENALLQVVRQRERLYHLQDLVCVRCRQVKAAHLSEQCSCGGSFRCKEEPSYFLSKMRVFLKVAVSQKFPLLQDCVQWILEAR

SEQ ID NO: 60208 - protein, 247 aa, Zea Mays
MSIEMHDINLQLLGDHQRQNAVTAACTALCLRSLGWEISDASIQAGLRETQLPGRSQFLTAEEASVLGLDGASTVLIDGAHTEESAKALSGVIEAVRPEGPLALVVGMASDKEHLAFAEQLLSGQTPDVVLLTEASIAGGSSRAMPASSLKEVWIAAARHRGIEYVDIGGISGTETLEHIADLLGSPSLSSRRKPMVIGCQDMGPFSWNLIIAASQLLESRGRAPGLICVTGSLHLVGAILQKLGRH

SEQ ID NO: 60209 - protein, 144 aa, Zea Mays
MAVPVGRLAASTLLQLLVWLPLPASACDRCVRHSKAAYYYTSSLTLAGGSCGYGTEAASFSAGLLAAAGPALYRGGAGCGACFQVRCKDRKLCGAAGARVVVTDRARTNGTDLVLSSTAFAAMARPGMARRLAGLRAVDIEYKR

SEQ ID NO: 60210 - protein, 261 aa, Zea Mays
MATEEWELREEDAYAYEFEFDLENPFTSPADEPIASLLDAEGHHAPSISAAASATRRAAAAFISKVRFGGELAVHPRVAYLALNYVDRFLSKRQLACEQQPWAPRLLAISCLSLAAKMQRVATFSTADIQRDEDFMFDAVTIRRMERVVLGALEWRARSVTPLAFLGFFLSACYPPPQHPPQVAAVKARAVDLLLHAQPEVKMAEFSPSVVAAAALLAAAGEVAAANLHAFQASLAACPFVNSVSMSFKPRGFFYFHYKPL

SEQ ID NO: 60211 - protein, 60 aa, Zea Mays
MLLVLPIEECPLPLVNGTHRKWRKLVKDLNIPRRFNMQNLAVFMINLIDELHIEAVVDDA

SEQ ID NO: 60212 - protein, 158 aa, Zea Mays
MTLSGGASSGSSHGTRSLGSEGDMVHRMELMRKRRMESNRESAKRSRQRKQQHLDDLNSQVDKLRTTKQQLMVALNMTSQNYAAAAAQNSVLRTQMMELQSRLCALREIICHMYATTTNVHPATVMGGAATYHTFGETAWNSGSCSMQMVDHLLHQCF

SEQ ID NO: 60213 - protein, 713 aa, Zea Mays
MGLGKTIQTIAFLSSVIGKGNGHGQSTNKGKMTGPVLILCPTSVIRNWENEFSEWAEFSVAVYHGPNRDLVLGKIENQGLEVLITSFDTFRIHDKVLCGISWELVVVDEAHRLKNEKSKLYTACLGITTQKRFGLTGTIMQNKIMELFNLFDWVVPGCLGDREHFRAYYDEPLKQGQRLSAPERFVQVADARKKHLVSILREFLLRRTKEETIGHLMLGKEDNIVFCKMSDVQKRVYRRMLQQPDIQILINKDVRCSCGSPLPQVECCKRTEPDGVIWSYLHRENPEGCSICPFCLVLPFLVKLQQISNHLELIKPNPKDELEKQKKDAELAAAVFGADIDLVGGTAKSENFMGLSDAENCGKMRALERLLSLWTGQGDKILLFSYSVRMLDILEKFLIRKGYCFSRFDGTTPMNARQSLVDEFNRSPSKQVFLISTRAGNLGVNLVSANRVVIFDPSWNPAQDLQAQDRSFRYGQRRHVTVFRLLGAGSLEELIYSRQIYKQQLSNIAVSGKIERRYFEGVQDDKKFQGELFGICNLFRDLSDKLFTSEIIEMHGEHGKSSATEATGIREIVDTDLFGSQENRKSSTATTHTDDQKLVDFGIVYAHRNEDVVNMRTDGREKGGADETVQSSLEELLSKNETKHTAMEKSYSSEEKREVARSYSLEQKKKEFSCIASFMGMDDLEFSKWLLSASPHQRSEVLQDYRRKKKNQK

SEQ ID NO: 60214 - protein, 398 aa, Zea Mays
MMDCVLRFACNSSLIILQQDFDVTPRQLEEVSSQMMELYVQNRTPQAQQSQGSEAEGSSAGVRNQHSSVKSEGNSKEPSAHGYHPAFKPSNLHHSSLAGAPGDHDSGHSNSDKHVSGHKMLQNDNGNHVGSKEKNKSGGKSDAGMDRFCHEKSPPGHHYSKVSHESHNPVEEQKPHQSHDNPNERIDGILGGNEVPGVSTSRIDAMNKIDKGKVKAALEKRRKTKGDITTKVDVMDDDDLLERELEHGVELAIEDEKIKQDKMQNLSHIKDKKITQDNMQNLSHIKDEQDNMQNLSDIKDEKIKQDERQNMSHAPVDLQTTDQVMENGHHVEPSVPTTVEDTGFPLDNKEHPPFDKQNDVPEHESQQLEHTLKHDLPQLVGGPEQDDGTDCKRPKLEE

SEQ ID NO: 60215 - protein, 546 aa, Zea Mays
MIFLHFTDFQDTQLRQFDILINENQSGPKLTAYNDTWYLTPTHVHTKSYRADDGKYNVTLAATKASVLPPMINALEIYIRVPYESPTTLPQDFDAIVAIKTEYGLSRNWMGDPCFPIKYAWDGVKCSNASGNTSRITSLDLSNSSLHGTISKNFTLLTALENLDLSYNKLIGSIPDSLPSLPSLRVLNVSGNQLSDESLCKNYTGPLIFSRDFDGSACNKPSPSPSRNKVAIIAISVVVPVLVLIVLLFTYFIWWAKRKSNVQPVPTHGPTRDPEPDNVSGSQKSYGYNMNKTENRQFTYKELEKFTNNFKKFIGQGGFGPVYYGRLEDDTEVAVKMRSESSSHGLDEFLAEVQSLTKVHHRNLVSLIGYCWEKDHLALVYEYMSQGSLFDHLRGKNGVSQALNWRKRVQVVLEAAQGLDYLHKGCSLPIVHRDVKTNNILLGQNLQGRGHVIQRVKQKVATGDVGSIADSRLGSAYDISSMWKVIDTAVMCTADSAAQRPTMATVVVQLKESLALEETREKGSSNRVSRGSDIEAMASTLGPFAR

SEQ ID NO: 60216 - protein, 58 aa, Zea Mays
MTGNRVYVYIYIYMYMYVYLIWWPLVIFGWGVFDILSVADWRILWRIFDSYMYLFIQI

SEQ ID NO: 60217 - protein, 326 aa, Zea Mays
MDLRSKARTLSGPVTDPSKLPKWNYDGSSTGQAPGEDSEVILYPQAIFKDPFRRGNNILVMCDCYTPAGEPIPTNKRYNAAKIFSSPEVAAEEPWYGIEQEYTLLQKDTNWPLGWPIGGFPGPQGPYYCGIGAEKSFGRDIVDAHYKACLYAGINISGINGEVMPGQWEFQVGPSVGISSGDQVWVARYILERITEIAGVVVTFDPKPIPGDWNGAGAHTNYSTESMRKEGGYEVIKAAIEKLKLRHREHIAAYGEGNERRLTGRHETADINTFSWGVANRGASVRVGRETEQNGKGYFEDRRPASNMDPYVVTSMIAETTIIWKP

SEQ ID NO: 60218 - protein, 1761 aa, Zea Mays
MASAVAAPPPTPPESDPRLVEIFSPFLEKLIKNASWRNKAHSKLSHTAKSILDRLQKPPPPPAAEAQAPSTPTSSPSTPTSSSAQPGPLRSLSLADSELLLAPVISALGSGSAKLAEAALELLHRLIAHSYIHGEADPSADPSAQLVASLLDAACNALGLDDEHIELLLLKTLLSAVTSTSVRLHGDCLLRAVRACYDMYLGSRSAVNQATAKASLVQMLVIVFRRMEADSSTVPVQPIVVADVIELPDAISGSSPTADPNVVQGFISKIIGDFDGALTPLARTTSSAGAGPTVAHDGAFETTAAAEEGANPADLLDSTDKDMLDAKYWEISMYKTAIEGRKDELGVEGAVVGTLDDDADVRIGNKLRRDAFLVFRALCKLSMKTPPKDAPADPIVMRGKILALELLKILLENAGAVFRTSESLVARFRPGLKAEIGVFFPMIILRVLENIAQPNYQAKMIVLRFLEKLCGDSQILVDIFLNYDCDVHSSNIFERMVNGLLKTAQGPPAGVPTTLVPPQDTTMKSEAMKCLVAILRSMGDWMNKQLRIPDPASPNVESEKNDNDDGNELPQADNNGDESSEASDSHSELSNGISEAASLEQRRAYKIELQEGIYLFNRKPKKGIEFLVNASKVGETPEEIAAFLKSASGLNKTMIGDYLGEREDLSLKVMHAYVDSFDFQRLEFDEAIRAFLQGFRLPGEAQKIDRIMEKFAERYCKCNPKAFSSADTAYVLAYSVIMLNTDAHNPMVKNKMSPEDFIRNNRGIDDGKDLPEEFMRSLYERIWKKEIKMKEDEFVPQQQQSTSSNKILGLDNILNIVVRKRGSSMETSDDLIKHMQEQFKEKARMSESVFYPATDVVVLKFMVEVCWAPMLAAFSVPLDQSDDEIVVSQCLEGFRSAIHVTAAMSMKTQRDAFITSLAKFTSLHSAADIKQKNVEAIKAILLIADEDGNYLQEAWEHILTCVSRFENLHLVGEGAPPDATFFALQQPDLDKSKQAKSSILPVLKKKAPNATSASKRGSYDSAGVGGKASGVDQMNNEVTSLLEQVGMAEMNRVFVRSQKLNSEGIIDFVKALCKVSMEELRSASDPRVFSLTKIVEIAHYNMNRIRLVWSSIWHVLSDFFVTIGCSENLSIAIFAMDSLRQLSMKFLEREELTNYNFQNEFMKPFVVVMRKSRAVEIRELIIRCVSQMVLARVSHVKSGWKSMFMVFATASYDDHKNIVLLAFEIIEKILREYFPYITETETTTFNDCVNCLIAFTNSRFNKDISLNAIGFLRFCAAKLAEGDIGSSRLKDNPSNSNPPSPHLTNDGKQECTVLVDKEDHIHFWFPLLAGLSELTFDLRPEIRKSALQVLFDTLRNHGHLFSLPLWEKVFDSVLFPIFDYVRHAIDPSGNPPQGQSVENDPAELDQDAWLYETCTLALQLVVDLFVKFYDTVNPLLKKVLLLLTSFIKRPHQSLAGIGIAAFVRLMSSAGSMFVDEKWLEVVLSLKEAATETLPDFTYVSSGAYLENVPTENGVSADNREDESEPVADDNEESSRSRNLYFTIGDAKCRAAVQLLLIQAVMEVYNMYRGQLSAQNTVILFEALHTVAAHAHKINSDSDLRSKLQELGSMTQMQDPPLLRLENESYQLCLSILQNIFLDSSPDHGSTEVVESHLIGLCKEVLEVYLSTARPSQPSSGTQPLGHWLIPVGSSKRRELAARAPLVVSTLQAISGLGDSAFEKNLRQFFPLLAGLISCEHGSSEVQVALSDMFSTWVGPLVLQSC

SEQ ID NO: 60219 - protein, 421 aa, Zea Mays
MDGQAPPLLDAVVLEPLAVGDELHPRRPVEVEDAPAAAPPSGMDGQVPPLYNVTRDPLTVSDELQPTGEVVDDALLVAPDIVKGEVMEDDILPVATDIINDAASECPEAGSDGVVLTDELRNRIVKQVEYYFSDENLPTDEFLLNYVKKNNKGFVPIEIIASFRRMKKLVQDLSVIEAALRTSSKLVVSSNGKRVRRLHPLPHKELKDSKKSTVLVENLPPDFSMESIQEKFATVGKVVNITINDPESVKEFSTAKKPDFNLSFKVTALSDESNWRTGMKVRLLSKQSVMGPGKYKKPSKENQDAVSKMIDQNQHSKEDQLKTLEKISGADAVGITKDRDNLKPVFITETEHQDQKPNARGRKGWYKGQGQMQQNANKQGSCGSESLNKPISGPRMPDGTRGFTLGRGRSLPLQKSEKAEE

SEQ ID NO: 60220 - protein, 638 aa, Zea Mays
MKEDPLPASLDKADRVSVRALIALFLILSWVVIIVQCFTGSDILRWRSFYATHDMAWKAHYREVFDHGIREALCCLGRAKYLTVLEEDEVYSVARLLGDLVAYRASGTGHLELLAGLALLQKHGNLSELQTDLVEASHELMQEAAFLHPFAEACYTGPLLDFGRNPILFPCAWVYRQGVLTPWARRRRPALDGDNWWRGHAAAFLRFVNIPPKALLKGRVCQSKREAAYFVVVLHDKRTVVIGVRGTETPEDLITDGLCRECAFTMEDLDGLVNSEQLPATTRERVISTFPHYGHGGIVESARELFMQLNGENTSSGRLGFLSTLLGEGSECHGYKVRLVGHSLGGAVATVLGMMLYGKYPSVHVYAYGPLPCVDFVIAEACSHFVTTIICNDEFSSRLSINSILRLRSAAISALSDNSPADTAMIQKLARRILHVNRYHDNGPDDGIIQGYADHTRTADTTVPNERQISHQIPLCNTELDLHNTQNGFFRYNGSSASIDEHLSYEGISSGHDMQIIPLDGADSGFEGHQTSYREIPVEPPEMFLAGLIVHIVRQRRSLFPLWKCWSIQETEPPYKAVLAKRENFRDIVVTPYMFTDHLPWRCSCFYYTCLTIRTVLDGVLIFFNCAFFSGMAACNGR

SEQ ID NO: 60221 - protein, 1005 aa, Zea Mays
MVGPEMLVAATVNQVVRKINEIIGVAQGETKLCCSFSDDLEGIKDTLVYLEGLLKNAESNSFGSDRANLRHWLGQIKSLAYDIEDIVDGYYSSKEQYEGSNYAQKGSLLCSLSNPMLSKVSMVHKMKSKRELLQTRQNLPTQYHFISHINSVVNYDEKQTTSYRNCDIRIVGRGPDLEHLMYMLMQINLKELTIISIVGPVGLGKTTLAQLIFNDARAETFRFRIWVHVSMGNVSLQKIGRDIVLQTTEKIEGNMQMQSIKNVVQDILNKYSCLIVLDSLWGKDEEVNELKQMLLTGRKTESKVIVTTHSSKVAELISTVPPYKLSLLSEDDCSAIFCQRAIAGQSISDPLFREYGEEIVRRCEGMPLVANFLGSVVNAQRQRREIWKAARDKDMWKIEEDYPENKIVPMFPSFKIVYYSMPHELRLCFVYCSIFPKGYVIDKKKLIQQWIALDMIESKHGTLPLDVTAEKYIDELKDIYLLQVLERHQIDAEISNTSEEKLYMNNLAHDLARSVAGEDILVILDAENVRCNRNYDYRYAQVSTSSLQSIDSKAWPSKARSLVFKSSAELQHVSEVLSVNKYLRVLDISGCSVKEMPAPIFQMKQLRYLDASTLSIADLPPQISGFPKLQTLDLSDTEVTELPAFIANLKRLNYLNLQGCKKLKQLNNLDLLHELHYLNLSRCLEVRSFPASLKNLRKLRFLNLSQCSKLPTLPDELLQSFSSFSSIVDLNLSGFEFQMLPDFFGNICSLQFLSLSKCSKLELLPQSFGQLAYLKGLDLSFCSDLKLPESFKYLSSLQFLNLSHCHNVEYLPSFDKLSNLEYLNLSQCAGLKALPKSLSNQKNLQIEVFGCQDCIVQSCYLSPQSHTCSQEVKEVGSSSDISDTILKESANRDVALGISFPEIDEVGYPHNNLKQKLTLSYHMDGHKSEEPNFITKQNSTTETVQLTPRHQFPSSTCRISSIASSSSALFASGSSSDVSITYNPVSNDKAGNQTGPQTESTHTVV

SEQ ID NO: 60222 - protein, 122 aa, Zea Mays
MDFRKLQQMDLYDEHARMRRRLLNDRLLLAERSFLQPEGLQGRGWFKHLLYSPPEDYESKLSFFPGIADAISRSANLSDKEQEVAMQHEVWKVCRAIQRAASVLRGEFSEQKPTNFSSLVTP

SEQ ID NO: 60223 - protein, 88 aa, Zea Mays
MIILTREQVRQSAMLVHVGASHSSRDGWDSYPQGPTPNPNPRRRRRGRVPWNGKVPRSGGIVHPPSYSRLATGVSFENGMARTELLAQ

SEQ ID NO: 60224 - protein, 171 aa, Zea Mays
MRSRRGSSWAGHGVHPHPPRRVREAHVRLPLRRAVAGLPLRGARRHGGRHRHARRRHRRHGLLHARPLQGQRRRRRGRRRRRRRGATAAAGGVGAARRRRSRRRRPRPRRARAHAHARDARALARRLGLGGCIVQVIIKNPMVQSRGKLQLAINAFMLFCAGRMATLAKWT

SEQ ID NO: 60225 - protein, 589 aa, Zea Mays
MDGFTLPPFESTCIFRDNDIIRVKQKSCTKHIEHNDVHCIQDHEIIEKRSLPVDGKILAIQDKEDVCKHQEEEAHDDHQLEENATASHSTENNGTSLKRKRNDGVADIPESSKGQRLKVTNSGKHIDYSKKEQNGSKKLKLSVIDIEAKKATPQHETTTTLVEQQKSEGNYQTELKCEAKVTNYDAQSDTKKNVHGDSPIAADCPSSSNQDGLPVPSSNQNGSHVHFSSLKADEDESETSDEIVPVVVRPGHIRFEPAGREPDKSPAKELQGTFQWSGTLSKKKGQKWGINSSNKKNADVGYHAGIAGSNTEVNNLVMDIKVTENGFCAVSNRRIDEGSNVEMSSVKAVANEEKSRGVPFDFESLYPLTQLPKEGDLIAYRLVELSSMLCPELSSFRVGKVVLYDPISLRIILLPVQEYPITTEENEDKDEPDMLVDLSPYKEDGSLEIEYSSLLDVRLLKGIEPVPGAFSTPLAETCNEVGSALAKGRPVTLHKNEGNIESQKSPLVANNTNGKEHKLGKSEKTVWEKNDEPGDEVDVQQNGWGTWKQNSTSAWSYRALRSSALGPTMALLRGKNNQRGKPPYRKKGK

SEQ ID NO: 60226 - protein, 151 aa, Zea Mays
MMDVTAAEEEIKRWKMAAEEEAEAGRSIEQEFQIQISSLRKELDEANRAMVELENKLKFKEETAAAAMAARDAAEKSLKLADTRSSRLRERLEELNKQLEESDTRTESVNRNGHRYMCWPWQWLGLNYVQLPLAETDQTSNEMELSEPLII

SEQ ID NO: 60227 - protein, 337 aa, Zea Mays
MRLMVLWTRLGSIRKDSLRIHTILLLRNEYEQKMKEKGEQPIMFSHLAPPKRRPTGDEDGRANPKPEDSVYYHPTLNPSGAPPPGKPPMYKSSIGPRIPPPSSSSTGASSSMSESEAGPTTLPPPPPPPPLPDTSESIDPPAPPFPLPPLPPLPPPPPKPNSDAALPGLPLPPPGPPLRESVSGHTVLPPPLPPSQRSSNPPPASSANESKTDSAWPLVVLPPPPPPPGLSPKSYDMEAAGTSKDTPGLKEDTAARVLPPPPPPSLPPLPPMQSDMLSPGVMRLPPPPPPPDSRPSLMAPGVSRPPPPPPGFPRLKCQYHHMVSSLVRHRCLGLHFC

SEQ ID NO: 60228 - protein, 76 aa, Zea Mays
MPWIWDRVSLNPAIPYMKIQSHTRSGEMARVACTLLAKDRLKGVVCSWVARTCSCSGVSMGMVDICKSYEKHMSCG

SEQ ID NO: 60229 - protein, 363 aa, Zea Mays
MSHHGMPTKQFTSRSYHSFEDAKYHNEFSGSFLPPIEHNAYSSAGFVNVLATSNSACTHENSQLGGANNNILKDLTGDFETYFHNLQYAQGFQQDNPVNPFSSGRPAPPSLQCQNTCPSNGRGRKNPYSYASMNGAVPCPPYPSGYLVWSPFIQPDDPMAMRTRGTGTYFSDRKLRKNRPPTGRVERGRNQFASNNYQRFHHHVRTDMPADMGSGLELRHELPQIHIPGATDHGMPSPMSIPMSSSSLNSPRDQLKVPAHSPSSQVRRNNFHGNGFMLLQDSKLESRTFNSKLESGILGPLPLEVTSKDHASRSESASSNQVSGPVSTVSAPRNTTTTDSNLMRDGAQSYRLKDSRDFPPLSS

SEQ ID NO: 60230 - protein, 958 aa, Zea Mays
MPLLDLYDSSKGYVVNDKCIIEAEVAVRKTLDFWNYDSKRMTGYVGLKNQGATCYMNSLLQTLYHIPYFRKAVYHMPTTENDTPSGNIPLALQSLFYKLQHSDNSVATKELTKSFGWDSYDSFMQHDVQELNRVLCEKLENKMKGTTVEGAIQKLFEGHHMNYIECINVESKSTRKESFYDLALDVKGCSDVYASFDKYVAVERLEGDNKYQSEEHGLQDAKKGMLFIDFPPVLQLQLKRFEYDFVRDTMLKINDRYEFPLQLDLDRDDGKYLSPDADRSVRNLYTLHSVLVHSGGVHGGHYYAFIRPKLSDQWYKFEDERVTKEDMKRALEEQYGGEEELPHTNPGLDTAPLRFTKHSNAYMLVYIRESDKDNIICDLDDEDISEHLKVRLRKEHEEKEYKKKEKAEAHMFTALKVARDFDIKEQIGRHMHFDLVDFDRVNSFRAPKNMSINEVKEELSKEFGIPVECQRFWVWAKRQNCTYRPSRPLTSQEETSTIGVLKDATVAKLPNSEVRLFLEVHFRQENQPIAPWNTKEDILLFFKLYDPEKEDLRYVGNFFVKASGKPSDIVERLNQIAGFLSDEDIELYEEIKFEPVVMCVPIESNASFRSSQIDNGDIICYQKHCLPDSMDRYRYPTVPSFFEYIHNRQIVHFRLLEKPKEEGFSLELSKCSTYDDVVEKVAKQLRMDDPSKIRLTQHNPSSQQPKPHFIKYRSLNYLSDMLHNHNQMCDILYYDILDIPLPELESMRSLKVAFQNAANHEMSFHIMRLPKSNSLLDLIEDLKSKVEISCNDAEFRFFGVYLHKICKVYQPGDKIDSVNDHGPLYIEEVPEDEKNAGPHDRLVHVYHFEYNHHIQYFGEPFFFLIRDGEALSDMKVRIQKRLQVPDEQFLKWKFAHVTFSKPEYLQDSDIVMNRFHRPVYGGWEQHLGLEHTATTPKRSYLGNNQNRHSFEKPVRIYN

SEQ ID NO: 60231 - protein, 594 aa, Zea Mays
MDGGSAEKIAGGEDEGTTSPVPEKVQVGHSPQYKVERKLGKGGFGQVYVGRRISGGTERTGPDAYEVALKFEHRNSKGCNYGPPYEWQVYSALNGCYGVPWVHYKGRQGDYYVLVMDILGPSLWDVWNSFGQLMTPNMVACIAVEAISILEKLHAKGFVHGDVKPENFLLGQPGSPDEKKLFLIDLGLASRWKESGSSGQHVEYDQKPDIFRGTIRYASVHAHLGRTGSRRDDLESLAYTLIFLLRGRLPWQGYQGENKSFLVCKKKMATSPDLLCCFCPTPFKLFLETVTNMKFDEEPNYSKLISLFDELIEPQHLRPIRIDGALKAGQKRGRLHVNPEEDEQPKKKVRLGSPANQWISVYNARRPMKQRYHYNVADARLHQHIEKGNEDGLFISSVASSANLWALIMDAGTGFTSQVYELSPIFLHKDWIMEQWENNYYISAIAGAMNGSSLVVMSKGTPYTQQSYKVSESFPYKWINKKWKEGFHVTSMTTAGSRWGVVMSRNSGYSEQVVELDFLYPSEGIHRRWENGYRITSTAATGDQAAFILSIPKRKLMDETQETLRTSAFPSNHVKEKWAKNLYIASICYGRTVS

SEQ ID NO: 60232 - protein, 497 aa, Zea Mays
MSRIRSGVEVVASRGCARMVIPGMHHNPSSAASVSSSAASRAAPAAGSGPAAHADGPFAGLVICVTGLSKEARVQVKEATERLGGEYSGSLHPKCTHLVHSFAGRKFEHALKHGPRNGLFLVTLGWFVDCVRRNMRLDESLYAIKSIGENGVPPGEFSRLVGVPVNEKSCLPPLIFQDKACSDMTQKHSLQTPGNGGGHDGLVFMNDTIYIDPGISDEMRKKISDAVTREGGKLLEHWFIGCPTTYIVCEDVCVKRYVGHSENIVTPLWILKTVKEKNLQRLVHLSSDLARHVAMVLENVQTSEENRKLGSVPSINTSSCGRPSTKEEINEVHQAKQKFVEGAKKEVRDRRARRMQSCEVTIHPITPATLLDSICWTISEPTSSASIYMDSSWSDDANEQQSTTYFDANGDVRDPDQPNDNFSRPLKESERSELIFKNHFLTILFPVDRFGELGPSSKTFYNNGGFTCIQVLNHIYNFYQVYNYCTLIAQVWTLFVL

SEQ ID NO: 60233 - protein, 70 aa, Zea Mays
MQKCEYRCFTNGHISHEVSCHWTTTTWFELHFLVLFVLFLEICTICSSSLYKLTSCIDVPFLDYLLFFVG

SEQ ID NO: 60234 - protein, 314 aa, Zea Mays
MYPPGKAVGMAAAHDGYGASGRGLREGDVVLLALPNSIARVRDTSPALVFATPDNVEKLSPLRVPVVLVPDAFHLVGDGAPEFAPFPELLLLDSEPLSGPSVRQDDAAAILYSSGTGGQSKGVVLTHRNLIATVELFVRFEASQYAAPACDNVYLAALPMFHVYGLSLFAVGLLSLGSMVVVMKRFNAGEAVKAIRRFKVTHFPIVPPIMAALVHTTKPAAMPLECLVQVSTGAAPSSRRLIDDFVKAFPHVDLIQVSKSVVQRTRCPYGVFEEPWGAGQHHGGARRGLAVQRAERRRQRTSERRQNKKRRMQR

SEQ ID NO: 60235 - protein, 240 aa, Zea Mays
MDSTGNWYKPGQVYLEKDVILPYVPNVDLCDHKCVLETQSKRSILLFFRGRLKRNAGGKIRSKLVEELKSAKDIVIEEGSTGAQGKAAAQDGMRKSFFCLSPAGDTPSSARLFDAIVSGCIPVIISDELELPFEGILDYREIALFVSASDAVQPGWLLKYLRGINAKRIREIQSNLVKYSRHFLYSSPAQPLGPEDLTWRMIAGKLVNIKLQIRRSQRLVKESRSICTCECRVGNTTRML

SEQ ID NO: 60236 - protein, 350 aa, Zea Mays
MSPAAATTTFVAISIAVPNPTAPSRGRVRLPLGGVPAAPRRAVASMAVSAPRSGAATSFLERRESERALHFVKYQGLGNDFIMVDNRDSSVPKVTPEEAAKLCDRNFGIGADGVIFVMPGVNGADYTMRIFNSDGSEPEMCGNGVRCFARFIAEIENLQGTNRFTIHTGAGKIVPEIQSDGQVKVDMGEPILSGLDIPTKLLATKNKAVVQAELAVEGLTWHVTCVSMGNPHCVTFGANELKVDDLKLSEIGPKFEHHEMFPARTNTEFVQVLSRSHLKMRVWERGAGATLACGTGACAVVVAAVLEGRAERKCVVDLPGGPLEIEWREDDNHVYMTGPAEVVFYGSVVH

SEQ ID NO: 60237 - protein, 175 aa, Zea Mays
MAATSIKVAHLTTLALFSPTPNPFGPKSSKHRARAPPPISISMDPALVDPAHLQALMLACGHSCTLRLSPALSVSAVEPVDLSKLRTALAHSFVVVSVFCGARFFTHDREREGEGQRFLGLEIGLDLQGERRLVGFGRAVSDLGLTASVHDIGTSITTEERNWPKDSEQNYKGTS

SEQ ID NO: 60238 - protein, 227 aa, Zea Mays
MIRFLRNSLFALGIGRNMLTMKRDLMVLFERGLAYVGTDYHSNILWDEYIKYEESLEAWSHLADIYTRVLEHPIQQLDRYFNCLKELASKHSLSEILTAEEASLYVVTSETTAQAPDGEAHPDDVDKLGQPEISSSTDAESLAKYVSMREEMYRKAKEYESKIIGFELAIRRPYFHVKPLDNPELENWHNYLDYIEKEEDINKVCFYTSRNPLSLFTSFYYRTLGIL

SEQ ID NO: 60239 - protein, 67 aa, Zea Mays
MHDKRRMGTEADAAAVDLLRSQIPFQTDGEFVLPPRGVGLVLVDLCNGFCTVGAGNLIWSGWKRSQM

SEQ ID NO: 60240 - protein, 186 aa, Zea Mays
MILAAKYARENRVPYLGICLGMQISVIEISRHVLGLEDADSEEFNKDTPNHVVMYMPEVSKTHMGNTMRLGCRRTFFSKPDCLTSKLYGSPPHVDERHRHRYEVNPSFVPMLESAGLHFVGCDESRNRMEIVELQDHPFYVGVQFHPEFKSRPRRPSPPFTGLIMAATKQLGANSNSSNGFVGASD

SEQ ID NO: 60241 - protein, 411 aa, Zea Mays
MQGEPLGMYKLLKECSRNHSSGILPGIGTNVSNFGHARPDQVVKALKNVYNIALNKLKGKDLELLLAILPDNNGQLYGDIKRICETDLGLISQCCLTKHVFKISKQYLANVSLKINVKMGGRNTVLLDAISWRIPLVSDIPTIIFGADVTHPETGEDSSPSIAAVVASQDWPEVTKYAGLVCAQAHRQELIQDLYKTWHDPQRGTVTGGMIRELLISFRKATGQKPLRIIFYRDGVSEGQFYQVLLYELDAIRKACASLEPNYQPPVTFVVVQKRHHTRLFANNHKDRSSMDKSGNILPGTVVDSKICHPTEFDFYLCSHAGIQGTSRPAHYHVLWDENNFTADEMQTLTNNLCYTYARCTRSVSVGMFCALQSLLHTTHTWQHSGLGSTWNQRCWTTRRPRPPMARAESR

SEQ ID NO: 60242 - protein, 231 aa, Zea Mays
MSTLPWNVLIVLSLSASTWEIRTLYTSGSSSPKCVVTLMLEIAPSFWGRWKRRHSNFDKSIPFALLSQVAGIREYFAANPALTSELPSTVVKSKASETLIIQSEHEDSELGDEFYDALTRGESFEDGDSDDDDDATTPKARKVKLKNVSWAIAGLALKTTKALVETSELVTNSSPVTVDPSHFHGTLHRAKTQNDQNSWSAPGGEKFMIRGKTYLTDYHKEADKMWSFEMG

SEQ ID NO: 60243 - protein, 147 aa, Zea Mays
MQEMISFDEYSLPPQEVPVEKAAEEKPSSGTETESAPSTNDETPSSVEDKNETSEVQDAAEKSDAEETNTAAEEASETAEEEEAEKPEIKIETAPADFRFPTTNQTRHCFTRYVEYHRCVAAKGEDAPECDKFAKYYRSLCPGEWEC

SEQ ID NO: 60244 - protein, 127 aa, Zea Mays
MPLAAPYCPFLPHLHHACHPREETAAAIAATPRASPGLDGVCFVRRNACGSTRTSLSACSTTCSARARRPGPPGLRARFRVLRARKGPWHGRCRFVHVYAVCRCSPRAQSVRRRDPQRHGRLARLLW

SEQ ID NO: 60245 - protein, 994 aa, Zea Mays
MVMDRAGWLWRRKSSDKSPGGSDSSLSVSSHSEQCSDDQGQYQSPEAFSRSKYDYSQETGVARSLNGKLAAGVNMNNFNPEHGQSFEQHISSNVGDEEIKETLESLNYKLSAALSTIRAKEDLVKQHAKVTEEAVAGWEQAEAEVTTLKGLLEASCRKNASLQDQVSHMDEALKECVRQLRLAREEQEDKVREVVSNSLVPQSENPELQNHIAELKKRLEMTRLEASSSMILQHDLHERLRAIERENLDLKAKHQAIEKENIDLKAKLLVQSKDLKILMLERDLSNQVAETASKQHLESVKKIARVEAECRRLQHLTRKTTLINNSRSTQNNCCMESLTDSQSDHGEHMVGVDNDLQNSDSWALALIAELDQFKNGKDGSRNIVNNPVEIDIMDDFLEMERLAALPESDGTSSNFEMETDSDKAVTRNSSLKVKNEELQNKVANLQEKFEAIACEKRELELALVEVRDQLEISCDALVVAKNRLVEMQMQLDSANDSKLSALDDVERLDSERKALELQLESKSVEVEELLIAVASLEENAEQKELESQLELMSAQATELRLTVASLEERIQAERDLSVQQKQNAEAMLNAKEELEAQLCSANTEMGKLRDIIKALENEVKKERALCEELTAQLQIKVEAAVNAVKESLEAQLCSANTEAGKLRDVVKALQDEVEKEKALREELAANLEVKTRAARTAEVVKESLEAQLSSAHAEMHKLEEITKQLQNEVEKEKEFSAQLEMKIEVERARSIESAKESLEEQLLLVNSEAAKLHDMVSALEHDVEKEKFFSAELQMQLEALEVVKKVLESEAESAHQDAKILKQKVESLEAKLEEQMSSADEFTETLQSERMVIEHKLKTADGEILKLTNKVSLLHREIEQERLLSEEYEQKCQKLEAQMSRDSRDAKLWRLANSNGDLKVKKEKELANAAGKLAECQKTIASLDRQIKSLTDLDSVVLEPERLESSRDMPLPLDFRNGDAEFAMFADDLGALDS

SEQ ID NO: 60246 - protein, 92 aa, Zea Mays
MATSTLSTVKVSNVSLKAAQREIKEFFSFSGDIVHVEMQSGDELSQVAYITFKDNQGAETAMLLTVYLLSHLKVLEDSNYFSWIDDSLSVLS

SEQ ID NO: 60247 - protein, 368 aa, Zea Mays
MKALILVGGFGTRLRPLTLSFPKPLVDFANKPMILHQIEALKEVGVTEVVLAINYRPEVMINFLKDFEDKLGITITCSQETEPLGTAGPLALARDKLADGSGQPFFVLNSDVISEYPFAELIKFHKCHGGEATIMVTKVDEPSKYGVVVMEEATGRVERFVEKPKIFVGNKINAGIYLLNPSVLDRIELRPTSIEKEVFPQIAADQQLYAMVLPGFWMDVGQPRDYITGLRLYLDSIRKKSAAKLATGAHVVGNVLVHESAKIGEGCLIGPDVAIGPGCVVEDGVRLSRCTVMRGVRIKKHACISNSIIGWHSTVGQWARIENMTILGEDVHVCDEVYSNGGVVLPHKEIKSSILKPEIVMSRLVVSN

SEQ ID NO: 60248 - protein, 772 aa, Zea Mays
MSSCDDDHASLLRSHAGASSPSCPSPRGSAGHQHHADVEADEATVTASPRLASGGGGVRGLLRNLERRMSARGSGPGRRQHQHYQQLDRSVAIESPPSQRQRERAAAGDDDELGDGAPPEWALLLIGCLLGLATGICVAAFNRGVHVIHEWAWAGTPNEGAAWLRLQKIADTWHRILLIPVTGGVVVGMMHGLLDIFEQLKLVKSGQRQGINFVGAIFPTIKAVQAAVTLGTGCSLGPEGPSVDIGKSCANACSEMMESNRERRIALVAAGAAAGIASGFNAAVAGCFFAIETVLRPLKAENSPPFTTAMIILASVISSTVSNVLLGARPAFIVPAYELKSAAELPLYLILGMLCGAVSVVFDRLVGWFSRFFGHIKEKFDFPIIVYPALGGLGAGIIALKYPGILYWGFTNVEEILHTGKSASAPGIWLLTQLAAAKVVATALCKGSGLVGGLYAPSLMIGAAVGAVFGGSAAYLINSALPGNAAVAQPQAYALVGMAATLASVCSVPLTSVLLLFELTKDYRILLPLMGAVGLAIWVPSVVNQPNDSEPSGFRTSRRGYSSMSPEERNGSLRQGDVVDDLELSIIQTDMSNYGTYNAEMLLDDLKVFQAMSKIYLKVLPSATVTEVLNLLHDRQQNCALVVDPEDFLEGIITLGDIRRMGYGLHVESFINGDHPKADDNSSSISLCLTRGFQYRGSERGLLTCFPDTDLTTAKSLMEARGIKQLPVVKRGVAHRTAGKRRPIALLHYDSIGCCVREEIENWKTIYQRLAC

SEQ ID NO: 60249 - protein, 1658 aa, Zea Mays
MRVPCCSLCNVRYDEEERTPLLLHCGHGFCRACLSRMLAAAPGATLPCPRCRHLTAVGNSVSALRKNFPILSLLSTSPSSPSFLHSDSGSSSDGSEDEDDFFARPSRRPAPAPAAAPPGCSFFDLASHPDLKLARRIGSGPPGPAGQEVWAGTLSRGGGVKRCKHQVAVKRVPLAAGDGLEVVQEEVERLRRASTWCRNVCTFHGAVRVGGHLCFVMDRYVGSVQAEMRQNGGRLTLEQILRYGADIARGIAELHAAGIVCMSIKPSNILLDAHGHAFVSDYGLSAILKNLTSRRVPDDSSAGIDATLLSPNYTAPEAWGPLKKSLNMFWDSANGISPESDAWSFGCTLVEMCTGAVPWAGLSAEEICKSVVKEKKPPPQYSRVVGVGLPGELWKMIGECLQFRASRRPSFQDMLKTFLRHLLDIPRSPPASPEIDFANENLPNGMQPPTTSILEMVHDNPNALHHLVCEGDAAGVRDLLAKAASERNDSLIRSLLEAQNTDGLTALHLACRRGSAELVEAIVAYQENVDILDKDEDPPIVFALAAGSPRCVRALVGRSASINSRLREGLGPTLAHVCAHHGQPECMQELLMAGADPNAVDGEGESVLHIAVARRYTDCAIVILENGGCRSMGISNSQHKTPLHLCIETWNTAVVRRWVEVASLEDIAETIDVPSPVGTALCMAAALKKEHEKEFHKVQDYWTIMFFHLFQTLFVLIVKLLLLAEGRELVRILLAAGADSTAQDDPHCRTALHTAAMIDDVELVKIILEAGVDVNIRNAQNTTPLHVALNRGANSCVGLLLAAGANCNIQDDDGDNAFHIAADAAKMIRENLAWIAQMLLQPSPAVDVRNHRGWTLRDFLERLPREWIYEELMETLEDKGVHLSPTIYEVADWVKFRRTVTSPAFGWQGAGPRSIGFVQSVVDNDHLAVSFCTGEAHVLTSEVIKVIPLNRGQHVQLKPGVSEPRFGWRGQSRDSIGTVLCVDDDGILRVGFPGASRGWRADPAEIERVEEYKVGNWVRIRPSLTVAVHGMESITPGSVGIVYSIRPDSSLLLGLCYLSNPWLCEPEEVEHVDPFKIGDQVCVKRSVAEPRYAWGGETHHSVGKIIDIESDGLLIIDIPNRAAPWQADPSDMEKIENFKVGDWIRVKATVPSPKYGWEDVTRNSIGIVHSLQDDGDVGVAFCFRSRLFLCSVADVEKAQPFEVGEKVHVSPSISEPRLGWLSETAATIGAISRIDMDGTLNIKVSGRKGLWKVAPGDAERLSAFEVGDWVRLKPSIGSRPTYDWNSVGRISIAVVHSIQDSGYLELAGCFRNGKWLTHNTDIEKVQTLKIGQHVRFRAGISEPRWGWRDANPDSRGVIAGVHADGEVRVAFFGVPGLWRGDPADLEIENIFEVGEWVRLTNDVEQWRSLKPGSIGVVHGVGYQGDAWDGTIHVAFCGEQERWIGPSSQLEGVSKFVVGQRVRIRGCIRQPRFGWSNHNHSSIGTISSIDADGKLRIHTPAGARAWLIDPAEVEEVEEEEVCVGDWVKVKDSVGTPVYQWGDVNHSSIGVVHRADDGELWIAFCFCERLWLCKAWEVEKVRPFRQGDKVRIRPGLVSPRWGWGMETYASKGEVVGVDANGKLRIKFRWRDRLWIGDPADIVLDDVHLLTEASNGLAFCS

SEQ ID NO: 60250 - protein, 381 aa, Zea Mays
METGSWMVTFNVTDRDGNKVLDASTISYIQKTLEVDDWYYPGAHNTVGIVPSGDYTSIELTGTDRPGLLSEVCAVLAAMGYAVQSAELWTHNTRVAAVVHVTDAETGGAIEDSARIADISARLGNLLREHSDVRAGGGAGSLALHKERRLHQMMFDDRGVEGHAAAAPPDGSLRTEVSVTHAERGYTAVVVRCRDRPKLLFDTVCTITDMEYVVHHGTVSAEPGGGAYQEYYIRHVDGHAIRCEDEQQRLVRCLAAAIERRTADGLELEVRTGDRAGLLSDITRIFRENGLTIRRAEISSSDGEAVDTFYLSDPQGLPVETKTIEAIRAQIGEATLRVRNNPFGTGDDADMAGAGTTAFIFGNLFKFYRPFQSFSLIKLYS

SEQ ID NO: 60251 - protein, 73 aa, Zea Mays
MEDFYVTILYGLLLVAGGVAGYMKRGSAASLVAGGGFGAALLLAGALSAWAFAHGRGGAAAIFATVLQIVHSY

SEQ ID NO: 60252 - protein, 98 aa, Zea Mays
MPFHVLASSTPPAIPLPAPAAPAVVLAASRGQPPRPQITRPCPSMPANHVTPSIHGSRAPSAPFHPWSRIPTRRDSSHTLPLRPSIHGRGSPMLRSGS

SEQ ID NO: 60253 - protein, 127 aa, Zea Mays
MWGELWESVKGVLREYPRLRLTQGRMVLEVRPTIKWDKGKALEFLLESLGFAGCTNVLPVYIGDDRTDEDAFRALRRRGQGQGVGILVSKHPKETSASYSLQEPAEVMEFLLRLVEWKRLSRLSRTQ

SEQ ID NO: 60254 - protein, 683 aa, Zea Mays
MSSWLRSAVSKAVEAGGRSGVARTVLGYADAVAHHAGQAVAEGAKIINERVSTQNFKSVKQTVKRLEEVAVSSRRDERVQVLRRWLGALQEVEAEVGGSGGSQRQNVSSSEPNSSKPSLAKVLFYDADIGGPPMNFRDIFLYSHALEGITLSMILEAPKEEEVSLLLEIFGICLTGGKEVNNAIVSSIQDLAKSFSNYHDEVLVKREELLQFTQSAISGLKRNADIVRIDSEALDLWKKLHEKEASRAQSIGDPDKVTEKTSTIESFKEALNEVRFCSRMEELLLKKKTINTGDSLEIHSQKVEKLKVLATSLANSSSKAEKRILDHRRQKEEALNFRAKKENEVIAVEKDLTAEISELEKQKDELEAQLKKVNISLNAAICRLKQTREERDQFHEANNQMIFTLQAKENDLSKSIDSCNMEASVVKTWVNFLEDTWQLQLSYNEQKETKTNDELERCTSSFLKLTKHHLSYFKEVLSPSIERIRTYVDNLAVLNSREESIEHEGDDEISVQTSPQKSLEEEYLETEKKIVIAFSIVDRMKKMFYSEQAANSRQDDAEVRTLFSEIEKLKEVFESVERPTLDIEVRKAKDPMKDKSGSNRSAKDKSESSHSPVQVPSSPKDVPVESPKSPVKPEQTMDPDSEFAKLELEFGKVNRDHEEIGGWDFDELEEELRADLSKSTNPK

SEQ ID NO: 60255 - protein, 54 aa, Zea Mays
MATTNLDDGNDELGLSQTEGATFGVANRGRTSSMQKGTSDAKRRSEQGMWLGCC

SEQ ID NO: 60256 - protein, 189 aa, Zea Mays
MVNPGWPQNEAMDEACWSDVEFCRTTQNWYCLSKTLAELEALDYAKRSGLDVVSVCPSLVIGPLLQSTVNASSSVIVDCLKGDREVKLKLRNFVDVRDVADALLLVYETPEASGRYICDANARQMSEVVALLKDWYPAYSHAATKFVQVSDEPLFSSKKLQALGWKFRTLEESLRDSVESFKAAGVLVD

SEQ ID NO: 60257 - protein, 1149 aa, Zea Mays
MDAEPRREGSDRAPAADSSAAPDGDEAMARGVAAAEKPTAASEAGAGGDVAAAERGRDGETPAGDPGVVADEGGAVGDQCPAAPQASEVDEGGAAGKERSDGGLANGAVEGSSIAGEVPDVAPVVSEARMDEDGGCSTGNEYSEMKMEVDGGCVAEREGDGQEQEQECTAAAVESEVKTGEGDGGVVNQGTTAHAGGLQVKEEVGEGLVGRYIGRSAPGRTRILIGKVVSYDSTAGVYSLVFEDGHAEELGLPQLQELLMSDDNGALGMKVSCRKRKLDLLVSSGSALEVKEPPSTRQRVDGCEMSARPDELQHSASGSDMSEDVESSSNSSDFTREETSEPCPPVQAVELPPSSGDIPVPEESISSLLSVYNFLRSFSVQLFLSPFGLDDFVAAINCSVQNNLLDAVHVSLLRALRRHLESRSAEGSRSASNCLKYLDWTLLDALTWPNFLLEYLYVMCCIKNLGGKSFGRSLLVAEYYKLPVTMKLRVLQILCDDVIESEELKTELENRVGYNEEMEYEIESSAFLEAGSRSVSTRAAKASACKNTNDFHNLLESAPNVTNPETAPAVLSQDGNSDDCRICGMDGTLVCCDGCPWAYHSRCIGQNKAFLPQGDWFCPECMVNKLGPTSSRIERGARGAQMFGIDMCGRLFLGTCNYLLVIETASDAESYARYYNQYDVAKVLQSLAVSDAYVDICKQIKDYWKHLLGIIHNERSTTGKEVGAKVALPQTNAQQKFVANQSAMCSVECLEEQKCKSSLGVVTEKNAEVFKQTVSAQNNIHNAHRNGAFGPSVVSSVSHQNGSIVTGGSNIAQAQPAQSIFHPDPSTVSVTSGSFCPSSLGKHHLQMFPERSGNMSGVKAAKLSSFKPQAYMNLYNHGNIAASAAANIAVITSDDSKVSASQLTAKHRKKMAADNALQLKAFSSAATQFLWPSTEKKLMEVPRDRCGWCLACRSSAIGTKKACFLNMATSNAVKCSARILSVMRVIKNSDSHFPSIVAYLANMEESLRGLLVGSLQDMQQKERWHQQLQEASNCRTVIPLLLELESNIRGVAFSASWLKPIDDWPLESPGPSTGASRPAQYQKRGVGGRRGRRRSVASESGTATATDEDNSWTWWTGGNISKRTLQRGALLHSTRRKAARQVDSRFILP

SEQ ID NO: 60258 - protein, 995 aa, Zea Mays
MRVQDGDVDGGGEVTAPPQHLVFAYYITGHGFGHATRALEVVRHLVAAGHDVHVVTAAPEFVFTTEIASPSLHIRKVLLDCGAVQADALTVDRLASLEKYHQTAVVPRESILKTEAEWLNSIKADLVVSDVVPVACRAAADAGIRSVCVTNFSWDFIYAEYVVAAGHHHRSIVWQIAEDYSHCEFLLRLPGYCPMPAFRDVIDVPLVVRRLHRSRTEVRKELGIANDVKVVIFNFGGQPAGWELKKEWLPDGWLCLVCGASDTQELPLNFIKLAKDAYTPDLMAASDCMLGKIGYGTVSEALAYNLPFVFVRRDYFNEEPFLRNMLEHYQCGIEMIRRDLLTGHWKPYLQRAITLQPCYDGPINGGKVAAHILQDTAVGKKYISGKLSGARRLRDAIVLGYQLQRAPGRDVGIPYWYSHSEKEISVGPAPTSHDMNGSDESSFEDFEILHGDMQGLTDTMSFLKSLSGLVGNDLRSPEKQTRERAAASVLFDWEEEIYVARAPGRLDVMGGIADYSGSLVLQMPIREACHVAVQRSDPTKQKQWKHTQARQLANGGAVPVLQIVSFGSELSNRAPTFDMDLSDFMDGDKPISYDNVKEYFSRDPSQKWAAYVAGTIFVLMAELGVRFKDSMSILVSSSVPEGKGVSSSASVEVASMSAIAAAYGLNIAPRDLALLCQKVENRVVGAPCGVMDQMTSACGEANKLLAMVCQPAEVKELVNIPTHIRFWGLDSGIRHSVGGTDYGSVRVGTYMGRKMIKCAASNLLSELLLSCTSTQPGDSSPDEYEGHGVDLLKSEASMEYLCNLPPHRYEAVFAKEIPETITGDAFLEKYGDHNDAVTEVDPKRSYCVKAPTRHPIYENFRVEAFKALLTAAKTDEQLSALGELMFQCHYSYNACGLGSDGTDRLVNLVQEIRHRKSSRAGGPSLFGAKITGGGSGGSVCVMGKNCLKSSEEILEIQKRYKAATGYLPTVFDGSSPGAGKFGYLKIRRRSTSPSD

SEQ ID NO: 60259 - protein, 129 aa, Zea Mays
MGAATALYSATCFAHGKYGNGKPFPVNLSLAVGLSGWLPCARTLKNRIEASPECAQKASSIPLLLCHGKADDVVAYKHGERSAGALKANGFSNVLFKAYNSLGHYTVPEEMDEVCKWITANLGLGTKSS

SEQ ID NO: 60260 - protein, 202 aa, Zea Mays
MMSMFKEIEKKAFVVQEEYKKTQEMIDNHKVELDKTKEEYTKQKKAMDELRATEVDAEYKLQDTKKLAKEWEMKVKTFKKRLDEIHIIIQKDAVDPEKLKVTPGDEQLNDTYDMKRAMEMVALLEAQIKDLNPNLDSIAEYRTKACLYGERVDELNATTQERDDLKKLYDGLRKRRLDEFMAGFNIISLKLKEMYQKVLFSV

SEQ ID NO: 60261 - protein, 822 aa, Zea Mays
MRSSFLSESPCDEQRIHGYGFNPQSWLQVERGKLPKSSYSPSSIESLIKIAEPHVVPLYKPLDYVEVLSRIHEELEQCRPSELPGLYLVQSQVFRGLGEAKLRQRSLHSAWRCASSVHEKVIFGAWLRYEKQGEEIISDVLASCQKCCREFGLLDVASEMPVRNFEVIGSWETGSSSQVSSMVTFQVQDGRVTCDRCKIASLSIPFCSMLNGPFNESQLELVDLSENGISLEGMRAVSEFSSTCSLGDLPVEILLEILVFANTFCCDRLKDACDRKLASFVSTRQDAVELMPLAFEENAPVLAASCLQIFLQELPDCLADDLVISLFLGATAQQQLIMVGHASFLLYCLLSEVAMNIDPRTETTVLLLEKLVQLAVTPTQKQIAFHQLACIRLLRKEYSEAEHQFEVAFSAGHVYSIAGIARVAGIQGQKALAYEKLSSVITSNLPLGWMYLERSLYSEGDRKLADLDKASELDPTLTYPYMYRAASLMRKKDAKHALEEINRLLGFKLALECLELRICLYLALEDYKSAICDIHAILTLSPDYRMLEGRVAASKIGTLLGAHVEQWNTAECWLQLYERWSSVDDIGSLSVIYRMLESDAAKGVLYFRQSLLLLRLNCPEAAMRSLQLARHHAATEHERLVYEGWLLYDTGHYGEALQKAEESISIQRSFEAFFLKAYVLADSGVDPSYSATVISLLEDALKCPSDRLRKGQALNNLGGVYVDCGKLDSAADCYTSALKIRHTRAHQGLARVHFLRNNREAAYEEMTKLIEKAKNNASAYEKRSEYCEREQTMTDLQTVTQLDPLRVYPYRYRAAATICRWF

SEQ ID NO: 60262 - protein, 669 aa, Zea Mays
MRRDDAGGGTGFHDLFDSVRRSISFRPTAPAPEAPAGPFGAGAGGIGVRISSCLRKSRGMGLLGLITKSPSPPRRMLPPMPDQSDGGSGGGGANGGVGEENPLIRWRKGELIGAGAFGQVYLGMNLDSGELLAVKQVLIGTSNATREKAQAHIKELEEEVKLLKNLSHPNIVRYLGTVREEDTLNILLEFVPGGSIQSLLGKLGSFPEPVIKKYTKQILQGLEYLHSNAIIHRDIKGANILVDNKGCIKLADFGASKQVAKLATVTAAKTMKGTPYWMAPEVIVGSGHSFSADIWSVGCTVIEMATGKPPWSQQYQEVALLFHVGTTKSHPPIPEHLSQEAKDFLLKCLQKEPELRSTAPDLLKHPFVTGELDDLQPRNHAAHKDCFNEIHAHDMPNGLGLNHSSNWSTMNSNRSSKIKPLWEGSCDDVDMCEFADKDEYAPVGSSYNPMSEPFDNWENKFDTSPEQSSHEPMEFGELAKHAESSITENDFTCPVEGSCEDDVLTESKIKAFLEEKALDLKKLQTPLYEEFYNTVHGGSCQTSKGKFPISPKLPPRGKSPPSKTRGGACDTLNNTAPESCSKQFPRSSVVESSRILREIASPQLNEFADKLHLDAQDSPSISFTERQRKWKEELDQELERERVMRLAGCGKTPSPNRGSNVKKECHADH

SEQ ID NO: 60263 - protein, 346 aa, Zea Mays
MPSKPNAASRLVFLAFLLVISAAAANDDAAARRTMEQFAGFPASDDGEGPSSDFHVDSEGLQRQIDELASFSDSPAPSVTRVLYTDKDVQARRYIKGIMNQLGLVVREDAVGNIFGRWEGSEPGLGAVATGSHVDAIPFSGKFDGVVGVLGALEAISLLKRSAFLPKRSLEVIMFTSEEPTRFGISCLGSRLMAGIEELAQSLRKVVDNQNVSFLDAAESAGYKLNLEDLHSVFLKTDKYSAFIELHIEQGPILEKEGIPIGIVTAIAAPASLKVDFEGNGGHAGAVLMPARNDAGLAAAELALAVEKHVLESGSIDTVGTVDDEAAATTSDEGVGSINEMGLDID

SEQ ID NO: 60264 - protein, 50 aa, Zea Mays
MDNFLQRMEGITLDDVATFARKMLASRPTMVSWGDVDKVPPYESICKRLR

SEQ ID NO: 60265 - protein, 1368 aa, Zea Mays
MPLVRFEVRNEVGLGDPGLYGGGAAAAAAATAAAGEEEPKALLEGVAVAGLVGILRQLGDLAEFAADVFHDLHEQVIATSARGRKVLTRVQNIEAALPSLEKAVKNQKSHIHFAYVPGSDWHTQLQNEQNHLLATDLPRFMMDSYEECRDPPRLYLLDKFDNAGAGACVKRYSDPSYFKKAWDTMRADKNANVQREKRSQKIKRKGSRLREPYHGQAMPRHRGTEFQRSLTAGQLVNRQFASPSNDGQGISEHKSTPDARSNPDNMSRSSSLSSKTQLSSVEQAIDTKPSAVSHENGHGKSLDTKLHKPGGLPSPVLLNSTTVDDHSDHLKQGSPPDGMVARSPYVKWDEKTAIIMSTSSIYCDDVVMDEVEDAEPTCISSVQKETDHKVMDTLHQQDALLKKTKSLLVPSVLNHHDDIPGEADNYMDALNTLESETETESEFQTKNRVPAPSFKAEAPQVGAIDNIVPQCLDSSAADFIDTCQESDIICTSERAIDFPSLSNADSLEVSQLELSDYTSVSPYKESSVITNIHESGAEGARGDPCEIIEPLQVHSAILANDGSPVCNEIPKSKPDDDLGYFQEIPQPGFSTCMVIPSNKESAVANKNLEGDAKSDDDLIDGTADNVVSGPKIANMVVDEVGFKMAPANRSSPGDPSDDSCVIPESRPQDYAVKSYEGVGDCGVTEVSKLCSEPLNKPSDNICATQDVPTNTSTMSAGASEVSSSWSEPVTELIDDRCATQGVPANASTTSTVVPSVKLWTNAGLFGLEPSKPPVFGNGPREDTPPGFKEAQPVHSTEFTEVHCSKPTESAAVDVPNGNTSITSSFVEKLVGIRPGSANLNSSGANQSAARIPDPIHSHTDGHSDFSSSFEHNNMTGKHTSISELLEFEGSADTGTKIYSTDMRNNAVSASSFSSIAQRFLANTLQRRTSKYTDLPMSSERANADTSAKSESTLNPVVEPSEAVFAEETKFENKTENGMDGLSKTSIFSSRHYSEKSSPPLEYMKISFHPMSAFEMSKLNLDFCDGNIHEISDDMMLPTFQLLSESSIPQPGSGSESEDDTFGRSYSYSSYDDLSPRLYSNSEAWDQDDGTGLEEHELYDDSNQIGSSTAPLSSYMGFEQMNLSDMKSDISLANIGDQNVIGTLQSCTVEELPNFDTLMSRSDDQNGETPIPHNLGNMTPDEDQLPPPPPLPPMQWRMTRQTTSLEEETCITTKDMLRKTSSLPHIHTSAQEEHCPPTAPLDLQGHAGEVGVQKTGGVREITNPPSIIDIKSSLLQQIRDKSEQLKLNGHERSKKAVGGDIKSLDEREELLQQIRSKTFNLRRTNASKADGSSQSTASSNVAAILEKANAIRQAVASDEGGDDDTWSDI

SEQ ID NO: 60266 - protein, 348 aa, Zea Mays
MPLIQILVPHIMGLKEQLKDPSKVSFRVEYPEDYHTFSEEDRRDFRHVRYAVSDVLLDATEVLGGDSTLKLLSTKLAQAYGSCNNEQNPKWQPVEAALFCIQAIARSVSIEEREILPQVMSLLPCLPHHEQLLQTVCSTIGAFSKWIDAAPAELSILPPLVDILNKGMSTSEDTAAAASMAFKYICEDCRRKFSGSLDGLFQIYHIAISGVGGYKVSSEDSLHLVEALSAVITTLPPESASRALELICQPVINPLQELIQQGDQVLQQVPARHLTVHIDRLSSIFSNVKQPEVVAEAVYRYWPTLKSIFDQRAWDTRTMESICRSCKFADLATRTPFACCDSSGPLYM

SEQ ID NO: 60267 - protein, 207 aa, Zea Mays
MKQWKESDSRDMEACGWDNVFWEEIGLGDLLEGNCAKIGRSVAFPGHALGSGLTPTAAKELGLLPGTPVGTSLIDAHAGGVGVMESIPDAGSKAGLSDEHAICHRMVLVCGTSTCHMAVSKDRLFIPGVWGPFWSAMIPEFWLTEGGQSATGALLDYIIENHVASPLLSNHAASQSISIFELLNKMLLSMSQEQNSPFLSALTQDTQ

SEQ ID NO: 60268 - protein, 163 aa, Zea Mays
MSSSSNSKQEKKEEEEEGDVPPCMNGDVGRDDDNNGGGGGEEEEEEREGEFAAAMAQLAPEGVRALHARVEAEWGPVLQSACQTAAARALWGRAVRDPAAGLLAGERYLRGLRDKMRRDEQAGASEVHGVMIAVRTLWFDARVEAAVAALGGDPQVVILGAVC

SEQ ID NO: 60269 - protein, 1295 aa, Zea Mays
MMMSDDDDAEPQLNAVEGYYFVDSKNEKEPVCFSTLPFWFGDTDDLPDGKKKLVLRGTGDPGVKVYDEVVACRLGLEGKQPEFAVLTAKGRRWIRLIRPLNSYEEMIRTVLITAQMLHFLRRKPHEPEKTLWNHLCKVFNKFDVPPSEDDFRNHCSLMKQFAAKDPVLAKSEILRVFIEGKSRKKFTEVGADHIDVKQPFITDDEGIDEMNVEDVDNESDEDDDEYLFDSICAICDDGGDILCCDGPCMRSFHAKEGSGEDSCCVTLGYTEAEVEAMKLFLCKNCEYKQHQCFICGVLEPSDGEAAKVFLCNNATCGHFYHPKCVAQQLHPINIDEASELEKKITEGFSFTCPIHWCFHCKGLEDRTQEPLQFAVCRRCPKSYHRKCLPSEISFDENEEDDIIIRAWELSKRILIYCLDHEIDSELETPVRDHIKFPKIEKPLQFVKKGSSLLPKKKKRTYSETVLEQSPKDTVKRKSKVHMLEREQNKQDTREVSAKSFTQNLVDTPVKKKAKLKEKIQLPYVAKDHFISSPKSVKEQEQELVPLPLSAIRKSSFPKVDSETEKRVITILGNKVSSLTIKDVTRNCSLPSTHVYSGRLTDKIPLGKIERSVQAVEAALKKLENGGSVNDAKAVCEPEVLRQLARWHSKLRVYISPFIHGTRYSSFGRHFTKVEKLVEIVDRLHWYVETGDMIVDFCCGANDFSRLMKEKLDKVQKKCHFKNYDLIQPQNRFCFEKRDWMTVQPNELPHGSQLIMGLNPPFGVKASLANKFIDKALTFKPKLIVLIVPKETKRLDQRRTPYDLIWEDSECLSGKSFYLPGSVDLNDKIVEGWNASAPPLYLWSHPGWTKKHMQVAEEHGHTCMGKIACHVEESNLSDDLSVRKQSDATNKLNSRSGKETPFNDRMSNLLDDGSARKQARSEEEKRTLGKIEHHVKKANIPDNLPVKKEPEASSKVMSHSGKDRKIGRYNRRRHDNRSSKGTPDHTESLPPEKQVEVAYEETRVIPSKKIAHNEKKSAQYNYEQTAAGMPNMRSRGGDSDMSISPPVSCNARSKPMSYSLTRPIEHLDTNAHLLAEEPSDSVLNRVPNHDSYLAIKEEYCDGFKRKNDPIFSHIDDSSRMRGSSIEEVTKPYITAPNSDPWSKGDGSFYRHPSSEDLNANADVLMPGYSARYGQIGGDSNPQASMVPLATDSRLHGGTVADNYLSARYSLGSSGARVSQPAPTVPPFGLSGASSQRGSVMDRYSYGLSGPTGTQRSVIDRYAPSLDGTNTTRSRSSLPEQYPFGQPGSSGGGWPHH

SEQ ID NO: 60270 - protein, 555 aa, Zea Mays
MAIPEDLEGTSGDGGVTNRGSRGRRKGAAKGRGRGRPRSADRSFPPPAMAGVAVGDRVLRERRHTTNVFCERDTDVDDESIYFQDDVETVRSKDSRSGDVLQTAKKRKKGGAGKVSVTKRSKREGEEQKKASPSKDKDCAETNGKRKMLTGDNALMCHQCQRNDKGRVVWCNSCRNKRFCVPCIERWYPNLSEDEFAAKCPYCRKNCNCKGCLRMRGVEEPPKKEISEENQISYACNVVRLLLPWLRKLRQEQMEEKKLEAKIKGVLVNEMKLEQAEYNLDERVYCNNCKTSIVDFHRSCKYCFYDLCLDCCVEIRRGEIPGGEEIMRVKPEDRGRAYLFGTTNSKDGSKRFSMRRHSSSLENEPSNVVGSSEGANNSLELWKAESDGSIPCPPKELGGCGGSILDLKCFFPEKMLSNLEERADRIMRSEVFAKAVAKRSDQCPCYDHSGNIRTQDVRETANTKGSSDNHLYCPVATAIKEDDLAHFQMHWTKGEPVIVSDVLHLTSGLSWEPLVMWRALREKKTNGDVEDEHFAVRALDCLDWCEVRSYISLNV

SEQ ID NO: 60271 - protein, 598 aa, Zea Mays
MKKNTTCSIHQELYFLVTENVMRLHVDGFLTAEAPLCSLFDEPDSQDDSNQISLVGNDGKLEGYIYNIEVSYVLGAIKEQYTKNPPFKLSIDYSCSDGIEEGDDGIWSIVGGKASCRRNFILEVVLTNAFGEPVKDKEVVSSLVYADDGTVVAKSRDDSEPPLLITCEGLEYAAISRPLPIIRGRALFKLKISQLSSKCDNKLFRIKFSTLHMQRYSFLEAYSKPIRCISRSRTVRPLGPTKRASSATANEIDMLSNGQGFVSTDKVNSRGHSVCLHTPMFPKIEDGMVEVVEAHKIVSQNKNARKVVVSKEAQNVIGTDSSTSNYDSFDSGSSWSGSEGDDGIETFSDAVVFRYCLDSTYDRSKFLRGASLTVNKDDLVKLADRVSLYSGCSHHRNQILMSKRLLREGADTWNMISKNNERALWSSAIPEIITKFTNIAHSVRRGLSEQDLEVLRGIAGCGEDIGRDEFDRLWCWLYPVAVSLSRERIKKLWDCTAPRWIEGLITTEEAESALRSSRELLKEAGTFVLRFPITRSWPHPDAGSLVVTYIGSDSSIHHRLLSLDSSDASAEKLQDLLLQEPELSQLGRVDRVSITIRR

SEQ ID NO: 60272 - protein, 539 aa, Zea Mays
MAVGATATKLLPSAAAAARRPSMLHLAAVAVLCSLSYLLGIWHHGGFSAGPAAGDSSSSVSIATAVSCATPAPTTASSSPPAGPLDFAAHHTAEGVEAEGALRHRNYEACPAKYSEYTPCEDVERSLRFPRDRLVYRERHCPAAGERLRCLVPAPKGYRNPFPWPASRDVAWFANVPHKELSVEKAVQNWIRVDGDKFRFPGGGTMFPRGAGAYIDDIGKLIPLHDGSIRTALDTGCGVASWGAYLLSRNILAMSFAPRDSHEAQVQFALERGVPAMIGVLASNQLTYPARSFDMAHCSRCLIPWQLYDGLYLIEVDRILRPGGYWILSGPPINWKKHWKGWDRTKEDLDAEQKAIEAVARSLCWKKIKEEGDIAIWQKPTNHIHCKAIHKVIKSPPFCSNKNPDAAWYDKMEACITPLPEVSDLKEVAGGSLKKWPERLTAVPPRIASGSIEGVTEEMFVEDTELWKKRVGHYKSVIAQLGQKGRYRNLLDMNAKFGGFAAALVNDPLWVMNMVPTVGNSTTLGVIYERGLIGSYQDW

SEQ ID NO: 60273 - protein, 630 aa, Zea Mays
MAEADLTLHDAGGGARDKPDRKADVFADLGSPVSPLRLRPAATPSTSSSSSGSAKSPAPGNAAAGRGGRGNHSGELAQESTNPPGHRRAGSGPLIFSGASSSTTASSPLTNALPTGNICRVAGAAAAAAATQPPRARPAVLGSGTGHYGHGSIMRRGGGATPARTSGDAAPLLHGHGSNSSRSRSPASCPAPAPPATSGGLQEITRAGNEWYKKGRHADALRHYDRAVALCPDSAACRGNRAAALIGLGRLAEAFRECEEAVRLDPASGRAHGRLAGLCLRLGMVEKAKTHFTLAGSANQSDPAEWQKLHEVEIHQGRCMDARKIGDWKSALREADAAIAVGADSSRLLLALRSEALLWLHKLEEADLTITSLLKLDDASLPSTPTRVSGMSADSYVHIVQAKVNVTFGRFDSAVALAEKAKLIDGVSSEVEVILNNVRLVALARARGNDLFKAACWSKLGRWAKAVEDCSEALRVQPNYTKALLRRAASYAKLERWADCVRDYEVLRKDLPGDTEVAESLFHAQVALKTARGEVVSNMKFGGVVEEIISLEQLQDVIRSPGEFLLYMHLACCRHFTSFLVLVVLRSGQLTRCIRSLLHGYNEQAMCTNYPVCGLPLLRVPCIEFPEGKR

SEQ ID NO: 60274 - protein, 346 aa, Zea Mays
MQLVMSSFDMVAGSGAAKPYTAVALQTISRHFRCLKDAINDQISVIRKKLGEDDDASGKEGKLIRLRYIDQQIRQQRAFQQYGMLQQNAWRPQRGLPENSVSILRAWLFEHFLHPYPKDSEKLMLSRQTGLTRSQISNWFINARVRLWKPMIEDMYKEEIGEAELDSNSSSDNVQPNKDKPPSSEEKDHKTSTSQVCQTSQLGESKANIGGVVSFCGAPAGGFHNDANPDDSFMSLMLKAQRPGETDGSGLLHDAVAHHSDESARFMAYHLTEFGRYGNNNVSLTLGLQHAENTQPGFPGVRDQDIYNSTAPLNVTSTSSEYDSASQIDQQRQLFEVSPLMHDFVA

SEQ ID NO: 60275 - protein, 658 aa, Zea Mays
MSLMQSSFSSVQVRDDQMVLSTKILNLEKKWNEYCVRLHQGCNRINRDPCQLFPHHIGVRVDRERCANPNQSAQTIALQRDIIKPCALSSPYTNITAKSISAPDQINADLVLNLQVRQSRSNEPLQSGVVPFQHINSSNYNKPEESSAAPVTTDLVLATPRGSSFKDSSSALCKRVEDIEETIQLMPNKVDDLNLKPPHLSIQPYTCSKSSSSNWEQTSPSALHSTSLGGTSAFGQWQRPSPLATQSFDLSNYKLLMEHLFKVVGRQEEALSAICASIVRCRSMERRRGANKKNDIWFSFYGPDSIAKRRVGVALAELMHGSSGNLIYLDLSLNDWGNPSFRGKRATDCIFEELRKKRRSVIFLDNIDKADCLVQESLIHAMETGRYKDLHGGRVTDLNDSIVVLSTRMIQGCQDASLGVEEGNAFSEEKAVAARGHQLKIIVEPGTTNIGGGNVVVSSRHSLGSSEASSYSSKRKLHISDGQEKTEESASTSKRLHRTSSIPFDLNLPGDDEEAHDDGDDDKSSGSHENYLEGSVGNLLRWVDGSINFKPFDFGKLCEDILQEFSNTTSKILGTRGCRLEIDAGAMEQVVAAAWASDSHENEKRPVRTWVEQVFGRSLEQVKMRCENLSSCTLRLVSCEVKEDGFGALLPSRIILDW

SEQ ID NO: 60276 - protein, 667 aa, Zea Mays
MFVYVARPHAPRTEKVVSIGFQPGFDPYKIVSASQAGDIQFLDVRRAAEPYLTIEAHRGSLTALVVHRYAPVVASGSAKQMIKVFSLGGEQLTIIGYLPSFMGQRIGSVNCLSFHPYKSLLAAGAGDNALVSIYAEENYKHAVAGLVHYFTATVSRVRNFLWEIKDQVHIVISSPCERPSPAAASHRLLRKKPLSDTGEGVRIPQPQPQPQPPKKHRTEPSAPLTLTLQGGGAMHGGGAASPDAAICISPEAGPIVGVAPAGIRVENCYVFKSRLQEYAQRVGIPTPEYHTLKEGPSHEPVFKSTVFVNNTKYESLPGFFSRKAAEQSAAEVALMEIAMSAPVTEIRNMPAVQETGLCKNLLQEYAQKMNYAIPSYICTKQASGVAPFVCSVEIGGILYIGAAARTKKEAEIKAARTALLAIQSQSEGGANGAKKYIVVPGQRPDKETNKNPTETPIPLRVKKRGSRKKWNKRKFRRMADRIVDAGKDAEGLGTLLHDDYEEARRIGYELPTDTAMVQFNKEVVMTQPGEGDRIVQLEPPRDPAEVQYNKEARSVEQDPPRDPAEVQHNKEARSVEQDPPRDPAEVQHNKEARTVEQDPPSNTEVWKPDNKATTTEQESVSAFIALRSNGDSTDVEAAPGDTLMMQGQESEATMQEASHAGEQAQPN

SEQ ID NO: 60277 - protein, 807 aa, Zea Mays
MGQKQTPNTRRALLQDIGYLCYFFGHKQSNDFLLPILPAFLNDHDEQLRAVFFGQIVYVCYFIGARSVEEYLLPYLEQALSDDMEAVLVNALDCLTMMCRSGYLRKRVIVGLLVKILPLLRYPINWVKQSAVRFVAACSESLGSVDTYVYLSPHLRQFLHMEPPSLASETALLSCLKPPLPKSIFYEGLEHAQDIGDILLKSSGKKEQIVHGGRYPGTAQSGSLANLEDILRPKGPNISSSMSLYVKNSVSFEKSLYSGFALHASAANSSFYDGLSKGIPSYSFCTDNKRGLGETHMVPDSSVYKASIRLPWLEPNRPAMQTRDDHFSSTRQDFSINDSMKSNSSLQGDIIPNSDTGGLPFSRSAVNLETGWKPRGILVAHLQEHRSSVNDIAVSNDNTFFVTASDDSSIKIWDTRKLEKDIAFRSRLTYSMGNSRALCTTMVHGTSQVIVGASDGTLHLFSVDCARSVGTVVERYAGIVDVKRNEIKEDAILSVVNCSTDSFSPTVLFSTEHCGIHKWDTRTNSESWSFKSSPEEGYISALVVGPCGNWFISGSSRGVLTLWDNRFLVPVKSWNYSTLSPIEKLCLLIPPPSSISSAGRPLVFVAAGCNEVSLWNAENGNCHQMFRTASTDNEAVMSKAPSRPVNKPVIKDIRRAGNYKYRIDELNDPPVRHPGIRSLLPLPGGDLLTGGTDLKIRYWDQARPEQSFCIAGPSAKEVRSAKGDILEKAVGNDESYDIRSSFGIQVVQEMYKQSSSVSGLTPKTQLAVAAADSAGCHRDAILALASFNLSSQRLVSGSRDGAVKVWK

SEQ ID NO: 60278 - protein, 232 aa, Zea Mays
MFQLLDTGFVGLIFSCFSEDAQKVGKIQVTAFQSEGGQQHALPLAIAPVIDLDSSLSSSDNALTSHSALVEGMEQDTGDSRASKHNKAWKRSLDFYSHPDTNHSTNYQPNENTLALYNPDNTQEAPVDPYDSDMTQSLQEALHRSTMDISGAEYRGKEVPLFVLPTRYLLKLDTTMTSYCDMQRVLFEEEQSAYNQAMQQNICDGKIHPLTSIHCTSTYNSSLCKLMEYWTA

SEQ ID NO: 60279 - protein, 295 aa, Zea Mays
MIGLEGVVLKKAKKIANGKGDVNLSLGSFVDTLVVCPDDLVQVIAKGLSLPLKGVCKPLDSNVVAASGSLKPQISHANDPKMSNKTKNMSPLMQAEKCTSVGQEKNTSVKRNGQDNGITTSLSSSTRHVGACLSNNWDSRSGSMVPKVDVITSSASAVPVVASGVKPSQPVNNSVAKIVTSSKTAAKEFKLNPSAKVFSPSFASSRQVLAAAAPVDTYYISHSAPEVPMGVPVYEPKSVSGVSPLSNKVYCSNLSPANYAISPQYVPSVSASIYSYVFLIVSFISPSLDNTILSS

SEQ ID NO: 60280 - protein, 107 aa, Zea Mays
MRGSRMRCLDKGSHTASSGNKPNALNVNPRGAHLRRARSSRRSQISQPRPDAVRHYARGTPRCGSYAACFINCTCYAERFISCKRWMFAIGLGMGEAVCFCLRSASQ

SEQ ID NO: 60281 - protein, 495 aa, Zea Mays
MLNPPPLKVYMAARKKKPLLIACQATSARITRSQAAANSTRSGLAPSVPVPLKTEHNHAAKKKMKREASDENASADAGASAPLPKRRTVLKNVTNISCAKISKRCTAVTGLKLGPSQKAGQSINKQCTNKISMLLPLAVGGSSLVDDSNNAEETQMVDLLAQKEKQIVLLKEAQPLQNTEQNKGGACDEASVEERNAMNVHETAALKAGVSNGLNIVDIDKNNGDPQMCVTYVAEIYRNLMASELIRRPRSNYMETLQQDITASMRGVLIDWLVEVSDEYKLVADTLYLTVYLIDQFLSQNCIQTHKLQLLGITSMLIASKYEEYSAPSAEEFCNITAGTYAKAEVLEMEQQVLNDLGFHLSVPTTNTFLRRFLRAAQASRTAHLTTLNYLASYLAELTLISYDFMKFLPSEVAASSIFLAKWTLDQSDHPWNPTLEHYTSYKSFDIRTCVRALQELQHNTSNCPLNAIREKYGQQKFECVANLRSPELLRSLFS

SEQ ID NO: 60282 - protein, 1185 aa, Zea Mays
MWACMKQFKDAVCGVMNEPGPIATKLLALKFVETWILCCTPQANSDQVQPTEGKNWRFDTSRSSQFHPSLDPAILEADAHRALLLLLDILRTAYAHRGSFLVGTINSLAAVVKIRPIYYDRVLPVLLDFDPGLETAKGAHSASLRYAVRAAFLGFLRSPHQAMIESKDILVRRLRVLSPGEAMEQNIRQAEKMSRNIERASRASKDESTSWEMPYGDINRKKPAVRSSDTFTTSDGIAKRARFDMSATSNLPVLGLSDYSDMQADNDASVGHSSDPAILNNEVSPVEKMIEMIGALLAEGERGAESLGILVSTVEADVMADIVIETMKHLPEASFHLATNNGVQQLNFKYSSGLVTQNLPANSDSTLFTAQSTPTADGVSISPSDAFVMTSVHDAKRDPRRDPRRLDPRRIVSSSAVNSIQVKMETNSVHQTDNLSNTLYSNSRKAENYSDYQGDLHKNEGEQQSASQPNQTIAKDKLELLDVVTEPEPTFEVEAPVDVRIHSSDVDEDIVKPMSSVVNSLDESDSMDLEVDPFLPAPKAPTPDDTNDDLPIITSQLELSEKGKISINKLAIGRILDDYKKNSFNARFSLLAHLIAQSAADDNIMDLIQRHIIFHSHDQEGYELAMHVLYQLQSISVANSPESSTSTSKHYEKFFISLARSLIDSLPASDKSFSKLLCDAPYLPESLFRLLEDLCMSEDNSQQLKDGDGDRVTQGLGTVWSLILGRPPLRHVCLDIALKCAAHSQDEVRGKAVRLVAKRLYDLTYATEKIEQFAIESLVGVANEHTVDTDINSKSLKESTAEIEVGSQGTSVSGSQIPDTEFSENGPFKTSSVSTKQSAVSVSEAKRRTSLFFALCTKRSSLLQHLFNAYGRSPKVVKQCIHWHMPNLIRNLGPSCPELLNIIHNPPEGSEHLITLTLQTLTEDSNPSADLVAAVKQLYNTKLKDASILIPLLPSFPKEEVLPIFPRLVDLPLERFQDVLARILQGTAHTGPALTPAEVLIAIHDINPEKDKVALKKVTDACTACFEQRTVFTQQVLEKSLNQLVDRIPIPLLFMRTVIQALDAFPALVDFVMGILSRLIDKQIWKMPKLWVGFLKLSFQTQPRSFDVLLQLPPPQLEFMLNKYPNLRTPLSSFVNQRNMHNTLPRQILNILGIFSETQQAPMAFVTATLQTADATTSLPGATLM

SEQ ID NO: 60283 - protein, 550 aa, Zea Mays
MDIRRGPPPPRTASGGVEPRFRQVGFVTAAEPARGAATPAPASPAASDGLSPVMIPPPLIPVPVPVPVAPASESLAPSSPPPDSSSRPDAVSDLDDDDDIDVSWARPPPPAFPGLKSTAMASDANTKQPKTAKISLKKDVNQVNSPVASDKKTGERPPDKDRKKDAPQPRMQFDDTHRVVKAKKRSVVRQSEAQNRVELFRHLPQYAHGTQLPDLESKFFQPDLMHPSVYKVGLQYLSGDISGGNARCIAMLLAFREAINDYSMPSEKILNRDLTAKISSYVSFLIECRPLSISMGNAIRFLKNRITKLPLAFSESEAKVSLQSDIDRFINEKIIVADKVIVSHAVTKIRDGDVLLTFGSASVVEMIFDNAHELGKKFRVVVVDSRPNHEGQGLLRRLVAKGISCTYTHINAVSYIMHEVTRVFLGASSVLSNGTVYSRVGTALVAMVAHAFGVPVLVCCEAYKFHERVQLDSICFNELGDPDAISRVPRDESLSNLKNWAENENLHLLNLKYDITPSDYVSMLITDYGMLPPTSVPVIVREYRREHVWI

SEQ ID NO: 60284 - protein, 993 aa, Zea Mays
MQRSEAQARKASLAESVLAAISELMPSAAAAVDAEHESFMDVGSHLHHGALPTVSVEAQKVQGSPANALHVMEYLAANVDLAKDLVTRCSAIAQQLMDDDLLGITEDLDKVIKNISNELNKMPAATFESSRFAEPAVSGHLQVVRNQHDLFEQQSFDGYSEGDMPMVVAIERPPKRRTLHNSDMPRLVDFLQGMYQESHEIGGQSFGSLPEVAEYVEPLYDSFFCPLTNKVMVDPVTTESGITYDRKAIEDYFDKFTDGSEPVICPVTKMAMQSKTLRSNLPLKSTIAEWITRNEATRVRIARTALSMATTEAMVLEAIHELKVLARLRRKNRDQMHKIGITKFLARLLDHKDALIRCDSLDLLCLLVEDDTGKSELLLENIGSTAGSILILTTMKFNSSSDPIAAEKAGEVLENLEKCPKNIKYMAESGYLDPLQRHLVEGPEDVQMEMVSYLGELVQKQEMTINIAGSASEILIKMVCSGNTAIRKATLDVLVQISSHHPNAKTLVDAGAVPVMVEELFIRKIDDEPMGSKTEAAAVLANIVESGLDPEAITVNKEGHVITSKYSVYNFAHMLKCSMPDTLNLSIVRVLLALTALPKPLATVVSVMKEQDSGQTVIELMGSLTESLVIAAMRLLIALSPQMGHTIAEKLCKAPGQPGRLVKSIGLHGRIMERHAMSATLLAKLPYQHIALNLALINQGAMVTVLAKIEEMQRGETRASRHAKAYMEGLMGVLVRLTTTLYDPDVLLAAMDHNLTSVLTDLVRSAGSDEVQRLAAIGLENLSSQSPNLSQPPTEERRPKKKNILRRLREAHAGRVHDNRRPPAHSRVCPVHRGVCSPSTTFCLVEAGAVEGLLCVLESSENGRVVEAALGALCTLMDDAVDVTSGVAVLAEHDAARHVLRALRQHRDDGRRGGGGAAAGETVTRRCFWAVERFLAHGSERCVREVTSDRALPSLLVGAFHKGDAATKQVAESVLRCLHRMPDYSATYESVEL

SEQ ID NO: 60285 - protein, 618 aa, Zea Mays
MGDREEDEELQMALRMSLQGSPPAQPEPKRSKPPPPAAESPEAEARRKQRELMAAAAEKRRRGAASPASVSVARSLLQPVVVESAPAPEVTKEQVEEPEQAGVSMEEAKEVEEEEEEEKGEELPPDVAENLWAMVFGRGVSKAVLAQWSNQGISSDPETTMGLVQHEGGPCGVLATVQAYVLKYLLFFSDDLSNPEISNPLYTLGQRRFYQSSFAAGDDFSSLTDDRKTRALVHAMVEILFLCGTGKRAVVASVARANRGKIDAALEDLSVESAVDLQKVLKTSTFTSRKDAFNTLLANIPLFQSRLGAMLFLISALLSRGLEDIQADRDDPSQPLVTAPFGHASQEIVNLLLCGEAVPNVFDGKMDLGGGMSLKGIPNNVEVGFLTLLESLNLCKVGQYLKCPKWPIWVVGSESHYTVLFALNPNVQEENELEERESKIRRAFDAQDQSGGGGFISVEGFQQVLRDTDINFPSDKLEDLCNAGIIVWSEFWQALLQLDKRAGGMKDPTGLMGKKQFTIFHFNGIAKSVPNGNASAGGSCPIQRPRLCKLNVTVPPRWTQDEYLADVVSASTSSSKDDSILSLAPPGQTNQHAPLVDCIRTRWPRAVCSWVGDVPSIV

SEQ ID NO: 60286 - protein, 512 aa, Zea Mays
MGYEESKKHLLSLSYPELQCLCKRYNLPAKKTHSQLASSLASLLEASPSPAPPPVQLANMKEASTCNHANNKRGPYNGRDDGKPLVHAKHQKGDQTPVDETSKKGIDTGTSIPPVSMNHGRPEYHGHLSSDLRTAHNLQSQCDVGIATNTTNLEFVGKHDCSPANVIDQICPPIIQKYPSNGNGQASTKFGRMNDNTEKGCRLSDKISANAAAVQFSVMSDEGIDLLVDLNSSSATWAKNFMAEMHITPPSEHGNFSSFISSLSTKDDHSTASPSGNIIVDIQNKGAENIVPSTDSSLASDVGESSRSVLYPVDTTTVNSVSSTSTVAGTPVELSGYQEGAPVVCSSCLTADVQNNVTSDMPGASDNEVLPPEPADVFLQSERITAPAVCGSVQPIGNKCTMSSGDEVRSGSNEDSCPKSSGKQTGDETLMENEPVKAVAVEENIGRDDSLSISYQLACKTVAELPVTDAQSPASSSGHFIAGNFDNTHPTSSATSFTWMAYQFNLYPLWLQ

SEQ ID NO: 60287 - protein, 51 aa, Zea Mays
MIRFNGLLATSGAANRPRRRDPNTKPDHSIGRSDGRAFKGQGRSQRELMTR

SEQ ID NO: 60288 - protein, 118 aa, Zea Mays
MAERLEAAASDEYTQDGTVDLHGNPVLRSRRGGWRACGFVVVYEVFERMAYYGISSNLVLYLTKKMHQGVVPSANNVTNWVGTIWMTPIIGAYVADAHLGRYRTFMVASVIYLSAVNI

SEQ ID NO: 60289 - protein, 672 aa, Zea Mays
MDLLFSFVKPDHPHSTLLSGYFSKVVICLVLRKTAPLMSYVQGHPEIVVQLVDLIGITSIMEVLIRLIGADETIYSNYGDTLQWLENTNVLEMIADKFNSSDSPEVHANAAEILCAVTRCAPPSLAAKICSPSFVRRLFHHALEESRPKSVLLHSLSVCISLLDPKRLASASYQAFKSNLSHGALVMASPETVDGMLESLGNLLNLLDTSAAESVLPTTYGCLRPPLGKHRLKIVEFISVLLTIGSETAEKELVRQSAIKRSIDLFFEYPYNNFLHHHVENIIVSCLEGKRPEVVEHVLHECDIVGKILVSERLSSLSTESNGPTVPTEGKTHPRVGNVGHMTRIANKLIQLGNSNNTIQAHLQENNEWVEWQTNVLVKRNEVENVYHWACGRPASLHDRGRDSDDDDFRDRDYDVAALANNLSQAFRYGIYSSDDIEEAQGSLERDDEDVYFDDESAEVVISSLRLGDDQEGSLFTNSNWFTFDGERGIDDRSSASVPSSSPNSEETSLKTEEADDGKVIGTEDEMETVYLGNGSVEEVKDVAECTEQPNCCTEEERLKNEEGMEWHPNASNNDTEAEAAAESSAPSVEIVAEKTVDEPLEVGRKLDEPAESSLDSSVSVALPAPVNGSEPANSEVSSEQVAHATDVQQPVKEAPAEDDDAKKTDAAKTNE

SEQ ID NO: 60290 - protein, 286 aa, Zea Mays
MLRIAEGGALTEAAVVANFLCLSALDANKPVIGASGAAPFLVRAFQAASSTEQARHDALRALLNLSIAPANALHLLAAGLAPALVAAVGDGPVTDRALAVLCNLVAACPEGRRAVSRAPDAVPSLVDVLNWADEPGCQEKAAYVLMVLAHRSYGDRAAMAEAGASSALLELTLVGTALAQKRASRILEILRADKGKQVAEDASGVVATVSAPQERGCRGEESVDGEFADAGMSAEKRAVRQLVQQSLQSNMRRIVRRARLPQDLAPAPTESLKALTASSTSKSLPF

SEQ ID NO: 60291 - protein, 351 aa, Zea Mays
MFNIVSSWNKRRRSRSLDQLNPWVYKPAELWQAKEQEHHHPPPKKRSCTMVFTLKEMEEATNLFSDRNLIGKGGFGRVYRGVLKDGQIVAVKKMELPTCKQADGEREFRVEIDILSRLDHPNLVTLIGYCADGKHRFVVYEYMPRGNLQDILNGIGEVRMDWPLRLRIALGAARALAYLHSSTAVGVPVVHRDFKSSNILLTDHYEAKISDFGLAKLLQQDQDLHTTTRVLGTFGYFDPEYALTGKLTLQSDVYAFGVVLLELLTGRRAIDLSQGPQEQNLIVGIHQAVGDRKKLRKVVDRDMPRGSYTLESVSMFAALAARCVCFDSAGRPPMQDCVKELQFIMYANMKI

SEQ ID NO: 60292 - protein, 255 aa, Zea Mays
MLDSDIIQHSKSPFASSVILVKKKDGTHRFCVDYRHLNAIMAKAKFHVPIIDEFLDELHGAAWFSTLDLRARFHQIRMAPPDLYKTTFQTYHGHFEFRFMAFGLTGALATFQGAMNCTLKPLLRQRALVFFDDILIYTDTWKHHLKHLEHVLQLLLQDHWQVKLTKCTFAKQEIAYLDHIISKVGVATGPAKVEAVVSWPTPTNSKELRGFLGLTGYYRKFVQNFGVIAKPLTALLKKHVVFFYEHRIMLLLLPC

SEQ ID NO: 60293 - protein, 286 aa, Zea Mays
MMLYGAIFGCLSPILSVAAFLSYKSPFLSPKDEKQNVEKAKATLLNENLDGSSSVTDNKQSDHLLMVIAYDKWSRILLQNGDKSARQFCHSFYLNSTVMHMIRDMRLQFGTLLADIGLIDLPKDTLRHKVGSRKNNLESWFSNMSLPFNAYARCTSVIKSVMCAGLYPNVAASLEGVDPGALGGRKPSDVLFSKDRPRWYDGRREVHIHPSSVNHSLKAVQYPFLVFLEKVETTKVFLRDTSVVSPYSLLLFGGSMVIQHQCLSMTPCDFSGDSRGWWKPFNVNLF

SEQ ID NO: 60294 - protein, 446 aa, Zea Mays
MQRLESTTPHFIRCIKPNNLQLPAIYEQGLVLQQLKCCGVLEVVRISRSGYPTRMTHQKFARRYGFLLLEDVASQDPLSVSVAILHQFNILPEMYQVGYTKLFFRTGQIGKLEDTRNRTLHGILRVQSCFRGHQARHHARERIRGVLALQTFIRGEKARQIYSSLLRKHRAAVILQSNLRCWLARRYFINVRKASVIIQSGIRGSLVRRCNGNIDLINVLREFESKQEAEGDQILIKASVLAELQRRILKAEATVREKEEENETLHQRLQQYENRWLEYEQKMKAMEEMWQKQMRSLQSSLSVAKKSLALHETPRMSDSSVDQSWESNGNHVSSGSQLVPRTGGREMSAGLSVIGRLAEEFEQRSQVFADDAKFLVEVKSGQADASLNPDMELRRLKHNFDSWKKDFSGRIRETKMILNKLGNGNESSPNSVKRKWWGRLNTSKFS

SEQ ID NO: 60295 - protein, 578 aa, Zea Mays
MAGAPLRRSDLDFADVFGGPPRRVSGNEHRSQRGSQDTSSFESATRAGSGGPDTPVFGDRGSSDRRRQLGEEFYKDIFPGSEAASPRRSGAGDWGNVFGAQASPVSTARPRSSFSIRFNRGMDSSMPTSPSQQMSNRNDDGTSYAYSVPTSPNASMNNYLAQGAARQDSKKNPFSWHRYPFLSRFRSQSGEKKSTSNHVSSMDNEFEGTPVNLESIMANNKFHFSFYKWAGKGALLVLPATAQEKSVDIIGLRSFPQVVIQGIDLIDCEDSMSTATGTAKNQTDYEDSKSGKHSANSATKDGAIPLLFEDYMQGTKQSNDHTKNDVSSTTLSSKISRSPSGERSRSSRVKEKMKGFIKLFSPESSPKRKRAPETQRQTSVGKNGTKTELHDKFSMSSLEASEDVETMTEVQERLDKPVLTANSKMDTATGSNEAASNEPIHDDTKDKAANTIEHEDIEDLDGCVVEHFSEDHVLHNDQEKELIKISEAKIREWSRGKEGNIRSLLSTLQYVLWPESGWKPVPLVDIIEGAAVKKAYQKALLCLHPDKLQQRGAAMHQKCIAEKVFDILQVLLITAFPC

SEQ ID NO: 60296 - protein, 560 aa, Zea Mays
MSSQDSIGTVLKCMQKGAVDFLVKPVRKNELRNLWQHVWRRHAMNCQTNGSENNAASNHISANVANGSKTGENSDEESDAQSFGSKRDTEIHSVEAVQDIRRDEVAGSSKNNELQNKSYDGVNTKVDVSKYTNGAPSGSEKNVRSKCLNGITSAKVAEQIMDNALRITDASSRRPTNLGNGLAMTEPAADRKCQSSVMENNAVTENNPGDKSKGAAIGHADSCPSEFMVTNLGKEHHLNGYKNQEFREKDIFNHSNSSAFSRYGNKRIEPSGEIQFFPSPCVIGQGHVNGKNPVFQPNGVLLPPNEHNTGESTRQARISLDSRTEGAAILCSTSAREDAGANSSSHRKDSMSHPSYGFIPVPIPVGATMPYHYGAILQPVYYPQSPLMHCDSAGINKAAIQHASGQPNYHEAPGKPSHVLIEHKQSEENHQLHHSRQILRESGEPIDMARAHVDRANQTASCSQGICKGSGCTCSGEADINANTMVALESGNESGIQNGDRSRREAALMKFRMKRKDRCFEKKVRYHSRKKLAEQRPRVKGQFVSQKLNSATTTDAEADS

SEQ ID NO: 60297 - protein, 107 aa, Zea Mays
MAAGGEPSPLSPAKYSRLPDDAQPDASPKRRKRHHRHHHHHHHRRHRHADSPIPEAADEEVEEGEILDDASSVSAMEVNAESAAPQSSLAPLLSRVPQPSEKHTPLT

SEQ ID NO: 60298 - protein, 851 aa, Zea Mays
MGSVDGRGVEGIHEANRRAQLIGWMNALLPEFSLPPDSSSEELRELLSDGVVLCRLVNTLIPGVLEGSWEGYAPSDQRLGNVKKFLSVVSDMGLPGFSLKDLDEGLMSSVVECLLVLRGSVDPRLGDDIPPDVTRTPLRKQWGVQEMDKPQVPAAALGKRSPAEDMRNGVADSKTHQKTSVFSGQKVREVFQLKRGSYSDLTAAKISEMMHSNSLDNAPTQSLISVVNGILDESIERKKGEIPHRVVYLLRKVVQEIEHRLCIQAEHIRSQNVTIKTREQKYCSKIKALEMLVNGTNEENQMAINRLQIVKNEKSQIEEKKELCEKDVQRLMKEKEYSKSIIMNLTKDMEAMNRLHEQQLEQIGRKAKEMEEQLTTRVKEVEYLLLQSNKKVEELEIASRLKSQLWDQKENIFQSYMDNQQLVIKDIRILSQSYENDMYALQMQWRNEISNLGSGLKCLVDAAENYHKVLTENQKLFNEVQELKGNIRVYCRVRPFLSGQDKKSTTIDYMGENGELLISNPFKQGKDGHRMFKFNKVFTPFASQAEVFSDIQPLIRSVLDGFNVCIFAYGQTGSGKTYTMSGPTTSKQDWGVNYRALNDLFDISLSRRNAFSYEVGVQMVEIYNEQVRDLLSNDIAQRRLGIWNTSQPNGLVVPDASLHSVKSTSDVLDLMEIGQANRAVGSTALNERSSRSHSILTVHVRGMDLKNGSTSRGCLHLIDLAGSERVEKSEVTGDRLKEAQYINKSLSALGDVIFALSQKSAHVPYRNSKLTQVLQSSLGGQAKTLMFVQINPDVESYSETISTLKFAERVSGVELGAARSNKEGKDIKELLEQVLVLLDLSLTRVYLFPIL

SEQ ID NO: 60299 - protein, 681 aa, Zea Mays
MDAADPLCAISSTARLLPRTLGPAIGPSPSNPRDALLEAIALARSLKGSEELVKQATMVPKEHGDIQALYHDDGVKGWPPANGSKEQQGRRPALDRKRARFAMKDTGSKPVPVVDQSKLSNISDPITFFMTLDRLEEAEEEIKRLNGEAEKRTLNFDPVDEPIRQPGLRGRKSVRSFKVIEDVGTQDPNEAPASQTATMTGSQLSQDVMHAVAGKNGRSVSSRSSEAISEKEDLDESEEEEFIRKTLGIKETRKERVSLRNSILGVRSLRSNTEQKGSMKVHPPESHLPQTRQDRISELEKHLFPGGAANAKCTDDESEGSPDIVMGEPSLVHYSSDVLMTDENFTASDVDRETPNLGARAADPVLDPEPNLPDHAYERQPGGSSLGLYRDTEVGVAKENETCNRSNISVEEDDVPIDYITIGRSTNETEVSSSHPLEGSSTEELVTKPGRHAAPDGICRTSHAAEDSIQHLEAVKEGGVLQDKSSQLLEMPQEDINPLNQAQMHGGSTKKSAPDLSPTKQKKQQAVQERKRKQQSKRGKKVAGESLEIPQTNFESENQPHNDDVNIEKQTITSSTLSPNGAKGQKGAQRRNQTKKRNQRKILGDADLACQPGVRKSSRTRSRPLEYWLGERLLYGPIHDNLHGAIGIKAYSPGQDGKRSLKVKSFVPEQYSDLVAKSARY

SEQ ID NO: 60300 - protein, 311 aa, Zea Mays
MMIPWGGVGCCLSAAALYLLGRSSGRDAEVLRSVARAGSMKDLAAILDTASKVLPLVVAVSGRVGSDTPLICQQSGMRGVIVEETAEQHFLKHNDAGSWIQDSAVMLSVSKEVPWYLDDGTGRVYMVGARSAAGLILTVASEVFEESGRTLVRGTLDYLQGLKMLGVKRTERVLPTGISLTVVGEAIKDDVGTIRIQRPHKGPFYVSPKSIDQLIMNLGKWAKLYRLASMGFATFGAFLLAKRAIQHFLERKRRHELQKRVLNAAAQRQAREAEGSIGSSDTEPNSKKDQLVLDICVICLEQEYNAVFVPV

SEQ ID NO: 60301 - protein, 573 aa, Zea Mays
MLVTFLQQCIAGPVLDFFKRQLEHIDAERNALRLKCNSSDDKLALLRKQLEASEGHRAEYVRRYEEVLNDKQKISKDYSTRITELQIKSSKLEERSLSLSSSLETAKRESNDWKSKYDHGILQQKADESKLKSQIASLESRVNISEGRLSATREQADSAQEEASEWKRKYEVAVSEAKTALQRAAVAQERTNKKVQEREDALRSELANQLSEKEEEIARLHAKLSQTEIHATSLISRLEATEAKLKSHESDSLALKEEIRLLTDNLESVRSEAMSREKEVRILEQEKNHLEEKYLSQCKKFDEIDIRCKEAEREARRATELADVARTEASSAQKDKGEAQRLAMERLALIERIERQVEALERDKAKMVEEIERLHQSEKDAVSKVALLERSVDEREKEIDEMLKRNNQQRSSTVQVLESLLATEREACAEANKRAEDLSLMLQATQGKLDMLQQETTLDSKLKTSARRLRGEGTESVHDMDIDEDNGRRRKRSKSTTSPLKSNHTEDGGSVFIGEDTCNGSQQGTETEDYTKFTVLKLKQELTKRGFGAQLLQLKNPNKKDIVALYEKHVVGK

SEQ ID NO: 60302 - protein, 1619 aa, Zea Mays
MGRKGSEVSPSKRYPLRSAHSSGRVLRSALANNNKDSEPLNAAAATQAAVKKRSGNQLDSPNSTVRLLRSTSKNKDEAHSGPLNDRIIDKPAANKRKHANPSQVGSPSSSVRVLRSAIKNKDMARSEPQSDRTAGEAATNKRKNANSSKVGSLSSGLSVLRSASKAKDETCIKPLNDSAAVEPASSKRKCTSPSKVGSPSNSVRVLRSTSKYKNETCTEPLNDSGAVEPAANRRKGVSRSKEGSPNSSVRVLRSASNNKIDVSIEPLNNSTTGQPAAKRRKNGSSFKSSARVLCSTSERANEASSEPLNDSTAAQPAARKKKGGAMPKTDNPKIGVRVLRSASGKKNETCTEPVNGSTSAEPTVTKKRNCKPSKDRSPKKDYLKICQRIKYILNRMKYEQAFIQAYASEGWKGQSLEKIRPEKELERAKAEILQCKLRIREAFRNMDSLLSKGKLEESLFDSAGQISSEDIFCAICGSKDVTSQNDIILCDGACDRGFHQNCLSPPLLTEEIPPGDEGWLCPACVCKADYIDALNELQGSKLSIHDSWVKVFPEAASTANGSKQVDASDLLPDHIKDSANLALVGTHMVNEIRFSEEDDSKADDLGLPSEDSGDGDFDPAGPDSSEDQNDGLNSEESDFTSDSDYFCAEIAKSCGQDEVSASPLSNVINRTDRMKLRAYSRRSNEENHNHAFMDMELEQDIVLPVPSRRQVERLDYKKLYDEAYEEESSNSSDEEEWSGKELLEGSGTDSLDERLRPVKRCSRRAPAGQQNNELTPQSRPHGSNSEQKTEVLRSNGSSSTGRKYDPEVTQKLKVHFEKDPYPSRETKENLSEELGLTFNQVSKWFSSTRHYSRVASAKKEMHPDSHTCENNDETTVDSMQAKQPNAGVMEKLTGDRNGIVPEKPMVQDNLNQGAMEKLTRDKNDIVPEKPVMQSSLNQCNNEDIPLSGTEIEMESYEQESSDSSDEEWSILSTPRKTRLQDHGKSSVTESLRSAKRCSRRAPAREQNNERIQSEQLHGSASEQQTEFLRSNVSSGKVSKYHFGPIVSQKLKEHFEKDPYPCRATKESLAQELGLTFNQISKWFSGTRHYSRDAVAKNQKRPGENTTVNNNSTTFDDIQVIEPNVGLIDKPAADVNDMISEKLMVQINLNEGIEEDIPPSQYARCEEKITMTPAAISREAGLPGYGPGPGENFLQVSSRNTSCEQSVILAPTAIAREVGPPGYATGENQGNGAPWNTSYERRLFMNPVTSSRAVSPPGYGPEESRGSGISWNTSSEQILFMSPTTISRELGPPGYGPREDQCSGTSWNASCELGVFMSPVTTSREDSPPGYGPRENQENDNMRCELRMFTSPTTISREVGPPGYELTGKNKGNGASCTTNYQQGAFTSPEAFPREACPPGFVSGENQGNDTPWYMSSKQMAFTSPTTNPRVGPPGYGQENQGSRVSWNTSYEQGVFMSSTNISREAGPPGYGPGESQGNITSWISTGGQRMFTGPSTIPNEVGQQGYGPSGIPGTDGSRSMDLKAFPPGYGPAGENQGGGASGSVISPQARSAENVEFSDDARKKAIQRELRRRQKFRRRIPRSMGARWWWLRPSRTSSSSALNHTSGRSRLLSHPSPSS

SEQ ID NO: 60303 - protein, 384 aa, Zea Mays
MKYAPSTSASNEGASTSGAASQTASGVLSGSGVLNLRPGSTTSSGPLAQMFSSMSADVAREYLEKVADLLLEFAQADTVVRSLMASQSLLTRLFQMFNKIEPPILLKILRCINHLSGDPNCLETLQRTDAIKHLIPILELCDGPLVFQIHSEVLNALFNLCKINKRRQEQAAENGIIPHLMNFVMSDSPLRQYALPLLCDMAHASRNSREQLRAHGGLDAYLNLLEDDVWACTALDSIAVCLAHDNDHRKVEQALLKKEAIQKLVKFFQDCPEQYFVHILDSFLKIIMKSSRLNTAMATNGLTALLIARLNHRDAIARLTLLKLIKVVYEHHPRPKQVIVENDLPQKLQNLIEERRGGQRGGHQVLVKQMATSLLKALHINTVL

SEQ ID NO: 60304 - protein, 749 aa, Zea Mays
MGYGPQTIEEKQKLYTLLRSLNVNGGLASASISEPYTSTGQSFAGGAPVDGFYSPELRGEFGAGLLDLHAMDDSELLSENAASEPFEPSPFMPKEMDDDDYDVIAENQQGLVDNQSAFTNEKENTVVSARESNVAKIKVVVRKRPLNKKEVSRKEEDIIDVHNSQFLTVHEPKLKVDLTAYVEKHDFCFDTVLGENVTNDEVYRETVEPIIPLIFQRTKATCFAYGQTGSGKTYTMQPLPLRAAHDMVCLLHQPMYRNQHFKLWLSYFEIYGGKLFDLLSERRQLLMREDGKKQVCIVGLQEFEVSDVQIVKEYIEKGNAARSTGTTGANEESSRSHAILQLSVKKHIPVTETRRQRDRDAIEAKNTKHVGKMSFIDLAGSERGADTTDNDKQTRIEGAEINKSLLALKECIRALDNDQIHIPFRGSKLTEVLRDSFVGNSRTVMISCVSPSSGSCEHTLNTLRYADRVKSLSKGGNTKKEQFAVQSVSSGKESTYTSYPLSCEAEETMEQTQEIRPVDSSRKGVDSFTSNSSIEPEKNSYCMIPSYPHKGKEETSTRSGLNDRERGDLKYNQAGFNSKTHSLQESINSQEEVKVTKVSPPRRKANRDEKSERQVNYMKKESGPEISRTGVKQQQQLKQLQRPSSTSSSQVLSKQSEKEDMEINTILEEEALIAAHRKEIESTMEIVREEMNLLAEVDQPGSLIDNYVAQLSFLLSRKASGLVSLQARLARFQQRLKEQEILSRQKPLR

SEQ ID NO: 60305 - protein, 694 aa, Zea Mays
MQTRSKLGRAPFATSFLFTEYQYVGIFMAIFAVVIFLFLGSVEGFSTKSQPCTYSKDKYCKPALFTALFSTVSFLLGAITSLVSGFLGMKIATYANARTTLEARKGVGKAFITAFRSGAVMGFLLASSGLVVLYITINVFKLYYGDDWEGLFESITGYGLGGSSMALFGRVGGGIYTKAADVGADLVGKVERNIPEDDPRNPAVIADNVGDNVGDIAGMGSDLFGSYAESSCAALVVASISSFGIDHDFTGMCYPLLVSSVGIIVCLITTLFATDFFEVKAVKEIEPALKKQLIISTVLMTFGIALISWLALPAKFTIYNFGTQKEVSNWGLFFCVSIGLWAGLIIGFVTEYYTSNAYSPVQDVADSCRTGAATNVIFGLALGYKSVIIPIFAIAVSIYVSFSIAAMYGIAVAALGMLSTIATGLAIDAYGPISDNAGGIAEMAGMSHRIRERTDALDAAGNTTAAIGKGFAIGSAALVSLALFGAFVSRAGVKVVDVLSPKVFIGLIVGAMLPYWFSAMTMKSVGSAALKMVEEVRRQFNTIPGLMEGTAKPDYATCVKISTDASIKEMIPPGALVMLTPLIVGTLFGVETLSGVLAGALVSGVQIAISASNTGGAWDNAKKYIEAGASEHARTLGPKGSDCHKAAVIGDTIGDPLKDTSGPSLNILIKLMAVESLVFAPFFATQGGLLFKYL

SEQ ID NO: 60306 - protein, 577 aa, Zea Mays
MVIPYMPMLIPPICWTGYDKGAHLFLPSYVMRTHGARQQRDAVKRAPREQMQFVFEALNTLGSTKWRVNKRVLSIVDRIWSNGGRLADLVDRTDVPVPEKPDTEDETLLKNWKWHLRAAKKKNSERHSQRCDVELKLAVARKMKDEEGFYYPHNLDFRGRAYPMHPYLNHLGSDLCRGVLEFAEGRPLGKSGLRWLKIHLANLYAAGVDKLSYDGRIAFAENHLEEIFDSADRPLEGRRWWLGAEDPFQCLAVCMNLTEALRSSSPETTISHIPVHQDGSCNGLQHYAALGKDKLGAIAVNLVAGEKPADVYTGIANRVMEIMRMDAQKDPSVEPDAARARLIVDQVDRKLVKQTVMTSVYGVTYIGAREQIRRRLKERGVIPNDSELFGASCYAAKVTLTALGEMFQAARSIMNWLGDCAKVIACENEPVRWTTPLGLPVVQPYRKLGRHLIKTSLQVLTLQRETDKVMVKRQRTAFPPNFVHSLDGSHMMMTAVACKRQGLNFAGVHDSYWTHASDVDTMNKILREKFVELYDTPILENLLESFEKSFPKLKFPPLPERGDFDMKEVLESTYFFN

SEQ ID NO: 60307 - protein, 62 aa, Zea Mays
MRAGSKLAQISEISGATVTLAEDRPDILEKVVRISGTPEQASKAENLLQGFILSIPDDIPSG

SEQ ID NO: 60308 - protein, 52 aa, Zea Mays
MKQWRDDVDRLLGMAHSGSTRTRSRSSRRQHEASASVRSPSVRAAPTEDLRA

SEQ ID NO: 60309 - protein, 183 aa, Zea Mays
MHARFLSAPSPASAAPSPYVRLAFTGARPRRACWKPRGPASASAPPPRPLHSLCARASMQPASPAHDGCGVLTVEIEHVDVTTLEKLEKQGVDCEPNASTIMIIQDKYRQKKHFSRCEIPLPDFMEVDTLRSIEEAGEKFGYPLMVKSKRLAYDGRGNAVAKNKEELPSVVASLGGFERGLYV

SEQ ID NO: 60310 - protein, 85 aa, Zea Mays
MEIQHHRGLGNSKVVKVQSEEAWDLFTDQASNEGRPVVAHFGASWCVTSLSMNYKFEELAQTHPEVLFLYVDVDDVQVPFRILRK

SEQ ID NO: 60311 - protein, 331 aa, Zea Mays
MGMVPNGLLPSASAGMTRRLDPERWAVAEDRTAELIACIQPNVYSEGRRLAVYHYVQRLIMNCLSCQVFTFGSVPLKTYLPDGDIDVTAFSNSEELKEIWANLVRDALEREEKDENAEFHVKEVQYIQAEVKIIKCLVENIVVDISFNQVGGLCTLCFLEEIDNLISQNHLFKRSIILIKAWCFYESRILGAHHGLISTYALETLVLYIFHIFNNSFTGPLEVLYRFLEFFSNFDWEKFCLSLWGPVPISSLPDMTAIPPRMDSGELLLNKSFLDTCSSAYGVVPHTQENQGQPFVSKHFNVIDPLRTNNNLGRSVSKGHVPAGWRCRRWR

SEQ ID NO: 60312 - protein, 1205 aa, Zea Mays
MGVQAVKGSLLDQYNGVNDASHGLHRKRKRHLDGASDDDEADAYSNKITEEQYRAMLSEHVQKYRRSKFKEGAFSSDPPRVATPQLKHKNGGKKNMKRISDFSDDVALDGIEASHEYNGIECIKTHGGFNKLVATLDSTYLDMGDSTRYLVPEGYDKLASSLNLPVSSDIRVEEHFLKGMLDLRTLAAMLGTDQRFEASNRGGISEPLPQFESLKERVKVQEFSLQVTKDPFAIPEGSAGRIRRYIISEAGDLQVHYVRVMEKGDTYEIIERSLPKKQIVKKEPSVIMKEESEKTYKLWQSLATKSIPKHHKNFTALIKKRQVDAKRFSDSCQREVKLKVSRSLKLMRCAAVRTRKFVKDMQMFWKRVDKEQYELRKKEEKEAAEALKREEELREAKRQQHRLNFLLSQTELYSHFMQNKTGGSAPPDEEDVPDEEDPEEAQLKREALRAAQHAVSQQKMKTNAFDSEIVRLRQTSDSALPTDDSSSMDPSKIDLLHPSTMPETSSVQTPELFKGVLKEYQLKGLQWLVNCYEQGLNGILADEMGLGKTVQAMAFLSHLAEDKNIWGPFLVVAPASVVNNWAEELIRFCPDLKILPYWGPERMILRKNINPKRLYRRDASFHILITNYQILVNEEKLLRRVKWQYMVLDEAQAIKSSSSQRWKTLLSFNCRNRLLLTGTPIQNNMAELWALLHFIMPTLFDSHEQFNEWFSKGIEGHAEHGGALNEHQLSRLHAILKPFMLRRVKIDVIAEMTKKKEEIVPCKLSSRQQVFYQAIKNKISLNELLAGSRGSLNDKKLLSLMNIVMQLRKVCNHPELFERNEGSSYFNFAEIPNSLLSPPFGELQDVHYAGKRNPIIFEIPKLVYEGIISNMENSGNICGFQNGYLNRLFNIFLPSNIYRSAIPEVSSSKESLLSSGAFGFTRLSNLCPVEASFLATASLFERLVFSVMQWNMNYTAEILDEFLDSEDTGIQSSHNDSTKVRAVARLLLSSTKVKPSLLRTKIGTGPIDGPYEALVLSHRDRLASNIRLLRSAYAFIPPARAPPINVWCADRNFAYKFTDEMYDPWAKKLFLGFARTSEFNGPRQPIAPHPLIQELNTDLPIIEPMLQLPYRIFGSSPPMSNFDPAKMLTDSGKLHTLDMLLRRLRAEGHRVLLFAQMTKMLDILEDYMNFRKFKYFRLDGSSAISDRRDMVRDFQNRNDIFVFLL

SEQ ID NO: 60313 - protein, 1606 aa, Zea Mays
MRVPCCSLCNVRYDEEERTPLLLHCGHGFCRACLSRMLAAAPGATLPCPRCRHLTAVGNSVSALRKNFPILSLLSTSPSSPSFLHSDSGSSSDGSEDEDDFFARPSRRPAPAPAAAPPGCSFFDLASHPDLKLARRIGSGPPGPAGQEVWAGTLSRGGGVKRCKHQVAVKRVPLAAGDGLEAEMRQNGGRLTLEQILRYGADIARGIAELHAAGIVCMSIKPSNILLDAHGHAFVSDYGLSAILKNLTSRRVPDDSSAGIDATLLSPNYTAPEAWGPLKKSLNMFWDSANGISPESDAWSFGCTLVEMCTGAVPWAGLSAEEICKSVVKEKKPPPQYSRVVGVGLPGELWKMIGECLQFRASRRPSFQDMLKTFLRHLLDIPRSPPASPEIDFANENLPNGMQPPTTSILEMVHDNPNALHHLVCEGDAAGVRDLLAKAASERNDSLIRSLLEAQNTDGLTALHLACRRGSAELVEAIVAYQENVDILDKDEDPPIVFALAAGSPRCVRALVGRSASINSRLREGLGPTLAHVCAHHGQPECMQELLMAGADPNAVDGEGESVLHIAVARRYTDCAIVILENGGCRSMGISNSQHKTPLHLCIETWNTAVVRRWVEVASLEDIAETIDVPSPVGTALCMAAALKKEHEKEGRELVRILLAAGADSTAQDDPHCRTALHTAAMIDDVELVKIILEAGVDVNIRNAQNTTPLHVALNRGANSCVGLLLAAGANCNIQDDDGDNAFHIAADAAKMIRENLAWIAQMLLQPSPAVDVRNHRGWTLRDFLERLPREWIYEELMETLEDKGVHLSPTIYEVADWVKFRRTVTSPAFGWQGAGPRSIGFVQSVVDNDHLAVSFCTGEAHVLTSEVIKVIPLNRGQHVQLKPGVSEPSIYLDAEIIELVGILNWRSTMCLLFGWRGQSRDSIGTVLCVDDDGILRVGFPGASRGWRADPAEIERVEEYKVGNWVRIRPSLTVAVHGMESITPGSVGIVYSIRPDSSLLLGLCYLSNPWLCEPEEVEHVDPFKIGDQVCVKRSVAEPRYAWGGETHHSVGKIIDIESDGLLIIDIPNRAAPWQADPSDMEKIENFKVGDWIRVKATVPSPKYGWEDVTRNSIGIVHSLQDDGDVGVAFCFRSRLFLCSVADVEKAQPFEVGEKVHVSPSISEPRLGWLSETAATIGAISRIDMDGTLNIKVSGRKGLWKVAPGDAERLSAFEVGDWVRLKPSIGSRPTYDWNSVGRISIAVVHSIQDSGYLELAGCFRNGKWLTHNTDIEKVQTLKIGQHVRFRAGISEPRWGWRDANPDSRGVIAGVHADGEVRVAFFGVPGLWRGDPADLEIENIFEVGEWVRLTNDVEQWRSLKPGSIGVVHGVGYQGDAWDGTIHVAFCGEQERWIGPSSQLEGVSKFVVGQRVRIRGCIRQPRFGWSNHNHSSIGTISSIDADGKLRIHTPAGARAWLIDPAEVEEVEEEEVCVGDWVKVKDSVGTPVYQWGDVNHSSIGVVHRADDGELWIAFCFCERLWLCKAWEVEKVRPFRQGDKVRIRPGLVSPRWGWGMETYASKGEVVGVDANGKLRIKFRWRDRLWIGDPADIVLDDVHLLTEASNGLAFCS

SEQ ID NO: 60314 - protein, 391 aa, Zea Mays
MKIFERSMDGFTGGQGQGKRPGHRRQHPCRVSCRARSRVTPAKKQMMMMMMCHAAGQQETEHHGNPRTSQRPPSSLLYVWSRSDDDVHSQDHHSVVRQVLRDVSCRARPGELLAIVGPSGAGKSTLLEILAGRLSPSPPPHLLRIDGAAAHSADLRRVSAYVTQQDVLFPLLTVRETLLFSARLRLGARLPSKDMHARVEALLDDLTLRRVAATRIKDLSGGERRRVSIGVEAVRDPPVLILDEPTSGLDSASALHIVGALRAMAEARGRTVLLSIHQPGARIVKMFDSVLLLAAGSVLHHGTVDQLRALLGDAGLHLPPHVDDVEFAIDSVDALRRHASSSLQAPSSGDREGRCTLQRLFQLHGKQVADAPVAVTMMASRYANSRAREVA

SEQ ID NO: 60315 - protein, 308 aa, Zea Mays
MGRYGPFPAAAGDGGGCLPLPIVAAEGALAVLDGAIATAAFVQLARIHRHNQLQGWTRQKIFHFMIGLSNIVFLVYFVSTIIATCQRWICWVHGCGFVLMASPQILLLASFLLLLSFWVDLCHQTNDEDEEDGRSQSHHEALLDRTKAKPGIHPVNIRQRCCPGIQLGSRQKFVILVLLLSFVVMLAFAILIWVGRGDNPIDSSLLKRVYLDVFSVVVIVLGGALACYGAVLFSKMSKVRSETVSTEKWKVASLAAVSLICFSSSAILALVTNVPVLLYWYSTDVDIINNAVILFIYYFIGIFIFLYA

SEQ ID NO: 60316 - protein, 459 aa, Zea Mays
MKYSKEDKPERAGGAGAGSRAVPVALVVVVLCAFSFYLGGIYSTGRSLLDSIQPAPTALLALGAATTTRRPSDDGQARPALASTAAVAFPECPADYQDYTPCTDPKRWRRYGNYRLSFMERHCPPPPDRHHVPQRRRRVRGPDAGPGPGHARRHRPHRARHRLRRRQLGRRPAGAGHPHRVAGAQGQPRGPGAVRAGARHPGHPRHHLHAAPAVPVRRLRHGALLALPHPLDRVRRPLPPGDPPRPPPGRLLGALRPARQLREPLARLEHHRAGAEGRPGQAQEDAGQHVLQALQHEGGHRRVAEVRRRLLRQAHPGHHARQVRRQRRPRRRLVRAHALLRHGSQPQVQEAGAQRHAQVAPEAQRRPGAHQRRPGQQRRRLQAGRRPVEAQGQALQDAAAGAGERQDQERHGHEHRVRRIRRQPHQGPRLGHERRLLLRPKLPRRRLRQRAHRRQPRLV

SEQ ID NO: 60317 - protein, 248 aa, Zea Mays
MAEEMAQAQPRLTAPRSVRCIVKLGGAAITNKGELESINEENLRSACAQLRHAMSESDGDGAMEKVLGMDWSRKPGDPVDPAVDAEWIAGIARLGLDTNFVVVHGAGSFGHFQASRSGVHKGGLHSTLVKAGFVATRISVTSLNQEIVRALAREGIPSVGMSPFACGWSTQQRKLASANASQIFQSLHAGFVPVLHGDAVLDELLDCTILSGDVIIRHLAQLLSPKYVVFLMSMECMIALQLTQMQYF

SEQ ID NO: 60318 - protein, 1180 aa, Zea Mays
MVFKGRFFSSRHKSSESSSSPDGSNSPRTPTSAPASASAASPASSSSSRSDKKKTKSETPKKRDKLFGSAATAPKSAASSASSSPAGDGRKGSVPHHRDAGVGGGGGASAAALSPILASSLGLNRIKTRSGPLPQEGQRMAAVIGSSNLSRGQGQAEPSAASAGVGGRKGVTSWADTSSSSRGKGKTTELPMRSTAGTSLGPVGKSAVKAKPSAQRNHSGDLRTPTHIPEAACAYDPCETPKESESPRFKAIMQATSAPRKRLPADIKSFSHELNSKGVRPFPFLKPRGIYNLKEVIKVIHVRFEKAKEEVNSDLAVFAGDLVSVMEKYADSHPEWKDALEDLLILARTCCVMTPGEFWLQCEGIVQDLDDHRQELSMGVLKKLYTRMLFILTRCTRLLQFHKESGFAEDEVVIDQRDKIIQSADRQILTQSGVGDTTSRASKSEARKSYSQEQHNLKWKRSQEIKPVNLLPPLDTDVKKVADSPTKERISSWKPFPSPVTKVPKESTPTKLESPNKKTDAHSTVSSHVELSSPVESLPQQQLPVKHQHKTSWGHWSDQPNISEEGSIMCRICEEYVPTQYVEDHSRVCAIADRCDKKGVSVDERLIRVAEMLEKMVESYSPKDLPNAAVSPDVAKVSSSSINEESDGPSPKLSDWSRRGSADMLDYLQETDNTISLDDIKNLPSMTCKTRFGPKSDHGMATSSAGSMTPRSPLTPRSNHIDMLLAGKNAINESGDLPQIVELADIARCIANTPLDEESALSQMVTCIEDLQEIVNRRKHEALTVQTFGTRIEKLHREKYLQLCDSVDMDKVDSASTIMDEEDDVVRSLRASPVHPVKDRTSIDDFEIMKPISRGAFGRVFLAKKRTTGDLFAIKVLRKADMIRKNAVESILAERDILITVRNPFVLTDFGLSKVGLINSTDLSGPAVSGASLYGDDEPQMNELEQMDHRARRQNRSAVGTPDYLAPEILLGTGHGCSADWWSVGVILFELIVGIPPFNAEHPEAIFENIMNRKIPWPHVPEEMSFDAQDLIDRLLTEDPHQRLGANGASEVKQHPFFKDISWDTLARQKAAFVPSSDSAFDTSYFTSRYSWNQSDENIYEAYELEDSSDNGSLSGSSSCVSNQDDMGEDSTGLNEFESSANVNYSFSNFSFKNLSQLASINYDLLTKGLKDDPPPRTEM

SEQ ID NO: 60319 - protein, 178 aa, Zea Mays
MGHHHHMQQCMHKVHHNSRHQCHRVHTHTVLILCSHQTDSSNSNKNLLAAHLSHLPRFKIVLVASSPIQNRPILEICDKRHALCIREDTESPCPVQDSEPNSCSFCTMIHIDSLGPRLEVVTDELGRDYLIGGVQFLDWIHVPVFGPLVQELFHLHVYSVHSYNGNRQISISFFGYCV

SEQ ID NO: 60320 - protein, 1049 aa, Zea Mays
MTSLSRELVFLILQFLDEEKFKETVHKLEQESGFYFNIKYFEDEVLNGNWDEVERYLGGFTKVDDNRYSMKIFFEIRKQKYLEALDKHDRSKAVEILVKDLKVFASFNEELFKEITQLLTLENFRENEQLSKYGDTKSARQIMLAELKKLIEANPLFRDKLQFPSLKTSRLRTLINQSLNWQHQLCKNPRPNPDIKTLFVDHSCGQPNGARAPSPANSPLLGSMPKPGGFPPLGAHGMNLPVNMLPVTYPQSHNYQQDDFHKAVARTLSQGSAPMSMDFHPLQQTLLLVGTNVGDIGLWDVGTKERLVVRNFKVWDLGKCTMTLQAALVKDPAVSVNRIIWSPDGTLFGVAYSRHIVQIYSYNGGDDIRQHLEIDAHVGGVNDIAFAHPNKQLCIITCGDDKTIKVWEATSGAKQFTFEGHEAPVYSVCPHYKENIQFIFSTALDGKIKAWLYDNLGSRVDYDAPGHWCTTMAYSADGSRLFSCGTSKDGESHLVEWNESEGAVKRTYQGFRKRSMGVVQFDTTRNRFLAAGDEFMIKIWDMDSTGLLTTIDADGGLTASPRIRFNKEGTLLAVSTADNGIKILANADGLRLLRTLENRSFDASRNASEAVTKPLINPLTAAANAAAASSSGAGAPSAITAMNGDSRSLVDVKPRIADESLDKSKVWKLMEITESSQCRSIKLADNMRTSKISRLIYTNSGLAILALTSSAVHLLWKWPRSDRNSGKATASVSPTLWQPPSGILMTNDTTDNNPEEAVHCFALSKNDSYVMSASGGKISLFNMMTFKTMTTFMPAPPAATFLAFHPQDNNIIAIGMDDSTIQIYNVRIDEVKSKLRGHSKRITGLAFSNVLNVLVSSGADAQLCVWNTDGWEKQKNRFLQIPSGRQSNILDTRVQFHQDQMHFLVVHETQIAIYETTKLEPVKQWPVRENSPPITHATFSCDSQLIYASFMDATVGIFNGSSLRLQCRILPASYLPPNISPSVHPVVVAAHPSEASQFALGLTDGGVFVLEPLESERKWGNPPPVENGSASNLSTPPPNGASSSDQPER

SEQ ID NO: 60321 - protein, 792 aa, Zea Mays
MAEGSSSHRRSAFSPGLAVLLSGDEAKISSQKSHLVSYHDEIGHQAVERTIEHIFDLPHKSVVRPPGPVDTGFVHSVVRNQARKFDLDWENCIRGYHRSVFIVDKGAGQRKVVLDDSSICGSFRNVRGPSLVESSAPFSSARANACVWKGKWMYEVTLETSGVQQLGWATLSCPFTDQKGVGDADDSYSFDGRRVTKWNNDPKPYGQPWAVGDVIGCCINLDAGEISFYRNGTSLGVAFDGIRSVEPKKGYYAAVSLSEGERCHLNFGSHPFRYPVDGFDPLEAPPRSWSFVTYLLRCLFRLLEVHNLEKSESAYFEKLRRVKKFAPLQELFGPISEGICAEIFSAIEASQGCLEYIAWGSLITLLLDVFRTREPHDFSCLDQVLDLFLRFPGCTSLFQELIVALSCMCKVAPLVLTECPYSGSYPFLALVCHLLRHKDVMCLWWKAEDFVFSFEGFLTRKIPNKQDLQCLVPSVWWPGSSEDEVSMTLTMTTLSDAIKKIEEMHRELCSLVICFIPPMSTPQPPGSVFRSFVQSLVLKARGGDHRMVVNGTFNNTVLVSLYTVILHLLSEGFSMDSAGSASSSKANFGNGVGFLHKGGKRKFPTQLFFRNDAYHSVIPRIGGPPSILMHHQFDAVENEVQWDEGCMNDEETRVTHTTAQKPCCCSVTDVAVGLRYKETAKYVPSTSKGSCKPMPERSPHVAAECNGRGLSDEIEDKPSTSAQSEIEYGYQSLHSLENMPMATQSSSETLKEEELLDVMLLLYHLGISPNFRQADTRKIMLRASKAFERSPE

SEQ ID NO: 60322 - protein, 375 aa, Zea Mays
MLLLKKQQILFLACAGCHREIGHGRFLSCMGAVWHPECFRCHACSQPIYDYEFSMSGNHPYHKTCYKEQFHPKCDVCKQFIPTNMNGLIEYRAHPFWVQKYCPSHEMDGTPRCCSCERMEPRESKYVLLDDGRKLCLECLDSAVMDTNDCQPLYLEIQEFYEGLNMKVEQQVPLLLVERQALNEAMEGEKAGHHHLPETRGLCLSEEQTVSTILRPRMAGNKIMGMITEPYRLTRRCEVTAILILYGLPRLLTGSILAHEMMHAWLRLKGYRTLSPDVEEGICQVLAHMWIESEIMAGSGSSAASSSSGSSSSTSSKKGGRSQFEHRLGDFFKHQIETDTSMAYGDGFRTGNRAVLHYGLKRTLEHIRLTGTFPF

SEQ ID NO: 60323 - protein, 71 aa, Zea Mays
MAMATSASYPPPPPFYRLYKNFEQDPSSAPEPPPPIDEPFKALGVDYTTSRRSLGPSTESFNCIFWSWQIY

SEQ ID NO: 60324 - protein, 658 aa, Zea Mays
MDACVELAKSVGEMRTETELLPQCWEQINHQYEERRLLVAQSCGELAVYVRPEIRDSLILSIVQQLVEDAATVVREAATHNLALLLPMFPNLDKYYKVEELMFQLVCDPSGAVVEVALKELVPAVVRWGDKLDQISRVLLAHILASAQRCPPISGVEGTIDSHLRVLGEQERWNIGVLLRMLTELLPFIHQKAIQTCPFASADPTSSTPENFSASCLKSYATGDSEWSAFEWMHTDCLPDLIKLACLLPVKEDNLRTIITKYLLEVSGLYGKDYLEHIMLPVFLVAAGDIDSGDFTYFPLSIQPKVRGLRPKTSTAEKLAIMCVFPLLLSGILGSPSSRQQLEEYLRKVLIQNTKDGSFSMHHTTEIINAVRFLCLFVEHHSVIFNILWEMVASSDTSLKINAAALLRALVPYTDVKIASTHILPALVTLGSDQNLKVKYASIDAFGAVAQHFKNDMVVDKIRIQMDAFLEDGSHEASVSVIRALAVAVPHSTDRLREYLLTKIFKMTCITPVGNDIERRRERANVLCEALRALDATDLPAMGIRDLLLPSIQNLLKDLDALDPAHKEALEIISRERSGGTLESISKVMGAHLGIASSVSSFFGENSLLTKKEGGEEHDPAGPTAPEQNLQAQPESTRFGRIMRSGFGDILRGQSKGQ

SEQ ID NO: 60325 - protein, 1049 aa, Zea Mays
MSTRDGGGGRRGGNAAAGRGGDGQGRGRGGGGRGGAGGRGGGGQWRAQGGAELGGGRGGAVGAARGGRGGVERGGHQSFHGARPVGGDRGGRGHYHHGVPAQVQPQWQVAAPPSTSRPTPAEVEELRGEVERKAAVAVPDAEAHEGPSSGTAHEPSAAPARVEAEQGTSLVVEADQAAQGRLPPSSSKALVFPARPGYGTLGRRCRVRANHFFVQVADKEIYHYDVVISPESQSRKRNRWILNELVKLHKNYLNGRLPVYDGRKGLFTAGPLPFKTKEFVLELTNPERANQGAKEYSVTIKDAAKLDLYSLRQFLAGRQRELPQDTVQALDIAMRECPTEKYVSISRSFFSQSFGHGGDIGSGVECWRGYYQSLRATQMGLSLNIDISATAFYKAQPILEFALEYLNIRDTSRRLSDQDRLKLKKVLKGVRVVATHRRDIAIHYKITGITSLPLNSLTFNQDGASVSVVQYFKHQYNYSLKHIHWPCLQSGNDSRPTYLPMEVCSILGGQRYSRKLNEYQVTSILKKACERPPQREGSILEVVNRNDYGNDHCAKEFGIKVTNELALVDARVLPAPTLKYHDSGREKVCSPSVGQWNMNNKRLIDGVSIQYWACVTFASRLHPNDVRMFCNNLVGACNDMGMQINGRPCVDVGQARPDNLEAALRNTHRQSAQMLAQQGVTRQLDLLIVVLPDANASVFYGRIKRLCETELGLVTQCCQPKNVFKGGRQYLQNLALKINVKVGGRNTVLEDALNRRIHLLTDLPTIIFGADVTHPAPGEDASPSIAAVVASMDWPQVAKYRCLVSSQGHREEIITDLFTQVKDPQKGLINGGMIRELLVSFYKANGSRKPSRIIFYRDGVSEGQFSQVLLYEVDAIRKACASLEEGYLPPITFIVVQKRHHTRLFPEDHHAHGQMDRSGNILPGTVVDTKICHPSEFDFYLCSHSGIQGTSRPAHYHVLFDENKFTADALQTLTYKLCYTYARCTRSVSIVPPAYYAHLAAFRARHYMDDDLSDQGSSSVASSRMKDGAVPVKQLPKVMESVKQFMFYC

SEQ ID NO: 60326 - protein, 181 aa, Zea Mays
MVQFAKYGPNAEPIRKGRVKEGVEKSQDRSRSRSPRPRHRDRDHRSQSRSRSRERHVRDRDRGYRRRSRSRSRSLSSSPDNRSHHRARDDDKRKSMSKSRSRSRSTSRSRSYYSASPARHSASPRKSPPPQRSPTPAKHANGKVAPLSRCVSPLPKRATSRSPGSDGKKTAFSRSHGIAEP

SEQ ID NO: 60327 - protein, 217 aa, Zea Mays
MAASTTSRTNSRVNYSNEIHDLSTVQGGSAAAAAAALFYPDSKSIADIFPPHLGKKVISEVVATFLLVFVTCGAASIYGEDNARISQLGQSVAGGLIVTVMIYATGHISGAHMNPAVTLSFACFRHFPWIQVPFYWAAQFTGAMCAAFVLKAVLQPIAVIGTTTPSGPHWHALAIEIVVTFNMMFVTCAVATDSRAVGELAGLAVGSAVCITSIFAG

SEQ ID NO: 60328 - protein, 411 aa, Zea Mays
MVAITAPSSIEQIPLMRCPRANAVQQAGAAVPCVDLSAPGAGAAVADACRSVGFFRATNHGVPARVADALEARAMAFFALPAQEKLDMSGAARPLGYGSKSIGANGDVGWLEYLLLSVSANTVKISSLPPSLRAALEEYTAALREVCGRGAGADSGGAGRGAVPAARDGGGAGRQRRGGAGEPLPALPAAAAGGLRRDGVRGAHGPADHLRALVQPHCGPADQAPGRQVGPRAPHTGIPLRQRRRLAAGSDERAVKEREAPGGGAGAADRAAAAGDAGRGAEPVPGVHVGRVQARHVQDPPRRPPPRALRAARQHQRRQQARRARGGQRGPGALQRRQRLRHAAAAAGGAGALDYAGFGLDMVSSAKASSPPRLSCCCSLVHAPWSRSAPGSLSRSSDPSLLFNPYRVTEM

SEQ ID NO: 60329 - protein, 74 aa, Zea Mays
MDPEQHGDNMAGKGGAGQVYWSNAMSSFVLKYLSDLVASGTKTTSGFKQAHLNSCGRALYEKLGVQCWGLVLKC

SEQ ID NO: 60330 - protein, 495 aa, Zea Mays
MAHRGHLDGLTGQAPALMRHGSFAAGSLSSRSPLQSSSTLEMLENKLAMQTTEVEKLITENQRLASSHVVLRQDIVDTEKEMQMIRTHLGEVQTETDLQIRDLLERIRLMEVDIHSGNVVNKELHQMHMEAKRLITERQMLTLEIEDVTKELQKLSASGDNKSLPELLSELDRLRKEHHNLRSQFEFEKNTNVKQVEQMRTMEMNLITMTKQAEKLRVDVANAERRAQAAAAQAAAHAAGAQVTASQPGTAQATTVSAAAATDSYAGAYTSYPPAYQQGAQAGAYQQGAQAGVYQQGAQAGAYQQGAQAGAYQQGGQDGAYQQGAQAGAYQQGAQAGAYQQGAQAGAYQQGAQSGAYQQGAQAGAYQQGAQDGAYQQGAQDGAYQQGAQAGAYNYAYDAGTAYAYAGYSGYPVAGYAQSAVPNYSYAAPPQPTSSGAATNAAGGQYGAVGSAGYPTGQVQPSSGTANAAQAPPPPPPPAAPYPPSTYDQTRGAQR

SEQ ID NO: 60331 - protein, 2227 aa, Zea Mays
MKWSTLLSKVVFAGGQQQQPPPPPSPPPESPFHGQQAVQDLATPRLSSASTGGDEGGFDAAAGSSPSAAASSARGRNELESDFRRLWEEFRSSSSEKEKERALNLAVDVFCRLVKQYSSVAQLVTKLVEGHIFSFVIGRAFVTDVEKLRIHSKGRPLRVADVIGFFSDTTELGICPGSNLLYAVEVLVTETNDRQPLLDSGILCCLIYILNSLLSPNENSTDTLPVHQEGSRNEKNKNLDPMQSRRLEIEGSVIHIMKALASHQSAAPSLIEDDALQVLFHMVANGSLSVLSQFRDGIVPLHTIQLHRHAMQVLGLLLANDNGTSAKYIRKHQLIKVLLMAVKDFNPQSGDAAYTMGIVDLLLECVELSYRPESGAIRLREDIHNAHGYQFLVQFALTLCSLHKNQTLQSSSKLASEADASVPSHRLEQDIFSCDLSPQLSRLLDVLVNLSQIGPSENGGVSSPKALRGYHLLALFLHRRMSLFDMQSLDIFFRIAACEASFPEPQKSKINRTAGYASGMSPEASLDDLTLPRFADDMSSGGSHGDLDDFSAQKDSFSHLSELENADLAGETSEFIVLSNADMVEHILLDWTIWVAAPISVQITLLGFLERMVSMHWFRNHNLTMLRRINLVQHLLVTLQRGDVEIPVLEKLVVLLGVILEDGFLASELELVVRFIIMTFDPPELTPNRQIVREAMGKHVIVRNMLLEMLIDLQVTINAEELLEQWHKVVSSRLVTYFLDEAVHPTSMRWITTLLGVCLTSSTTFALKFRTSGGFQGLNHVLPSFHDSPEIYYILFCLVFGKPVYPRVPEVRMLDFHALMPSDGNYGELKFVDLLDTIIAMAKATFDSLIMKSMLAHENNNLSHLNGTLVADLVEATSDMGGDLQGEALMHKTYAARLMGGEAAAPAVATSILRFMVDLAKMCPPFSAVCRRHDFLESCIDLYFSCVRSDFALRMAKDLTTVATGEMNEHDDDNGSLKDALSSLPHDQDQSTKTLSATSFPQEQKSSSSESTGMPNPFETAEAKADDSSNQEFSNKILNGEANQIFNNARDQGRITASGANGISEFHHVTDSPNSVAMNNVGSPVLSERSTHRAASTPTASPMAPFTSWPGSAGSYTDGRHLTASPSMASSISGIDLDSSPDLRTNIQGPSAANTLFPINSKLLLDIDDLGYGGGPCSAGATAVLDFVAQILADTISDQLKAALFIENILESVPLFVDIDSALVFQGLCLSRLMNFLERKLLLDDEEDGKKLDKSRWSVNLDPLCWMIVDRVYMGCFPTPLRVLQTLEFLMSMLQLASKDGRVEDAVPPGKGILSIARGSRQLDPYIHAILKNTNRMIMYCFLPIFLKSMGEDDLLANLAFLTETGRSLASKRYQEDFSIDICTVLQLLVANKRLVLCPSNVDTDLMCCFCINLMSLLHDKRVTAQNLAVDLLKYLVVHRRQSLEDLLVCKPNQGQQLDILHGGLDKLVTGSTSTFFEWLQSSQQTISKVLDQCALIMWVQYITGSAKFPGVRIKGMEVRRKKEMGRKFRESAKVDARHWEQINERRYNLDLVRDVMSTELRAIRQDKYGWILHGESEWQSQLQELVHERGIFPMRQPSTEPEWQLCGVEGPYRMRKKLEHSKFKIDTIQNVLTSNLGSNGGKIINKEDGELLLTSGSDTMSGLNLLTYDTEQRDLDAVEFSSFKDDDDIFKGGSTISGPIGWTDDKSSVNEQSLHSATEFGAKSSSLSFHMTESHQGKSELSSPRRAPSVKGTDARTSEDKSEKELLDNGEYLIRPYLEPYEKIRHKYNCERVAGLDKHDGIFLIGELCLYIIENFYIDDSNCICEKGSEDELSVIDQALGVNKDIMGGSESQLKSPTTWGGTAKVLLGGRSWAYNGGAWGKEKLCNSSNLPHPWHMWKLDSVHELLKRDYQLRPVAIEIFSMDGCNELLVFHKKEREEVFKNLIAMNLPRNSMLDTTISASSKQESGEGSRLFKVMAKSFSKRWQSGEITNFQYLMHLNTLAGRGYSDLTQYPVFPWVLADYESDVLDLRNPQTFRRLDKPMGCQTEEGEEEFCKRYDSWDDPDVPKFHYGSHYSSAGIVLFYLLRLPPFSTENQKLQGGQFDHADRLFNSVKDTWVSAAGKSNTSDVKELIPEFYYLPEFLENRFNLDLGEKQSGEKVGDVVLPPWAKGSAREFIRKHREALESDYVSENLHHWIDLIFGYKQRGKLKMPSMSSITTHMKAMLT

SEQ ID NO: 60332 - protein, 542 aa, Zea Mays
MASGDLLLRAHAGAPVLARAFSCRLLVPARRRSGLISPLAASKVGIADVVGRVRSGGADQKRRRRDAKEGFGFSGVATRRELIDDEKVEQDEEDEALKLGVEKNGGETGGVDGSYLSETRFDQCAISPLSMKAVKDAGYERMTEVQEATLPIILQGKDVLAKAKTGTGKTVAFLLPAIEVLSTLPHQRGQLRPPINLLVMCPTRELANQVAVEARKLLRYHRTLGVQVVIGGTRLTQEQRSMQANPCQILVATPGRLKDHLENTPGFSTRLKGVKVLVLDEADRLLDMGFRRDIEKIIASIPRERQTLLFSATVPEEVRQISHVAMKKDYRFINTVKEGDEETHAQVSQMYMVAPLDLHFSILYDVLKKHVAEDADYKVIIFCTTAMVTKLVAEVLSQLKLNIREIHSRKSQSARTKVSDEFRKSKGLILVSSDVSARGVDYPDVTLVIQVGVPADREQYIHRLGRTGRKGKEGQGLLLLAPWEKYFLGAVKDLSIAESAVPPVDSSVETEKCGQKSRDEEQRMCLSSMVRVLQLEQDHWSR

SEQ ID NO: 60333 - protein, 167 aa, Zea Mays
MFGASSSLLSLIPRTCRWHRPSPSSSLTYAMSPPPHSGTTAPTRRSRTTLSAPSTPTSLRFPASHGAGARGRVDKARGEGHPSGRRRMLCLPRRWTQGTRARLPDARSTPRWRHLHARAGVLQGRLGGRRQARAVNGRRRSGYREGSSVDATSAPCGGGRAEGKSAN

SEQ ID NO: 60334 - protein, 136 aa, Zea Mays
MVPCIFGVKLTGKDLMEFIWQLDETDGSSDMPPAVLRILNFKACRGAIMFGDPLLPSECCLIIEELKATSLCFQCAHGRPTTVPILNIASLHDELARLQMLSGRKAETWHGLGHHEPSLERAHMRLERLRKLRRGL

SEQ ID NO: 60335 - protein, 187 aa, Zea Mays
MISGAPASGKGTQCRMIVEKYGLVHISTGDLLRAEVSSGTEIGKKAKEYMDNGKLVPDQVVTDMVVSRLSQPDIQERGWLLDGYPRSFSQAQHLENLKIRPNIFIVLEVPDDVLIDRCVGRRLDPVTGKIYHLKNYPPENEEISARLITRSDDTFEKVKSRLDTYKQNSEAILPTYSDLLNKVLVYS

SEQ ID NO: 60336 - protein, 111 aa, Zea Mays
MIGATSFFPYPQIFHLAVVPFALGAESMGRCCRPAGQYTATLRGHGRGRLMVVGGVDQVLVVGSKMEHGDEPYLARKVVSSLRPGPLRAMPADKLASRFKSIPKIGQGGLS

SEQ ID NO: 60337 - protein, 188 aa, Zea Mays
MPMGCRVRQWIFRNTTSVAIFCILFAALLWILWIIYKRRTLSNRAEQIYEQVCEILEDNAVNAEIDNSNSEVWVVTSWLRDHLLVPQERKNAFLWKKVEELIREDSRIDQYPKVIKGESKVVYEWQASGSLSAKIKKVQGARAKSRTGVGVIKFGEEMSASSLGEVREQGSCDLTREERSKDKVTCSD

SEQ ID NO: 60338 - protein, 61 aa, Zea Mays
MYSSYFHEVEGSYFGKFYKQTADMDPVQRAAFLEEDDEMEDAHSIAASAGDTNVNFTSLMD

SEQ ID NO: 60339 - protein, 181 aa, Zea Mays
MNTPSMSIGVSCSAAVDGVNGCLTYSTCRSRNYYYQYSHTTNLQISPVDQMPLPRKLKKSIQRNAYFLTQKRKLVPHCSSDLSTSCRGVPNYLSINVLQDQSNTKQGAIRKALVILNPNSGFRSSRDVFYQKVQSTLKASRWKSLKQHMPGMQRFFLLLLTSKNSLMVLYVLVAMGSSMRF

SEQ ID NO: 60340 - protein, 51 aa, Zea Mays
MHYTPPPPLVDLAPLQARLLTLKSTQAMGEAMKCVTKAMWQMTRQMNLLAL

SEQ ID NO: 60341 - protein, 56 aa, Zea Mays
MSGAPPCSTQCRCGPLQASRDGVSLRLLKFVSRGIKVQIHITRRFCAARMRQKSCW

SEQ ID NO: 60342 - protein, 161 aa, Zea Mays
MTLYLQLVSTSLHAGSPRLALLHLRRSCEFNPRVSMSSYSPPPPPPRDQSMDTEAPNAPITRERRLNPDLQEQLPKPYLARALEAVDPSHPQGTKGRDPRGMSVLQQHAAFFDRNGDGVIYPWETFQGLRAIGCGLTVSFAFSILINLFLSYPTQPVGRCR

SEQ ID NO: 60343 - protein, 202 aa, Zea Mays
MNMSQHVMKQVNFCLFSFMIRCLCTYSIQEKYEGAMASLAQMENRAVMAETMLEATIQYQSSQQKAQLPSPSPSPRTPTRDASPGQGNQDSSQEFQPRRISLLAPFSSLGWRDKNKGKQNGSDESTNGKLNNSTDQGVETPKKDDEKKADSPKESEQIVRTPERDNELRLGTPKMDSEVPSVEMAANSTNGLEDQLEEIKLD

SEQ ID NO: 60344 - protein, 547 aa, Zea Mays
MARAEQAQARRQVELAELQLEEVRRGAKAELDTVRERRTAALADLRAARAEVESLEKVRARAAAEAGAAVAREREAAAASREAGKAVEDLTAELVALKGELESSHAAHVAAEQKRMGLAVAWEEDKARWQMELEEAEQEAKGLREKLVVACDVETKAVAASQLMASLKAELFAYAVERTTLGQEEEATAISDRLMLEKTKKELDDVKASVEMAKHEAKCLRVAAASMRDELEKEKAGLTALRRKERERQGLSSASIPYLEEELRWVTAELAEARAKRGSDESEMAERVAEARREAEEAKAKARSAREKVARAKEVAGVAKAAVAAMEARLEAVTREILAANKSAETATASAGALLQESKPSSDKDVEAGVTVTLTVQEYAELSRRAQETEEAAGMRVVEAVKLIKEAKDAEVRRLEKVARLDKQTEQRRLALEAATLEAEEAEFDKLSAERELRQWRAEHEQRRAPGDTDSPRPGLAEISVLHDQGTGEGRGNPHIVSPRAGYMPRTELVMTGSAADADADADARQRKTFFPRIVMFFARKRTQSWK

SEQ ID NO: 60345 - protein, 79 aa, Zea Mays
MPLRRTTAQRAGSPKSSTLNKFKDYWHCSSLSAFLNQLHNILRIFENQVIMKKEDSCNILKKGLHLLMSTHILLKIGTR

SEQ ID NO: 60346 - protein, 60 aa, Zea Mays
MVEGSGASKQGVGVDCVGMGQRRAIAFPSVRLRAARFGGLGPYQFLRGGGATSDADMAGS

SEQ ID NO: 60347 - protein, 113 aa, Zea Mays
MGVDPSFGIGCLGKVNVVYKNDKDLMIKFYQFVAKEEMAIDEAELEPRELAEKLHAQQIMQEKQLNMLVEMRKYSRESQSVILGTLHKELEEANFDINASILSPEQMQEIVQK

SEQ ID NO: 60348 - protein, 387 aa, Zea Mays
MASSSPQLKEPSSAVKRASTGPTALPERNKRKTSPSLPEASGATQQPAKRKPPLFQRAWSPGDEVRILEALATYRREHGGRLPTPVELFGALDGSLEKEGVGAKELAIKQRSLKRRYDRDVMKNAPPADKHERRLYLLSKHVWGRVPPTRPPVAKVRSATQAKCAGAQASNAAAQAQAKSADRQSGKEALKPKAKTLDEMRELYPYLVDEATILVEPAVLERVLLNIEDIDAQVLDKKIRKARKQLAGAITESARINNMEMPTIFLFTSSKLQPEKLRVENDNNLLVDHLEKMDDVDICAKQRLARVEHEVMELRQTVIAYQAQAKGIICESAKSGLQSIVAENQTPANVLQKKTEVPNGLIHKKNAAVTSKYYCAVPHNVPPNKPA

SEQ ID NO: 60349 - protein, 158 aa, Zea Mays
MMQRLQCNVFMLSYRGYGESDGYPSQKGITYDAQAALDHLAQRNDIDTTRIVIFGRSLGGAVGAVLAKNNPDKVATLILENTFTSILDMAGIMLPFLRWFIGGSSSKGPKLLNCVVRSPWNTLDIVGEVSFWWFELTFCVSVLCFDYHFLIILVAVEH

SEQ ID NO: 60350 - protein, 381 aa, Zea Mays
MNCLKNSRSVLSRLLRHRPHVAAPPPPTPATAPQSPASRYYYYASRVKPAVSRPPPPPQLPRSRHYYTSPRRQQVVHFNRRRGGSRWYHDQRKLTAAVLISGGGAVAFYFGHLETVPYTNRSHLVVLSPKFERQLGESQFAQLKKEFGPKILPPLHPDSIRVRLIASEIVRAVHRGISVQQRHDAFYGEDASYGYGGIADDLSIKNRDADAAAALLGASPGKNASAAVAAQRDDELLDDRWVTESRSRGKARGAQPQTGHLDGVNWEVIVVKDDLVNAFCLPGGKIVVFTGLLNNFRADAEVATVVGHEVGHAIARHSAEQITKNLWVAILQIVILQFIYMPDLINTVSTLLLRLPFSRRRSVYLYIKKRERVTNRTHTTP

SEQ ID NO: 60351 - protein, 488 aa, Zea Mays
MVQLPGSKKRHAEMATAATVKAEVEGLGCGDGSPHKHVKPMPQPPPQPPPPEDLPFDVLDGPSPLGLRLRKSRSLVDLIQCKLFQDKSAHEQFDGHNNVSDTPMKKEVRSGAPTAGERMKASNFPANVLRIGSWEYISHYEGDLVAKCYFAKHKLVWEVLHNGLKSKIEIQWSDIIALKATCPENEQEGVLDLVLARPPLFFKETDPQPRKHTLWQAASDFTDGQASSKRRHILRCPSSLLSRNFEKLIQCDQRLRELSQQPAAILQNPGFEPKRSIFQNPNESKDCLDIGGLKFEHKATLPKFTAPLSTRVFSSLSNNVGRPINIGFGAGHFGGNVPEESKNCNQWNQLIVPGLEALQGDERSAGGPPLTTNDAISKKAWEDLVQHLFSDTPSLPALDDNNLTSRVDSLYSLLEKDTAPPAMRDPECSSDGGDIGAIQVDSDGFKGRLDPSPPGISRNDSLDELLLNLPKIASIPQFLFNRTEDSDE

SEQ ID NO: 60352 - protein, 220 aa, Zea Mays
MNQTTPAGGQQAVPAGPSYGLSHQEPTSAVTYGSHYAQLYSSSGTSSSNIQEYVFPERPGQPECEHYMKTGTCKYGAACKYHHPQYFSGPKSNCILSPLGLPLRPGSQRCAYYAHHGFCKFGPTCKFDHPMGTPNYSLPAPSLTDVPVAPYPHTFSVTPIAPYLLPPDPRPQYTLAKDPSAYPPQAPGTTYGPVGAISKVYARHTLIRSPTSGAAGMQAS

SEQ ID NO: 60353 - protein, 114 aa, Zea Mays
MMEALVWFLVLNLMRQVTDGGFQGRRNKLSDTCYAFWVGGVLKILGAYHLIDSCALRSFLLTCQSPYGGFTKFPDDRIPDIYHSYYGLAALSLLEEEGLEPLCVELGILSAAAL

SEQ ID NO: 60354 - protein, 66 aa, Zea Mays
MFPHLWMELRILKMKQRLRGSKEKGKIRRLKLIKVTNNRARKRRKIKRKRAKVMQYRFFVLSCFFM

SEQ ID NO: 60355 - protein, 277 aa, Zea Mays
MNNDAGRESCWPLARLRRGARSAHRVRRGGVHADDRAETDHLLALAAGAGRLSFFRCDLLDGAALLDAARGCSGVFHLASPCTVDPVKDPQNQLMVPAVEGTLNVVRAAKDAGGVRRVVVTSSISAVVPNPGWPAGEVVDERCWTDIDYCEKNGVWYPASKTLAEKAAWKFAEENGLDVVVVNPGTVLGPMIPPAINASMAMFCRLLQGCTEEYADFFLGPVHVEDVAMAHILVFESASASGRHLCVHSICHWSDFAAKVAELYPDYKVPKHCAVLL

SEQ ID NO: 60356 - protein, 62 aa, Zea Mays
MTVSTASIPVLHSAEVAHLYPQVMLPIYDGVVRAPYTSTKEARQGNTMRPLQSSTSFRKPAT

SEQ ID NO: 60357 - protein, 182 aa, Zea Mays
MEFAEMPFQACSICATRLWASCLLPAVFWCFYIAINLFEIYYGDDWEGLFEAITGYGLGGSLAVLVVVIADNVGDNVGDIVGMGSYLFGSYAESSCAALVVASISSFGINHQFTPMVYPLLVSSVGIIACLITTLFATDFFEIKAVSEIEPALKKQLIISTVVMTIGIALMLAWSSIHLHHL

SEQ ID NO: 60358 - protein, 293 aa, Zea Mays
MVASRWTGESVTEVSKDDKKGHEDQQEIPEPAEEALEDELEIPEPAEENYGGYHSEVEDDRRKYEDEEFYHESEDEYVDDHDEHVESYKSDDDQKDLTEPGHASWLDKVQQTVQNVFQKFNSFKTPVDLSEASHVRKEYDDASSKLSKIQSKISSLAEKLKHDFGNDKEFYSFYDQCFETKEGKYTYKVCAYKKASQAEGHSSTNLGRWDKFEDSYRVMHFSSGDKCWNGPDRSLKVRLRCGLSNELNDVDEPSRCEYVAVLSTPAVCVEEKLKELQNKLDAMSLKQPGHDEL

SEQ ID NO: 60359 - protein, 238 aa, Zea Mays
MFGKVCDEHEGYFVHEALSIAIDCLQLDIQMRPEMEHVLFRLRIIVARSKLAAGSNNKPSQHIGRALVNNIDKLHPTLISTISMEELNEATGNFSNDVLIGQGPYAECFLGVLKDGQNLAVKRLRTSEEIQVEVPTILRMCYHDNVVQFLGCFLEGGTRVLAYEYAPRGSLHDILHGKMGIKGARPGPPLSWLQRVKIAVSAAKGIEFLHEKVTLVFQYMMPIAGFIIGPSTILSGNI

SEQ ID NO: 60360 - protein, 127 aa, Zea Mays
MGESSSLAKCMDCRRSVAHLLPAHPRARRGAPPRACSPPGPPREGRQLGRGEGAVPAASSRLGGEGNGGGLGAWRARVLIGWLGEKRGEEGGKGGGGVERGGGGGMALSFSLSSFGEGRRRDPGGNR

SEQ ID NO: 60361 - protein, 600 aa, Zea Mays
MVGEESGCGVEGGTGGGEVPAASAPNGDRSGNSRLAVPSSSADDRGFHRSSTMPGVIKNDEITNESTGPSNLERSRTERRRQNNPTIDPAKQLLDERIPIKKKLKMLNRIATVKDDGTVVVDVPSGLEPTIVGGTEDIYTEAVEEALDGTEILYRPPMQIVILIVGTRGDVQPFVAIGKCLQDYGHRVRLATHANFKEFVLTAGLEFFPLGGDPKILAEYMVKNKGFLPSGPSEIPIQRKQMKEIIFSLLPACKEPDPDTGIPFNVDAIIANPPAYGHTHVAEALKVPIHIFFTMPWTPTNEFPHPLSRVKQPAGYRLSYQIVDSMIWLGIRDMINEFRKKKLKLRPVTYLSGSQGSGNDIPHGYIWSPHLVPKPKDWGPKIDVVGFCFLDLASNYVPPEPLVEWLEAGDKPIYVGFGSLPVQDPQKMTEIIVKALEITGQRGIINKGWGGLGTLSEPKDFVYLLDNCPHDWLFLHCKAVVHHGGAGTTAAGLKAACPTTIVPFFGDQPFWGDRVHARGLGPPPIPVDQFGLQKLVDAITFMMKPEAVELAKAMESEDGVTGAVRAFLRHLPSKAEEQSLPQSSGFLEFLGPLSKCLGCS

SEQ ID NO: 60362 - protein, 700 aa, Zea Mays
MSSKRRLRHLAIYVRKFLQMLLTKTKSIKYLQLLFRVNFSNDMERDYIMRVVCEATQSPDVKIRQAAFECLVAISSTYYDKLATYMRDIFNITAKAVKRDKESVALQAIEFWSSICDEEIDILDEYSSEFTADSDVPCYYFIKQALPALVPMLLETLLKQEEDQDLDEGAWNLAMAGGTCLGLVARTVGDDIVPLVMPFVEENITKSEWRQREAATYAFGSILEGPSADKLAPLVNVALGFMLSALMKDPSNHVKDTTAWTLGRIFEFLHGSALETPPIITAENCQQILTVLLHSMKDVPNVAEKACGALYFLAQGYVDSGSASPLSPFFQDIVQNLLMVTHREDAGESRLQTAAYETLNEVVRCSTEETAAIVMQLVPVIMVELHQTLEAEKLSTDEREKRSELQGLLCGCLQVIIQKLGGMESTKYSFLQYADQMMELFLRVFACRNATVHEEAMLAIGALAYAAGPNFAKYMAQFYQYLEMGLQNFEEYQVCAITVGVVGDLCRALEDKILPFCDGIMTQLLKDLSSNQLHRSVKPPIFSCFGDIALAIGENFEKYLIYAMPMLQSAADLSAHTTATDDEMLDYTNQLRSGILEAYSGILQGFKSSPKTQLLMSYAPHIIQFLDALYNGKDMDDAVMKTAIGVLGDLADTLGVHAGPLINQSTSTQAFLEECLASDDPLVKESADWARIAISRAVSG

SEQ ID NO: 60363 - protein, 53 aa, Zea Mays
MVPFKTADLVFKKPQDDGEKFIKLLRALEAYAEGSSVNPIIRRAAYLWNKLKS

SEQ ID NO: 60364 - protein, 717 aa, Zea Mays
MVAELLGCSIEDLNLALTKRHMKVNNENIVQKLTLAQATDTRDALAKSLYASLFEWLVEQINKSLSVGKRRTGRSISILDIYGFESFDKNSFEQFCINYANERLQQHFNRHLFKLEQEEYVEDGIDWAKVDFEDNQDCLSLFEKKPLGLLSLLDEESTFPNATDLTFANKLKQHLNSNSCFRGERDKGFAVRHYAGEVAYDTSGFLEKNRDLLHMDSIQLLAKCKTFLPKMFASKMLVQPDDSMSVPYRSSAADSQKLSVAMKFKGQLFQLMQRLESTTPHFIRCIKPNNLQLPAIYEQGLVLQQLKCCGVLEVVRISRSGYPTRMTHQKFARRYGFLLLEDVASQDPLSVSVAILHQFNILPEMYQVGYTKLFFRTGQIGKLEDTRNRTLHGILRVQSCFRGHQARHHARERIRGVLALQTFIRGEKARQIYSSLLRKHRAAVILQSNLRCWLARRYFINVRKASVIIQSGIRGSLVRRCNGNIDLINVLREFESKQEAEGDQILIKASVLAELQRRILKAEATVREKEEENETLHQRLQQYENRWLEYEQKMKAMEEMWQKQMRSLQSSLSVAKKSLALHETPRMSDSSVDQSWESNGNHVSSGSQLVPRTGGREMSAGLSVIGRLAEEFEQRSQVFADDAKFLVEVKSGQADASLNPDMELRRLKHNFDSWKKDFSGRIRETKMILNKLGNGNESSPNSVKRKWWGRLNTSKFS

SEQ ID NO: 60365 - protein, 112 aa, Zea Mays
MIITQIEFIYVYSYTSNHHRYIFIHIIYIHKHISIHIKYISTHTTSYKSSTSYIPSYTSSYYISGVVRCSVSLALLCACMPMGNNGPCKSIGLGPNQLTSRIRDLGFFLGLG

SEQ ID NO: 60366 - protein, 563 aa, Zea Mays
MKSSAVTTKGKAIFELKHKLVQAVNKIADRDTYQIGLDEIEKMADTLAPDMIGPFLSCVIDTDAEQKSAVRKECIKVIGTLARLHGNLLAPHMAKMVSSVVKRLKDTDSVVRDACVDTCGTLAMCARSYGDGGAALVTLVRPLFESLGEQNRYIQAGAALCLAKVIDESNYFPGPVLPQMLVRVVKLLKNPHFMAKPAAIDLIRSIIQAEGASTEQALSSALTSIMDALKSTDWNTRKAASLALSSIAVSSGYLVTSFRTSCLRSLERSKFDKVKPVRDTIIHAIQLWKAIPGSHTPEPSEAGSSTKENYFGDHHDARSIHDGGSRDTSFRRTDHGPSVSVISGSSLSSAKRRSPLSINKVAINNAANLQRMKTGDWRVEVSVPKQSMIPLVNNDEKGSSKACSLKDTKRNAYESVDVDSKFDYDIVDDKQECSSVSEVASRSFETKHVTTAQECTEDCDSAEVTEQCPRGRESKSIGSTITDVTTHDTHSCCLNTMNELALVRKQLQEMERKQANFFDLLQLSREHVSAKFEGAQLGECCRQNCIYNYSERKPVSSSWLQAF

SEQ ID NO: 60367 - protein, 528 aa, Zea Mays
MASLPKPPPPPRPKTRGNYNCGRCGQPKKGHVCVGPGPGPGGAASPSSSSGAGGEHGLRRALSFDEAGTPSSPEKKPKVEDVDEAELDEEATVDVGARAVSREVMAEVLHRLGPRGVMAAAGVSRGWRDCAGRVWRAAEELRLRVLASSGAGLLAALLPRCPALSRLHLRMESDVDGTTLACIAFSCPSLRTLEITMAADAVNRMTGEDLSRFVSEKSSLSALKIGGCSNLDILNLCSSSLSILWLSDLCSLSKSVMNCPNMSELSLCFTEHSSDCTNLITLMDGLGRTCPNLEKMHISSKQLSNEAVCALENANLRGLFMLSLILGSKITDAAVASIVRSCASLELLDLSGSSISDNGVGMICKAYPRTLSRLLLALCPNVTTRGIQLATAQLPCLQLMDCGMSLCANVKNEKEGPYFGEINGGIRIIRKLSILKRQPIHQKLIIKHGNLKKLSLWGCSALDALYLNCPELNDLNLNSCTNLHPERLLLQCPNLKNVYASGCQDMLIGAIRNQTLICKPQNLTDQLI

SEQ ID NO: 60368 - protein, 255 aa, Zea Mays
MALLRLLAISLLFAVATPVRDIAHDACSSEVKDFQHLNNSSGLHLTLHHPQSPCSPAPLPADLPFSAVLAHDGARVASLAARLAKTPSSRPTLLDESRAGSSSSSSPDDESSLASVPLGPGTSVGVGNYVTRMGLGVLHPGHVLPGPGGAAARARGHHGLRGRRGAQAGRQEPAGGRGQRHHVPGLRARPERRHHREHAAADVQRRLRRQEQQDRVRRRRLQLRSDTYIHAHAQTDSVTKTKTNSACMHLPSGFV

SEQ ID NO: 60369 - protein, 359 aa, Zea Mays
MGSNDPSTPSKASKASKQVLETVDQPPATTSSGTVSVYPEWPSFQAYQAIPPHGFFPPTVAANPQAHSYMWGAQPMVPPYGTPPPPYVMYPPGAVYAHPSTPPTMHPFSHYPMPTNGHAETPGTAPSAPEMNGKSEPGRTSAPSANGITSHSESGSESESEGSDANYENDSHSKDNDGKEDGNSQNSISYSASQGVLNQTMAMLPIQPGAMVGGVSSSTANLNIGVHYWEAPGSAAVSATHGKAPAGSARGDQWDERELKKQKRKQSNRESARRSRLRKQAECEELGQRAETLRSENSSLRAELERIRKEYEQLLSQNASLKEKLGGSSDPIPDMNEQNDGNGSDKKQSDSDAQPGSES

SEQ ID NO: 60370 - protein, 154 aa, Zea Mays
MGGLTPASSSPSRTTSPRRRPRAAAPAAALPPPWPRPSTSDGNFFLVDVPAFDTDADYQLDQIRAARQRFVPRKALNYLLDAAVTQRDAAEKAARTVPGMEMAALFLAYRRAVFSPIDNTYAQAFGVDPELALAAEQKAAAERAQRDQATIILM

SEQ ID NO: 60371 - protein, 813 aa, Zea Mays
MATTHREGLTAATSTTRVRERWRQGRKGMGEEVVAVGSRGRGGMRNDPNNIVHWIWSECNLFGGFSGGYGCVGDLVVFAKLQPPPPHVHVLTNRSHRLSLNINRLEELSTDYMDAERDIKPFVSPIMATTIQHRRSLHGPNASQPTALASEHDGTPVLPQTQPQAACVLNKAASEVSGDVSDQSISAYETLEGTSTRRPCSAPRLSRKFWGAGDYDAAAGRSTPQPLSLQNRMCVHPEFLHSNATSHKWPFGALAELLDNAVDEIETGGATTILLDKVTDKRNGSPAILIQDGNGFKTSTMRLGADVIVFSRCTKSSGPTQSIGLLSYTFLVETGHTDVVVPVVDYKCNLMKGQTQRLERHGSEQFFSNLSALLKWSPFATEEELMQNFCDIGPHGTKIIVFNLWSNDDGNLELDFDTDPEDIMISGAPNPEEIRNSVKRANENHLANRLRYSLRVYASVLYLQLPDYFRIILRGQEVKRHRIAADLIYPECISYKPHSCGIKEATVLTTIGFLKGAPTISVHGFNIYHKNRLILPFHRVLNTSSSKGRSVSGVLEVDFIKPTHDKQDFEKSQLFQKLINRLKEMTNEYWELYSDKIGYMKKPRVSAAPLPPPVMLPIANGTAEPSDRSAPAPTQPLRSHSNYLNAVPIASAPPGFHSAPVKAESVAPGAHMGYSPSSLNAQTMQVNGIKSPSMVPATDSVDTRKRRNDDTTTMTVAFKRKATQDLAGSSCATDETKQVSGYMGMGERETKEFCFLKMENRMLREECSDFVMAEKALRLKEQNLRLEIEKAREQFKSLLNEYVSLSATPTQKR

SEQ ID NO: 60372 - protein, 155 aa, Zea Mays
MARERREIKRIESAAARQVTFSKRRRGLFKKAEELSVLCDADVALIVFSSTGKLSQFASSSMNEIIDKYSTHSKNLGKAEQPSLDLNLEHSKYANLNEQLVEASLRLRQMRGEELEGLSVEELQQLEKNLESGLHRVLQTKDQQFLEQISDLEQK

SEQ ID NO: 60373 - protein, 468 aa, Zea Mays
MLLVMGNPGRSRQLSALVASAAILLSLSALPICRPYTYEQDVFAINGLYTALGAPQLPNWTSNGGDPCNEGWQGVSCVASNITSIILSGANLGGQLGNTLGNFTSLITLDLSNNNIGGTIPDGLPLTMQRFFLSANQLSGSLPSTLSSLTLLTSMSLNSNHLTGAIPDVFSALTGLANLDFSDNNLTGPLPPSMGNLTSLTSLHIQNNQISGTLNVLQDLPFQDLNVENNLFSGPVPVKLLNLPNFKKDGNPFNTSIAPSAQPPIAPTPLPSIPPSSGHVPSKEPAHSSSVPGGSTSGSGKHTTLKLVGYILIGVVLAVVLVLIAMYCLSKYKEKRSRDDIYMKNKIGRVPQKLGEPKIKEPPLKLKNDAEKAPNVVSDGREEHKLKVPTSETSNVVYDPSPRDGAELRFITDSRWHCGLKKSLSIPVYVQEGEEYLQLKRWNRRLLSSPFPLHPFNNIPIVSVRKIS

SEQ ID NO: 60374 - protein, 299 aa, Zea Mays
MVDYVLVLLLPFQEITICLSTLCSSWSGIVKVWSMPQITKVATLKGHTERATDVVFSPADDCLATASADRTAKLWKPDGSLLMSFDGHLDRLARLAFHPSGKYLGTASFDKTWRLWDINTGKELLLQEGHSRSVYGVSFHPDGSLAASCGLDAYARVWDLRSGRLFFTLKGHVKPVLGVSFSPNGYLVATGSEDNFCRIWDLRKRQMLYSIPAHKSIISHVKFEPQEGYYLATSSYDTKAALWSARDYKPIKSLVGHESKVTSLDISGDGQKIVTVSLDRTIKIWSCRSSTQDNEMELD

SEQ ID NO: 60375 - protein, 302 aa, Zea Mays
MSAAQLLRHSRKLRSLQNPVGCENFSFVRHFSSGSGSFIARENGIGKRTRGTRFSQHNQPAKQLETFSAGVNGSCTWRIASNSLTPSAASWLSGSFSCGQVVSARPFSSSADLPPHQEIGMPSLSPTMTEGNIAKWLKKEGDKVSPGEVLCEVETDKATVEMECMEEGYLAKIIHGDGAKEIKVGEVIAITVEEEGDIEKLKDYKPSSSAEPVAPAEPKAEPEPSQPKAEEKKPTQAPEAKTPKIEEASQSGDRIFASPLARKLAEDNNVPLSSVKGTGPDGRILKADIEDYLGYIMLWPHR

SEQ ID NO: 60376 - protein, 161 aa, Zea Mays
MQKKKNKHANVKSNHDTADAVVEFLSDSKYDAPLKLKKKSKKKKMESSGPAVVYESSVVTEDAGASKLKKKKRKVKGGKVSAGITDAEEILHENQIEETSALSEDVDNEEPQKLKRGKKMEVKKSGKAKKKDKHASRKDNNNLERHVDVSTANADENMRFH

SEQ ID NO: 60377 - protein, 357 aa, Zea Mays
MTLEALCPTSSDVLVYDTFNAAAACAAASAGTFLFGNAPPVEVPAAAAAQANGENSVQQGRRKRRRRQRSTKNAEDAESQRMTHIAVERNRRRQMNEYLAALRSLMPDSYVHRSDQASVVSGAIDFVKELEQQLQSLEAQKLALKRQLQQQQQRSVTAAIRDDAAQPARGRDDIGAGAGGDAAARSEVSAPEPDPPPFARFFRYPQYARRHAAAREDAGAEETSRASAVADVEVGVVVDAHASLRVMAPRRPGQLLRMVAGMQALGLAVLHLNVATAAVDATALYTLSLKVRRRRTLPDGWVASKATVPFSFRPRTRTNRRRQSLVACHTLARFLVPEMVLSPCSNMHFGHHRCHCP

SEQ ID NO: 60378 - protein, 1016 aa, Zea Mays
MFAKRLFHRALVHHHQGVGRGGGGGASAPAASPADAIQMDAQISTHCGVPYTASLLAFDPVQRLLAVATLDGRIKIFGGDNIEGLLISPKSVPYKFLQFITNQGLLVAISNENEIQVWNLEFRQLFYSSQWDVNITAFAVIERTFMMYLGDENGLLSVLKYDVDDGKLQIMPYNVHIHSLIERSGVSLQDPQPIVGILIQPDTFGTRLLIAYERGLLVLWDVSEDRAVSVRGYGDLRMKGQINGAQGDSGEDQLNTTIDDSEEEREICSLCWASREGSTVAVGYITGDILLWDMTTKSSRQEKQSDVSSNVVKLQLASGSRRLPVIVLHWSAGSAVHSNKGGHLFVYGGDDMGSEEVLTVLSLESTAGLESVRCMSRTDLKLDGSFADMILIPDTGVPDKSRTSALFILTNPGQLNFYDGGSLFSVQNSKEGTPLPEAQKFPVAIPTLDPNITVTGLYSLTESEFPNISLKKFCARKNAGHFISENMKWPLTGGVPNEMSLDEDHAVERIYIAGYQDGSVRIWDATFPVLMPMFVLDGNVADVNLDGANASVSSLAFCSLSMTLAVGTTSGLVRIYKLREHTGGSSFHFVSEFKQEVHVVHHGKGFHCYVAFLSANSSVLSLLFMASGGLLAAGYQNGQVAMLDPSQLSILFTVDGASGTNSPVVSLGIYSVAASAAKADQSKKDNPQNATLSRDVLLSLTKDARVTVLDCTTGVMINSHIIHQKQSSAISMYVIDAESDETQTQLSEDKIPSQGQTGKDGNDLDKIQTQGIEKHLKNASQLSQNGGSDSLLVVCCEDVLLLLSLASLIQGSSKHLQKTKLAKPCCWSAVFKNMDDKVCGLILAYQTGTIEMRFGPDLAIVAETSLMSLLRWSYKTGMEKSTSSSNGQVTLVNGSEFAIISLMASENDLRIPESLPCLHDKVLAAAAEAAMSFSTDQRRKQNPAAGIIGGFIKGMKGKAEENAKMRESLTLRAPSEQLESIFSKEPFAEPSIPDLDDPMEELSIGSLSPSLCIILY

SEQ ID NO: 60379 - protein, 87 aa, Zea Mays
MAHDEEVEDLGDLDSTLPDSVLPEASEVELAPPSDAGEGPSVTPTPTGAGEDPAPAPALTGEDASKVVGEPATEHPAAAAGPSQVAG

SEQ ID NO: 60380 - protein, 61 aa, Zea Mays
MQYLPMSIELFFFIYEFQPSTNIEGILVFLIQKNPINNSNNLGKQTELLRLYNPDYIILQK

SEQ ID NO: 60381 - protein, 458 aa, Zea Mays
MSSISILHRSCLRLGLLPFSPLRARATTLRLPLPLPQPRRHLHLPRRSAMSSAASRLSHIAAATGGGGGAAGESNESPPAASAATQEDDGLSSGDMGYRLPPKEIQDIVDAPPLPVLSFSPNKDKILFLKRRALPPLSDIAKPEEKLAGLRIDGNSNTRSRMSFYTGISIHKLLDDGTLGPEKEVHGYPVGARINFVTWSQDGRHISFSIRVDEEDSKSGKLRVWIADVESGEARPLFKSPEIYLNAIFDSFVWVNDCTLLVCTIPATRGDPPHKPSVPSGPKIQSNESKNVVQARTFQDLLKDEYDAKLFDYYATSQLVLASLDGTVKPIGPPAIYTSVDPSPDDKYIMLSSIHRPYSYIVPCGRFPKKVELWTVDGKFIRELCDLPLAEDIPITMSSVRKGKRSINWRPDKPSMLYWVETQDGGDAKVEVSPRDIVYMENAEPINVAPLGVMNLLL

SEQ ID NO: 60382 - protein, 405 aa, Zea Mays
MLPPSRREFQDIYVVFELMESDLHQVIRANDDLTPEHHQFFLYQLLRALKYIHAANVFHRDLKPKNILANSDCKLKICDFGLARASFNDAPSAIFWTDYVATRWYRAPELCGSFFSKYTPAIDIWSIGCIFAELLTGRPLFPGKNVVHQLDIITDLLGTPSSETLSRIRNEKARRYLSCMRKKYPVPFTHKFRHADPLALRLLERLLAFDPKDRPSAEEALADPYFASLANVEREPSRHPISKLEFEFERKKLAKDDVRELIYREILEYHPQMLEEYMKGGEQISFLYPSGVDRFKLQFAHLEEHYSKGERGSPLQRKHASLPRERVVVSKDGNTEQQINDQERSADSVARTTVSPPRSEDADMDDVKPTSLSSRSYLKSASISASKCVVVRNKHPEPEDVPKDI

SEQ ID NO: 60383 - protein, 125 aa, Zea Mays
MGDARKAVVEPAKEAGLKHVLLWYLKLLCRSHPFRKDKRCLFFWGGGGGKCYCGTSSTAKLEEFTHPAIASSLVRMLEYTGIILMLFMARFEHMDLPSLPLRDSLMSCFSWHELNDCVTVLWALA

SEQ ID NO: 60384 - protein, 103 aa, Zea Mays
MPRATSDAKLLIQSLGKAYAATPTNLKIIDLYVGFAVATALIQVAYMGLVGSFPFNSFLSGVLSCIGTAVLAVCLRIQVNKDNKEFKKGPLLILSYAIWCSTW

SEQ ID NO: 60385 - protein, 258 aa, Zea Mays
MLLLQRYEFKANHEEWVNTVKPKLGLDISTRVLQAVNFARENIKSLYAIRNELRVALKNLLKDTGILVLPTTAGYPLKRNSKERLSSGFEDRMYKFVGVAALSGCCEVTIPMENLDHHVSLSFVAAHGSDKFLLRNILDTYSLIQDQVVLASKLETAPVTNVDVDVNASELLKEKGNSAFKRRQWIKAIEFYSEAISLSDTNATYYCNRAAAYLELGRFKQAEADCDRALLLDRKVIDFCRCNIPVLLRVTCLKHCLP

SEQ ID NO: 60386 - protein, 358 aa, Zea Mays
MCAWERKLHDEERSVRGFGAEAIGNQLGVVPCGLRRRRKSETLRAQYIDVRELRICAGTWNVAGRLPPNDLDIQEWLDMEEPADIYVLGFQEIVPLNAGNIFGAEDNRPVAMWEHIIRETLNKISPDKPKYKSHSDPPSPSRFKPSDDAFVMEDELISESDSEGDGEVHPLNEQDLVDSVDGIHGNKCEPQTILQDEEFSRLPSVKTFDRSNNLSFKESNLEEKICQKILTKTFSHSERLGMIWPEPPLDMFAQCLPDSTKPFASGKVLRSYLSFKSVNGDSGPFAEDNSVPDFYMSCAAVKRKRPYFVRIISKQMVGVYLSIWVRRSLRKHIQSLKVSTVGVGAMGYIGNKKDCMAR

SEQ ID NO: 60387 - protein, 80 aa, Zea Mays
MHPASQLGPRGDDRASDVVSTTRCSRWTTQGRMDLTSGCSPSEYLPSKHYLSVKIKASPGFMHNRYICYFTALNVCRLVL

SEQ ID NO: 60388 - protein, 696 aa, Zea Mays
MANMDSVVVMEVAPVPIPTFMDATPLNPPLPLVVEELVLRRSARYLNRPTRPNYADQEPPKNPGGRGRGKRKRDEEKPELAAQQGTKTPGRNDSNVEAGERKPMPVTAAVPACCAGVAAEDDATPTGKSAKLRVKETLRAFNSHYLHFVQEEQKRAQAAIQEIEAKGGLKRQTKGGKKKSSKQEAEAEEKEKRPSKRPDLKAITKMQEMNAVLYQEKTIGHLPGLDVGDQFYSRAEMVVLGIHSHWLNGIDYMGMKYQGKKEYANLTFPLATCIVMSGIYEDDLDKADEIIYTGQGGNDLLGNHRQIGSQQLKRGNLALKNSRKNGNPVRVIRGHLSKNSYTGKVYTYDGLYKVVDDWVQNGVQGHVVFKFKLKRLEGQPSLTTSEVRFTRAEAPTTISELPGLVCDDISGGQENIPIPATNLVDDPPVPPSGFTYLKSLKIPKDIKIPSSIIGCDCEGDCASNKNCSCAQRNGSDLPYVSYKNIGRLVEPKAVVFECGANCSCNHDCVNRTSQQGLQYHLEVFKTASKGWGVRTWDTILPGAPICEYTGVLRRTEDLDGSQNNYCFDIDCLQTMKGLDGREKRAGSEMHLPNLYPENDSDAPPAPEYCIDGSSIGNFARFINHSCQPNLFVQCVMSSHNDVKLAKVMLFAADTILPLQELSYDYGYRLDSVVGPDGKIVKLPCHCGAPDCRKRLY

SEQ ID NO: 60389 - protein, 197 aa, Zea Mays
MFIRLKPLTTFPTRYGFYDECLRKYGNANVWKYFTDLFDYLPLTALIENQIFCLHGGLSPSLDTLDNVRSLDRIQEVPHEGPMCDLLWSDPDDRCGWGISPRGAGYTFGQDIAQQFNHTNGLSLISRAHQLVMEGFNWCQDKNVVTVFSAPNYCYRCGNMAAILEIGENMDQNFLQFDPAPRQIEPDMTRKTPDYFL

SEQ ID NO: 60390 - protein, 353 aa, Zea Mays
MERLGGPRPHHPLALLLLLGYYYAAAAQADASIQPHCCQSATTIYCRPLITATGPASKRQPGEGSRGLGQEAMSGDRSSTAERRRGIRRLLLHPRGEASSPPPPPPAPAPEEGRRKGFASAALRGLGCTSAAASKAYAPGAAAAAALRSSADWHGRRRRRGKDRRKERGGGGAGAGGGLVTGGIGADVWCAPGIPFAAEASSVDCVVARHQTVGRGGRGAEGERSHREIMMFQTRVLLGGMNMYDRYQDWRLDVDNMTYEELVELGDRIGYVNTGLREDEIARSLRKAKHPSFGSLRFAAEVERKCTICQEEFQSNEEMGRLVCGHSYHVLCIKQWLSQKNTCPVCKTAVSKN

SEQ ID NO: 60391 - protein, 64 aa, Zea Mays
MGAPSPTLSTPATTTPPPEPSWSCIFPVVKDGEGPIMCISLVSSCYDEEIWIQYLIFHLFLNIC

SEQ ID NO: 60392 - protein, 669 aa, Zea Mays
MGSSGDIAVVLRKLIDSGKISVSDIASEVGISSESLEAALVGETTTFSHGLTLKIMKWLQNYVQMHSAQGDVCKGSSEVVQESKSDRLVTTDTVDVKNPLVLDDDKGVGVLVDLLDSSVTEPAQTRSESNSKILNENSATCATGVTILQNGKKNMVKEGYNPECSAKEFANESTQDFSPISNKYVLKDEHGILILNATSGNKEFGTSTEIPNENQGALRGRKINDLTDVELGPCLEKGVSSHDHCFVRGDNGRDRVDSVENSFNARDCDSNCSHGQPFFNFDDSHSYIHPFIQKKISHHWDITFNQNKEALNHYIQESSYPSLEKVPTDSSVEVEGTADTTATGQVLKARSLKILEHSPDDEVEGEMVYLQSRLLDNAVVLKHRYEKLIAMVVQNLSRELDALSKRKWDLIFVNQFLRDVREAKKRGRKEKRHKEAQAVLAAAAAAIASSSRNSTVRKDAKEDAPKSSPKLAAGSSRVGQRTSLPQANDSSKSSNSKISSDKKSGSFLLPISSKENGLYCDVCMRTETLLNRIFVCYRCKAAVHINCYRNLENSIGPWNCELCEDQDISSEAATVSDKSHCNGKKLPFAQCGMCHGTSGAFRKTVDGKWVHAFCAEWLLDTKYVRGQDKPVEGTESLVEGKDTCCVCLHNVGVCLRQWGLQHYISSYLR

SEQ ID NO: 60393 - protein, 458 aa, Zea Mays
MESRRGGSGAAAEDAGGAMPSFGPTQHAIRAGADVNSMQPSRVTDFGALAQSAGFRIEDLANLNANALFNLKPNSHTIDNSPLQFGNYGKSISPHINTTEATTAATRIDPQLSAQQTGAQPILVALPTGNMENWGESAMAGSPMTDTSTDPDTDERNQMFEQGLVAVPTASDSSDKSRDKLDQKTLRRLAQNREAARKSRLRKKAYIQNLESSRLKLTQLEQELQRARQQGIFISTSGDQPQSTSGNGALAFDMEYARWLEEHNKHVNELRAAVNAHAGDNDLRCIVDSIMVHYDEIFKLKGVAAKADVFHVLSGMWKTPAERCFMWLGGFRSSELLKLLAGHLEPLTDQQLVGISNLQQSSQQAEDALSQGMEALQQSLAETLASGSLGPAGPSGNVANYMGQMAMAMGKLGTLENFLRQADNLRLQTLQQMQRILTTRQSARALLAISQYHRREAL

SEQ ID NO: 60394 - protein, 170 aa, Zea Mays
MLGGLSKQYCLVTRPLTSPAQNILTKWSLVMQWASYLVARSLLLVLHPWMKMLVMLAHFWHSTWDCLFLALNYLFKEKGSLSSSVLELKRWMQLPVLEINSSFGGSEYQDMVDQALNEYFKFDRFLARGDVFGIQNSWKCGSSCCLACNKQDNKLNPRNMIYFKYHCTVK

SEQ ID NO: 60395 - protein, 337 aa, Zea Mays
MKALGAHAADLLRGPHLLRAAVFAFAVALAFLVGYHWPNASPRLVFFSSDASSSSPRSSSRSPSVVLSPNSNVSFDPSLIPTPSTPPASSTPNAWSPPALPPPTSAPPPPLPPPPPPARLGIVGEDGAMQDDFDIGNVGANDTDLATDETAPQEPSDVGASGGPPRVRIERFPVCPESMREYIPCLDNEDDIKRLPSTERGERFERHCPAKDKGLSCLVPAPNGYKAPIPWPRSRDEVWFSNVPHTRLIDDKGGQNWITKVKDKFRFPGGGTQFIHGANQYLDQISQMVSCSWRLIDCLELEATLLGQPNLFISMKRPNKRHGKRWRTSLPDFAGSL

SEQ ID NO: 60396 - protein, 4165 aa, Zea Mays
MATEDEEREAADGTEVPVEAVVLGTFHLHAHPEGKLSSLMDIKSMGETIDSTEGTLKIPEDQVLVEAPSDVQLPPEHNLNGEASSLNGHTDKEEKVSVEQPHDNDQEEAELDQNNRINKEDAADGLSHGESTTEDSCLLKHKKDEESKGDEQQDLGVTVDDDLVQEDTLKTDNAIEQTDDGQQDQDQEPEKANENTEPASIANNDDVEIVAETPTGLQAPVESRMNDSDGIPETIDEETETDEPAQADGVVHPEDVAKVEDQQSQQDDTVDADVAPEEVKCEETDQQEEKPKSEAHEPTIDTREALNQEPAEETDDSMNKKIEETAHQRNMAAPKETTLEHEATMSATPVNTQVQDQEPLEEIEDTEKGIQPSSGSGDAIPEDQSNLSVTIDNDTVNEDTVIGIEQQDDGQQDEDLEPEKATEDTQPASMTNIPQVEVVTEASSGVQTPGDLNLNNSDAVPDTIDANTETDEPSKAHSVVHPEKKERFLEDATTEEPTEEVVKVEAQQSQQADVMDANMVQEEVPKSEHADEPATDAFEVLNQESVDEPAIQAPVTIQVQNQEPLEEIELAEAVDTEATVQQSSAAFEESVPEHQCNLGATHNTEQEDTLEASGQSKGGQEYQDLGPENATENTQQASMTNILDVEVITETPSGIQTPMEINLVISDAIPDATDGNTETDEPAKAHTFVHPEKNEVFPENTFTTKPTAEVVKVEDQQNQQDDAMDAEVVLEEVPKSERADEPATDALEVLESVEETDDPMNEKTEETTQQSNIPASEETTAEYDATREPPANNQVQNKEPVDERESTVEEREVAEAVDTEAPVQQSSVAFDEAVPEEHHNLGVANNTVQEDTMEATGQTQEGQQYQDLGPENAAENTQPASTENIPDVEVITKAPSEIQSPVEINLDISDAIPDTNDGNTETDEPAKANTVARPDTEESFAEDTSTGPTEEVVTLEDQQSQQVDAKDADVVQEEVPTSEHTDEPATDAVEALNQESDEETDGPVYENTEETTHQSNMPASEETLPENDVTTREPSVTIQAQNQESLEEREVHEAVDTEATVQPSSASFEESVPEHQHNLGATNDTVQQDTLEATKQTKGGQQYQDLGPENATENTQPASMANIPDVDVITKASSGIQTPVEINRDISDAIPDATDGSTETTEPAKAHSIIHPEKKESFQEDTSTAEPTEEVIKVEDRQSQQAEAMDADVVQEDVPKSEHADEPTADALEVLNQESIEETNSPVNEETEEATNQSNMPASEETIPKYDAATRDQPVNIQAQNQEPVDEGEATVEEREVAEAVHTEAPVQQSSVAFEEAVPEDQHNLGVANNTVQEDMMEATGQTKEGQRYQDLGPENAIENTQPASTANIPEVEVITEAPSGFQTPVEINLDISDAIADTTDGNTGTDELVKAEGVIHPENKESFLEDTSTTEPLEEVANVEDQHSQQADAMDADVVQEEVPKSKADEPATDTLEVLNQEYAEETSGPANEKIEETANQSNMLTSEETVPEYDTATRDPPVNIQAQNQESLEEREATVAENEVAEAVDTEAPVQQSSVALEDAVPEDQHNLGATNNTAQEDTQDAIGQTKEGQQFHDLGPENATENTQPASMANIADVDVTTEAPSGIQTPVEINLDISDAIPDTTDGNTETDKLVKTEGVIHPEKKESFPEDTSTAEPTEEVANVEDQQSQRADAMDADVVDEEVPKSEHADEPATDALEVLNQDYAEETNDPVNEKTEETGNQSNMPPSEETTPEYDTTTREPPVNIQAQNQESLEEREATVEESEVAEAVDTEAPVQQSSVALEDAVPEDQYNLIATNNTVQEDTQEAIGQTKEGQQYHDLGPENATENTEPASTANTPDVDVITEAPSGIQTSIEINLDISDAIPDTTDGNAKTDELVKVDGVILPDHKESFSEDTCVVEPTEEMIEVDQLGQQADAIHAEVLQEEVPEMIEVDQLGQQADVIHAEVLQEEVHKSEQSDEPGVDAQEVLNQESAEETDGLVNVKTDETEHKSNMVVPDDTIPEHDAQTREPPVNIQEQSRESVGDAEAVNTEAEMQQNSVAFEETTPENHVATSEPCSEIQHAHHVEPEEINGPEDGKDDEITNMSSREYLVRDNVLQSGPIIDIQPVQELEQIKTDEASNQTHAVIFNDLAQEDATATSEPQVTETELKDIEATEAEEITKLDHVTHSKELAVENDSTADEPHKGEIHQTLEQDLVEVKDTGTYHEKTISTSEDTVQDNLTEDEPSFGSQEVDDAESTEETKQNIAENIAEVSDVAIVDDAIEQNVLQTEDIVEMHKQELEREETERIEPVESEEASDQRNDAPFDYSAREDNTKESEIQQTESATETNEIEPTEIEAVPRESNTCVSEEPSQEDHIKESETSFDNQEVNITESSEVNDSHKDIISGGISDPSNTASAGDSSEGSNVPEGEPPEQAVQELGSEEIKNTQIDEVNETSLEMNATVFQIPSQEENPDTTKLHESTEVSNIEATEMHGNPHQSDLAAQSEEQTTEGISSGLKPESIEGNDTEAKKCQSTSQEKTISASESVPEDATTEPDVDHQQLQDQESAKLKETEADKFQEIVSSNTLSSEEFTSTEPSSDTEADNSQLAEETEDTEIVKSNTALAEAAAPETDATADTSSFHETDLEENKDTGTIETEDGMVSSDYTSEKMDTETMETEAVPHDSSDANIKEHTEDDTSTPNAPHAGTEPVHELESVEVSADTTEHPGETHDSASDELTPTEENTAVTEPSFSTQEVQNLTSQEIKDSEDDKTDEFSDINSFPIPGEADQVPRSETTPDVQEVEELGLTEETRDIEAIEPGDQQEDIVSTLEKPEIDGEPSADNQQVHEDKLPEVEDNKAIEAEASKQSNIATPDNAAEERNELESDPDPYAQPAEQVELSKDNENSQLVKTEETSDQSNFVVLRRTTEDSVAREIDPPVAIKQEQPVEEIKGVDATEAEEDFRTTQAVAIEKLASVNKIATVEPTYDIQRMDDLEATEEKKHAEAINEGDQSNIAVSEEQTPTYNGETPEDHHVESNEGTMGNETDNIILAHGIKDEIQKSAELKDGPCDLSETVLTTRRSENMIDEDNVQTYGNDTVEASNSIHQVKEEPDAGTEHNSSQMISECSGENETHVQDRDVDMWILTEGVIAEASQALLENDPQAAQDTIEKDDTTKSSEPISDHDSRQHCDVEALQQQSCETEALSILEQDEALQKIDSDQKQKEVEEIESQNDELQVDEQKHEDKRDDLAKEPLVEYQNFENRASNNTKDNDAFKDPVHIIQASEKEIADEIEESKEIHEDNAICHDKLQTNSEKEESPQPHSNEPYNVDAKIDDTTSLCEEIIHDNTSINPREIEEIGENKGPDFTSEPSVESSIQNNVEDSSSHHKVEDEKLSMSEKNDVDTEAMQEINDESGADINQTEQCQEEITADDVLQLETEGNSFDKIEETASNEETETSTAATEAVTFNEDITDKVSGADGAPSNGSLKTFTDTGRDIDVPLVITTSKEESVNDTMENLNLDLPGHQAQDGNTAEKVLSLEEREREMPSSEKLLQTEPGENQIPNEQDEKDIRDENQTLKEKDEDDMQDTEFGEAKKEVQQELPVSHFLMNLILGKESSDANEDSESEAARKQGEATEDDSCTFISEQEESLGSLPTENKVDDNPTFVEQEKHEVKCSEETQEMVEEQSDDQLHTERSIEIDEDIKKNTRALEIPAYQDNPQDGISGELQTEEAAGVSTKMVTRDIDISSVVLDNRTVGTVCQEKMEVSTKNENGSLRSSLNDSTNTMAPQDDTLGEGQSRLVLEPLPEDKSVDVVSEQAPLLTESGMTDANDLSSDTTSAQNPVSTKPTESARVEATYSTDIQLENEEVDKKEEDQHANTTKDEVSKEIVESSHINLQKITRPEEKSNELETQITEPVCDSQAILAHEKEISEENFPTAVEIQADGPNMQINQDKQDEAADIETEMKPEKLGESNFQEHQDNGTEQKSPKETDEGDQQLVAKKEILTQEMDVHETVERPQQAVESPQQTVSITSNEDQELFDSKVQERDLNVVSPREASEAEENFVDVTKPEFSTDEEQSPKADAEEKIYDEKIKDIEGTKNLTDEAAIKTEAPGAAQKTRKKYSLLSGVGSKVKHQLAKVKKAIVGKPGHTKPVSPTA

SEQ ID NO: 60397 - protein, 830 aa, Zea Mays
MQDSHWALLFDGSKYAERLPIGTEKVIRTVTHETVKRFYQKWYHLSNMAVFAVGDFPDTQAVVELINEHFGHKAPAPHPPPVIPEFSVPSHEEPRFSCFVESEAAGSAVVISCKMPAGGIKTVKDYKDSLAESMFHCALNQRLFKISRRKDPPYFSCSSAADALVCPVKAYIMTSSCRERGTVEALESMLLEVARVRLHGFSDREISIVRALMMSEMESAYLERDQMQSTSLRDEFLQHFLREEPVVGIEYEAQLQKTLLPHISSAEVAKFAENFSTASSCVIKIVEPRAHASLEDLKAVVLKVNSMEEDKSIFPWDEEQIPEEIVAQAPEPGTIIAKVEHPGIGATEMILSNGMRICYKYTDFLDDQVVFTGFAYGGLSELSEAEYTSCSMGSTIAGEIGTFGYRPSVLMDMLAGKRAEVGTKVGAYMRTFSGDCSPSDLETALQLVYQLFTTNVEPREEEVKIVMQMAEEAIYAQERDPYTAFANRVREINYGNSYFFKPIRISDLKKVDPIRACEYFNNCFKDPSAFTVVIVGKIDPAISLPLVLQYLGGIPRVQDATQPLSRDDLRGLPFKFPATIIREVVRSPMVEAQCFVQLAFPVVLKNTMMTEDIHYVGFLSKLLETKIMQVLRFKYGQIYSVNVAVFLGGNKPSRTGDVRGDISVNFSCDPDISSKLVDFVLEEISCLQTEGPSEEDVLSILEIEQRAHENGLQENYFWLDRILRSYQSRLFSGDIGSTFAFQEEGRIKVRDALTPQSMQSALQRVIPFPCRKQYTVVILMPKSSCWASVKSMLSWSSNGVSRDAKILAGMAGALVLAVSLWRYSRSSLKS

SEQ ID NO: 60398 - protein, 1736 aa, Zea Mays
MEDPNKTFSDVVKLLTSWLPRRSNPDNVSRDFWMPDHSCRVCYDCDSQFTIFNRRHHCRRCGRIFCGKCTANSIPVSSGPDRNVDEGDRIRVCNFCFKQWEQERVTSLKPVLPVLTPSLSETSLFSTKSAITINSVTTTAGSYSNGNYQHVSCVTSTSPPKCCHDKTSHNMQDTHAPEKCMSTVSNKDDSSVQFGYYTNRSDDEDEEYPAYCSDRQVQHQQQSGQYYGPDEFYELDTPYNSKMSIVEESMTSKELSPHVLDQGFPSAPTITKSDNEPEHYYSSECGAASSIYALESNDTNPVDFEKDELFWLPPEPEDEEDELQAELFNDDDGDDDDDKSVADGEWCRIRSSSSFGSGEFRSRDRSGEEHKKVMKNVVDGHFRALISQLLEVENIPLHEGDDMGWLEIVTSVSWEAANFLRPDTSQGGGMDPGGYVKVKCLACGHRNESTVVKGVVCKKNVAHRRMTTRIEKPRLLLLAGALEYHRVTNQLSSIDTLLQQETDHLKMAVAKIVAQRPNLLLVENSVSRYAQDLLLEKNISLVLNIKQPLLQRIARCTGAQIVPSIDLLPSQKLGYCELFHVDKYDEQSVSSVNVSKKMVKTMMFFEGCPKPLGCTVLLKGGSMDELKKIKHVVQYGIFAAYHLALETSFLADEGATLPELPLLSPLTVALPDKRSTADSSISAVPGFTINVSISQQTDSFDHIGTDYIMSTQPGENAVAEAPVSSECFSSQNTYSHSLGPWCANNSNFNNGTGDGDGLANVTATPNSVSISSLSTSGALTNHTSRYSSVEKNSMHFGDYHDGSMRLHGKTVTIDSTSTASHYHQSTVKASTNINVNESLEGPYALANVKTINENNSIVVQPVSTAAVQYQETSQGDDSTSNKDEVVPSDHQSILVSLSTRCVWKGTICERSQLLRIKYYGNFDKPLGRFLRDYLFDQGYQCRSCDKPPEAHVHCYTHRQGSLTISVRKLTEFVLTGERDGKIWMWHRCLKCPWSNGFPPATQRIVMSDAAWGLSLGKFLELSFSNHAAASRVASCGHSLHRDCLRFYGFGKMVACFRYAPISVHSVHLPPHKLDFGHQPLDWIQKEANEVIERAKHLFDEVLHALHMISDKKVQGSSINMEFSNYIADLEIMLRKEKSEFEGCLNKVLRRDMQKGQPDILEINRLRRQLLFHSYLWDKRLVFGARSDRCRHEKTHSIDSVAEQNVILKPQSECSGNRSANKDAKYVECLQESIYGGNHTGVDVGTVNSNHVHQMATGELDSLQRDIKAPLYSSVSVNGESIPLEPDLVARRTLSEGQFPSVLDVTNALEAKWTGKDDPVSSKVTMPESTASSEDSEEHMGDNTPSYASILLSKLGDSAADHSNWIEMPFLLFYRSLNKQWNRSNRFDALNEYSPEYVPFLREVERHIGPKFFFPIGISDTVVGVYDDEPTSIISYALASHEYHLQMSDELEREMTDTSLPLCDSRSVSLTELDECTSELLRSVVSTEDIILSMSGRKNPLASDSLVPRKVSHIKVNFGDEGPLGQVKYTVICYYAKQFDALRRLCCPSERDFVRSLSRCKKWGAQGGKSNVFFAKTMDDRFIIKQVTKTELESFMKFAPDYFKYVSESICTGSPTCIAKILGIYQVKSLKGGKEMRMDVLLMENLLFERDVTTLYDLKGSARSRYNPDSNGSDKVLLDQNLIEAMPTSPIFVGNKAKRLLERAVWNDTSFLADLTDRNRHTRPASGSIDLLVLSSS

SEQ ID NO: 60399 - protein, 940 aa, Zea Mays
MAEIAERAVAGEVPEEPRPPHGEEDDEGEEEGDVCRICRNHGDEDHPLRYPCACSGSIKFVHQDCLLQWLDHSNSRQCEVCKHAFSFSPVYADNAPTRLPFQELMVGVGMKACHVFQFILRLAFVLSVWLMIIPFITYWIWRLTFVRSLSEAQRLFLSHISAQLILSDCLHGFLLSAIIVLIFLGATSLRDYIRHLRELGGHDAERDDGGRERHGARAVRRLAGPNNRVPADGNVDELAEAQGIGAGELLRRNAENVAARLERLEAQVEQMLDGLDDADGAEDVPFDELVGMQGPVFHLVENAITVLASNAIFLIVVIFVPFSLGRIILYYLSWFFSSASTPMLAKVMPFTETAISIANDTLKSALNVVKNFSSDSNNEGVIGHVIEVVTQSLKINATGLSVIQGTGKNSLMKGTTIASSYLSDLTTLAVGYMFIFCLVFLYIGSLALLRYARGERFTIGRLYGIATILEAIPSLCRQFFAGMKHLMTMVKVAFLLVIELGVFPLMCGWWLDVCTLKMLGTTIAQRVEFFTMSPLASSSIHWLVGIVYMLQISIFVSLLRGVLRNGVLYFLRDPADPNYNPFRDLIDDPVHKHARRVLLSVAVYGSLIVMLVFLPVKVAMRVAPSMFPLDITIFDPFTEIPVDVLLFQICIPFAIEHFKPRATIKALLHHWFSVVGWGLGLTDFLLPKSEENGGQENLNARAERRDRGHGGREMVAPQVEQLMIQHVAAEDNGRGDSNEANDVTEDSDVDDQGDSEYGFVLRIVLLLVLAWMTLLIFNAGMIVFPISLGRLVFEAVPRLPITHGIKCNDLFSFSIGCYILWSVAAGTRYAIDYITSRQLGFLVQQICKWCSIVLKSSVLLSIWIFVIPVLIGLLFELLVIVPMRVPIDESPVFLLYQDWALGLIFLKIWTRLLCWIRWHLWLMKAGGQSLRELETMASPV

SEQ ID NO: 60400 - protein, 296 aa, Zea Mays
MATRRRLSPTFFGGLRARELGGASVSSRATAGLPYLADLSSDPGGRGGGVIAVEHSGDPAIPFAISFGKTAQTCNLLAVADEDGYVGLYDTRRRLPSASSSLEKSAETRVCDWVAHNNAVFDVCWIKEGSQILTASGDQTVKIWSVGNRKCIGVLSGHTGSVKSLSCHSSNPELIVSGSRDGSFALWDLRCDPKSPNSHGETCLTSSAVVREAHSPILRSRTRSRAKAASTSITSVLYLKDGVSIATSGAADNVVKIWDTRNLKVPFSNKNSQAGAQPLLKSGQSLNKHTGLLSLK

SEQ ID NO: 60401 - protein, 199 aa, Zea Mays
MMSIRSTSFSPTADAMSETKVAPITQVDLSFLSEGKSTWVNLTSQDTKRHDLANACVVVTGGRGLRSAENFKLLEQLAEKFGAAAGATRAAVEAGYVPNDLQSCRRRLQQLESQLMEANRIKEEGNTGSIRWKENILDQENELQNIKQENDDLQTKESAASEKIKELSSQLTNAKYGMINSNTKEIMRRGALKRTMNLL

SEQ ID NO: 60402 - protein, 112 aa, Zea Mays
MFTEEQNELVESAAEMLYGLIHARYILTSKGLAAMLEKYKNYDFGRCPRVYCCGQPCLPVGQSDIHRSSTVKIYCPKCEDIYYPRSKYQGSILTILLSDCLNAYMFQTSTSW

SEQ ID NO: 60403 - protein, 119 aa, Zea Mays
MESHLMSSLPVPAPPSSSSSVPHSSSWNIRLAFADDSLAPPPPLRISRRCLATAMPMLLSRSWSKCAASPGSSSFRLKRRPYSCASAGASPVRASHAHQSSSMAFPVHQPTLPARLSGQ

SEQ ID NO: 60404 - protein, 197 aa, Zea Mays
MESDGEFQYGSYRKEAADLRSVVLHFSEQKYDIIALIGHSKGGNAVLLYASKYHDVPAIVNISGRFALERGMEGRLGKNFMRRINEDGYIDVKNKKGELQYRVSKASLDDRLSTDTLFSSRAISEGCRVLTIHGAKDEIVPAEDARQFAANIRNHELRIVADANHRYTGHREELASLVLGFLSSHPYQITSRLRPRL

SEQ ID NO: 60405 - protein, 175 aa, Zea Mays
MLGRLVGCCPSDLVRQVYSSKSLTPNLPGFSQPTVCQLRGQSYYVEVALGFPAASAKKVSEFEHIHIKKELDPVKDAMVGSDGQRKVESPDGLPILERTFIYPPEAVLVPMVHQAFVRFSSKRMCLQGSLGSSSWEAWPFWNFAPSSYFQNRSVSNYLFLWHAVSTILPRIDYSL

SEQ ID NO: 60406 - protein, 293 aa, Zea Mays
MIARLVLALGAEAKIDVVPGSAEYALPFTTLEDALRVESKLKMLERKRFGKSSPTIEVAIVGLGYSGVELAATISERLKNTGTVKAINVQTTVCPTAPQGNRDAALKVLESRNIQLFLGYFVSCIKEAPTSDESSSTVTYSEVDGDHRKLILDLQPAERGLKGQTLDADLVLWTVGSTSQIPRLQPPDAPYVIPLNGRGQVETEETLQVKGHPRTFAIGDSAALRDPSGKLLPATAQVAFQQADFAGWNLWAAINDRPLLPFRFQNLGEMMTLGRNDAAVTASFIEGLTLEGP

SEQ ID NO: 60407 - protein, 281 aa, Zea Mays
MRKSYHLFVEDPVERPDNAARAVSMKGLDLIAIAFNDACHKFKSLEHIDRNELLALLCTPVVRLKLGVRVRENSYPKSPRNNVHSRIRGQMWRDRGQAPSARGFTGTRSVHENPLANTTAHETAVQYHNHVQPTTVRQTAIRNQVTNTAVHQTAPYQNHTARQVYPTWSQTAEPYQNHNQQVYATGFQTGPYQSHNQVHAYRAGLPPGGIYEIHNQQVYNAGFQTDGPHQNQQRRKGYPSNHQNNRLSATAARYEPVRGQFNNGSTWDSRSQAPGSAALRR

SEQ ID NO: 60408 - protein, 331 aa, Zea Mays
MANAADDPMADEAGVEDAFTQEINHSYVPRYHVLSWMETVEGMVAGVASLPPVYLILNREIYDTCSCLLMMPVWCQSYLLETGWGWKRLVPYRPGYVELHVFKKYLGDYFDHNREAFLCAEQKPDPFGWIVAEKSALIAAAKSCLKMEKALLRYCASFLTPDDKRLILRIKDQAKQMIQSEGDQSLIVTICLECIAKEAELMYNYLPCDFDTTEEVAVCNKVRRSALNLMLYKGSESAVAAGAMMGITTEAKSIFDLLSRDHDVVMEVFTCESIREHTASVLTQLGKEFACETATVNSSSARPMGVSDVRDLNSEVSGSMEDCTSMDGARF

SEQ ID NO: 60409 - protein, 212 aa, Zea Mays
MLHLLPFAEAHANFGAKGRPAQSKSPRHTSYLDELPRTHGENNQFAASRVPNDWGIERHGADASSSLRFDMPSHQQTLEELEMEFKKEATQLARARDQEEDEENYRHRESLRVIRENYMERVITLRNVHAKKWEEFLDTFKSQQQAQPSYIQTGYLGFEQRTAHISATHQPMDSKSTYPYASDSYSAPKAHAAYGEFQHERHDDLGRAYRRY

SEQ ID NO: 60410 - protein, 141 aa, Zea Mays
MGSEELETALMEMVEHDNRRMLSAKVEKLETEAYELRKAFSDKQEQEQILLRMEQEQKVAEDARIAAERDAAEQKHAAHLLQEKYEAAMTALSQMEKRAVMAETMLEATKQYQFTSCRPCSCEDKSRTKPNCTYQENRPAF

SEQ ID NO: 60411 - protein, 271 aa, Zea Mays
MNQQEAPTGVGEFLRDFGVPVVLWRLLQEVGYIETPKYQWSRTVLRGQPWYEVVVRIPERARKPSWPHWMFHAEGMTPWEGAQVAALEALTTICYQKWEEIQATSMRLFPAVALSDPFVYHHQARLMESIPIGQDSVESASARVLMAVLELQLTRGHSRQKWQQLYTGSYAAFKMMEMAKNRACTQAQERLEETKVQAEQVIGLKHQVTELQTQHQADQNRIKALEHQLANAHSKSKVLSQQQEEIRLDAIAVSEDLKETLSFISHQDQAI

SEQ ID NO: 60412 - protein, 467 aa, Zea Mays
MREDGKKQVCIVGLQEFEVSDVQIVKEYIERGNAARSTGSTGANEESSRSHAILQLAVKKHIIVKDTRRQRDRDANEAKNTKAVGKISFIDLAGSERGADTTDNDRQTRIEGAEINKSLLALKECIRALDNDQIHIPFRGSKLTEVLRDSFVGNSRTVMISCISPNAGSCEHTLNTLRYADRVKSLSKGGNTRKEQSTGPTTTSSRDSLSALSYSLPAEAEEIPNQVQEKRPVDTYRKGTENFISNPSVESDRNSFSTIPNYSNRGREENGAASGNDRESYDLKSSQPAYTSKPQLVQNSANTQEEEKVTKVSPPRRKAYREDKSDRQSNYMKKDNGPETSRVGYKMQQAKQLQQQQRPASASASSRQSEKESSCDDVEIDAILEEEEALIAVHRKEIENTMEIVREEMNLLAEVDQPGSLIDNYVTQLSFLLSRKAAGLVSLQSHLARFQHRLKEQEILSRKKPSR

SEQ ID NO: 60413 - protein, 232 aa, Zea Mays
MWTWTPWHFCRSQDEKRHEKGKAEFKKVVESLGHVILGWRLVPTDNSDLGESALETEPVIEQVFVTKSSRSEAEFEQQGGGGHAARRRGHAQVPGALPADGPRRPHLQSRRAADRVQLLQHVRAGAGRAHPVPAEAHVRLRHLRVRRDGEGHPKQGQPALRVLRARARQALQGEGQDPRQVQEAAARAPWRSRVRRLRVAHQIAGFQGPLRPPASFRCPGFLLGMKPLGYDV

SEQ ID NO: 60414 - protein, 296 aa, Zea Mays
MREVVTVQVGGFANFVGSHFWNFQDELLGLADDPGADPVFRTAALDMDVLYRAGETHQSVASYCPRLVSVGSRGSLGSLSSSGTLGSSSAAADEPNIFTWSGKVTKSVAKPHERNLFLQSLSEEEQNPSSSDGQNNASVEDKDLVANLENGVKFWTDYSKVQYHPQSLYELYGSWTDFDRFDNYGTAKEVVSEWSQMEEMNERLRFFVEECDHIQGIQFLVDDSGGFASVAAQFLESIVDDYTNTPVMLYCVRNPDSYGSSRNQCETIIRSLHDAVSLSKLSYYCNLMVTCHLCFL

SEQ ID NO: 60415 - protein, 103 aa, Zea Mays
MHKVLFFSNLDERGEEGEVTDASRWSKLLLARYCRTARRCHARFVLLVSGTLGTAVRHYYDSRWGTGFHGGTTSILGCDSRRGCGLGFYSLAKIISDPVDTVC

SEQ ID NO: 60416 - protein, 416 aa, Zea Mays
MGVGAEPKDQAATAAAVSCSICLDAVLAASGERSTARLHCGHEFHLDCIGSAFNAKGVMQCPNCRKIEKGNWLYANGSRSAHDVSMDEWAHDEDLYDVSYSDMPFRFHWCPFGRLTQLPSLFEEGESSPPVTFHDFMGQHVFTEQVAVSAAAGTTNPCPYVAYLHPLTPLTSLSSSHVPDRTMDRPAYHDHWNPMAGPSDVRSMQTMQPADFHHSHWAHVPHSYGQPNSNNEQPGIPFGARAVRVDGDSQRRASVVSPSYFSNGSGSRSRPPNVPPLMPQFMRAHGSISEQYQQNSSSSLFAGAHRSGGMRPAPTPLPENPTFTLFPPGSSGHSSMETDDAGGSRFYAWEGDRFAPYPLMPVDCETSWRTSQQQSHQSTSEPTSAPRRLFGQWLAVGRPSPSPEGSSYRQLHSPRM

SEQ ID NO: 60417 - protein, 314 aa, Zea Mays
MWACRMMRRTHFSYENYRWQPHDCEMPEFTGPKFLKRMRNRTLAFVGDSLGRQQFQSMMCIATGGKYSPEVEDVGWKYGLVKAPGALRPDGWAYRFSSTNTTILFYWSATLSELEPLNTEHTVTRYALHLDRPVTFLKEYLNDFDVLVLNTGHHWNRGKFNGNHWELHADGKPVGNGSRLADLNRAKNLTLYSIARWMDSELTRHPKMKVFLRTISPRHFVNGDWNTGGTCGNTVPFTNGSEVLQDHSIDIPAENAVKGTRVKLLDITAISKLRDEGHISNSSFKKASTGINDCLHWCLPGIPDMWNELLFVQI

SEQ ID NO: 60418 - protein, 583 aa, Zea Mays
MKIEKIRPSPPAGSSSVDTSASEPEVTPIDVKEVGNEGTLEKGEKEIAVESYFSVMDAKSESSSSNQTSEIGSVINLEERDSTVAVIQDTNASELPNTEVTGKLQESKKASVSDSSESIEDRRKQKSDTISVKEQDQLEEAQGLLKSAVKTGQSKEARLARVCAGLSSRLQEYKSENAQLEELLVQEREKSTLHEAHIKQLQQELSMSRVEGSRAELNMVDALTAKNAEIESLVKSLDSWKKRAATSEEKLASLEEDIDGLKRNCELTETRVIQALREELATTERRAEEERIAHNATKMAAVEREVELEHRAVEASSALARIQRAADQSSSRVLELEHKLAVLEVECASLQQELQEMEARNRRVQKKPSEEANQVLQMQAWQEEVERARQSQREAEAKISSLEAELQKMRVEMAGMRRDAEHYSRQEHVELEKRYRELTDLLYHKQTQLESMASEKAALEFQLEKSLKQFHEVQIEAERSKATRRSASSWEEDADIKALEPLPLHHRHMATANQQLQKAAKLLDTGAVRATRFLWRHPVARVSLLFYLVFVHLFLMHLLNRLQDFASREGTSAMGDLASANLP

SEQ ID NO: 60419 - protein, 228 aa, Zea Mays
MTPLFLTQVAAALLSLRQRNTYHGNSGQSKSMENGIALAGAPDPYNLFSYINPESGSQVIEVIETSKSRAKMMVDVAIQAMCKVSEGENAFSKIGEALDHLNSRGTGSGSSILGIRRIPPDSGQSNASYHDDCTAAPAANSSSRLPNGCDSEAQFPKELISSCVAMMLMIKNCTEKQYHPAEVAHILDSALSSVQPCSSQNIPIFREIEMCMGIIKNQMLALIPTPSG

SEQ ID NO: 60420 - protein, 246 aa, Zea Mays
MTRMPIMKVMAQTGEIRCAMDHILEAERKGEINHDNVLYIVENINVAAIETTLWSIEWGIAELVNHPAIQHKLREELASVLGAGVPVTEPDLERLPYLQAIVKETLRLRMAIPLLVPHMNLNDGKLAGFDIPAESKILVNAWFLANDPKRWVRPDEFRPERFLEEEKSVEAHGNDFRFVPFGVGRRSCPGIILALPIIGITLGRLVQNFQLLPPPGLDKIDTTEKPGQFSNQIAKHATIVCKPLEA

SEQ ID NO: 60421 - protein, 425 aa, Zea Mays
MKQLMWSNDGDRAGEESCTLFLRAIGLREYSRYLTFNHPCSLEKPLLSHLRFFPWVVDEVHFKVWRQGRTGYPLVDAGMRELWATGWVHDRIRVVVSSFFVKVLQLPWRWGMKYFWDTLLDADLESDALGWQYISGSLPDGRELDRIDNPQFEGYKFDPHGEYVRRWLPELARLPTEWIHHPWDAPESVLQAAGVELGSNYPRPIVELDAANSRLQGALSEMWELEAASCAAIENGMEEGLGDSTDEPPIDFPQELRMEVDRQPAQPAIIHTPVVAGWRREDQRVPSMTSSLIRAETELTADFGNTSEDSRPEVPSNIHLQARAEREETVDGATGNTVRVNGNQQQQNLQNNMHRVLGIAPSISEASSSWTGREGGLVPVWSPPAASVHSDPYTADEADISSRSYLDRHQQSNTMMNWSQLSQSL

SEQ ID NO: 60422 - protein, 203 aa, Zea Mays
MRQRLGSDLPTFSEKDKKFIKNKIDFIGLNHYTSRLIAHHQNPDDVYFYKVQQMERVEKWSSGESIGERAASEWLVIVPWGLHKLLNYIVKKYNNPVIYVTENGMDDEDDQSATIDQVLNDTKRVGYFKGYLNSVAQAIKDGADVRGYFAWSFLDNFEWAMGYTKRFGIVYVDYKDGLSRHPKASALWFSRLLKGEAAENSYS

SEQ ID NO: 60423 - protein, 95 aa, Zea Mays
MAGIIIKMLVLCAGWEIARGIVFSSLGSPALCVPVPCFVLFGFSFYASSPVLLQIERIFSSRCVLQIERGYIATQHNTQGHSYAVHSPYVYPVRL

SEQ ID NO: 60424 - protein, 399 aa, Zea Mays
MDDPRWRRCGGPRGSVPKLVDPEQGVDAGAGRACASTTRTRGGGGGEGVREARSGGRAGEEGQLVLATEVSSRREGDGTGDGGVRVGSEEDAGATQRAPSRSSCGAVQLPRGHAIPTSERHNPHDAGALAPGVRVLGDGVGRGEPHRGADMGEFCPSPQGDSALAAPPLTLSSPSPATAVRPSYGSCDRRYVKLVFDNLHGSISVDPLALQFVDTEEFQRLRDLKQLGLTYLVYPGAVHTRFEHSLGVYSLAGKAINNLKTYQGEELGIDHVDMQTVKLAGLLHDIGHGPFSHLFEHEFLPRVDPGSSWSHEDMSVLLLDSIVDKHAIDIENGYLKMVKEMITASAKPTSTKSANEKHFLYDIVANGRNGIDVDKFDYVGRDCRACGLGCNFQYWRLLG

SEQ ID NO: 60425 - protein, 122 aa, Zea Mays
MLKGVTPELSCPIVLFTYYNPILKRGVGNFMSFIKQAGIHGLVVPDLPLEETALLRSEAIMHNIELVLLTTPTTPTDRMKGIAQASEGFLYLVSAVGVTGARSNVNLRVEHLLREIKKVSKL

SEQ ID NO: 60426 - protein, 222 aa, Zea Mays
MLRVGVALLTPNFVDTVMVATVRCDEIANEKFGCITSDTEWLDVESAVQSGPVPGFGKKLGNIVDVHLQEYDKEAVYFDEAVRKGKRQHLESRILNLVQPAFQKMLTHLRVKALEKFKTGLNSSLESGKGFAVSARDNTECSLKEFEQGCADAIIKQANWDCSKMLEKVRRDIEDHALSIRESKLSEMTRHAKVMYGKLKEILITSLAMHNFLLDLFAYLIL

SEQ ID NO: 60427 - protein, 2024 aa, Zea Mays
MNGGETSTKNNEVEKKKTLILHLKKRSTKELSENTKPSKSEFVELSEEKIVKHGSVLKLKKHPHRMDLSPSKSKTRRQSSQRESKRSGTKKIKYSMSDDDSVSSSEPSTSLDNSESPPKRKHSDGKAPSSSTKKGKKKVKFVEKKHSEEQGVVGDKMMTTQEDQQVDRILGCRLQMSQINPPSHASLEQFESANLQVDGMVLPHASAGIPNRPHDGTESSRNGTIEDICADESANHSGHNLEMRKDTDSKSHEKESHKREQVKKILSVCSGDETNIMKDDQVVRENVSASKKGEDETSDLPAEKDDTILPVTRACTMIRTNQDHTDESKQHGKIEQITNKDYNDAGYEFLIKWVGKSNIHNSWVSESEVKILAKRKLENYKAKYGMSLINICKEQWCQPQRVIGLRASVDEVEEVLIKWCGLPYDECTWERSDEPTLMKYSHLVTQFKNFECQALDKDVVKDYANARNRHELNVLVDQPKELQGGMLFPHQLEALNWLRKCWYKSKNVILADEMGLGKTVSACAFLSSLYCEFKINLPCLVLVPLSTMPNWMAEFSSWAPHLNVVEYHGSARSRSIIRQYEWHAGDASQIGKTKRSYKFNVLLTTYEMVLVDAAYLRSVSWEVLIVDEGHRLKNSSSKLFSLLNSFSFQHRVLLTGTPLQNNIGEMYNLLNFLQPTSFPSLSSFEEKFNDLTTAEKVEELKKLVAPHMLRRLKKDAMQNIPPKIERMVPVELTSIQAEYYRAMLTKNYQVLRNIGKGGAHQSLLNIVMQLRKVCNHPYLIPGTEPESGSPEFLHEMRIKASAKLTLLHLMLKILHKEGHRVLIFSQMTKLLDILEDYLTLEFGPKTFERVDGSVSVAERQAAIVRFNQDKTRFVFLLSTRSCGLGINLATADTVIIYDSDFNPHADIQAMNRAHRIGQSNRLLVYRLVVRASVEERILQLAKKKLMLDQLFVNKSESQKEVEDIIRWGTEELFGNSDSVDGKDNSEVPGPVADVEFKHRRKTGGLGDVYEDKCIGGSTKLVWDENAILKLLDRSNLPSSMAESTDGDLDNDMLGTVKSIDWNDELNDDPGTNEDTAPIDNDGSEQASESKQGATNRSEENEWDKLLRVRYSAILWEQYQIEEEACLGRGKRLRKAVSYRETFATLPNEALSEDSDEGDEPKREYTAAGLALKEKYGKLRARQKERIAQRHIIKNYADDNLEEFMTPYDSIANEPAENPLVIVEDLNSSQLSGAKRFSDSTGEMRQSSKKSKRYSEIPQDLYAKIPGNTASFKHHSKATDVFNPGTPNHLLPVLGLCAPNADQVNSYKNSICAPSIKERKRASGDIVKQLSTPADHSNVHRNEAQSASDKAIFPGASEEALRRISNMIPDSYFPFSHIPPISGKGVDPVENPGPSIASFQGNLGLPNFSLEDNAPLKHIKPIPDIFPSLSLGAHKDYIRSSVPELPDGSLLPNFMADITGTSKQKSFMSGLLPGLGLSPGQPIHSAMPDNHKKVLDNIMMRAQYASNKFLKKRSKLDYWSEDELDALWIGVRRHGRGNWDAMLRDPKLKFLNNRTSEELALRWILEEQKIIDEPMSTSTRRSNSAAFPGISDAMMSRALNESNFSKMRMEQPKLQSHLTDIQLGSSDILSTFPHVDAASYINSGEGGPSQIPWQDFKHRSSYAGDFPAGAFDKLEKPDVGPIPPFMPNPFMTDSIGSLPINRKNNSSIPHSEIRSSSRENILSGVSDGQINLLHEMQRRRRVRSGKEPIEMNLNHIDHSNLQLDNTSDLGGLKPNKLPHWLQEAVRAPSSKPPERELPATVSAIAQSVCLLLGEQEPSIPPFLIPGTPLSRPKDPRINSKKKLRKAQQSNSHVEHSKIGSGEGDCVTTPAPPSIEASPALPVDCDDGEPSLNLKSASLSSSAGSKGLDELPPTFKEANQTVDGSEAVAAKSDAPEIGCQVPGSSPLHDKGSESSGSPVKDTPDAGIRLPGSDNSVMAFSALPLVDEAPGTSSRAADTPVPCDGNESKEDVPLDNAESTRKLEPNG

SEQ ID NO: 60428 - protein, 241 aa, Zea Mays
MRPSIVLFGDSITEEAFGEGGWGASLANHYSRSADVVLRGYSGYNTRWAARVAGRAVASIASPVSAVTVFFGANDAALPDRACALQHVPLAEYKDNLRAIFALLKKRWPSVVVILITPPPVDEDGRLRNECRYPYAHDFSGLPERTNAAAAAYARACVEVARQWGLRAIDIWSRMQRFPGWEKSFLRDGLHLTPRGNRVLFEEVVFALKDANLSLEALPADLPLFSDIDPDNPVKSFEDQE

SEQ ID NO: 60429 - protein, 815 aa, Zea Mays
MPLTGRGIIQVWCLLAPFEDSHSHQPVNAFNNGKQRGRPRKIPCSDKLVPVPKGPRGRPKKRSYDDQLEPVPKRPRGRPRKYPLPVAKFEGSSQNGESQDIILFDPLSTSSFIPDDLSLASVMPTEKSVQSTPKRGRGRPRKNPSDKLTDSSGIVSEDVCTALPPTTAISTKPKRPRGRPRKYPIPMNDGSVSGADVELGKETTCQTASFGCSLDHTACTEFNAKLCIVAVDAALPPIDKLTCSPGTVSGDVCTAPTLTTAICTKPKRPRGRPRKYPVQINGRSVSGTVAELGQESTCQPVSFGHTVCTEFNANLSIVPVDAALPIVDKLCSSSGTVVKESVCTEPSPATATRKQPKRTRGMPRKYSDTMIDLGKDTTGHPVLFGRSMDHTACTESNSSFSIVAVDASSLFASSSTATCDDKSKDDSELPIHISPKSSNKRESSGRRGRGRPKTIPLSAGTGHFVASVASLPKTTCVLTSSSNLTSLNKSGGKFIVSSVSSCGCDVEKCSVHSGVLLSDDAPPAHGLQNTNCKEESNTKIGKAGSRNKPVAVEHNHFTDLNVKEQKVQTTPMSGDPVILVENCMEGQGPRKAGGQLQRIPASNKSSGASVGGGTYKIETLSTPMTKGSSKNNDMAYGAGLNQSQNAIVGCEGMEVIESNTANYTSHCNENARANQVAPSFKNSDRVIDETEAAELGPLKEPREDDNLFTCVNSNSASITSDIAQPRVVLCLAHNGKVAWDIKWKPPLLSQPEQKSRLGFLAVLLGNGALEVWEVPSPCMIQKIYSPSKVEGSDPRFLKLQPVFRCVKVKCRNRQS

SEQ ID NO: 60430 - protein, 346 aa, Zea Mays
MLLWQSLTHLASVGHDPSSLSRPLAVAGVRASPATGGRENSRDCSVGRSVISGGPGPVLCSWQRPRAAKQSRAEQIDLPGPMREEKRKEENRIKSKRSKKRLTVEVRCARELYVGRVVVGVDDAGLRAAALQAVECDAEHGVVVERDAVVLLEAAGARVVLGAVLGRVHGERDGDASGGEVARHHDVAGALVQQPLHAAHQRRHHRRHHRLHLLQRPVRLPREAVVVAAELAEHEQGPPEQGAARGGVVGADAALHLLEPLQLHAHGRVEGRDAPHVVVLEVLEVQRRRAHHREVGALAEVGALVRRRREQRETERLGCGSRSRGGRWSTSRTAAGTWACWAACPS

SEQ ID NO: 60431 - protein, 79 aa, Zea Mays
MLATVMNAIFLQATMESIGIPTRVQTAFRMSEVAEPYIRRRAVRHLEKGRDARVGGAPSSLIQFLYIHMRFRVGGWCWN

SEQ ID NO: 60432 - protein, 514 aa, Zea Mays
MLRTKNPCGKVPNQLYLAMDTLADEFGIGTLRLTTRQTFQLHGVLKKNLKTVLSTVIKNMGSTLGACGDLNRNVLAPAAPFVKKDILFAQQTAENIAALLTPQSGAYYDLWVDGEKIMSAEEPPEVTKARNDNSHGTNFPDSPEPIYGTQYLPRKFKVAVTAAGDNSVDILTNDIGVVVVSDDAGEPIGFNIYVGGGMGRTHRVETTFPRLADPLGYVPKEDILYAIKAIVVTQRENGRRDDRKYSRMKYLIDRWGIDRFRAEVEKYYGKKFESFRPLPEWQFNSYLGWQEQGDGKLFYGVHVDNGRVGGQAKKTLREIIEKYNLDVSITPNQNLILCGIDQAWREPITTALAQAGLLEPKDVDPLNLTAMACPALPLCPLAQTEAERGILPILKRIRAVFNKVGIKDSESVVVRITGCPNGCARPYMAELGFVGDGPKSYQIWLGGTPNQSTLAESFMDKVKLDDIEKVLEPLFTYWNGTRQEGESFGSFTNRTGFDKLKEVVNKWAESPSAA

SEQ ID NO: 60433 - protein, 236 aa, Zea Mays
MASSASAPASTGPRYAPPDPTLPKPWRGLIDGNTGYLYFWNPETKVTQYERPVAAVPAPQSQPLVYSRPDDVPRSSAPAERSEAAVSRPQFVPPSDNRTRIDHSESSSASGVNLSQSALSTNQVSQYANGSQMSTEAYRAKHEITIVGNEAPAPFMTFQSTGFPSEILREVLQAGFSAPTPIQAQSWPIALRGRDIVAVAKTGNWRHKFKMKQSSLADLQEYLLLAYMEVLQKALS

SEQ ID NO: 60434 - protein, 419 aa, Zea Mays
MGDPLKMAAVSIENNLSPPETLQKLSDSLTSMLPLLSELSDIIPRDTLLWKLKLLKAGAAYANSRLHAVQAEVLLLASGKDNLLPSGEEADRLFKALKNCRVRYFKDNGHTLLLEDGVNLLTVIKGANMYRRGRQRDSVTDYLPPTLSEFRQTFDVDHRLFHLALSPVMMSTLKDGKIVRGLAGVPDKGPVLFVGYHALMGIELSPLYEEFLREKRTVVRGMAHPFLFGKKLFQRNQFVLLYPGGVREALHRKGEEYKLFWPDQPEFVRMAARFGVTIIPFGCVGEDDVLELVLDYNDQKNIPGLREWIQSINKEAERVRDSVKGEDGNQDMYLPALLPKVPGRFYYLFGQPIEMKGMGNLVRDRKSANEVYLRIKSQVEEIMSYLKRKREEDPYRSLPQRALYQATWGASAQVPTFEP

SEQ ID NO: 60435 - protein, 67 aa, Zea Mays
MGMEHFISSANLSAGFTSYGNEAAEEMKKLRGLRLETLMETCQNTESRDVAIRCPIPCKSSRYNPAL

SEQ ID NO: 60436 - protein, 570 aa, Zea Mays
MVDHSLEHSSYDRKQTASESDQSYEIVFDDKRRPQRAETGFLVWEEIVTRNDQPPLGPHADEQGLDTAEEEYVGTGDQPHGAVSDEKSGAETPEQEFSLTDHRNVAVPDARNISETREDEEQASADDHSDNAVTGKAKVYDEDGEDREARWKDLTDEEEDELESLWEHQDLVEQLKLELKKVRSSVGLPTILEESDTPKAPVEDLKPWSMDAKFLREDPMDELNKFYKSYRERMRKLDILCYQKMYAIDFLQLRGSQQSNNNNNNSVKSLSPTVASILSHNFRSSRRRSPEDPSERFLRELRYDLETVYVGQMCLSWEFLRWQYEQARDLPESDSYHSHQYNQVAGEFQQFQVVVQRFVEDESFKGPRLSNYINNRCVLRNLLQVPVIKDALTVAMHALPGCCVEDSLKDRMEDQRKGNYVITSEELEDVMEEAMHVLWEFIKADRAETTTTAAAASVLKGLSSSNVELQDPLDHGLMAHIHSALQKKEKRLKDLLRTGNCIAKKFKKPKEDRSNQNLFFSQVDMKLVARVLRMPRITSEQLQWCRAKLDKIVLVDRKIHREASFLLFPC

SEQ ID NO: 60437 - protein, 859 aa, Zea Mays
MGVARREEHRAAAAAFLYALTVLGVLAGGAGVRAFEDGTAVYIVTMKQAPVSHRRLNLEKFGSSKAATAVGRGGSGGGGGGDTPTTSVLRKPRQSSPKPMNYGSYIVHLQKSLLKRTLRGEHYVKLYSYRYLINGFAVVITPRQADKLSGRKEVANVMLDYSVRTATTHTPEFLGLPQGAWVQEGGPQFAGQGVVIGLIDTGIDPTHPSFADDLSTDSYPVPAHYSGICEVTNDFPSGSCNRKLVGAQHFAASAITRGVFNASQDLASPSDSDGHGTHTASIAAGNHGIPVVVAGHQFGNASGMAPRAHIAVYKALYKSFGGFAADVVAAIDQAAEDNVDIISLSITPNRRPPGLATFFNPIDMALLSAVKAGIFVVQAAGNTGPSPKSMSSYSPWIFTVGASAHDRVYSNYVVLGNNLTIQGVGLAPGTDGDPMYNLVAAPHALKNNTASCNEMSLGECQDSSHLDADLIRGKILVCSYSIRFVLGLSSVKQALDTANDVSAAGVIFYLDPFVLGFQLNPTPMHMPGLIIPSSDDSKVFLTYYNDSLVRDGTSGQVVSFGGVAKILGGLNPNYGNSAPKVMFYSARGPDPEDNTLSNADILKPNLVAPGSSIWGAWSSVGLDSAEFAGESFAMLSGTSMAAPHVAGLAALIKQKFPSFSPAAIASALSTTTTLSDRQGKPIMAQRTYSNPDLTQSPATSFDMGNGFVNATAALDPGLIIDCSYDDFFSFLCGINGSSPVVKNYTGNSCVASTMTGADLNLPSITIAVLNQTRTITRTVINVAADESYSVNYSAPNGTAVSVVPTQFFIPSGQKQLVTFVVNATINSSTASFGNVGFQGNKGHRAIIPFSVISKVVYSS

SEQ ID NO: 60438 - protein, 259 aa, Zea Mays
MLYRPPRCSHCSICNNCVERFDHHCPWVGQCIGKRNYRFFFMFVSSTTVLCIYVFAFCWVNLRRIMDTHQCKIGRALLKSPISGLLILYTFIAVWFVGGLTSFHIYLISTNQTTYENFRYRYDRRTNPYNLGVGQNFIDVLFSRIPSSKHDFRAKVKADSSTFASSLSMGRVLSPPKTSVDLEMGMKRQAVAAEDFEDLHSQIGSAMGLERCGTEPPHFVGRKGCSEMSPDIEAFAEEFGMEGGLSERKKIERRTNDDS

SEQ ID NO: 60439 - protein, 105 aa, Zea Mays
MASRTCDMVVAIHSVEQFHAPPVSSSPDEVMGVPHETRGRPPANRRGHNAGEPDLHPPCMVALHLLPSYSPQRRALRRGSTGVRQGGCGTQVFITGVGQSEPKGA

SEQ ID NO: 60440 - protein, 408 aa, Zea Mays
MATNLGVFCRAPRPSPASTAAAPSQSLSPSSASVHIPHSTQRGRLAAAPPLPRCVASPTIANVKDQTEAEVAMGYTMTEICDKFIEFFMYMKPETKDWRKLLVFREEWQRYRGHFYKRCQVRIHIEADPSLKQKLVVLARKVKKIDDEIEKYMELFTELRENPADINAIVARRRKDFTGDFFRHLNFLVNAYNGLDERDGIVRLGAKCLSAIHAYDCTLEQLDIESAQLKFDDILNSSSLDGACDKIKSLAKAKELDSSLILLINRAWAAAKESTTMNDKVKDIMYHIYTTTKESLKSISPPEMKLLKYLLNIEEPEERFGALATAFSPGDGREAKDEDALYTELHKWIKMLLDSYHLNKEETDFMDARKMSDPVIIQRLTLLKEMIEEEYMKRYIHPEEEEEPMDDS

SEQ ID NO: 60441 - protein, 329 aa, Zea Mays
MQEFRGMLYKSMEDPHLDLAEIENIVRLLLELEPETDPVWHYLNIQNSRIHGLFEKCTQDHDSRMEVLQNKIREKVLSDSKWRQLQQDSNKSLEVDSTIGDSPRVDQLSTNFMAEEADSLRATYIRRLTSVLIQHVPAFWRLALSVFSGKFAKAASGNVVSDFDVNAKPTANKNDEKGGEVKYTNHTLDEVGSMVQATISAFDTKVQSTFRDFEECNILCPYMSDTIKEIAKACQTLEGKDSSPTAVKMLRTLHFEMTKLYILRLCSWMRATTKEISKDETWVTLSTLERNKSQYAISCLPLEFRDITVSAMDRIDTFLVILSYLEMNP

SEQ ID NO: 60442 - protein, 58 aa, Zea Mays
MGGGNGQKSKMARERNLEKNKGAKGSQLETNKKAMSIQVPCLDPCFCSYVLVSFGGIS

SEQ ID NO: 60443 - protein, 122 aa, Zea Mays
MQKAHAVLLCLSDTRLNSGLESSLSFSNLISTSFLAACLSSSNLVESVMCLRQEGLAFYAQQPEASLQGAAHGLLLERTTTGSVASSLLCRPTIHGIAEKQHSKSQQVILYCNQSNSTPIVV

SEQ ID NO: 60444 - protein, 207 aa, Zea Mays
MCRLLINELEKLLLDLGVERLLLPAVPELLQTWTCSFGFTVMSNSERLELAGNSILSFQGTTMCQKILNVAHNISQDRSIPSMSNSERMGLAENMVVKKAFIPLTVEPDHHVDLIVEPELVMKIENNSSEEGISSIDPLTSMPDPQVGLAVGPEMVPVSRENKDKEGICFIDAPTCPPDPQVDLTTGIHEQSFVRSVQRELHFEYNT

SEQ ID NO: 60445 - protein, 209 aa, Zea Mays
MDMVQRLQCMLKRVRETYDAATEGIKTNYYGIKHVIEALLPLLQASSDGRIVNVSSDFGLLRLINNEEAKAGAKRRGEAHRGEAGRGAGRVPERLRRRRGGGARVAGGLLGLQGGQGGHERVHEDPSEEPPGAARQLRAPRLREHRHDRPHRASHARARRGQRREGGAAAGGRPDRRVLRVGRGGVLYVTKAPSSLSSSLFANSLLVDF

SEQ ID NO: 60446 - protein, 986 aa, Zea Mays
MEVVDLSPTSRPLSPLLSTAPARRLRLLPPRCVVGLRASPRTRGLGCVGGSLSRRHSFCKNGFFATSSSSASVEPATQELGTADAVEWSGDAIRRRFLEFYAARGHKILPSSSLVPGDPTVFLTIAGMLQFKPIFLGKEPRRVPRATTSQKCIRTNDIENVGRTARHQTFFEMLGNFSFGDYFKKEATTWAWELATKEYGLPAERLWISVFEDDNEAFNIWHNEVGVPKERIQRMGAEDNFWTSGATGPCGPCSEIYYDFYPERGSSDVDLGDDSRFIEFYNLVFMQYNKKDDGSLEPLKQMNIDTGMGLERMARILQKVPNNYETDLIFPIIEKAASMAMVSYAKADDATKTNLKIIGDHMRAVVYLISDGVIPSNIGRGYVVRRLIRRVVRMGRLIGIRGDGHGNSEGAFLPSLAEVVISLSTEIDSDVESRRRSILGELQREEMRFVQTLERGEKLLAELLDEALLNAGNNGNKPSLSGKNVFLLYDTYGFPVEITAEIASEQGVTVDIEGFDIEMENQRKQSQAAHNVVRLSVGNETEIVKNIPDTEFLGYDSLSASAVIKGLLVNGNPVNEVSQGSEVEILLDRTPFYAESGGQVGDNGFLYVNGGEDRRQTTVIEINDVQKSLGNIFVHKGMIKQGSVEVGKEVDASVDAKLRQGAKAHHTATHLLQSALKSVVGSETSQAGSLVAFDHLRFDFNFHRPLSEEELTTIEALINQWIGNAAHVETKVMALQDAKNAGAIAMFGEKYGEQVRVVEVPGISLELCGGTHVSNTAEIRGFKIISEQGIASGIRRIEAVAGDAFVDYVCARDNYMRRLCLSLKVKAEDVNSRVETILEELRATRNVASSLRSKIAVLKAASLASRATTVEPQNVRIVVENMGDVDADGLKSAAEYLIDTLKDPAAVILGSSPGDGKVSLVAAFSPAIVEMGLQAGKFVSGIAKLCGGGGGGKPNFAQAGGRKPENLPDALEKARAEIVARVSGSS

SEQ ID NO: 60447 - protein, 238 aa, Zea Mays
MKLILHTITILCILLLAVGKVKDEKVKVLMELTKLKEQYLLLKGSAVKEGHDTGDSSKLIPGHDQQGMLKTMLKRTSLRHWMRKESNTIGHGSSDGNDHTVCKEHSVDVARLRVENAMLLEGVGTVEHLTSSVHRLHIVLLKAYDDIKSADPLESTFEALNSLITEANLMKTALNVVLPVSWSGDSSDAIKYEAMCDPSDSPKSKSGKVDPLSSAGMEMVELLILAAEILKESFLVKK

SEQ ID NO: 60448 - protein, 412 aa, Zea Mays
MACYLKTGQFDECISEGTEVLSYDSNNVKAYYRRGQAYKGLGKLEAAVADLSKAHEICPEDETIAEVLRDAEEKLAREGGGVSTRKGVVIEEVVEDGASQPSSSERNSSGYTVSQPPEGAGNIGLSGSLERPRDDPTSIRSSQNYVSKSDPEGLSNFGIEGMSPELVKTATDMIGSMKPEELQKMFEVASSLNSTSSAGPNLGPNMPEMSPDMLKMASDMIASMPPDDVQKMMSFASQMGGPGGAPRSSENINFGPSVRATTSNSARGSSSQPVLENPDELSDDQRMSQSSSSLPPSTADMQETMRNSMKDPAMRQMLTSMMKNMSPEMMANMSEQFGMKLSKEDAAKAQQAMSSLSPEDLDRMMRWMERAQKAVEVAKKTKNWLLGRQGLILAIVMLILAFILHQFGFIGR

SEQ ID NO: 60449 - protein, 427 aa, Zea Mays
MTGKKAPVPPPPPPQAPKPPGVVPPPPPPSSKISNAPAPPPLLGRGRGNTTGPTKGRGIGLAQQSNPPKKASLKPLHWVKVTRAMQGSLWADAQKQGNQARSPDIDLSELESLFSTAVVTSTSEKGATRRGSAINKPEIVHLVDMRRANNCEIMLTKIKMPLPDMINAILALDTSVLDNDQVENLIKFCPTKEEIEMLKGYNGNKEMLGKCEQFFLELMKVPRVEAKLRVFAFRITFSTQVDELRTNLTTINDATKEVKESLKLRQIMKTILTLGNALNQGTARGSAVGFRLDSLLKLSDTRSRNNKMTLMHYLCKLLAEKMPELLDFDKDLIYLEAASKIQLKLLAEEMQAINKGLEKVEQELAASESDGAISVGFRKALKSFLDAAEAEVRSLISLYAEVGRNADSLAQYFGEDPARCPFEQEFT

SEQ ID NO: 60450 - protein, 501 aa, Zea Mays
MIEQFVNFVIRPPRAEYNPDQYLWEPEFTLAGRKYKRLDLELTNERSQTLKCSHYVPAVIPENTSLPCVVYCHGNSGCRADANEAAVILLPSNITLFTLDFAGSGLSSGDYVSLGWHEKQDLKCAVSFLRKNKQVSCIGLWGRSMGAVTSLLYGAEDPSIAGMVLDSAFANLYDLMMELVEVYKIRVPKFTVKMAVQYMRCVIQRRAKFDIMDLNVVQFAPKTFIPALFGHASNDMFIQPHHTDHIHQAYAGDKNLIKFEGDHNSPRPQFYYDSVSIFFYNVLHPPQFPSTCTHKLDKYYNLGAFKGAAGTNESLLYEIINGLRAAGTDAGSSSAATASFTNATKSVVELLTERVNQLSVKNDNDLDFLLDENHNLTEMDGNTGECHLEDKSNRQTDECCSYTSSNRESWGRCSSLGGASDGLSSGEQPEIPNHKLKSLTLRALATPLRRVQRKPLAIPKEKNRSLWKRLKKERQQMGENISQRLRLCLQGQARHKRTKSS

SEQ ID NO: 60451 - protein, 440 aa, Zea Mays
MTLLCVPLVGRTVEEMITDAAAAAATGGDMVEIRLDFIQGFRPREHLPPLLRGCPLPALVTYRPVWEGGQYEGDDTTRFETLRLAMELGVDYVDIELKVADKFMSFIAGHKPEKCKLIVSSHNYEYTPSCEEITNLVASIQAVGADIVKVATTAKDIVDVSRMFQVMVHCQVPMIGLVMSEKGLMSRVLAPKFGGYLTFGILNATKTSASGQPTVEDLLDIYNIKCIGPDTKILGLIANPVKQSKSPILHNKCLQSIGYNAVYLPLLGDNLASFLETYSSPDFSGFSCSLPFKVDAVQCCDEHDPVAKSIGAINTIIRRPDGKLVGYNTDYIGAISAIEDGIGGPGSKDAVISPLAGRLIVVVGAGGAGKAIAYGAKEKGARVVIANRTYEKAVRLANAIGGQALRLEDLETFRPEEGMILANATSLGMYPNVDESLGFL

SEQ ID NO: 60452 - protein, 390 aa, Zea Mays
MDYFDARRKPHNVGKIIAALVLTTLCIFVLKQSPGFGGNSVFSRHEHGVTHVLVTGGAGYIGSHAALRLLKDNYRVTIVDNLSRGNMGAVKVLQGLFPQPGRLQFIFADLGNQKSIFAENAFDAVMHFAAVAYVGESTLEPLRYYHNITSNTLLILEAMASHGVQTLIYSSTCATYGEPDKMPITEATPQFPINPYGKAKKMAEDIIIDFSNSKGADMAVMILRYFNVIGSDPEGRLGEAPRPELREHGRISGACFDAALGVIPGLKVKGTDYPTADGTCIRDYIDVTDLVDAHVKALNKAEPRKVGIYNVGTGRGRSVNEFVDACKKATGVNIKIEYLNRRPGDYAEVYSDPTKINKELNWTAHYTDLKESLSVAWRWQKSHPRGYGPN

SEQ ID NO: 60453 - protein, 783 aa, Zea Mays
MRDLSGFVETRQQLLSLKPNHRMNWIGFAVAHHLNSNSSKAVEVLEAYEGTLEDDYPPENERYEHNEMLLYKISLFEECGMLDRALEEMQKKESKIVDKLSFKEQMASVLFKLGRFDESESIYRSLLFMNPDNYKYFIAVQKCLGLYSDNGQYSAADVERLSALYNSLKEKYAWSSAVKRIPLDFLEGEKFQEAADNYVRPLLTKGVPSLFSDLSPLYEHPGKANILEQLFLKLEDSIRDSGCFPGCPQKEPPSTLLWTLFLISQHYDRRGQYDIALNKIDEAISHTPTVIDLYSGKILQHAGNFTAAAALADEARSMDLADRYLNSECVMQMLQADQVGLAEKTAVLFTKDGDQHNNLHDMQCMWYELASGESYYRQGDLGRALKNFLAVEKHYADMTEDQFDFHSYCLRKMTLRAYVSMLKFQDRLHAHEYFHKAAAGAIRCYMKLHDSPTKSSKEENDEISKLPPAQRKKLRQKQKKAEARAKREAEEKQEDETASSNSSKSGKKQHARPVDLDPHGEKLIQIEDPLAEATKYLKLLQNNSSDSLETHILSFELSMRKQKVLLAFQAVKQLIKLDEDNPDSHRCLIKFFHKINSLPGPVTDSEKLIWNVLEAERPDMRQLHGKSLVEVNRSFLEKHNASLMHRAAGAEMMYLLEPNKKMEAINLIEDSTNITSSGHSLLGPVKTWQIQDCIDVHKLLETVFGDQNVANRWKARCAEYFPYSTYFEGIKSAISTYAIDHSLESPPENGIASNPHLKSKDGEQGSLNGTLHIVDDLSSLSIR

SEQ ID NO: 60454 - protein, 509 aa, Zea Mays
MASDGDHGGALQKPLLPKAPRSGGWFRKGTSTARLGAAAAGTSSKAAALRPPHHVPALLCTLVVALGTVQFGFTSGYSSPAQDGVTRDLDLSISEFSVFGSLSNVGAMVGAIASGQMAKYVGRRGSLMIAAVPNVMGWLAISLARDTSFLYVGRLLEGFGVGVISYVVPVYVAEISPQNMRGALGAVNPLSATFGVVFADVLGLFFPWRLLALIGTLPCLLLIPGLFFIPESPRWLARMNMMDECEASLQVLRGVDADITVEANDIKIAVASANKSGAMSFQELNQKKYRTPLILGMGLLVLQQLSGINGIIFYAGSIFKAAGLKNSNLDTCVLGAIGVLASVVTTKILDRAGRRILLIISSSGMTLSLLTVAVVFYIKGNISHDSDLGNTLSMVSLIGVLACVTAYSFGMGAIPWIIMAEILPVSINSVAGSFATLANWLTSFGITMTANLLLSWSAAGTFALYMMVSAFTVVFVILWVPETKGKTLEEIQWFFQKDSDVFGLISYFM

SEQ ID NO: 60455 - protein, 89 aa, Zea Mays
MVVRRSSHEAAHFYGWPGIGRSSLYGRHGRMAYPRAVHPGGSFRGRAPMKAGARSLQWKREPSGTDSSAGAKNDMSVPFSCEQVLPPAT

SEQ ID NO: 60456 - protein, 147 aa, Zea Mays
MHILNFSTAYTFYRALATPDKHRQTRERHAMSSPAARSITCYSKIPEFLVGTNGQPMPAVGLGTASHPFVAEDVRTSVLTALELGYRHIDTAGLYASERVVGEAMAEAVSCGLVASRDELFVTSKVWCTQCHPELVLPSLKESLKLN

SEQ ID NO: 60457 - protein, 529 aa, Zea Mays
MHQEGLNESLIQDCEQIVLSEFSSYRKQLKCRYEDYLSLFGSCRHNFEEGKDGSITQGTLTRNDFSSSRHGNFSEYSTTESDEHEFEKHDGGELICEDESAFFDSIDYFTESDNRSSTMLSGKEVVDSQTHDSSNNIQAQIRRRSRLPDPIEKEKGISLWSIIKDSVGKDLTRVCLPVYFNEPLSSLQKCFEDLEYSYLLDQAYQHGKVGDSLMRILKVAAFAASGYASSVARPCKPFNPLLGETYEADYPDRGIRFFAEKVSHHPMLIACHCEGKGWKFWGDSNLKSKFWGQSIQVEPVGILTLEFEDGEIFQWNKVTTTIHNLILGKLYCSHHGTMHIKGNRQYSCKLKFKEPSLLDRNPHLVQGFVEDNNGNKASFLIGMWDESIYCSNSDTSKVKSADQLKGASLLWEKNKPAPNPTRYNLSSFAITLNELTPGLQEKLPPTDSRLRPDQRHLENGEYEKANAEKLRLERRQRMSTKLQDNGWKSRWFEQDTEDGTYCYKGGYWETRERGFWDGCLDIFGEFVET

SEQ ID NO: 60458 - protein, 1020 aa, Zea Mays
MATPTPMPGGEGTLAAVMPRSPSPTPAEAGTSATETPVLIFLYFHKAIRAELEALHGAAVLLATERTGDVEMLAKRCRFFFNIYKHHCDAEDAVIFPALDIRVKNVAGTYSLEHKGESDLFSQLFDLLQLDIHNDDGLRRELASCTGAIQTCLSQHMSKEEEQVFPLLTKKFSCEEQADLVWQFLCNIPVNMVAEFLPWLSTSVTSDEHQDIRNCLCKVVPDEKLLQQVVFTWMEGKATREVAESIAAGISARNNSVEDVPDQGKIHICLHHNSKLGSKNCGESNGPQADKHPIDDILYWHNAIRMELRDIKEETRRVQQSGDFSDISAFNERLQFIADVCIYHSIAEDQVVFPAVDSELSFVQEHAEEECRFNNFRCLIQQIQIAGAESTALDFYSKLCSHADKILEAIEKHFCNEETKVLPQARMLFSLEKQRELSYKSLCVMPLKLLERVLPWLVSKLSDVQATSFLQNIRLAASPSETALVTLISGWACKGRDKSKDGEYLCLTSGAARCLSDDVDDLGKCRSFCPCASPNSSDLSLQLHTENDSRPGKRGKDAVSFSHTNGIYCSQTADIEAIPCSKKPCCIPGLRVESSNLGIGSLASAKSFHSLSYNSTAPSLYSSLFSWETDTSLSCSDSISRPIDTIFKFHKAIRKDLEYLDVESGKLIDGNESCLRQFIGRFRLLWGLYRAHSNAEDEIVFPALESRETLHNVSHSYTLDHKQEEQLFEDISNVLFQLSQLHDSQGHAQTEVNEVKKSCFHSSNDVDFARKYNELATKLQGMCKSIRVALTNHVHREELELWPLFDKHFSVEEQDKLVGRIIGSTGAEVLQSMLPWVTSVLTQEEQNKMLDMWKQATKNTMFGEWLNEWWKGAGTASDSSAEASSAPEDSHLQDKLEQNDQMFKPGWKDIFRMNQSELEAEVRKVSRDSTLDPRRKAYLIQNLMTSRWIAAQQKLPEPNSEECNHDASIPGCAPSYRDQEKQIYGCEHYKRNCKLVAACCNKLFTCRFCHDKVSDHTMER

SEQ ID NO: 60459 - protein, 176 aa, Zea Mays
MYLASGIGGQRALKLIRQHGCIEEVLQNLNQTRFSVPEDWPYQEVRTLFKEPNVCAGIPDFTWTSPDPEGLMDFLSTENSFSPDRVTKAVEKIKVARDRYSPGRMKHLTPVASLRGSHTEKEPQCILGSPGQTLKVMSSPQVCKSPSSGFRYGSSKPFMLGRQSGFHGMPYALSFI

SEQ ID NO: 60460 - protein, 200 aa, Zea Mays
MVGELSEESSLGTFREYQGFHAKFVHENTENSNTMIELEAEKYRLEKELKDHEWKLSVLNKKIERSNQALAKLHSSWSPSEQSADREHLTEEEKIMFRRIGRKMDGLVLLGRRGIFDGVIEEIHQHWKHKEVVKVITKQNQTRQIMYAASLLEVETVNEILCSGETEVHFGIEKETEVCDKANQVSNPMIMKSLDSMVSK

SEQ ID NO: 60461 - protein, 247 aa, Zea Mays
MGYLPSLSSKAAHFVSDLTTVILSPVSERETSHLPEVDEVLENLDDDKDSEHNSDSLDGPDTSSFRAFLISFLSSSSSNNDSMEIIPEQNGDMGYPTLTPMGKGSKGRTGLLSRGKHSIGKIINKAARISGFKQTTAEPKIDREAVTHTEPDAPVLEHQEPKEVASFGSLPTMSEPSVLLSELMQRILYASLPALAQGRNWVLLYSTWRHGISLSTLYRRSMLCPGFSLLVMLLFPKCLKCYVFSLL

SEQ ID NO: 60462 - protein, 295 aa, Zea Mays
MGSGEEPSQMRRALVDSLAGAISGGISRTVTSPLDVIKIRFQGFWRGNVPALLMYMPYTAIQFTVLHKLKTFASGSSKTEDHLHLSPYLSYVSGALAGCAATIGSYPFDLLRTILASQGEPKIYPNMRSAFVDIIKTRGVQGLYSGLSPTLVEIIPYAGLQFGSYDTFKRSMMTWNRYKYSHLNFGSEDDSVSSFQLFLCGFAAGTFSKAACHPLDVVKKRFQIEGLKRHPRYGARIESSTYKGMYHALKEIVAKEGFGGLYKGLFPSLVKSAPAGAVTFVAYEYISDWLESILM

SEQ ID NO: 60463 - protein, 225 aa, Zea Mays
MARQPWSNNGHRNSPSNSLDGGVPGPMPLVPFQEELAVGCEEIRRIAADNTLVLEDILGLRQELAVIEDEIHILAKQTIPRLRVDNEMEYRDIIQGGMKLEEQMHALKLIKEEVLVLSSEKMELEALCKELSVKVQSLYRELEQIENKQIPATREGLHDIQAEISRARMAYEHEKRAKVELLEESQAIESDFINIKMEAQRLRTELEKRRSGVFKHHAFGSYYKR

SEQ ID NO: 60464 - protein, 813 aa, Zea Mays
MAVEKSSSGTSTPSTTSTMDRFQKIVLSWDYLRLIAESKGGKQAKVLQHVKNTYVSVAEYLGVFEPLLFEEVKAQIIQGRSNDEEESGMDWRRGAVGSCTESEGFHKLSVAVEDNFQDNVSENDLLLISKEKFEEGSTPNAYAFALVEQRGGGIHISLRTFVAGEIQNLNVAKPVKSTRLQHFASIIASQNSLLWILKVCSLSTIMREFTAMHSVASLPFKDLILSATEAHKDGDDQSRAWNVPEPLMDYLKVNLNDSQLEAVNAGLSRRSFVLIQGPPGTGKTQTILGLLSAVLHSAPARMQIKGGFDVLKHGPELDIDGKRAHWIKASPWLLGANPRDLIMPVDGDDGFYPTGNELVLGLFTPYMEKKKIFIETRNRIRDENNNTYNPKIVRIGVKALHSVKAVSMDYLIQQKLSGVDRTLDGGRRGAGEYDRIRASILDEAAIVFSTLSFSGSSIFSRMTRAFDVVIIDEAAQAVEPATLIPLIHGCRQIFLVGDPVQLPATVISQTAQKLGYGTSLFKRFQAAGFPVQMLKIQYRMHPEISTFPSKEFYEGVLQDGEGLSRKRPWHSYSCFGPFCFFDVDGIESQPSGSGSWVNQDEVEFITLLYHQLALRYPELKSSPEVGVISPYRHQVKLLKDSFRSTFGDQSRELIDVSTVDGFQGREKEIVIFSCVRCNKEQKIGFVSDFRRMNVAITRAKSAVLKGRPGVVVVGSASTLKQDKHWNNLVESAKERNCLFKVPKPLTAFFAEDNLKTMKVERRPPPELNARVLEEINQEVVRQELMNVDDAADHADAGDDDDADMDADDGGGDD

SEQ ID NO: 60465 - protein, 158 aa, Zea Mays
MWSSDSANLAYIAQHQLFDQIKELHEDIAVPEYCSAGGGKLQSLNAWFGPHGTITPLHHDPHHNLFAQVLGRKYVRLYPASTSVGLYPNTESMLSNTSEVDLDNTDGKEYPETAALEFVDCVLEEGDLLYIPPKWWRYVRSLSISFSVSFRWRTSQLP

SEQ ID NO: 60466 - protein, 619 aa, Zea Mays
MCTFSNHESMVYCEMCGVFRETFVKSAKDGLLKDTAVAVSSEPRTSAASKNDSAKAPVKTRAVNSDGDSMRKHASMSYDKANSTQLPSAGSSLGAEKKKKTPVLSEEVPVERIALLASDGFQSKGNQNSGASSSSQNDNVIQKLSSDVGQLNVNKNNVNVTKSCLPDEYKPEKWMLADLESRALSQLNLAIVGHVDSGKSTLSGRLLHLLGRISKKYMHKNEKESKEKGKGSFAFAWAMDESSEERERGVTMTVAVAYLETKKFRVVLLDSPGHKDFVPNMISGATQADAAILVVDASTGSFEAGMDGEGGKSVGQTKEHAQLVRSFGVEQLVVAVNKMDAVDYAKERFDFIKLQLGSFLRSCNFKDSAITWIPLSAVENQNLIKAPSDARLTSWYQGFCLLDAIDFLQLPSRDVSKPLIIPICDVIKSQSTGQLAAYGKLETGAIQIGSKVLVLPSGQEATVKAIERDSNSCTVARAGDNVAICLQGIDGKQLIPGGVLCHPGFPVPVANHLELKVLVLDITTPILVGSQVEFHIHHVKEAARVTKIVALLDKTGKPSKSAPRFLKSKQNSVIQVTLDGAVCVQEFSKSRALGRAYLRSAGRTIAVGVVNRIIGQDQN

SEQ ID NO: 60467 - protein, 263 aa, Zea Mays
MMGGSGRAALLLALVAVSLAVEIQADAGYGYTPTPTPATPTPKPEKPPTKGPKPEKPPKEHKPPKEHGPKPEKPPKEHKPTPPTYTPSPKPTPPTYTPTPTPPKPTPPTYTPAPTPHKPTPTPPTYTPSPKPPTPKPTPPTYTPSPKPPTPKPTPPTYTPSPKPPATKPPTPKPTPPTYTPSPKPPTPKPTPPTYTPSPKPPATKPPTPKPTPPTYTPSPKPPTPKPTPPTYTPTPKPPATKPPTYTPTPPVSHTPSPPPPYY

SEQ ID NO: 60468 - protein, 1046 aa, Zea Mays
MDWYSDDSDPDIDEDLREDLDALRRSCILSGADPDAAVAQVSSGLAGPSTPALAAAPGAAADHHHHASSSDDEEDEDLALVRSIRANLHHLHNSKASTVLPDAAPAPRDDDDPSSRPICTWPPSDTDEEEDDLETLRAIQRRFSHYQSSTSTASPKTMKPEASQGVHSDLFADRSGDDFAVQKQNAIVPHGDGFPKAALLLVDALKKNRAYQKFIRRKMVNIEAKIEENKDLRDRVKCLLGYQLSCRKSVSRSLGQKEDPRVRLISPLKSTQPCTKNKYRKIPALFLGPAENPHVSKYEMALKQFPMSFKKQPWSDAEKDKLARGIKQQYQETLILDSLNNGSADGDFSALDMAYALTNGAGNFEVTPENLRSVLPLINWDKISAMYLPGRSGAECESRWLNCDDPLINHEAWTADEETRLLLIIQEKGMCNWIDIAVTLGTYRTPFQCLVRYQRSLNPHILNKAWTKEEDLQLQAAVETFGQKWQLVSASLDGRTGTQCSNRWRKTLHPEKTSVGRWLLDEDKRLMVTVKLIGPGRWSLIAPFIPGRTQTQIFERWCNILDPDLYLDDWRPDEDSTLLAAVSEFGPCWSKISKTIIPGRNDSMCYRRWRKLCKHEVQKAREARQLKKAIFQNNFVDREKERPAICPRDLISLLPSKGDGCDVAIVRGGSEKQGEENHLALSNIVNISSGLDCVAANSVLNASSRRPRRVSSGRRSKKHTEGNNIAAPDDLNASSSAPSSSIKRKSTTGNNVAAKKRSRVSISVNADNEVEKNRITDSVAVSEEGLVKKRTRRPKPVGNEGAVRKRGGSNNEVGTNIITESVAVGEEGVVKKRTRRSKPVGNEGADNEVGTYRITGSVVVGEEGVVKKRTRRSSKPVDNEEVVRKMRGSINNYDEAGTNTMMNSAFGEEEVVKKKTRHSKPVGTEGAASIGGDGMVNKRRTGSVSTENLGAVRKRKIVSSRRKLAEVNLPTEEGVPNAVPDLDFPCAISEERAVDVGNMDKGRRKSTPRPKQINMPEEDADKNSTFTRLVNCLSFARMKGIDRNKR

SEQ ID NO: 60469 - protein, 193 aa, Zea Mays
MDKLTCDMETFTKHCSVQVQPNSAPLHHVQFRRLSVTRIGFAERLLWVQMLDLSHNSLRSVEGLEALQRLVFLNISNNQISSFTALEPLTKIISLKVLDLSFNEIGAHSIDTARYICPSPFSHKTEASEAFEEYQEVNNINVTEYWDAILFFRSLKLAQLDIRGNAVASKDGFRTLVVTLIPCLKWFDGEGVS

SEQ ID NO: 60470 - protein, 586 aa, Zea Mays
MPKTPPVNASKNTEPQKQSAPNLTITNGHTSTKVVVKKEHPINDVKHISTWVCKNLACKAVRPAEDSFCKRCSCCICHKFDDNKDPSQWLVCSSDNDSKNCCGSSCHIECAFREKRAGCFDLEQIIHLDGSYSCASCGKISGILGYWKRQLVIGKDARRVDNLCQRIYLSYRLLEGTVHFKELHEIIEDAKAKLESEVGPLDGMSAKNAHGIVSRFSAGIAVQKLCSTAIQRADEWLSSPDLHLRDITSSSLIVILKETSSSDTIKGYKLWYWKSREQPSMEKPVIVSKDERKILLYDLTPCTEYSFRVISFTDDGVLGHSESRCRTESREIFVMRAPKNAVGGGATHAQKKDRNQSCKSTGFKIRDIWKNFQEALDAEGCFEGFSEDVHEGSCSRSVTETELSGACRKLHFNSSSVPDLNAEVPVPVDYTENHYYSKKGLVRSNDSGDSETCAVGQTAEPPAVESRQVSKVNSVPVNKCEQNGASAICHEKMLSGSTRQLDGDYEHCVKVVRQLECDGHIENGFRMKFLTWYSLRSTDQERKAVSTFVRTLSNEPSSLAEQLVDSFGEILNSKKAKTGFCSKLWH

SEQ ID NO: 60471 - protein, 93 aa, Zea Mays
MRPTARPPHPQRLAPMHCTPASSTPSLSSSLFLDRDSDGDKPTSTTPLCLATCGLLHRLVWSFPILDGPVRTPINYPPDRIMATTQERDVAQP

SEQ ID NO: 60472 - protein, 564 aa, Zea Mays
MAHNVWEADKMLDSYIYDYLLKRNLQNTAKAFQAESNVPSAPVSIDAPGGFLFEWWSVFWDVFIARTNEKHSDSATSYLESIKAREQQQQSQHQIQTQQLLLQRHAQQHPQEQQQWRQQKQQQRSENTDFPTSAQNGTVAADPPARQNDTTAGTLSAKVFEDRMKITVQRDVSEETSMKQRLTETICPLLESNPTSMLKSPARSSLASGPIFQRSAGGMSGSLQQAQFRSQPLLGSTQDIKAETNVALNQRAAGADGSLFGVPGSNQAGNNLTLKGWPLTGLEQLRSGFLQHKSYMYPAQPLQHQLQFLTPQQQHALIHVQAQQNATSPGDMDNRRLRMLFSSRNLVPGRDGQSTGFTEIVPSVGQSLQNMCLPMQRTETDMLMKIAALQQQQPSNNLQQLLQHPLLSQQQQSSTYLEGEQEKMGAGIVTVAFAGNEQVSKNRNGRKRKHPISSSGPANSSGTTNTAGASPSSTPSTLSAHSPGETISTPLQHQNASSCTTLVVYGSEGPVPIGSPTNQLVDMDHYTEDDSMEDNLEPFLPHNGTNPRAAGSHCISSGKDMSSL

SEQ ID NO: 60473 - protein, 237 aa, Zea Mays
MPLWPHTRGTVMTTVSPPPTQSLLRGCWISAAAREGAMEVAPMAGALVEGKLDPVVGRQDQIERVTQILGRRTKNNPCLIGEPGVGKTAIAEGLAQRIANWDVPETIEGKKSVGSMDEDDDSPASGSGRHKKKLRLIMGLHDGSAKVQTGISLNTLGSLGYEIDHGWRQRIAVCHSKLGVVVNPTQQAAADAMPTQPRGVAVLSVMLFGWRTEFSGEKKYMWVRQGLIFPFLDYMNR

SEQ ID NO: 60474 - protein, 435 aa, Zea Mays
MPLAPLSLEPPPFRLIRPATGSGGRVLPVPGPAPRLCRSLRAAPVAPDTTEEPFAAARGRLESLSQVTGVLGTQWGDEGKGKLVDILSQRFDVVARCQGGANAGHTIYNSEGKKFSLHLVPSGILNENTQCVIGNGAVVHLPGFFKEIDGLESNGISCEGRLLVSDRAHLLFDLHQVVDGLREAELGNSFIGTTKRGIGPCYSNKVTRNGLRVGDLRHMDIFGAKLNTLLRDAALRFKDFEYDNKILKEEVEKYKKFAERLEPFITDTVHFVNQSILQKKKILVEGGQATMLDIDFGTYPFVTSSSPSAGGICTGLGIAPRSLGDIIGVVKAYTTRVGSGPFPTELLGNTGDLLRASGMEFGTTTGRPRRCGWLDIVALKYCCQINGFSSLNLTKLDVLTGLKEIKLGTSYYTDDGNSVQSFPADLSLLEQVKFL

SEQ ID NO: 60475 - protein, 141 aa, Zea Mays
MGRLFLMHLDGNVYSCKHCKTHLGVASDIISKAFQCKHGKAYLFHKVVNVTSGVKEDRMMITGMHTVSDIFCVGCGSIVGWKYDAAHEKGQRYKEGKFILERCRALTEANTGFHKMLTWAEATPMTYKTRSNKLKPVVDPL

SEQ ID NO: 60476 - protein, 299 aa, Zea Mays
MVSYHPSLLRPSVLIAQASGIGRCPTLNAFLSTPVVSAVPLRLRPLRAAAGGAASPVSGDGGKRAVPPPAALLVFARSNFLPLALVSGVIFGLLDPTLGCLAHKYSLSKFSTFGIFIMSGLTLRTKELGTALEAWPAGLYGLGSVLLFTPFLSQFIMQVQFSPREFITGLAIFCCMPTTLSSGVILTQLVGGNSALALAMTVASNLLGIIIVPLSLARYIGTGAGVSLPTEKLFRSLVTRLLIPLIIGKVAREASKGIADFVDGNQQGFSVGNAVLLSLASTYCTVGFQHCNVAYLVTS

SEQ ID NO: 60477 - protein, 572 aa, Zea Mays
MDLDPEGIFRDDSDEDEDSVQEREANKEMVVYLVDASPKMFTPATTQDNEKQETHFHTIVNCITESLKTQIIGRSYDEVAICFFNTKEKKNLQDSAGVYVYNVGDREQLDRPTAKLIKDFSLIEDSFMSTIGSRYGITAGSRENTLYNALWVAQALLRKGSVKTDAQDLGLSIELLPLSPPDDQFNMSLFYADLIGLDGDEMTEYLPSADLDGVYLMAHILVSSGTRLGIAKPHEYMILELKFISDLIEYVERSFICNDTGALLQDAQTRFQMYNDTIVKFSVRELSEVKRVASHHLRLIGFKPLDCLKDYHNLRPSTFIYPSDERIFGSTCVFVALHSSMLRLGRFALAFYGNPTRPQLIALVAQEEVTSSGRQFEPPGMHMIYLPYSDDIRYPEEVHVTSDDAPRATDEQIKKASNIFKRIDLINFSACQFANPALQRHYGILEALALGEDEMPDIKDETLPDEEGLSKPGVANAIEEFKTSVYGENYDQEEAEAAAGKASRGNASKKRKEVTDAAAQISAAYDWAELADNGKLKEMTTVELRSYLTAHDLPVSGKKDVLISRILTHLGK

SEQ ID NO: 60478 - protein, 65 aa, Zea Mays
MFPSMLPILGLQLRLASSFPLQESANPHSTKKSRKAKRKSNAKQTTISASPPPSHLIPSEAPGTA

SEQ ID NO: 60479 - protein, 286 aa, Zea Mays
MYIANLYETLISDVNVRLAALIGFREKTIGLALEASGGLYRKLIQRFPKRGHCSFKRRELATSHATRTKFPELVVQEEKRVRFVVINGLAIVERPENMRMEDAEWFKRLTGRSEVAICSRDYKFYSPRHKIRRSPQAAFDIPDTSALAEDENSSLVCSSGFRSPNEIQNQHQSTSKRPIEHLENQPFLHLFHQAEDDSMQQVQHCAQFPPIHQCTSTPHLSDNPQHQQQAYLSQHISCLQVGQGHLGGRMHIIPTSPAKFCDECGSPYLRATSKFCSECGTKRLGM

SEQ ID NO: 60480 - protein, 781 aa, Zea Mays
MGDPHPLSSAHLTAAASSAREHRGPTNERLAASDPSTSFAKRPRVAAEPSDSGGCVPCVEADVRALVSVSGGIYPLARAGALRGLTAVLEKVDTSSCVSAAITDCCYKCAVELMRDDDNGVRLAVVRLVDACARNISARLDFDANGYGDLMDMIFLQLSSMARDMCTQVRMEAFAALGKMQRVSEGVLLQSLEKKVMKTDRMGVSIINGQKLPPKLKIPCAAGIFSHGVEDEFYEVRRTACKSLGALAKFSTQYTEKALDLLMDMMNDDTEAVRLQALEALFSMATYGCLSVQEKHMHMFLGLLVDANVLIRDAARKIFGLVNMPKLQIFKSAVDGLVTSLEKYPEEEDIYGIMFSIGKNHGSFSANIAKHLAKEITMASDGELILDKPRVKALLIVSISAPFSDDKHKQLGIPSIIFSYAIPLLEKISCALGEVDQDSLLSYLYHKGGMPFWENRSVSAEFGESESCNVETVKIGAHIENTAKEAKCLDEVLVMKSILEIVEGVWTMRMSCNVCEVRTIFRTCKEELRLLAENSSGSIGALLSFLSEYLDAILFIVEIWQLIQLDKPYTCGLTSLDILLERLDMSVRRMKYCYIGLNRVLEVQVLELSLIAHLCRLSKIAVCSKVVLGKVLWVINRLEDLCADGSCELSDFSGEIKKACDTNRIGDNLIGNINNLFQLFHLKPTTDFGMLKVISAMLRVCDNDSENPLQYICGLPVGVSFKISLWNISGHHRLWLRMTIGESVQHTFLEFSRFEGNDEGSAPTRVDMEDRVIVWFNSLMN

SEQ ID NO: 60481 - protein, 722 aa, Zea Mays
MGCKGSKLDDQEAVALCRARAELLAAAVRHRYALADAHAALADSIDSVAAPLHRLLRLQAESPGLTLPSARKGGGAPADRLPRSFRPSSSAPQPAHGHSSHLQFGASPGSEPPSPAESPPRRVPEQLQHPHPHHAAYGYEYDYATQPAYAYPPTPAGSLQFYYARSRPPPASVAVTQRVPGPPERVVRFGSFDAAGGYPQQYAYSAQRAPIPPPAPAALQRAAPPAPPKASSWDFLNVFENYDSYEYDTYYYDSATAATAAAAPYTPSRSSREVREEEGIPDLEDDDDEDSVVVNEVAGQYSAPGSGGARSRRSSLGGVSATAELDQAENIIDVIASSKMMSAISVAHLGCKDMDAVDVGVVAMVDSQSLSSALEKLYFWERKLYAEVKAEEKMRLLISKNSKRLKLLDQKGAEPQKIDATRNLLRKLSTKIRIAVRVIAKISRKINKLRDEELWPQVNALIQGFVLMWQDKLDSYHRQCQVISEAKNCTSVLSGENGQDLVLELEVELIKWIISFSSWVNSQRNFVKALNGWLALCLNYEPEDNTAGVPSYSPGSMGAPLVFVTCNKWSQAMDQISEKDVVNAMQALVSSVRHLWEQEHLEQSEQIISIREREKWIKFLERKTQDISKEADELNKKLALIPSRHRLHVPRIVQLYEAHCVEASSLHINLRLVLEALENFAANSLQAFLGVSKSAEGTRLPRDNVRRERRSSNRGSNYKTSS

SEQ ID NO: 60482 - protein, 832 aa, Zea Mays
MVAACRSTASTYAFLLLLLFAAAVAVSSSSGLRRVQDQDRSALLQIKNAFPAVDLLQQWSPDSSGRNHCSWLGVTCDSSSRVVALEVLSPSRRFGPSQELAGELPAAVGLLTELKVVSFPLHGLRGKIPGEIWRLEDLEVVNLAGNSLRGALPASFPPRLRVLSLASNLLHGEIPSSLSTCKDLERLDLSGNRFTGSVPRALGSLPNLKWLDLSGNLLVGGIPSGLGNCRLLRSLRLFSNSLHGSIPAGIGKLRKLQVLDVSRNRLSGLVPPELGNCSDLSVLVLSSQSNSVKSHEFNLFKGGIPESVTALPRLRVLWVPRAGLEGTLPSNWGRCSNLEMVNLGGNFLSGAIPRDLGQCSNLKFLNLSSNRLSGLLDKDLCPHCMTVFDVSGNELSGSIPACVNKVCTSQLMLDEMSSSYSSFLMSKTLQELPSVFCNSGECSVVYHNFAKNNLEGHLTSMPFSADRFGNKTSYVFVVDHNNFSGSLDSILLEQCSNLKGLVVSFRDNKISGQITAEFSRKCSAIRALDLAGNQISGMMPDNVGLLGALVKMDMSRNFLEGQIPASFKDFKSLKFLSLAGNNISGRIPSCLGQLRSLRVLDLSSNSLAGEIPNNLVTLGDITVLLLNNNRLSGNIPNFASSPSLSIFNVSFNDLSGPLPSKIHSLTCNSIRGNPSLQPCGLSTLSSPLVNARALSEADNNPPADNTAPDDNGNGGGFSKIEIASITSASAIVAVLLALVILYIYTRKCASRPSRRSLRREVTIFVDIGAPLTYEAVLRASGSFNASNCIGSGGFGATYKAEVAPGKLVAIKRLAIGRFQGIQQFQAEGCQTK

SEQ ID NO: 60483 - protein, 204 aa, Zea Mays
MDATVVAIADDHDDSDCRRPLLAQNEEIHLYTEPPNRQHPPLDAAATQLEEQRKPERVASLDVFRGFTVAMMILVDDAGGAWPGINHAPWFGVTVADFVMPAFLFIIGVSAALVFKKMANKTAATKKAAIRASKLFILGVILQGGYIHGRHKLTYGVDLDHIRWLGVLQRIAIGYFVAAMSEIWLVNNNLVDSPVPFVKKYFIE

SEQ ID NO: 60484 - protein, 581 aa, Zea Mays
METLPNGSVNNAELNQENEKSMYASESEEARDIFVYREDVVSLKSKEDVRGVVLEVAGEYDYDGSITDDDIDTEEHEDKTAYGAENGVADGGLQCSLGPGEPGASTFVLVAYDYIESGGAFGDPYKLYGVSQSQKLLPNKTEDDSMSIQLETKGDQQSVPLEEQNPEDLTLLSRFSYTNWQLTDWCLSQRYTSCTNDTMIDSDKHTWQICTCSENSVPLSGIPESQADAQIDTDTGHRQTDVDSTADVLSMSDGDNSCIAKESETGTSASSISNEGPQDNATSRKKFRKVFFKKDKRTKKRDDNFERALLIANTCTKVDVIWQDGTKECGVAATALIPIHSPNEHEFFPEQYVVDKVTNDVGVDDSSEPRRVGLVRGVNAKDRTATVSWFKPPLHPEEPKEIACNEIVSVYELDVHPDYDYCYGDIVVRLPPVKPVIESTNSKEQMELDKTLDSSEGFAASYSAPPDTSADEQLSQKESCLQFTSLSWAGNIVGFQDGEIEVIWGDGSISKVGPHEIYVVGREDDGASLDDGTASDGSSWETVDDNEMDVLHDSAKHWKGKWFIQLPGWKFCCNWSPFSCF

SEQ ID NO: 60485 - protein, 100 aa, Zea Mays
MKAEGASTEQALSSALTSIMDALKSTDWNTRKDASLALSSIVVSSGYLITSFRTSCLRSLECSKFDKVKLVRDTIIHAVQLWKAIPGSHTPEPSEAGPST

SEQ ID NO: 60486 - protein, 140 aa, Zea Mays
MRLIPATLACGNTCIGWLLTSQHQQMIASAESSYHMRAQAPPWASTVLCWCSTSNWGGARCLRRKFVRTSTCVISHAVSTSASLWPRRTSTVSGKQAQVGEGSLVFLIMSFKVKAGKLEPTTTSNVRVCLYGRIGVHYVA

SEQ ID NO: 60487 - protein, 225 aa, Zea Mays
MLQLSNGDVYEKTHDELDFEFLGSRWGGQWRVQTNVYGNGSTSRGREERYLLPFDPTVEAHSYSILWAPTHIIFYVDDTPIREVIRHPDMGGDFPAKPMAVYATIWDGSAWATDGGKYKVNYKYAPFASDFSELAVVGSRADPVLRVPRRDGAAHQDLLALMTADYAVVTPRKRAAMRAFRARQMTYTVCYDAVRYADGLACQAADILQNNINARVCRESYWHNG

SEQ ID NO: 60488 - protein, 276 aa, Zea Mays
MLPLRFLRKRKLRMAKMWEDMKIHHANQLKIVLNLKSVDIPDSNIETSDYHHSHTRQLRDIVDKWITNFTDFMNCQKEYINALYGWLKLNLIPIESSLKEKVASPPRMQQPPIKAFLYAWHEHLAKLPDDLAKTAIVTFRAVLDTILGVQDEELKQKEICEQTRREYIRKARAFEDWCHKHPQPRAIDVDPDSGEGTGHKDVVTEKRFAVESLKSKLDDEIESHNKLSKQVREKSLSILKAHLPELFRALTDFSDASFEMYSKLRLMSLMQDQGNN

SEQ ID NO: 60489 - protein, 205 aa, Zea Mays
MASTASPPVFERVAGIRAIAESGRFKAWLLDQFGVLHDGKKPYPGAILALEKLAENGAKMVIISNSSRRSSVTMKKLKSLGFDTSCFLATITSGELTHQHLQKRDDPWFAALGRKCIHITWDDRGAISLEGLGLQVVNNVDDAEFILAHGTEALGSPSGVPLPKSLEELEQVLMLGIEKRLPMVVANPDYVTVEARDLRVMPGQI

SEQ ID NO: 60490 - protein, 97 aa, Zea Mays
MRFCLDQFCHRTVVVEKFGYELKILGWKWRQFSTGSYKEPVLNTLEKNLVLVPFRTKIKVIWLGTKTSRHEQRKNIYYRSFARTCTKELSAFGVSLR

SEQ ID NO: 60491 - protein, 375 aa, Zea Mays
MSSLNKVVSNSGDACSVLASKVTSLNPNAAEFVPSFVKPSFGNGTVLDKSDFRGSSGKTILDRPEPSKSNNSDDEAHQFWHKQLPDDIIPDFTSFEKVEQGPELSLAGLSLNAPPFYGTTSSRFSREYHELSSPVTKGLELELEHTNMLYEDKSNWEQNYIGDLHIANGNQDLHYDSESGVSFSDSFASEYVAPSDGLFAPLEYLASQFPGFSAESLAELYYANGCDFNHTIEILTQLEMQVDATPNHTLNLPHSTPNFSTGDFPALPTAEDQNGFNQGNVDVLGMFNGRSSSAMPTGAGDFVSAVRKLASQNSGQWKFKKGPEYGNGISALSVPKQYSSSTKQSSGNKFQSISSGRVAPWLETGDAVGNTHLIL

SEQ ID NO: 60492 - protein, 102 aa, Zea Mays
MFSVVEIYCLRFILAFIVNKLLFFPSFLAGRILCFSTLRQHCFPYLCSSKVQTLSSEVIVTCLSLHSIHIKRYCAVASTVSFHSFCFIPLGLCLMCASNTSS

SEQ ID NO: 60493 - protein, 1454 aa, Zea Mays
MADLDARRTEMRNNAAKGVQSQFRTHVAREQFLVLRDTSIYLQSFVRARLACKQHEFLRQQAAALRIQKNARWYFAWKTYYQLRLSAITLQAGLRSMAARNEFTFRKKNKASVHIQSQWRCHRDYSNYMNLKRAALTYQCAWRRRVARKELRKLKLAARDTQALKVAKEKLEERVEELTSRLDREKKLRADLEKSKADEVSKLKEALHEMEQRVEEVKAMQEQESAKKAVEEALAQEREKISLLTTEIEGLKVLLVAEREENDKMKKAHANALETNEELNKEVSDADEKIKQFSDTVRRLEGTVSEHEGLLLTERQQNEAANAALAESQARNEALVSKLEDAVKQNDLLHEADQRFQEATKNLESSLTFEKQRHEANLIELAEAREKIEELQREVGDTDEKFTLLQTSIQSVEERLREKDALLTTERLESEATKKSLNESEDRNQDLLLKIEIAQKDIAHFQETVRRHEENMAALETSLRSERQQNDAIMKQLAESQGEIGELQRKLEDADARNGLLQDSLQRHEENMAALETSLRSERQQNDAIMKQLAESQGEIGELQRKLEDADARNGLLQDSLQRHEENMAALETSLRSERQQNDAIMKQLAESQGEIGELQRKLEDADARNGLLQDSLQRLEDDATTREALMETERKETEMTKKTLTEALDQIEELVKEVECANHSVHQLQDSMQRMEQTAVAREATLLAEHQEKDATSKALAEAQGRIEGLLKEIYSANRKNDQLQSTIERLEQDVTAKEALLLTEKEAHDATRKTLTEAQEESGELLKKIHDNDKHILQLQFTIQRLEETTVANENLLLREREQNDITTKAHNESQEKYEELLSKFVDVDRKIDLLQGTIERLGENTTKDSLLLSERHEKDAIKKALTEAQEKNEELLMKVEDANEKIEQLQTTIDMLEDNVAAKDVSLEAAMKENDAIRRSLTEAQERNDELLKKISDSEYRIHLLQDTIQKLQVDAISRLSSFVMEKQESDASKRAVTEAHERNEDLLKRNEDLLKRNDDLIKKIEDSSKIVTQLQEALQRLEGKACNLEAENQVLRQQATSTPPTSAKSPASRAKISRIHRSPENGHNLNGDIRQTEMKPSTGTSEAITSAANVPDLGDQKDFEHGEKLQRIPKQKYQPSHHQQPQDDQQWLLACIPQHLGFSGSKPVAALLIYQCLLHWKSFEAMKTGVFDSILHAINSATEAQNDMRTLAYWLSNLSTLTVLLQRSFKTTRTAISTPQRRRFSSERIFHGNQTSNAGLAYLSGQSVVGSAGLPQVEAKYPALLFKQQLVDLIEKVYGMISDSVKKELNPLLELCIQDPRTSHSSIAKGNLNGMGQQNQLTYWLGIVKILTSYLDVLRVNHVPSILVHKLFTQIFSLIDVQLFNRLLLRRECCSFSNGEYVRAGLTELKHWSDNATREFAGSAWEALRHIRQAVDFLCKKFPLYISWAASIHP

SEQ ID NO: 60494 - protein, 1080 aa, Zea Mays
MFTAVDHQKKTISINDTVNVVEGPFQGKQGVVKHLYLGILFIYNESESENCGFFCAQSGSCEKIRKGLGSSTTESSDFTTPMFPEPAYEQNGHRDTERPYRSTREQLFSIGQMLRIRKGPLKGYLCRVVRIFRNDVTVKLDSLLKIVTVQADLLSVPANRGDNLSGAPASKFGSQDTSFFGSEAGKTSWDNGLPSFGSDSWQPFSSSTLSVQNAGGESEADPWSKKTSAKDDSDPWGKKTDGDSDRWGKKTDGDSDPWGKEAVSAADGDSNPWGKETVPSAAGDSDPWGKKVVSSADGDSDSWGKKATSSAVDTEKEGSGGTAWDKQAGVGGSDAAGSSWDRAVVNESEKSDNWGEACRVMDMGTGAEADTDPWGSKVKAVDMEGPNNWEKATVPPNNKLEDVSQGWGQPKGNSTEDQAIDNVSKDVDNNRACDSSLPVTEDGTWGKSKDNSCGGAGGAGGWDVSVGNWNKSSVVADAQDEGWGKGNWSSAESEETNNQSGNWNKTGASDQAGYNNWDKPKSFGGNGWNKGDDQNSSWNRPENFGGGRGFGRGQGRGRGQQSGYFNGRNDQGSWKKSWGSDNAERPSWRSDNQVDNEAGESGGYRGRGRGGRGQYGGRGKDNGWRNDDRSNSGFGRENNSGDGPKWGGGGNWNATNPPSSSVGTKSYGQNQPFTWNNSEDNKPSVGEQGDPWASKVSSTEDTEQQNDSWSSKMISGGAEDTSGGWDTKVKDSSCNDGGEGLQNDPWANKIGSNEGSWNTTAKGIPSKEKADDPWNSKGGNDDSKKTDTWGAGSSGGDQELSWSKPNFSLGDQESTWNNPRFSDDDNANNRGGFGRGNRGRGRGRNFGDGGGSSWNGGNRNDESGGGRSGEPWNRRDFDGGGGRGRGRFGRGDRNQGNNFGSGDGGSWGSGRGNGGRGGYRNWNDNNERSFGEGGGWSQSQSSDWNANKGNGEGNQAFSKSKPSWEAQNTSGRDGQAGKGDANNSWSKNRSSPSSAWGAPSGGAGGRGSWGKSNEDGWNSAGGSAKEKPAWGGGSEASTKKEDKGGEGNGSQGGGGVSSWDKGADDAWNGNTGSDIGSGGW

SEQ ID NO: 60495 - protein, 532 aa, Zea Mays
MAEVVDKLKDYDIKKEGEAEILLHKKNSVFFNPVQVHNRDMSIAVLRTFVAKRKEEHEALVDKRNTSHKKNKQSETSSQNGEDASTGQQDEMDVVCEKELNKAEDQIDDLSKEATEPSWKVTRELKPPLVLEALAATGLRSLRYAREVEGLGKVVALDNDKASIEDCKRNIKFNGASATSKVEAYLVDARIHMLTHPKEFDVVDLDPYGSPSIFLDSAVQAVADGGLLMCTATDLAVLCGTNGEVCYAKYGSFPTKGKYCHEMALRILLASIESHANRYKRYIVPVLSVFMDFYIRVFVRVFTSASEIKNTPLKLSYIYQCVGCDSFHLQCLARTVQKELHDVPLFFSLHNIAGTVKCTSPSLVMFRSAVLNAGYRISSTHVNPLGIKSDAPWDVIWDIMRCWVKNHPIKEQPRDSPGTVILSKSPKLEANFSRAVAALSKAQTNKIKRFLPNPERHWGPKVRAGRKITSKHVSLLGPDAIKGAVNGGDCQKEGNGAEPDSTASEPEGIKDVEDEPSNKRQKTSDGEPASEP

SEQ ID NO: 60496 - protein, 554 aa, Zea Mays
MLIGVLQAHKSCVSVIAWQVLSAGSSKSSLLLATGCSDGSVKIWLGNIEGLNQCASGEVPFALVAVVATDLSSPVSSISLAIPAQSQHEVSLAIGRVSGSLEIWIWNASSNKIEIFSAWHAHDQVVTGLQWAMDGYCLFSCSQDNSARCWISHENHLEEIFMHSNFPELRESADLSELSDRCYGLTLAPGEQMIAVVRSLDLNLLNQMYQVRTQKAVVEFIWIGGQFVGIPLDRSIDICSSQSTDLSSSNLMWWGSNILWSLKKYENVEKRLVIWDVVAVLQELKKSAPAFLETLVHSWVSVLLSGDPQCVSIDAPSRSMHDMMPYVSTRKLHLLNIMCRKVMVSIHTHHGPGAENGNEETTDFWSTLLVRSETELRERLVGFTFAAVLKRTAYLFNGTSTENCWFPVGVAQMDSWVTMNYDGQVHDQLQSIRSKIKDLGSRIDGYSDVESCPYCSSPVHFESPDVAICGERHTLPRCRASMILCSVVQPLWHCVCCGGTVNKLLPESFFTMQASTMHDEGSLDLSAASVPLCPFCGILLQRSMPAFLLSTSPA

SEQ ID NO: 60497 - protein, 308 aa, Zea Mays
MEDSPSHIVLLNCDVCSSFPLPDMLEAHKKYGGMGTLLVNKVSAESANQFGELVADPETNELLHYTEKPETFVSDLINCGVYIFTPNIFSAIEDVLKQKKDRANLRRVSSFEALHSATKALPPDFVRLDQDILSPRAGKKELYTYQTLDFWEQIKTPGMSLRCSGLYLSRFRRTSPHLLASGDGKRTATIVGDVYIHPSAKVHPTSKIGPNVSISANARVGAGARLINCIILDGVEIMENAVVIHSIVGWKSSIGKWSRVQGEGDQNAKLGITILGEAVDVEDEVVIVNSIVLPNKTLNVSVQEEIIL

SEQ ID NO: 60498 - protein, 166 aa, Zea Mays
MGLPWGSPGARDVDKEDDMFVLIAPQNAVGNCIIDDMRAMTDAAGDRPVILVNPRLKDMPASSGVMQTMGRDIRLKYAASFETCYSFRLLYYAGSFYPIMGALRMAYPNKYEIYRRVDTLNGKENYILIAEFTNKPTPDEITSAFKGQKREEKASSGFWGFLSGLF

SEQ ID NO: 60499 - protein, 899 aa, Zea Mays
MAAAVAMRGGSSDSGGFDKVPGMDSGKYVRYTPEQVEVLERLYIDCPKPSSSRRQQLLRECPILSNIEPKQIKVWFQNRRCRDKQRKESSRLQAVNRKLTAMNKLLMEENERLQKQVSQLVHENAHMRQQLQNTSLANDTSCESNVTAPPNAIRDASNPSGLLAIAEETFTEFLSKATGTAIDWVQMPGMKPGPDSVGIVAISHGCRGVAARACGLVNLEPTKVIEILKDRPSWFRDCRSLEVFTMFPAGNGGTIELIYMQMYAPTTLVPARDFWTLRYTTTMEDGSLVVCERSLTGSGGGPNAASAQQFVRAEMLPSGYLVRPCEGGGSIVHIVDHLDLEAWSVPEVLRPLYESSRVVAQKMTTVALRHLRQIAQETSGEVVYALGRQPAVLRTFSQRLSRGFNDAISGFNDDGWSVMGGDGIEDVVVACNSTKKIRNNSNAGITFGAPGGIICAKASMLLQSVPPAVLVRFLREHRSEWADYNIDAYLASSLKTSACSLPGLRPMRFSGGQMIMPLAHTVENEEILEVVRLEGQPLTHDEALLSRDIHLLQLCTGIDEKSVGSSFQLVFAPIDEHFPDDAPLISSGFRVIPLDMKTDSVATMARQYVRSVVSAVQRVSMAISPSQSGLNAGQRMLSGFPEAATLARWVCQSYHYHLGVELLNQSDEAGEALLKMLWHHPDAVLCCSFKVPEELYSSPQYSNLLKQRQIPLTRETYVYVCKQGRARHVRNISYCAARPDARQDLRRVRKESNILRYLKTNGTGLRVPAVGRVHVRNGSACLIRPSCSVEGARRGQQRPLPGVLLRQLVLRLTRHPMACVMSRPIFLYGDPNMGKPSAVTEGFMLHALVVRLESSVFMKKLDTAQSLVPLTFDCLPGNRLFVYLTGQPKRCLFHSDVTC

SEQ ID NO: 60500 - protein, 518 aa, Zea Mays
MLGGLSGQPLSGPDIGGFAGNATPKLFGRWMGVGALFPFSRGHTETGSIDHEPWSFGKECEEVCRLALLRRYRLLPHIYTLFYHSHTKGIPVATPVFFADTQDPELRKVETSFLLGPLLVCASTLPNKGAHEYAHKLPKGIWLSFDFADSHPDLPVLYLQGKAEGVLFEDAGDGYAFTQGDYLLTYYIAELHSSVVTVKILKSEGSWKRPKRNLKINILLGGGAMISTDGVDGEVIHLTMPSESVVSSLVATSEFEHKKRMEMIQPIPDIEEPSGQEGAELSKIPVDLKSGDWFLKIVPWIGGRIISMAHIPSDSQWLHSRIEINGYEEYSGAEYRSAGCTEEYKVIRRHLEQSGEEESICMEGDIGGGLVLQRQISILKDNPKIVQIDSSIQARSVGAGSGGFSRLVCLRVHPTFTLLHPTEVVVAFTAINGSKQEISPEAGEITFEGDLKPNGEWMLVDKCVGLSLVNRFNPREVSKCFVHWGTGDVNMELWSEERPVSNETPLRICHQYEVQQTT

SEQ ID NO: 60501 - protein, 115 aa, Zea Mays
MIKLLRSRLRDYLRILCSGLIKERHFGTDIPRWAYHVNSSHIMVALAKRGENKGEVYMMAVQTSFQSILTLKDHCKEGPSMCMRLFVNHQQFSILFSVYEYDDGLRVTRTVRRLV

SEQ ID NO: 60502 - protein, 139 aa, Zea Mays
MFSYIIVPVQLGALGAGGERGGPRRVLGEQPAAVAPGPEHHHPAHQGRHPLLHLRRPRPLRLGHEGRHHRLRRRRRRQQQRRQHRDSVGSLRAGDEHEAGVRWRDDDGRVGLQRGWQRRPPRDGPAVRGRGPRCNNGLN

SEQ ID NO: 60503 - protein, 195 aa, Zea Mays
MIDLMIPAEDSVPVLITLAVKYLSECPLALQQLEEENMQLKRRKTDVGETLQWTDYMSLSFTQHVITETLRMGNIINGIMRKAVRDVEVKGHLIPKGWCVFVYFRSVHLDDKRYDEPYRFNPWRWKEKDTSTMGFTPFGGGQRLCPGLDLARLEASIFLHHLVTSFRWVAEEDHIVNFPTVRLKRGMPVRLTSKD

SEQ ID NO: 60504 - protein, 123 aa, Zea Mays
MDASCPTDLLTCTRWQRNAVRSCRPKPKQPLLNLLLANPPWHRLALALLRDTARRSPSVPREGHAARAVDDGALARGGRGHRGHTPGRSIRAAEPPPIRRRRLQLHANGPRAGHRAARGQTGP

SEQ ID NO: 60505 - protein, 159 aa, Zea Mays
MTLPAESITEQKSYHFLEADSVISESTKLYNATSFNEYVLEGSAPVLPETQRLFKKLVSLGIKPVFLTGRTEDQRAITVTNLRRQGYSGWMTLLLKPVGLKATAIAYKSGERQKLQDAGDANGAARLSISPSINPSPGSSACAQLLFVCYPSLLIIINS

SEQ ID NO: 60506 - protein, 385 aa, Zea Mays
MSPQICNAVAIAKIMRATLILPVLKQDQIWKDQSKFEDIFDVDHFINYLKDDVRIVRDIPDWFTEKDELFTSIKRTVKNIPKYASAQFYIDNVLPRIKEKRIMSIKPFVDRLGYDNVPTEINRLRCRVNYHALKFLPDIEEMAVKLAARMRNKTGSINPYMALHLRFEKGMVGLSFCDFAGTREEKAMMAAYRQKEWPRRFKNGSHLWPLALQKRKEGRCPLEPGEIAVILRALGYTSGTQIYVASGQVYGGKNRMAPLRNMFPNLVTKEELASAEELAPFRRHVTSLAALDFLVCLRSDAFVMTHGGNFAKLIIGARRYAGHRLKSVKPDKGLMSKSLGDPDMGWASFTEDVVVTHRTRTGLPEPTFPGYDLWENPLTPCMCRA

SEQ ID NO: 60507 - protein, 79 aa, Zea Mays
MRKGAASSEAMDFICDAEWQVDQCHDGQGAPCWQSVPHEGQATNGSKPWSDTQIAKFKRRYEQEEEESKDRDGYLFTCC

SEQ ID NO: 60508 - protein, 81 aa, Zea Mays
MMPKSQASPEQIETYLNQERSKRRDMLQKFLDQCREIQVTVDVYLIESDQIANAIIELVPVLRISQLVLGVSKSNVRKEPR

SEQ ID NO: 60509 - protein, 430 aa, Zea Mays
MAQMQQSSGHRPMELQQPHQQNTRKRKPTSSGAANSSGTGNTVGPSPPSTPSTHTPGGGVPVASNVNILQKSSMICGVDATGGLASSSNQMDALDSFVDFDENVDSFLSNDDVDGRGMFAALEKGSSEHNTESLKGLSLSEVGNNRTSNNKVVCCHFSSDGKLLASAGHEKKVFLWNMDNFKMDTKIEDHTNFITDIRFRTNSTQLATSSSDGTVRLWNAADESGALQTFHGHRSHVTSVDFHPRLTEVLCSCDDNGEILFWTVGQTTSTHVLRVKQGGTGRVRFEPRSGQLLAVAAGSMVNIFDVEKQSSLPCPPKGHNSEVNFVSWDENGEYLASVSQDTVKVWSVSSGVCIHELRSNGNQYQSCTFHPRYPKVLIVGGYQTLELWSLSDNQRIPIQAHEGLIAALAHSPFTGMIASASHDRCVKLWK

SEQ ID NO: 60510 - protein, 406 aa, Zea Mays
MDFDEYEYLEKTVEAFAAPANGSSPPGSGYKDKERSSRRRSTGGDEERDNVERRSKRSRPEEGRDRDRERHRYRDGDRHRSSRERRDRDRDVKEKEQGRENDKDRRSRDREREKEEREKDRQRRSRSRSERRRDDEERDRYRERDVRRRKEEVAEPEVDPERDQRTVFAYQLSLKADERDVYEFFSRAGKVRDVRLIMDRNSRRSKGVGYIEFYDAMSVPMAIALSGQLLLGQQVMVKPSEAEKNLVQSNASSGAASGGARKLYVGNLHSNINEDQLRQVFEPFGQVELVQLPLDPLSGLCKGFGFVQFARLEDAKAAQSLNGQLEIAGRVIKVSAVTDQAGMQVSGATGDLDDEEAGGLALNASSRALLMQKLDRSGITTRIQPPLQQHCFHIYLAYQGWRIDDV

SEQ ID NO: 60511 - protein, 152 aa, Zea Mays
MDGKKLGNRIIRVNEVRTRGPRDFGRDGFRRDPRRYGRDPYWDRRDREQSYDRERDPYHDRDSDRSREHDRERDYEHGGFNREVDYPMDRDHEVDDIHPREHDRAAETHNMDSDNDKYKEHGSRKRFRCHVNFVFHSGVMLVLETTVAIFNI

SEQ ID NO: 60512 - protein, 519 aa, Zea Mays
MAAAAGKARAVSLAAAVRVVAATARPASSAAAAAGVGAMALIVQGEDTAFGSLEWWAYAGISCFLVLFAGIMSGLTLGLMSLGLVELEILQRSGTDVEKAQAAAILPVVQRQHQLLVTLLLCNAVAMEALPIFLDRMFHPIVAVILSVTFVLAFGEVIPQAICTRYGLAVGANFVWLVRILMVICYPISYPIGKILDCALGHNESALFRRAQLKALVSIHSKEAGKGGELTHDETTIISGALDLTEKTAAEAMTPIESTFSLDVDSKLDWEAIGKILARGHSRVPVYSGNPRNIIGLLLVKSLLTVRAETETPVSAVSIRRIPRVPSDMPLYDILNEFQKGSSHMAAVVKAKPKTEPPLDKTEPNREAVGPTQLTVPLLSNAEESADNVVVDIERPHNRQINGNTASNAVPRSSEDIEDGEVVGIITLEDVFEELLQEEIVDETDEYVDVHKRIRVAAAAAASSVARAPSVRRLTGQKAAGAQNRQGQQPPGILKKPTEGDSNPSKQVNLMEPLLEKGR

SEQ ID NO: 60513 - protein, 349 aa, Zea Mays
MGLAHRDSILKNIASDFEQWNHLVKKEKAIYHTLNMLSVDVTKKCLVAEGWSPIFASIQIQDALQRATLDSKSQVGSIFQVLNTKESPPTYFQTNKFTSAFQEIVDAYGVAKYQEANPGVFTIVTFPFLFAVMFGDWGHGICLLLATLYLIIREKKLASQKLGDIMEMMFGGRYVIMMMAVFSIYTGLIYNEFFSVPFGLFGKSAYACRDSSCSDATTEGLLKVRDAYPFGVDPVWHGSRSELPFLNSLKMKMSILLGVAQMNLGIVISYFNAKFFRNSINVWYQFIPQLIFLNSLFGYLSLLIIIKWCTGSKADLYHVMIYMFLSPTDDLSENQLFSGQKTVQVYILC

SEQ ID NO: 60514 - protein, 1114 aa, Zea Mays
MVTPPTVEEDEEMLVPRQEAVDTDAAQPMEVVAQTEVVSTAESQPVEDPQTSRFTWTIENFTRFSEKKHYLEVFVVGGFKWSVLIFPKGNNVDHFSMYLDVADSTSLPYGWSRYAQFSLAVVNQIQPEFTIRKETQHQFNARESDWGFTSFMPLSELYDASRGYLVNDTVVVEAEVAVRRIVDYWTYDSKKETGYVGLKNQGATCYMNSLLQTLYHIPYFRKAVYHMPTTENDIPSGSIPLALQSLFYKLQYSDSSVATKELTKSFGWDTYDSFMQHDVQELNRVLSEKLEDKMKGTVVEGTIEQLFEGHHINYIECINVEHKSNRKESFYDLQLDVKGCRDIYSSFDKYVEVERLEGDNKYHAENHGLQDAKKGVLFLDFPPVLQLQLKRFEYDYMRDSMVKINDRYEFPLQLDLDRDGGKYIAPNADRSTRNLYTLHSVLVHSGGVHGGHYYAFIRPTLSEQWYKFDDERVTKEDAKKALEEQYGGDEELPQINPGFNNAPFKFTKYSNAYMLVYIRESAKEKIMCTVDEKDIAEHLRVRLKKEQEEKEHKKKEKAEAHLYTIIKVARDEDLKEQIGKGIYFDLVDHEKVHNFRIQKQMPFSCFKEEVAKEYGIPVQFQRFWLWAKRQNHTYRPNRPLTVHEETQSVGQLREISNKAHNVELKLFLEVELGLDLRPLPPPEKGKEDILLFFKFYNPEKEELCFMGRLFVKALGKPSEILAKLNEMAGFPPDQEIELFEEIKFEPNVMCETIDKKLTFHYSQLEDGDIICFQKSPGAEYDAPVRYPDVPSFLEYVHNRQVVHFRSLEKPKDDDFSLELSKLHTYDDVVERVARQLELDDPAKIRLTPHNCYSQQPKPQPVKYRGVVHLSDMLIHYNQTSDILYYEVLDIPLPELQFLKTLKVAFHHPTKDEVVIHSIRLPKNSTIADVIYDLKTKVELSSPNAELRVLEVFYHKIYKIFPLHEKIENINDQYWTLRAEEIPEEEKNIGPNDRLIHVYHFKKDINQTQQIQNFGDPFVLVVHEGETLAEVKKRIQSKLQVSADEFSKWKFAFISMNRPDYLQDSDVVPTGFQRREVYGAWEQYLGIEHADTAPKRVYTVNQNRHAYEKPVKIYN

SEQ ID NO: 60515 - protein, 435 aa, Zea Mays
MENHGKLDGWDEVLEEEDELASVCKYPISTSYLSYGTSRRGKSVKKPRFSLRGYDFVPLDVKTDNLCIGEQDGSSAVPSTKASQTMVAERLENVEEQTEDLAPEFALPPKANTLVSELLDNLQRRGGSFVRTPSLLHQHAPSISIREQEVSSGVPPTKASQALMDEPFENDNGQTEELPSELPCSIKRPKFSVAELLEDLQGRSGSYVETASLSHQHTRAKHWKPKFLSSEKKTIAILGDRSIDSEDPLEHVIDGTSSEEEDATQNHLSLVNKDENQQTMADLFQEVFNPTNMDGAMKSMRSTGAGNYGRMQQIMHMEKDWHVEFSRQYSREHSYSGDLKGTTVQIMSRSLEGKLTVCSCMFQEKGNDATISNASADGTMDESRTRRTIIFSPKICNNVDLLVGNIIHIFPPWKEVKIQEEHVIICTYFSHHHRT

SEQ ID NO: 60516 - protein, 212 aa, Zea Mays
MILRSAPRRLHLLRPHHLRLLSAAALASAVPIPAPAQSPIEWAEAPLASVRPATADASLFHVSLDLSAHRGLLASHTAAGQFLRFRLPASSYHIFLAIASPPPPPALETLALAGPPSCFEFLVKRLPGTPSARLCDLRPGDLVHVGASVVGRGFDVARISDARDVLVFATGSGIRKGLRIGNPEELKLYLSSPDQIVNGQGREVISRMCSQG

SEQ ID NO: 60517 - protein, 90 aa, Zea Mays
MIQFGHQMPDYDSPATQSTSETSHQEASGMSEGSLNEHNNDHSGNLDGYSKSDENKMMSALSLGNPETAYAHNPKPDRTQSFSCELRSTH

SEQ ID NO: 60518 - protein, 307 aa, Zea Mays
MDVSYNYYVDGSLSNNPSGQKQFINYLGTSIDASGRINSGNLTILNCLRMNECNINNLTNRATSFAINCGGKQVEYSDLMPIMFSEDSTDLGGSGFHVNATSHWVVSHVGSDPFNESTGIVNTSDIFETNMQELYQTARTSTSSLWYYVVGLANGNYTVQLFFAEIVITHGPGKRLFDIDIQDQNIRKDFDITKEAGGSRKATNITYEVTVDNSILAIHLYWSGRGTCCIPYEGAYGPLVSAIKVTHSQDPKTSPPQAPHSDSARDDVKRRGVVAGIAALSIAAAVISSSVVYLWWKWVSLVKRPMA

SEQ ID NO: 60519 - protein, 378 aa, Zea Mays
MSNGDVYERTHDELDFEFLGNVRGKEWRVQTNVYGNGSTAAGREERYGLWFDPTEDFHRYAIHWTRDRIIWCKGASIGWHSDDNKPYLRQRAFTAVCYLNNHGEDYKGGILQFQDGDPSCIVPVAGDVVIYTADTRNVHCVNEVTEGERLTLTLWFTRDRAYDEDPKLLNFLSQTSLSCEPTEQNSYIPVPASDNMYRFSCDQSGFDIRCARVHILGFSFHSSSGECNISASPAEDDPIELLGKQLRLGRGDDVFEKIFSNSLHALQVVQFYYWKKHELAARREQSVVSSGTVCCPVTHHSKGTELPLPCNHALAQTIFGSYNTEEIVQWNDFALAVAMWEKYSEELKKQLLTFLPYWLSNETIYVVDTSELQRAEPI

SEQ ID NO: 60520 - protein, 607 aa, Zea Mays
MLVSVAADDSGWQESPSQAVLFADEIAAVRAVLGGTLSEASIIAALSQCGGNAERAINAILDDAEVVSAPKRAKVELDVGGVPVQVPVAVKVKAESIDVGAVAPAAVKVKAEPIDGDVVGSQQSDGSSAKATAKMKSEPAEWSAKTPDRFVPDARSVGAPVAVASAGAGISIVPRQNKRPRQEVGTIELTTTHPVPYLNSRPIRALPPMPPMGGDGEVYDPKPIQMVPPLEIQMHDPRTTLPAPSPIDIEMYQQPPRPPPVDVEMCEQRSRPRPRPLRAVVPASVTDMRMVVAPPDGEFGDFPVERDWMLVGKSYVPGLSTNRGRRRLDAGEIVHFAFPSYEKIYGGLKMTAKKAAALAQIVRFSTKRAGEIGKLSPEWTQCLVPLVNSSKVKIQGKLVFPTMELRLMQEILLYVSFYIHKSVLAEMDNSPCDMLDHANVDFTPSPLHKLLSLLNLKPSNKDAFSLDDLTTRKLKQILRGNNNNGDDSTPVLGHTFLEQGADEQAISEAALNKLVGTAETFDLEEAEPPTTLVSVLKPYQKQALFWMSKLEKGIDANEETKTLNPCWSAYNIADRRAPPVYVNLFTGQATTQFPSMTETVRGGGGVL

SEQ ID NO: 60521 - protein, 614 aa, Zea Mays
MESAMHHILEALGQMEERLTATLEGRCGALEQRNTTAMAHLRRGCVGLGDGACASVATAMDNFSFDSFKGPTTTTTSAAAALQYDNDELVLDAGPIFGEEPIFDGESSPSTRFDSPSPFNPYYFTLPQTPAELVDEPNHNEASPLSLVHDDWVDLFLQTGSCPECSRYCLLLDHMALGYFPYSELAAVPTKCSMLVLNRGTDEGGNLQLQHSTTSQLLNSGYLFDIRPDLVKGDSVVLPLEFASAVEGRVLLTTWWPQDAALQHEAVGVFLTHSNWNSSQESLCAGVPMPSVRAPAGVVQCSSTGPPVFTLINRATGLAIKHSLGQFHPMLVPYNPEYLDRTLTSSLSHMLPYAKTFSAADGRLPQWRASEYDVESSFSSDAILKVSAAAETVEKVYQGQLVGPTTFAAKLQPYLWSFNQVKENILFQHINVACGYYPVGKGFVLVADNLGDGLFAVSNEFHSVIVVSQNIVDHIRPRFFTANLTNATSIDDAIVWFCSATNATHAVSKLYHREATNQRLKVAEAAMRSQDKNAIMADSWYLPQNVGELWDPWSWRRRSITAALEQAAANETIDRACEISDLHLNSFFLKILNWHAGTQKKTVERYVRSLLPRR

SEQ ID NO: 60522 - protein, 332 aa, Zea Mays
MSGRWAARPALFTAAQYEELEHQALIYKYLVAGVPVPPDLLLPLRRGFVFHQPPALGYGPYFGKKVDPEPGRCRRTDGKKWRCSKEAAPDSKYCERHMHRGRNRSRKPVEAQLAPPPHAQPQQQQQAPAPAAGFQNHSLYPSILTGNGGGGVGAGAGGGTFGLGPTSQLHMDSAAAYATAAGGGSKYLRYSAYGVKSLSDEHSTLLSGGMDPSMMDNSWRLLPSQTNTFQATSYPVFGTLSGLDESTIASLPKTQREPLSFFGSDFVTAAKQENQTLRPFFDEWPKSRDSWPELGEDSSLGFSATQLSISIPMATSDFSNTSSRSPGGIPSR

SEQ ID NO: 60523 - protein, 555 aa, Zea Mays
MLNNKLGTSVTATQVSKEEAKTSVSAVDAQLFSKGEAKPTDVSVLPTSTISGTPAVGGAIGIPGLTNIPNLESVKRAQELAAKMGFRQDPQFGPLINLFPGTSTEVTVPQRPAKAPVLRLDAQGREIDEQGNVISMTKPTNLSTLKVNINKQKKEAFQIIKPDLDSLAKSSVHFDERMGINQKKLLRLKRPGFQFVEEGKLTRQAELQKIKSQFGEAQAKELKVKQAQLAKAKTEVDMNPNLIEVALGVRAPKQKQKEEIPEIEPWDAKILLSATYEDVSVEKLNLDKITIYVEHPEPYDPPAEPAPPPPQPLKLTKKEQKKLRTQRRLAKEKDRQEMIRQGLLEPPKPKVKMSNLMKVLGSEAVQDPTRMEMEIRTAAAEREQAHVDRNIARKLTPSERREKKERKLFDDPTNTVETIVCVYKIRDLSHPQTRFKVDVNAQENKLTGAAVITDSISVVVVEGGKKSIKRYNKLMLNRIDWAAAVGGDEDAEAEAEADKPVNSCELVWQGSVAKPTFHRFTVHNCRSESAAKKIFVDASVPHYWDLAVNSSEGSP

SEQ ID NO: 60524 - protein, 474 aa, Zea Mays
MLQEVIRRPLLCLRKELYNRMEWRIIIICLVCCPTIFMEMRSLLHFWLLATGLGSVLELNNALVSSALDILLKPMSWGISIELGQRFPFSHAYFPSQQSDLLAILTGPLSYKGFLDLVSYISALVHLDNTRTRCSSQKNLQLQPSKGLVKYNSAWYMIISFPIWFSYATALLFHREGSQDYLSETLSKEITAESISDVSLVQRAAFYLSWLLCPYNHDQREMLSNNILEISHSWARNNKKCVSYQSTVNNRRKLRIPTAADSEKFHVPVNTISSLVKEFDDRCVKCCSPTAFPQAQVGNLSDLHPLYFNLLHQWIPLGVLLVSPSCVNEQNCDILLRYTSTGQVLESNGARVKTKDDATNDGFLGSCIGTAERWALTGAYLIFGWLDVVEDMAPLIFDCEDKCHSFVSQLRNKTGPYLLKCVKSLFKTLEQPNQDKDFVIDLHNRLLNWDKNVQGCEIFGDVILEMNKKFNLPL

SEQ ID NO: 60525 - protein, 142 aa, Zea Mays
MKGPYNSKTLMMATTAYIDDSYSEIIDPLKTELIAGEIKIKGIELQESCSLSFFSMGVIETETMGTRVKESKTVLVEKELELIDEPQIQESPPVRALLHDEVDFAESSLAIRESDIPVKKVLIIVTITFVWPQQPYYLKPMF

SEQ ID NO: 60526 - protein, 222 aa, Zea Mays
MDLASLLLSQLLLLPVVTVVSGETAAHPGYAHAEEACSGMLEAEAEKATVLVPAPERREEFDGGRIVDISHYYREDMPEWESSEGSGEFLQLARSMRNGSDIANFSELRLTAHSGTHVDAPGHVFEHYYDTGFDVDTLDLAVLNGPALLVDVPRDKNITADVMASLNIPKGVRRVLFRTLNTDRSTSILHEDLYRFGPLECVTSYFLLRLYTEIVLGYMNYK

SEQ ID NO: 60527 - protein, 336 aa, Zea Mays
MDPAISKMLYFHVPSRHPSSTPELELPTLLQSAAVMGIGLLYEGSAHALTMKILLGEIGRRSGGDNVLEREGYAVAAGSALGFVALGHGNRAFGFMDTFLDRLFEYIGTKEVYHEKYLNATSADDQSCNPGQMMDGAQINVDVTAPGAILALALIFLKAESEEIAARLNIPNTYFDLQYVRPDFVMLRIIARNLILWSRIQPTKGWVDSQIPETVRCGISNMSEGTIDSDELDAEALFQAYVNIVTGACIALGLKYAGSRNGDAQELLYAYTVYFLNEIKHIPVRTSNILPKGLLQYVDRGTLELCLHLIVLSLSLTSHGGDLETRQIHSMGEYST

SEQ ID NO: 60528 - protein, 978 aa, Zea Mays
MDDLEQAILLASDSPAAAAASPSVRAEALAFCARARDESPPSSLLRLCLSGIASSPHAQVHFWCLQSLHDLLLRRRLVLPDDLALLRSSLLSLAVSSHAASPPFLRNKLAQLVALLVRLDYPHVYPSYFLDLLPPAPPQPGPTDMFARVLISLDDDLLSQEYPRSSEEAADAMRVKDSMRVQCVSQIASHWHTAAVTLRTADPAVAAVALDAARRCISWIDVGLVANDVFVPLLFDIAMSPASMPPLAAAAVGCLSAVATKRMDFRAKVGLLRSLLAAHQGLGSPDSGVKMAPLVTTYAAEALECHRRLGPTDADGAAALEMLEEVLPAVFAAAESGNDEDVDSGSVLEFLSGYVSIMKAPSEKQLAHLGRILDLVRVQMSFDPVYRGHLDVLDKIGKEEEDLMAEQRKDLIVLFRSICRVAPAAAQLFIRGLIMTALSSAEASVEDVEVALTLFFRLGEAVGEEEIRSGAGLLGELVPMLLSARFLCHTHRLVALVYLETVTRYMKFVQEHVQYVPHLLGVFLDNRGIHHQNAHVSRRAGYLFMRAVKSLKANLVPYLDTILQSLQDVLSQFTSMDWANKDTKFPSSEDGSQIFEAVGLLIGIEEVSPEKQAQCLTALLNPLCHQIESLVMDAKARGLEESLPRAISLQQIIVALNMVSKGFNERLVMVNRPAIGVMFKKTLDVVLQVLVSFPSVRPLRSKVISFLHRMIEILGISVLPCIPIALRQLLLDNEAKDMVEFLVLVNQIICKFKSSASAILEEVFPTIASHLSVILSQDAFSAGLASNTEEMRELQELQRTLYIFLHAMATHDLSTVLLTSSSRQYLETIMQLLLFTSCKHKDILLRKACVQIFVNLVKDWCSNSEDKVPGFRVFMIEKFATNCCLYSVLDKSFDLRDANSLVLFGEIVLAQKIMYERFGEEFIMNFVAKGLPEVHCPPDLAEQYYQKLKGNDIKAFRSFYQSLVEKIRPQGNGSLVFR

SEQ ID NO: 60529 - protein, 551 aa, Zea Mays
MILKYGGVLTHAGRKQAEELGRFFRNNIYPGEGTGLLRLHSTYRHDLKIYSSDEGRVQMSAAAFAKGLLDLEGQLTPILVSLVSKDSSMLDGLEDASTEMDEAKARLHEIIISSEKAKNTEGPVEFPWMVDGAGLPANASQLLPKMAKLTKEVTSQVKLLAEGEDERLALTSTFSKYDQAKALGKTTIDVARIAAGLPCGSESFLLMFARWRKLERDLYNERKDRFDITQIPDVYDSCKYDLLHNAHLNLKGLEELFKVAQILADGVIPNEYGINPKQKLKIGSKIARRLLGKILIDLRNTREEAISVAEPKFIEDEALFLPTKEAEHQQKVHVRNEDGRRSSSTSEKSLDQEDEDDRETKYRLDPKYANVRTPERHVRTRLYFTSESHIHSLMNVLRYCNLDESLQGEESLVCQSALDRLHRTRELDYMSNIVLRMFENIEVPLEDEKRFRIEMTFSRGADLSPLEDKTSESSSLLQEHTLPIMGPERLQEVGSCLTMDKFEKMVRPFAMPPEDFPPAAPPQALGYFSKGAGVLERLASLWPFHKSANGK

SEQ ID NO: 60530 - protein, 71 aa, Zea Mays
MTSAVYRSPIFNQCHGDTIICAKGTIVSTKPSTTVGGQILGRQYCEIIVTCVLKRDTILPRPGVMSLVVLL

SEQ ID NO: 60531 - protein, 507 aa, Zea Mays
MAEVVDKLKDYDIKKEGEAEILLHKKNSVFFNPVQALAATGLRSLRYAREVEGLGKVVALDNDKASIEDCKRNIKFNGASATSKVEAYLVDARIHMLTHPKEFDVVDLDPYGSPSIFLDSAVQAVADGGLLMCTATDLAVLCGTNGEVCYAKYGSFPTKGKYCHEMALRILLASIESHANRYKRYIVPVLSVFMDFYIRVFVRVFTSASEIKNTPLKLSYIYQCVGCDSFHLQCLARTVQKKNNGVKHAPAIGPVVPQECSDCGKKFNVGGPIWSAPIHDQDWVLSTLTGVKSMKDRYPAYDKITSVLNTMSEELHDVPLFFSLHNIAGTVKCTSPSLVMFRSAVLNAGYRISSTHVNPLGIKSDAPWDVIWDIMRCWVKNHPIKEQPRDSPGTVILSKSPKLEANFSRAVAALSKAQTNKIKRFLPNPERHWGPKVRAGRKITSKHVSLLGPDAIKGAVNGGDCQKEGNGAEPDSTASEPEGIKDVEDEPSNKRQKTSDGEPASEP

SEQ ID NO: 60532 - protein, 200 aa, Zea Mays
MELDPRLYENVSVSDNDVRNIVLSYLMHNCFKETAEAFLSSTGLNLPVDYSVDVDKRKAIFNFVLEGNALKAIELTEEMAPNLLENDMDLHFDLLSLHFIELVRSKKFTEALDFGQKKLTSFQKVTKYIEKLEDFMALLAYEEPEKSPMFHLLSPEHRQNVAEGLNRAVLAYSSLERVVQQATVVRQYLQQEVGKAFLSK

SEQ ID NO: 60533 - protein, 289 aa, Zea Mays
MLLRNAKENGVDDLQLMEGSEAMEMEPELRCLKALLSPSTGIIDSHSLMLSLLADAENLGTTISYNTSVISGHVGSNGLELHVCESKELQNYHVGSHVNAQLVLLPKLVINSAGLSAVLLAKQFHGLDQEFVPTPHYARGCYFTLSQTKSPFSRLIYPLPEDGGIGVHVTLDLNGLVRFGPDVEWISDGGKDHVSCFLNKFDYSVNPNRCSVFYPVVRKYFPNLKDGSLEPGYSGIRPKLSGPGQPPSDFVIQGWDVHGVPGLVNLFGIESPGLTSSLAIAEHIVSKYL

SEQ ID NO: 60534 - protein, 468 aa, Zea Mays
MEHLYEGGGFVSTLSASALLLAGSTVGGGTAVNWSACIKTPDDVRGEWARDRGLPLFATGEYAAAMDKVFERLGVTAGCAEEGLQNKVLRKGCERLGYKVESVSRNSSEGHYCGSCGYGCRTGDKRGTDSTWLVDAVSRGAVILTGCKAEKLLLEPGSAADGRAKRCVGVVARSTNPAITRTLEVTARVTVSACGSLLTPVLLRGSGLRNRHIGKNLHLHPTALVWGYFPDTVPDLRGRMYEGGIITSLHKVEGGGPGAPARAILEAPAMGLAGAGTQFPWVSGRDMKERMLRYGRTVHLFSMVRDRGSGTVHGERRVAYHLDATDRENMRDGMRRALRVLAAAGAAEIGTHRSDGQRFACGGATEAALEEFLDGVDVVRGPQSKAEAWTLCCTAHQMGSCRMGATARDGAVDARGESWEAGSLYVCDGSVLPGAVGVNPMVTIQSVAYCLATGIAESLRRGPVSRKD

SEQ ID NO: 60535 - protein, 85 aa, Zea Mays
MHQFRDYKIGESCIFKHSNQYNALLYPPGPLADPPCCYQIVFLMWHIYCICFNIKTDEWVISNFPCFGVFVHQLQVVFSLAVSCS

SEQ ID NO: 60536 - protein, 295 aa, Zea Mays
MTEDGYPVKLHVYDLSQGMARQLPATIVGREAIEAIWHTGVVVYGREYYFGGGIQEGQPGRTPYGTPVRVEDLGVTHVPREVFEEFLREIGPRYYTLATYKLLNHNCNSFSNEAAQFLAGSAIPSYILELPNQVMNSPVGALILPMIQGLEASLGAGAVPQPPQFRPVLAPLGAATVALPLTDDVEPGSAAADEPEAAKIAGASDGTPVPLSVQPAAAPAAAAAQASAVPTVSSMLVPPDPHAEAKSRVQEEIKREFADIMAAGTARAGEAAALATRRVMERHGAGSKEQSLTID

SEQ ID NO: 60537 - protein, 709 aa, Zea Mays
MWSVHKFGGTCMGTSQRIQSVANIVLGDSSERKLIIVSAMSKVTDMMYNLVQKAQSRDDSYTIALEEVFEKHMVAAKDLIDGEDLARFLSQLHSDVSNLRAMLRAIYIAGHATESFSDFVVGHGELWSAQMLSYAIKKSYFGANVLHPRTIIPVMKDNIPIVIRNMFNLSASGTMICKQPANENGDLDACVKSFATIDNLALVNVEGTGMAGVPGTASAIFSTVKDVGANVIMISQASSEHSVCFAVPEKEVAAVSARLHDRFHEALAAGRLSKVEVINGCSILAAVGLRMASTPGVSAILFDALAKANINVRAIAQGCSEYNITVVLKQEDCVRALRAAHSRFFLSKTTLAVGIIGPGLIGRTLLNQLKDQVAALKENMNIDLRVIGITGSSTMLLSDTGIDLTQWKQLLKKEAEPADIDSFVHHLSDNHVFPNKVLVDCTADTSVASHYYNWLKKGIHVITPNKKANSGPLDQYLKLRTLQRASYTHYFYEATVGAGLPIISTLRGLLETGDKILRIEGIFSGTLSYIFNNFEGTRAFSDVVAEAKEAGYTEPDPRDDLSGTDVARKVIILARESGLRLELSDIPVKSLVPETLAACSSADEFMQKLPSFDEDWARQRSDADAADEVLRYVGVVDTVNKRGQVELRRYKRDHPFAQLSGSDNIIAFTTSRYKEQPLIVRGPGAGAEVTAGGVFCDILRLASYLGAPS

SEQ ID NO: 60538 - protein, 294 aa, Zea Mays
MAEVQDGHYDSMSQATDSLRVEPIYESFLCPLTKQVMRDPVSIDSGVTFERNAILNYFNECLSSGRRLVCPVTKMELSNTELNPSIALRNTIDEWMNRNEAAKLDVARKSLTSDSTESDILQALQYVDEICQRSRSNRQVVRRDGLIIMIADLLKNSSTKVRQAALGTLCSIAKDDNENKVEIAAGDNIRTIVKFLNHGQTQEKEQAVSLLFELSENKALSERIGSVSGAILILVGLSSSKVENLLIVDRAEKTLENLESCEKNVRQMAENGRLQPLLRLLLDGSRASPTPSQK

SEQ ID NO: 60539 - protein, 427 aa, Zea Mays
MEEELIRQEIDQGSNKNDTIMEPAATAPRKPICDLSDPRYDICEISGDARTMGANRTVLYVPPVGELGSDGQEWSIRDQSRKHLEFVNKVTVKSLNASQSLAAPECTSRHAVRALVFAMNGLTSNPWHDFSDVLIPLFITTRALEGEVQFLVSDLQPWFVDKYRLVLKNLSRYDIIDFNQDGGVRCYPHVTVGLRSHRDLGIDPARAPRNYTMLDFRLYIREIYRLPSAGVSIPYKEANSNAAAAAPGAPAEQLQRKPRLMLINRGRTRKFVNFPEIVGAVQKAGFEVIPIEPRRDLSVEDFARTVDSCDVLMGAHGAGLTNFFFLRTNAVMLQVVPWGHMEHPSMAFYGGPAKEMRLRDVEYSIADVESTLYDKYGKDNPVVSDPESIHKQGWQLGMRYYWIEQDIRLNVTRFAPTLQKVLQMIRE

SEQ ID NO: 60540 - protein, 1013 aa, Zea Mays
MLYPDACGGGGRGWISPVMPNYGRGHGTRDTCALHTAHLSCDTLVDFWSALGDETRSSLLRMKEEDFIERLMHRFDSKRFCRDCRRNVIREFKELKELKRMRREPRCTSWFCVADTTFNCEVFEDAILVDWHQSLLEQDGIYHHFEWAIGTDEGKSDILNFENVGMIGQVHRKGLDLDQFEDYFVTLRACRLDGRRTEFCVKAHALKGQSCVHRRLIVGDGFVTITKGESIRSFFEHAEEAEEEDEDDVVDRDSNDPDGDIAHPQKHAKSPELAREFLLDAAAVIFKEQVEKAFREGTARQNAHSVFVSLALKLLEERVHVACKEIITLEKQTKLLEEEEKEKREEEERRDRRRTKEREKKNRRKERLKGKDKDKEKILVRSKKPGLSTFSPSSQAAPSSNESQDVLDLRYSDSEEEDNVVVREHYPDSSADQSSSKDTDERSNEHECSATAEFVPSDCDGSFLCDESNSSRNLRFRWDFPEKDVSYWYEDCRVDSGDTQLQSRERIRNNTRSYNTVFNTNNRTRDKYNPCSCGHQEDFRYFSTATRSSRETKISRKTVAEKPRLQYRRCYPPESFAVSNGRVGGTPNKNTGPKQVWEPMDARKKIGNGRGSEITPETTGAADGSDQVECSKDISECEKLEVVCETLAETCCEISAEACKSDQPCRQGEKNQSACSDGSKCVDKPNCCLTKDTVRTTNLTSSDSFSCLSEGDRDSSMSSMTSLSAQNVESSSTSDSDEYSDRNDSSPGDPPVKNVSRSLLEMCAGNGFREYQPKGLNPPNGNQFGFMVAPLQDQMLHQQKIHAPPYSSPFVGFHNHPLAVPTNGYLPYPQPGHFYPGLMTPVGCGVAGSQCVDFPMQYSNNIHPYSGPEFGFLPAKPVHKTPVSFHAVPVPPLAPLCRSEVPVVINQERQQGSAPPKFKQAVLVPENGCSAEDNTFKQKGDDTDSTPFSLFQFNLPIAPPTLATSKEEQSGAMPSMALPPAQITRAQLCSREETNVKEYNLFSGCNGVMFQLN

SEQ ID NO: 60541 - protein, 120 aa, Zea Mays
MNQVSGRNWGGGGGGGTPCCFSLLSGLPAGNGAPVFSSRMDIHRSLSKGLVVLYVRYSQLGTGRGRLRDPFANKSTVLFYSGRTGLIDSDEQVSSYLRQRLRALTCQTRADDARGESLET

SEQ ID NO: 60542 - protein, 129 aa, Zea Mays
MHQDAHEFLNFLLNELVDILEKESSAAKDSPQSSSPEKAPNGPVQPLANGVKKEPPVTLVHKNFQGILTNETRCLRCETVTARDETFLDLSVDIEQNSSITSCLKNFCSTETLNAEDKFFCDKCCRKAD

SEQ ID NO: 60543 - protein, 833 aa, Zea Mays
MIQDSPGREFLLRVSYLEIYNEVINDLLDPTGQNLRVREDAQGTYVEGIKEEVVLSPGHALSFIAAGEEHRHVGSNNFNLFSSRSHTIFTLMIESSARGDEYDGVMYSQLNLIDLAGSESSKTETTGLRRREGSYINKSLLTLGTVIGKLSEGRATHIPYRDSKLTRLLQSSLSGHGHVSLICTITPASSNMEETHNTLKFASRAKRVEIYASRNRIIDEKSLIKKYQKEISSLKQELDQLRRGIVGGASQEEIMSLRQQLEEGQVKMQSRLEEEEEAKAALMSRIQRLTKLILVSTKNNIPALTDGHQRHNSVSEQDKLSTSQDSSTLVQNEGTTKDHLPDSLDEINQLRSGSGEHSSATCSATDSMQAGFTASDHMDLLIEQIKMLAGEVAFGTSSLKRLIEQSIDDPEGSKDQIENLEREIQQKRRHMRALEKQIMESGEASVANASMVDMQQTITKLTAQCSEKAFELELKSADNRVLQEQLQQKNAEVNDLQEKVFHLEQQLSAKVGISPEQETDCAQQEAIDLKSKLQSKEAEFEKLKFEHLKITEEQCDLINQNHKLSEEAAYAKELASSAAVELKNLAEEVTKLSVLNVKQAKELLVAQEMAHSRVHGRKGRTTSRGRDEVGTWSLDLEDMKIELQARRQREAALEAALAEKELLEEEYKKKFDEAKKKELSLENDLAGMWVLVAKLKRGALGISDFNVDDRTVNLADITNGTKENKGEKNFALVEKQVSEDSVKSLSTEEHRSPEFEPLLVRLKAKIQEMKEKDTDPLSDKDGNSHVCKVCFESATAAVLLPCRHFCLCKPCSLACSECPLCRTRIADRIITFT

SEQ ID NO: 60544 - protein, 146 aa, Zea Mays
MMSHHVITSTLIGVSYLTGFFRIGTIVLALHDTSDVFLETAKLCKYTEKELGASLFFGLFAISWLLLRLIYFPFWIIKASSYHSITFWRKLDEFPTALYYIFNTMLLTLLVFHMYWWKLICLMIMRQLNNKGQVTDDVRSDSEDDE

SEQ ID NO: 60545 - protein, 73 aa, Zea Mays
MVEIICHGEPICPSSTLRGLMELWHRRQPTEPVEASVGAPAEEFVMVLGYRCHRRHPYLAPGTTVAVPPELPS

SEQ ID NO: 60546 - protein, 64 aa, Zea Mays
MRPPLRSAPIYVLTCAWACSPTTHCSVVSSHLRSCVCVCDRPDANWRWCAPVAIDAANLTRLRV

SEQ ID NO: 60547 - protein, 584 aa, Zea Mays
MRHCWSAWLLALCLVSVQLLAPLVCERLLVAAQNLSPPALTPPLVKEVDDVVEHVWISCGLDRGSLEDVRKHFNYNHVFDILRTLSGKDTKDSSPETEDASKALSPEIKNTLLNCLSKHPLVVAAHESAKNLPIDYIKMLFALLRRDVAQGSTGAATTSAPPAAVKSNPSPSLGEPSSTKPDKNPDPPLETTPEEKMVPQTEKTVAKKEDNSNMSITAVIGLSVSAIALLALLCLCNFVCRAKQASSSEVGVDKPPLNQNLSNLSVASLKFSKGNSIDVNKLGALPLKSEAGQNGNAKLSSSEISKTEVTPAVYNCLAEPMAASTGYVPGSRPTTPPSMPPPAPAHPKAPPSSTPQAPASLKAPPSSTPQAPAPLKAPHSSTPETPAPPSKPSSVLHSEPSSPSALKAAPPPKDAPQPKAAPPPPPKSTGPPPPAMSGSSNTRPPPLMKKSGNKMDDGANSHEAKTKLKPFFWDKVTANANQSMVWDHLKSGSFQFNEGKMESLFGYNSVEKIGGDGKKDLLSKDIPQFVRILEPKKAQNLAISLRALSVSPEEVCSAVKEASLVTLDIMTLLHDYYFDPITYI

SEQ ID NO: 60548 - protein, 348 aa, Zea Mays
MRVNPILDWSYRDVWSFLITCKVKYCSLYDQGYTSIGSIHDTVPNALLSDSSSEKSFRPAYMLTDGRLERAGRTKKINPKVEMNSAASNGINDTEGGRMISRAASIIVVGDEILFGTTEDNLGAALCKKLHAIGWRVSHVAVVRNEIDSVAEEVERCKSTDDMVFIFGGLGPLHSDVSLAGVAKAFGVRLAPDEEFEDYLSQLMGNNYTGDRNEMAQLPEGITELLHHKTLPLPLIKCRNVIALAATNMDELDTEWDCLLGTQESGLMPSKPFVSKHLSTTLSDVQIASVLAKLCLEFSDVYIGCHRISRAGPLVVNLTGKDNQRVDAAAEKLTSSFEGQFSQLNSCK

SEQ ID NO: 60549 - protein, 699 aa, Zea Mays
MERYKKQVVKCSEECDPRYNGLKKKYTDECAERRRLYNELIELRGNIRVFCRCRPLSSNELARGCSSVVEIDSSQETELQFVPNEKERKPFKFDHVFGPEDDQEAVFSETVPVVGSVMDGFNVCIFAYGQTGTGKTFTMEGVPENRGVNYRALEELFRISEKRSASVAYTFSVSILEVYNEKIRDLLDESNDQSKRLDIKQNADGTQEVHGLVEAPIYNIDGVWEKLKFGAQNRSVGSTNANELSSRSHSLVRVTVRSEHLVTYQRSRSHMWLVDLAGSERIAKTGVEGDRLKESQFINKSLSALGDVISALASKNSHIPYRNSKLTHLLQSSLGGDCKTLMFVQISPSSMDSGETLSSLNFASRVRAVEHGPAARKQADPAGSLKLKQMTEKLQHEEKENAQLNQSLQLMQLKYASRENVFRTLNEKVKDAEQACRNYQQRIRELENELGNEKRASRDSARSSRPPLVPTRQRQPQGRTNSFAPPSGPSRWRLKAPAKHNKENIPVAMNKPNAGDDPNKPVGRARRVSLAPVIRQIPIQPKRRSSMAVLPSVREHLSVLNDKKAGSRLSQANMARGSLGAFGLNLVPGTPLAGHGGPVDATPDGAKFRRFDFGSSSKFTSPAPNVGMWNKMVTPQQKLGMAPAGAKLCFSIQKRVTPPHVRAKPGLGIFDPALRENMVVGRAGNALRVLNPKRRQSVI

SEQ ID NO: 60550 - protein, 935 aa, Zea Mays
MATESAFRLIGGTGARDWSKGFGAFGSSAGALSGEDLGFVDNDTGVYGGWNKSVPNRSGSAPPSMEGSLAALGHLIDQQSGSFEASLTTLDNITDSSKSEEQLRADPAYFEYYGSKVNLNPRLPPPLISRESRRLMNRVGKAKEWRMVSQDNSSKGSIYVPRSMLSTHKEEPEDDKSPRLDSSSVEDAQIVSSASNFQSQDFMLERFQQSVASSPDSSSSNPSNSNTGDSMPVYSDINLLKSLSFDALKQSDLNSWTPKGPLKSNVNNDLSSPPLSSSSYPGSKTGTQTFEQEKAAADTKHGNVVLGSGAAVTEVDNVDSIMKNLKLSLDVHTSSPAKQRWQDNVLQQYGSFLPAQGDPIQLTTQGPHPPHVPFVDNLSHAQLKLPDIHQNLPQPSMTTPFYTPNSFGNPYYQNLHPANAFPTSIGTGGYAVSGSILPPFMAGYAPQGPLATPLDSSMTPSFSGRPSGFLPAGNLTGGTDFMQSCKVYGQFEPGMQPSIPDPNFIHFFQHPSLFQYTGGNQYNTMGPRFTVVGNLAESFDSQNTIPQAASAYPSDQRLPLPITGFPNSPTARRGGTVPNYQGISSYIGVPMTYPTSPVFQGQTLPGVLPPVRRNDSAGFLPPSRNITGSPGIQGQRARQKFDESKTCSFLEELKSNRARMVELSDITGRVVEYSADQHGSRFIQQKLENCTAEEKTSVFAEILPHASALMTDVFGNYVIQKFFEHGTREQRRDLATKLVGHVLPLSLQMYGCRVIQKALEVMELDQKIDLVHELDGHIMRCVRDQNGNHVIQKCIECVPTEHIGFVVSAFQGQVTSLSMHPYGCRVIQRILEHCGGNSQGQCIIDEILQWVCILAQDQYGNYVTQHVLERGKAHERSQIITKLAGQVVTMSQNKYASNVIEKCFQHGDIAERDLLIRRIVEQTEGNNNLLVCLVV

SEQ ID NO: 60551 - protein, 346 aa, Zea Mays
MDIHPDEGSGAEVLVGSFQLAFSLRSVSLQAGFLPPSRRRSLFTLATSMLVFFSKAFNVLALIPVVKQVLTESTVDPFLCLIEDCRLQALDSANESCTKLYGSKEDDELALKSLSNIDMNENQSKETSVPLILDSLEDMSESELSAIRKQLLEEFSADDSCLGSHFTETPSQYPAQNGKLHHKSMEVIPLGFVFEDDTLAEASDSSVEPHLQHPPCNNILDVNRLLDSVLETSQHVGRSSVSTNQDLPFKDVANQCEALLIGKQQKLSACMSVCEKEAGESSVEQSSRQDPQADTFLCTADEQWHPNSWPACRCVFNPKPGVMKVSWTELKNSLYKPEDLVMSHQG

SEQ ID NO: 60552 - protein, 546 aa, Zea Mays
MGGPSLGQENFTRPTYGHRTAAAPCDWICTICGCMNFARRTSCFQCNEPRTEDALPADATGSASHFGRRGSELGPTHVLVVRGLDENADEEMLRYEFAKHAPIKDIRLVRDKFTHVSRGFAFVHFHSVEDATKALEATNGITLEKNGQVLRVAYAKSTHGPASGGSQSNSLAAAAIEAASFAQQYDAIGWAPKEYNPDDKQNNNSESQKDGSTAQSGFVWDEKSGYYYDSASGFYYDGTTGLYYDSNSGVWYSYDQQTQQYVPCNDQSNTKAAGEAASENTKTSDSNSGKKVVISAPAATIKQSEKTSLPDAVQAAANAALAAEKREKEKAKEIKLASKNSLIANKKMSNVLAMWKQRNQEGQAARIVLDDKEPANSDDKFSHSRSGTGFSLKSKPNSDLENAMGNSLGQGMTSTQTLDSVVKPRPVSNSLGTTVMGVIRGSARGVIKSDTTFHALSDAGSTDSRTTITTRASGLMTSSEALITPAPFKTDVSALVSNTPSGVSGSGKRRFSEAPGQSQYRDRAAERRNLYGSSHGTDTVGLDSMR

SEQ ID NO: 60553 - protein, 975 aa, Zea Mays
MDGEQAARWAAAQEGVPVGADLVAAALRQLRFLAAVDRRRWLYDEGPLLDRAIRRYKACWLPLLDKHTKGVVVDGPLVVPLDCEWIWHCHRLNPVQYIRDCKKVYGRILNNNNVESSTQTKSTLESEKVWKELYPEEPFELLFTRTFDTAVDVNPAGAEEDITYDLVSAVKRQSSFYYQVGTPTMHDPRFLQEALARYKAFLYLIKMNQEKGLQRFRVPTYDVDLLWHTHQLHPITYRNDMVKLLGKVLEHDDTDADRSEGKKLDVGFTETTEQFESTFGVRYWKAGCMYRGNVPSPVTSTPQTFSAEVGTGSYICKAQKDLNALDVTVVELYLQIVDIKNLPSAVQKENVYVRFAKNQSDMFISDGGRLDISTVTGKNTGVCLQCEPTGELILAVMVDQLSKKPEPIGKVSFPLHDLTGPDSKLSFEKWFELKAHGGHAASPPVSLRVAASATVPSSAQKVFTMVRMEPFSLKSCLLPHSIKDQNTGSWTRFVNDCGTELIRLQIREHKAKNSMAVVRELVGVLKSTKKQIQLAEFKENKWTLKDSNLPISHGTDGSLLDLKGDNHLIKLYRGRKLEYERKCCSAHSEDVSAVTAVKFCAEHPYGKAVALLDTEAQLIMVNEDWLLLPWISISVLFMDGDGGTKLGGGAMVQKGTVFGSDTSMVLETQTVGAGSVASNLAQCGTCSAVFGGDDKEMANCKVEHASSGASRTVVASGENGHTETAGCGGGCGSNCGPMMAEDPKAGNAKSGGCGSGCGGGCGGAGGCGTMANEGQSRSGGVGTLLSSNAMGGEGQQAHSAGCGSGCGGGCGSGMVIEGSKANNAMSGGCGSGCGGGCGALFNASTAAGEGLHNKSAGCGGGGCGSGCGGGGGCGSGMAIEGFKANHAKSGGCGSGCGGGGCGTLFSSSAAASQGQSRSGGCGSGCGGGGCGTGSMVAEGSNGGNAKSGGCGGGCGGGGGCGGGGCGGGCGAVFNA

SEQ ID NO: 60554 - protein, 749 aa, Zea Mays
MVYFTSVQSDTYLETQYFSCSVEEKTAGMPTLLSLEVTGDAIEGTTMFASKRYWGGEEGDTMFRWILTNSDGTEKEIEGATSSSYTLKCNDIGFYISVLCKPVRNDGVDGSLVSTEAIGPIIPGPPTCQSLELAGSMVEGGRLTFHAVYTGGLRGSCIQEWFRLHDDGHKDKLTADECLDLDLADIDCRIELMYTPVREDGVHGLPRSVTSDTILPGEPKGVNLILPECFEDNEISPIKTYFGGKEGTGKYTWFRNKEKLDNLEFDLVAESSEVVGETLKYKPSLNDVSSYLILYWVPTRRDGKVGDPLMAISDDPVMAAFPSVSDVHLEQKSSDVYCGLGIYYGGYEGLSLYRWYRESSDGTRLHIDGADSVTYEVTDADYSCRLLFGYTPVRSDGISGEEKLSEPSDVILPELLKIETLNFKGNQVERETLTAAEQIPYSEIQQHIWKNYKKEMKYQWFISNESGGDQSFEPLATQCSRSYKVRFEDIGRCLKCECFVTDVFGRSSELVSAVTAPILPGRPKIEKLEIEGRGFHTDLYAVQGTYSGGKEGKSKIQWLRSMVGSPDLISIPGETGRTYEANVDDVGYRLVAIYTPVREDGVEGQPVSVSTEQIAVEPELYREVKQKLDDGSVKFEVLCDKDRTPKKAQVMGHLERRVLEVNRKRIKVVKPGSKTSFPSTEVRGTYAPPFHVELYRNDQHRFKIVVDGDTEVDLMVQTRHMRDRIILTIRGLAQKFNSTSLNTLLRIES

SEQ ID NO: 60555 - protein, 89 aa, Zea Mays
MSVSLLTWLLFASCVICVYPCDEHFSNLGAHSIGAPSSSLLDGEVEGTHIDDVYTVEMFASRVICVYPRDEHFSNLSAHSVGAPSSSRK

SEQ ID NO: 60556 - protein, 407 aa, Zea Mays
MHAYAAVFKHFEQDGAFYCYPGQSNKSVTAMYNLYRASQVAFPGEDELRRAEAYSREFLCRRRASGELKDKWVIPKDLPGEVAYALDVPWKASLPRIETRMYLEQYGGADDVWIGKVLYRMSLVNNELLLRTAQADFRSFQRQCKLEWHGLRKWASRRNLQAYGVTSNSTLRSYFLAAASIFEPDRATERLGWARTAVLAEAVSSCLRDGRCSRADGMLRELTSGIHLRNDDNPAASLVHALHELIGLLAFDNASYNSLLDAWKQWLAMWTAQGHEGSVALLLVRTVEICSGRRRSASATDDGQAHSLSEYSQLEQLTSSVCSKLAAAGTGDGDDLSPASVEDAADRHRVDLEMQTLARCVLRSRSSIDAVTRQTFLHVARSFYYVAHCSARTVDAHISKVLFEDVV

SEQ ID NO: 60557 - protein, 217 aa, Zea Mays
MEAEVGPPNPPRPEPAGSEPDDARLSPPPPAPAPPPPPPPPPAAEAAAAPTASAAFSLQAPAPAPAEANGSSDRKRRRKAEDGDGCKTCSCKKSRCLKLYCVCFASGLHCTESCGCEPCHNKPQLQGTLRMATVLPLKPVQTFEAGQDIVEQVIRSPMDLIRRKCTCKKSGCLKKYCDCYQGGAGCSINCKCDDCRNPFGRKAWSWLFLSARLVQDQ

SEQ ID NO: 60558 - protein, 528 aa, Zea Mays
MRPSDSVLLMTLQNAPPGLDYDRDKRFSKSFKEMVAMCLVKDQTKRPTAEKLLKHSFFKNAKPPELTVKNILTDLPPLWDRVKALQLKDAAQLALKRMPSSEQEALSMSEYQRGVSAWNFDIEDLKAQASLICDDDPPEIKEDDDTGRITDIDKDTSSDDYFGKTAPSNGNNCSDRSSVPANPGQNGPEINEILSSNNGNAYSERKPDGRKNPESENDSLPSTSKHDADGKDYRCDFRQKQRTYSGPVLQSGPNNSSMTERGHIIERDAGVQSVSDKQKNGTRRANNLSGPLSLPTRASANSLSRANNLSGPLSLPTRASANSLSAPIRSSAGYVGSLGDKPKRTMVEIKGRFSVTSENVDLAKVQEIPGSSASRKLQEGPSLRKSASVGDWSANDKTTSTNHQRKELCNSSVSTSILIPHLQNLVKQTAFQQDLITNLLSSLQQNERVDAAQSRVQSTTSDTVVEAATAEREHSLLVKIFELQSRMISLTDELIAAKLKHVQLQEELNVLYCQEEILDMREDESEEA

SEQ ID NO: 60559 - protein, 138 aa, Zea Mays
MDGLNYSKLRSSLRPRLQAFSGVLFSSLRSLDGLLHMASVAVLQFVHDPHDDPPVLGCVHLTLARVYALDRARSLSLVKDHFTTLGKDLTVIGYCCDDAEPRRRQLQFYVAESMFRVAGCHFVLLWMVPSAGGFSLLI

SEQ ID NO: 60560 - protein, 447 aa, Zea Mays
MGCGDCETTSRSMTIAGATDSFVTLQRIAKQLFSALHLDVKEVRGIGLSLSKLEHADLGRGASQGHMLESWLASPAAKLKKQQSEILGNVNVAGTSGLKDLRSGPSHTAEANLRNDRSTVFHNVELPPLSQLDLEVLKNLPPEIMSEMNEMYKGELQSLVDTLNSDKGKENSSKSLALPAVIRKSVPADAKLQGYRDHRDSMHLEEEHTKGKSDKQLSEAKPANNASCSRVSASIEKTTKSVTQLDLMPDSLSQADLTVLQELPEDVKADLFSALPLHRSGDPACSTSNVSESKSPNVVRAENRSSNDGGTDDLKTPRSFLPPGSSQKWIEQFRVSSCLILNVIAEQHTDSSCQRPLSSVLEPVASFLPLCPNPGSEEWNETHSCLSELLRHYIQLKVEYDIEELYKCFCLLKRFSSASEFFLDLHDSILPFLQDSISQHYGGTLQF

SEQ ID NO: 60561 - protein, 400 aa, Zea Mays
MTIVIDKILEKGTVEYLIVHTAILEYFTIADKTSASDAICQLIPLLTQGALIIDGDEPTNAPELPKKAKAKKKRSKEPLIVRIMQTREGLKLGISCVKYGSAKDRKKIIKSLKGHIMKLALSDFGCLFLICIISIVDDTKLVNKIVIQELVKHLKQLIFDKNGRRPLLQLLHPFCSRYLSPNDLACLNYNVPSLSSTEVETSESAIGVITENKLDDVTAQDPNGLEGKQIVFESKKDPLQRRHELLIKSELAEALVQSCIENVGELLRTNFGKEVLYEMAVGGKDNVLDGLTDRIHMLHDAIASDAAQPKTEDTEHAFENFFSSRVIRRMVIDCPAFAVTLWRKALQGKCKIWAEGHSSKVVASFLESPSTEVKDLAKPELQPLVDAGILKVPDPKVVQK

SEQ ID NO: 60562 - protein, 78 aa, Zea Mays
MCLWLNYLQATHVMLRSMCVCVCVSEDGTSNRMTENGNAGKRHKEPCCGLVTDLMSFALHLGSIYKMASLELTKTWDK

SEQ ID NO: 60563 - protein, 270 aa, Zea Mays
MERILRCFNLGPTGSEDDDISFTLTVETFSFEELSAATDNFSSTLRIGSGGQATVYEGHIPHIGQVAVKRLRTNDFPSKQRAFLMEVYVLNSTNHPHIVKLLGCCSEGTERLLVYEYVKGGTLRHRLKELNWYTRMRIARDTATVLEKLHLQSDPPIIHRDFKSDNILLSTNLSPKVSDFGIAKIAPAGDELTAATSETLGTYGYASPGIFRPLNATVMTDIYSFGVVLLEIITGKPAIDHSKEGDEHYLVHWRQVFFGADYVIKEQVLE

SEQ ID NO: 60564 - protein, 76 aa, Zea Mays
MRVHGVRDDGGGAAGVLRGAARRRRPAVEQALQHLHPLLRAGGRRHGLQPAGRRRHGRPLRVLGSGPLPPPLLPGV

SEQ ID NO: 60565 - protein, 590 aa, Zea Mays
MSPLSELVWSPDEGLSIKIAASSLSTRKASLRWNADTLSILISSPQRSGSGPGEKNGDTINDNLEVSEKMPSQLRIRSDSSVRVTVDSPNSTNVDALQFTSMRSQEQDSTKLVECCEGINVMNEGKEESENCCVDKLEDMEVGNCPTRCCKDASHSSASRKKVVPSISENQACCATTFCNERSWETNAWRARLVKAVCQKESILPTNTENPILPSSIGISCDAVEFSGKLVGSQGKFQSLGVSSNALEIHSHDNCQDPVLHESHKDEPVIARGESASGVNIVARCESVPGVDSSNFVRGKEKVMYNDSNCGNNTREGDDSNESIESCTSTKAPKRKHAQCCAATMPSSGNKRFRREDNESSCSGLLQKCGTSFFNWMSSLTNGLPMLDGATAAVPLEQKFSASTGDGSAAPSQPLQNNRSVPMQFFGFNSLFQSLYTRNVMITSGDNCRQPESNCAGHVFNRLTLELNDSNSMLNKEIGMGRETLDLATQTSAAEGFQMISGGCRGNVQSQIDIFQMRPERNMKLPSSSKFSSRSLEEKQNQCTAACSNDATQNKGGLRESLWVTRLLPKASVELMEGTPCNVENAVSPQ

SEQ ID NO: 60566 - protein, 488 aa, Zea Mays
MEGRMTSLEATMKVSSSMASSISRNADPDQQTLRPNSVEQFYFPRPGQSLPGIPPFFGPPSSSLYLPNDNEAKFGNQFESNPSQNTDWDPQAIVSNLTFLEQKIKQVKDIVQSMSNRENQLAGGSSELAAKQHLVTADLTSIIIQLISTAGSLLPSMKNPLLSSNPAVRQLGNTLGSPMGLGMNANQRPSVDSKTDIPDTGKTSDYDELMNSLNPAQDERDEMIKCPNPCGGEGSEPTPMEDHDVKESDDGGEGENLPPGSYVVLQLEKEEILAPHTHFCLICGKGFKRDANLRMHMRGHGDEYKTPAALAKPTKDSGADHAPVTRYSCPFVGCKRNKEHKKFQPLKTILCVKNHYKRSHCDKSYTCSRCNTKKFSVIADLKTHEKHCGRDKWLCSCGTTFSRKDKLFGHVALFQGHTPALPMEDVKVSEASEQPQDSEPMNEMARSNMYSFPCSSSDGISNLDMKMADDDLAVMGSRTEIADGCRHR

SEQ ID NO: 60567 - protein, 472 aa, Zea Mays
MLKAILSRELEDIASIEDKLGRSLTTMEKDRIGVGNLRLYLEELLQKRYIKSVPLIIPLLEKQHRNTTSKLREISHELSDLDETKLKEKAQLFHDTFLTKLSLLLKGMVVAPPDKFGETLVNERINGGTFTGSENFQLPNKMMPNGGMRLYGGAQYHRAMAEFRLVVGSTRCPPITRDEIVNACGVEDIHDGTNYSRTACVIAVAKARDTFEPFLDQLGFRLLYILKRLIPISVYLLEKDGEHFSSHEVLIRRVQEAFKRFVESTEQSCRQRCMEDLESTTRYVTWSLHNKNRAGLRHFLDSFVAPEQLSVNTLNERFSGLNDNKQDKAKGDSKSNHSPDTNSSTAMPETRLVDLLDSTLWNRRLVPSSERLVYALVHQIFHGIKEHFLVTTELKFNCFLLMPIVDKLPALLRQDLESAFEEELDSIFDVTQLRQSLGQKKRELEIELKRIKRLKEKFGEINKKLNSLQVRQ

SEQ ID NO: 60568 - protein, 1150 aa, Zea Mays
MEDAVSGLRSSNSATSFVAAPVYDDDVFSSSATSQHNASILGRRQHLSRSARLQRRPLQHLTVDPVSAVHGSDDSELSHSEVDRVLATVVLSNPREKVHDGLVGVTEFAHRPLAVYDSYVEHDLYSFIPLLFYTEQAKEEQVPVDTPTRCSMRVLNCRTFPRQGLQGHPSSLVCPLVRRHDGRFHLWFEPSVLVAPHTRGRAEQMTLSYDADAEADDYYNAPDVEIMVSNFGSTSTLSYLEPDLMLPTRYRNILAGMLEKAVYEEGHDLFGVLYESRSLVGTIGSIDFSFEENDELVDRKETVVTSQLQEEMGSKEHTTGQFQTLDKPIADNSSAAVEFSNRNCWVSLIQGSSVYTPYPSNRVEQGLVATLQSDEDGCDQQRDGESLPGSDNLFARAAIVFSHWWSSAAADDFRGQQLSRLVNLAPRVQQSPGCLRCLVLGLMEEPRRPRFFKVLVVDFARRIEIPQGFLCHFPEGRDRKPGTTAVASAKVVLTNAEGSSIWPVALESTDGRVFLTTGWPKFVEDNRLGKGEILIFKYHGRMRFVVSIFGVDAVEKAGRWSARSGAQAAEKTGTMQRNTKGDEHISSQGTAGFLDSHEVVCSKDYLETYLSEETMEDDKAKAVAEVMKTLRVDKLTVDLFCAILCLCEWKVEAAAEYFNFCRGKPQIPEKSLKQKFVFQFDFVKGQLQRFFPEDYDSEKIKKNNIESPNLSDQPLQRDLIVAPVKRRLVDEFKSCDLSHRQKRKVKLQGNSLQTQTPRRSPRLVNVNNTCNKNKKVSKGRAKVLKTPPDATDQVKDRAHKSCLLDEKLDNALKAVHEEATGSLSQDLRKLDSPRCEVGLSKEHGHDQGDTGKMLDEVSDVENSKEHVGSDAMGNSESYMSTYCVEPLPTNSRLTAYSRINELSFTWKHSQHASSLEKVLLDIQRDNFVNTIARIQKIVRDDPSDVLSADVIEATVQIEILKWGLCLQDKCAHKIVNTMLDYAKKVKGRHNFNTEMRKEEFSAKLQDLLKWQLKELEFKYTSLESDYKKAMADASNFFSTFEEHRKKLHAIKDGIKDLQQACMTKDDEMQKLALQVAEHATAYQKSIMEKVRVKMALKSHEQTLGYIKEQLASAESGSIDVGALVKIEMDNMSREIELSKQNLLNINFKKE

SEQ ID NO: 60569 - protein, 106 aa, Zea Mays
MSSSRRPARRAPTSGGCLGVESIGEHGAMDRYSSKSVHSSTSLLARIPRVCVFLVFPVPAAVIFVSVDHAHYSMAGLHSFSIFFLKNYQQDVWSILLLIMIRRRAS

SEQ ID NO: 60570 - protein, 669 aa, Zea Mays
MRCEARRGEASPVGGAGAWVRGRGAVPERRLIGLLGGGAMAMEDAVAEADLADPNPDVGDLFHHYDSLYFQGALAAAGFTVQWTSSLPFARRSFGSCSFSKQQNTIILSESFLKYRSCTDRKNALLHYMIHAIIYVKHHKKDSNHGPAFRAWMDAINSCCVEDHQRPNGGYNITTRHDFIPEEPRSLKGIVWKCRSCGDTLLRFTNQGPPSDACCIENDDINASCGNMLCYWHNHKNDCSGTYEKTMKLEAPSQKKVAGGAQLLLTLPSEMSNIQESSSSILQLEWSTKSTEPNAEDKHLCLGSGSNGKPQGSSSSKKAGKRNSPEMVGETSVLPAAAQGKPNQNHGLVAMAKQAPASVEGYSDAESPGRHTSKKAGKRHKPDDLQKSSVLPSVPQGTTKPKHALVATENNPLSSAERRNDAKSPKTNTSKKPGDWHELQIAQKACSQPADPHKKLKQDLGAPEKKEVFSLMGPSNEKLLGRSSSKKASRQHDREDIQEKNTILPTAPGIRPKASAFAAPEKRRKGKCKRKPVEEKEYAVMSAWLNYYESDRSSGSPEPLVNKRTERRRRERARILTYSRSKKNKTEPLASSGTHASVSSHKIEMAPQDHAVVTTGNQVAVAPATVHQAQPSADSAPCLDLVPFLQPADPLTSPDQSTARDMIVISDDD

SEQ ID NO: 60571 - protein, 271 aa, Zea Mays
MNSKRRRSHSPVEYKEGREKDYEASGRKDKSRDLDDTFDAKRGHESGRHSDRHSYGTSRESRRHDDYRRYHDKSGDDYGRSYPRASWSDRESRADTYYDRSKHDSTSGRSRGDQQDVGSRYGEKSVNRDQRSINEEKQEPPRGYQKSDVGEYNKCTDARKQEYRGYGDDRDHYRVVHKNKETIKEEVLKRRNGKEVEKEALVETREKKRSLFSSTGPNVDNPGDAKPSATTEAFDNSAGTVDGVNAAKVAAMKAAELACSPISNAAWFEEN

SEQ ID NO: 60572 - protein, 128 aa, Zea Mays
MHSAKTSILPSLPKLVHPADSPPAHIDPPRPLPNPIHFPKAISGPTSQMMSIPSPPMTSVSTFDAPKGKNGIAETSRFSSIGAIATCSRSHLKLWLLRLLAMRHQENRARRQGHNFASSITMSCNHGL

SEQ ID NO: 60573 - protein, 195 aa, Zea Mays
MVSEYDLGGEGDLFKAPEAIIEEPLLSLDPVAAAFSMMAGNGSAVMDQTIKDAGIGTIQNDPLLSEVLYECEKELMEKSTIEETISELMDVKIPMLQVEEIPSQAEQVLIQNQQLPAMEKEKQSVPECSLQKSVSSGCLNSADWMNGPARPNFLDFQGLDFEAAFGLRRAYSERRHSEPWSQHASTSSKCLCDHQ

SEQ ID NO: 60574 - protein, 76 aa, Zea Mays
MHSWKSGGGRMPPKIIGSCRTDAVEMYNSFLILEASERMILGRCSHGGWTLDSQCLCYFVALAVQSSAPCTISTTS

SEQ ID NO: 60575 - protein, 681 aa, Zea Mays
MADTVQYRLERMTDELDDLERRGLFTRGELADVVRKRRDFEYRLRRHSPLRQDFLDYIAYELRLDSLRNLRKRAIIRAAAEDDDDEPQHDARSSDDEGGRRKRKKDKSKKKWKKSVSDVAGVLRVLDIYRMATVRFKGDLDLWFRYLEFCRDKRHGRMKQVLAQAIRFHPKVPGLWIYAAAWEFDQNLNVAAARALMQSGLRSCPQSEDMWIEYLRMELTYLNKLKARKVALGEDVKTLQKKDNDASQWKEENKELFMPLNEQVKDPKEPGSAGDALEEKEDLFWRQGLLIIQTIYHGAVEALPSSLTLRKKFLEILNSVDLAHSDELKLEVLDDLKRDFSHSEDYWDWFARLQLSNLNSSSNSNRKDAISNKLNRSIQVYDEAIRKLPNSKMYSLYAKFWMDVIYTDREDSVTLFQDSEFDASEFTSSILKVYENAESCGCLTEDLACQYISLYLKLERLEEAKTLAEKLCDGPLSNAANLWSLRFTMEINSIATAPGSSSLSKENLSSLLDLFSTVLSKLSVTEAERLWHMAMKLFSHDKVCFEKLVKCAMLSLSLAGGSDSGASVSSAIVGWYLQRDGVKHARKMYKRLLALPRPSLKFMQYCIALEANLASLGDNGALKDARRLYDSALDLYPQEREVWRSYYDLELKMGTSESANAVYSRSRKVLGDSTALTAPRG

SEQ ID NO: 60576 - protein, 393 aa, Zea Mays
MPLLLALSSLLEDLIIVRDERTVLNPHGVMHALSLYVGHFNLTRQQDASEAFLHLLISLRDEFAHCYVPHRSSLADITLSDSKVYKQREGNLPECKRWKQNLFGPFDGTVGSILSCRNCSSVLSLDFENFHCLPLSPVLNANGDITSGCSLVDCLKYFTVVEHLDNYRCDRCWHIIAAKYLSLRSEVDEEKVSKLQSCVDYGTCSCRDMFPLESLPCSSSSRATKQLIISQCPKILCIHFLRASVGLDGEPIKHQGHISFPLLLNLSPFTGGASSAGPLAMNAQRDGQQALHLYRQLNMQANADVSSSSSSPPQLSRSKLYGLAAVVEHYGKCGGGHYAVYRRVASNPDPDDPGKPVAGLGKRWFYISDGYVSEVPEEDVLRAEATLLFYERL

SEQ ID NO: 60577 - protein, 52 aa, Zea Mays
MANQTSFNVISIEVADDQFHHTYILNYTKDVCQATKRKNTCYLIECIEKVAD

SEQ ID NO: 60578 - protein, 309 aa, Zea Mays
MLRKRALYNDMSRYVCCAGYMPCSGKCGESRCPEFCLATEVFLCFGNSVASTRFLLQDEFNIQTTQCDNCIIGFMLCLQQVACIFSIVAAIVGSEELSEASQILNCLSDLVYWTVCACMQTQHKVEMDKRDGKFSPQPMAVPPVQQMSRIDQPMPPPAGYAPQPAYGQPYGGYPSPPGQGYPPPPGQGYPPAGYSQGGAYPPPAQGYPHGGGYPPPGQGYPQGQGGAYPPPGSYPPQGSYPPAEGSYPAQGSYHPAQGSYPAQGSYSPAQGSYPAQGSYPPPPAQGSYPPAQGSYPAQGSYPPQAYPGK

SEQ ID NO: 60579 - protein, 229 aa, Zea Mays
MKLAPLGAKVNGCTGNMGLSVAEAAALRGLHLVPVSFSSREKVEKTIQVGQTDIQIYGPSKREDVVSSIADEFPDVIVVDYTGPNSVNSNAELYCKLGLPFVMGTTGGNKHLLYKSVQDSKNYALISPQMGKQVVAFVAAMKIMAEQFPGAFSGYHLEVLESHQAGKLDTSGTAKDVIACFEKLGVSYDMNRMVKIRDPEQQLEMVGVPEEHIQGHAFHLYHLTSPDDR

SEQ ID NO: 60580 - protein, 194 aa, Zea Mays
MYDPFLYSFQVFSAFGYVHKIATFEKAAGFQALIQYTDADTASAAREALDGRSIPSYLLPEHVTSCCLRISFSAHKDLNIKFQSNRSRDYNNPYLPINYSAMDGTLQPAVGSDGRKVEAQGNVLLASIENMQYAVSVDVLHTVFSSFGTVQKIAIFEKNGGTQALIQYPDVNTAAVAKEALEGHCIYDGGYCTW

SEQ ID NO: 60581 - protein, 2166 aa, Zea Mays
MQLEGVFCPLKDQRTFVSSPKIRISPQGKYIATLDLTGFVNFFSLDGDLRTVPLQTLGKARHLIDVKDISWWTDNVLMLVRKDGSISMYSITEDKIVSNDDPVLSTPILEKAKATEGHAFVLQSRRYGTNTPVNKRMDSDSEPCLLSGSGEHQQTEGDEMSWSLISFSKVTVAEMYSVLIREKRYKDALDFASRYNLDKDEVLKACWLHSDANTHEIDSYLAKIKDQVFVLSECVNKVGPTEADLRALLSFGLCITDCYRFSELDNSSKGSTWDSRTIRLRLLRHIDMLETFLGINMGRYAAGEYSKFRSMPLVETAIALAESGKIGALNLIFKRHPYTVSSDILRVLSAIPETLAVQTYSQLLPGKSLPSVVILRAGDWVECEQMASYINNCPAELDKVEEIKTEILVKHSKGFSWPSVAELCEWYKNRARDIDCLSGQLENSLAMIELACQKGIVELQPFFDDIKCLYQVVYSNELNEFTMNLLTWEDLPDYEKFKIILKGVKEDTVVQRLEENAIRFMKKLYEHKQESYLVSWLKEVAAKNELLICLAVIENGCGESPIYGLFKDLAEMIETSVHCIYMCSATNQWNTMSSILSKSLYKTKREKSLVASEEDCNLKDAKHALGSSMVSYEEMQCVCADILSGLGNAPEDFYHYDSVPDKPNDVKYLDILEKRLKVAEGHVEVGRLFAYYQVPKSMHFFLSAHLDEKNVRQIIRLLLSKFGRRQPVRSDNEWANMWRDLKLFQEKAFPFLDSEYMLAEFIRGLLKAGKFSLARNYLGGTSAVSLSTEKAENLVIQAAREYFFSASTLSGNEIWKARECLNLLPNSKNVQAETDIIDALTVRLPYLGVTILPLQFRQVKDPMDIIRMVITCQAGAYLHFEEIIDVAKLLGLRSEEEVADVEEAIAREAVVNGDLQLALDICLNLTKKSHGAVWDLCAAIARGPPLDNLDTGTREKLLGFALSHCDDDSVGELLNAWKELHAQGTFEKLMITTATNPPNFLIDGSSITPLPVQSVQDILDLRDDNGHDRRSDLVGIVKDMLSKVCLDFSNGDTHNWESMLEENRKLLCFGALVLPWLLKLFSNEACDGEIMDHLTRRCRFSTKVKAATSIIYWLVINGLAPNDNIIMILAKSIMEPPIDEEFDVLGCSVLLNLMDPFNGVKIIEEELKRRESYQEISSIMSVGMLYSSLNNSKKECSTPEQRRNLLLHKFHEKFTSADTDDLDQVDMANTTFWREWKSKLEEDKQLADQARMLKQILPDIDTSRFLSGDVNYIKIVVYSFVNSVKMEKKHILKEAVRIAEAYGLQRTEVLLRFLACSLVSEYWDNNDILNEISEFREDIVSSAKGVIDMIYSDVYLEIDGYNKQRLSYIYGILSACHSYLKRTNEIELRYPVHVHTHKLEPFQYYKVLEEECKKVCFIDGLNFKNIAGLDNLNFEHFNDEVCKNIHASTVTAIADMVQSLVSMYVDVLAKGLISQQGVYKHYVLGLLASLEGRSEAQSNNTDYEKLQASLCEFELNYDSCREYIQALPATDISYIVRRYCTLCFPSNLARSHPQEPSWRKPLATLLEFWSKVVDDIPGDSIDACSYGRTDYLNSNRLSLCMRAFRQLLIIDEIALHQGWDAISMYVKDCLRNGKMMETPCFCRAMILSGCSFESVVEVYFGGQGQLGSENADPSNYLDLLELYNAATEKCLSDLSEESCEYRILLHNLLSSLSRSTGKHAGALEMVRSGVWGKLIRYSEDMQLESQLRVYALQLMQCITGRNLKSLPNEMVCQVEPWESWYEHGAGAAIADESINSSSSITGTLVALRSTQMVAAVLPDANITPENLATLDSAVSCFLKLSERASGVSVAVFEAVLEEWEQLFSPKEEHVAPHESPKETSDWSDGWDDGWEALPEELESPKNKQEGVLLSVHPLHSCWMEIIRKRVELGELHKVLELLDRASLKHSVFLEEEEAHSLVELVSALDCFMALKTVLLLPYESLRLQCLQMVEVKMREGIVSTSSNADDQELLALVLSSGTMQKIITEEAYSKFFSYICHLVGHLARSFQTDLLVQWNEATSKINRSLLFARVLFPCFVSELVLGGQYLLAGFVISRWMHTHPSLGLMDITETSVRCFLQGQVAQLDEVGGSDAALTDGEVCVRHTISTLQPKLVSLLQSALALSNKEL

SEQ ID NO: 60582 - protein, 213 aa, Zea Mays
MNKDILVAADDHEGGLCLPKSSARLTQESGVGYNKASSLSFSAESRRQIHYCRAPLPSLSLRRSVSRRQNPRSLSLLNPLNKCGRMSEPSKVIHIRNVGHEIAESDLLQLLQPFGMVSKIVMLRAKNQALLQMEDLHASVSALQYYTSVQPSIRGRNVYMQFSSHQELTTDQSSHGRNSDQVFKLLFSITRAKKLWKHLVLCMEGTYTMVAAN

SEQ ID NO: 60583 - protein, 638 aa, Zea Mays
MNNQRKPGDWNCKNCQHLNFSRRDYCQRCRDPRPDLQFGDGYSTVGVLTSLDIRPGDWYCSCGYHNFASRSSCFKCGTIVRDFPAGQGAAGAEGDFAGGRDSAAVRAGWKAGDWICTRPGCNVHNFASRMECYRCNAPREAVSVFNKWAGNSGGPCTIGPWVARIAHYHTSPQPVVLESGPTWHGHTPPPSNDPIQSNYLPSLHCTAPTRLPLRPCRGVGDGEGNGNEPAAPATPKPRPTSMAIHLRAHAFAANPLRGVSAATTSMSPSAAAEALRYLLDPSSAAAAANPSQYLSKILPFRRGRPLARSTDPPAVPAWRLAWLPPSRVPGVALDAFVFLGALVEGDGKEASAYWAVDVSEGEGARVGGPADGDGPSAFVDLRTLMVATDWSDKDAMAELAIAGHARALLEWHSTAKFCGACGAKAVPTEAGRRKQCSNDSCKKRIYPRIDPVVIMLVIDKENDRALLSRQSRFVPRMWSCLAGFIEPGESLEEAVRRETWEETGIEVGQVVYHSSQPWPVGPNTMPCQLMVGFFAYAKSLEINVDKQELEDAQWHNREDVKKALTFAEYEKAQRTSAAKVDQICKGAEKGQNPSADFKVGSGEPAPMFVPGPYAIAHHLISSWAFEGAPKLPSSFSNL

SEQ ID NO: 60584 - protein, 279 aa, Zea Mays
MYSSAGKDSVLVTAWGSGLLQVDALADEIQPRWNIGVPSRLNVDSHGQINNVAMICDSNSQDPLALRSHRPSSTGSNVKSNIEAVWMGHSPPLLRLAIVDLALPKTPNDNSLSLFADPLVPERFYCAHGGGLDMVTLHFLPFSYPEMSSTPPSVHPVLTTGNSETSSPFLSGFVTIADAYGHVQLAGITCLGECFVVEMKGWKEPAPLQLDLESKIVKDVEPPATGMISKELIAGPDPPILPSSSSLKSLTPDSIEGKSTLHHYIKVFHEYYVEYGHKG

SEQ ID NO: 60585 - protein, 222 aa, Zea Mays
MELNSIPYIASWSSSSSCFYYSYSRCACRGTRDGKLVTKASAAGRKRAADSVCSQLSEQGTEDSISGPRSSWRIRRRDLASAILLPFLIPRVNISIAAEIYDASIIRSGVRSVLTKGKAAGVLRLVFHDAGTFEIGDGSGGMNGSIIYEVDRPENIGLNRSIKILRKAKEGIDNVQKVSWADLIAVAGAEAVALCGGPEIPVRLGRVDSSADPSGKVPEETL

SEQ ID NO: 60586 - protein, 109 aa, Zea Mays
MSSNCGEDEKELVCVTGAGGFIGSWVVNELLQRGYRVRGTARDPADSKNAHLLALEGAKERLTLCRADVLDRASLRAAFAGCHGVFHVASPVSNDPTQCSRLTTPLASA

SEQ ID NO: 60587 - protein, 83 aa, Zea Mays
MAAAQSSTDSLAPHLRRRPRRLVFDRRYGWIFDEWTHPADQALSGGRGMFCALTMARSLVSAAACSSSGTPQKTPQEAASLVP

SEQ ID NO: 60588 - protein, 425 aa, Zea Mays
MEAKSVVMSALGIGIGVGVGLGLASAPWAAGASASSRAAGVTVDRVEQDLRRLLVDGADTKVTFDEFPYYLSEQTRVVLTSAAYVHLKQADISKYTRNLAPASRTILLSGPAELYQQMLARALAHYFQAKLLLLDPTDFLIKIHSKYGTGGSTEKTVKRSISETTLERVSGLLGSLSILPQKEQPKGTIRRQSSMMDVKLRSSESMSNLTKLRRNASTSSDMSSMASQGPSTSTAPLRRSSSWTFDEKILVQALYKVLLSVSKKYPVVLYIRDVEKFLHKSPKMYLLFEKLLNKLEGPVLILGSRIVDMNSDEESDDRLTVLFPYNIEIKPPENENHLVSWNSQLEEDMKMIQFQDNRNHIMEVLAENDLECDDLGSICLSDTMCLSKYIEEIVVSAVSYHLMNNKDPEYRNGKLVLSTKRQQDK

SEQ ID NO: 60589 - protein, 241 aa, Zea Mays
MNQNPLSQVKYVAIVLEAEEFCNLISNGSFFDHVQRVCDGYPGFTICYIINKLMNYINKCEQSQYKNPSNTWRRPPVEEVLCKLATHYINVHSRQCIDEAEVVEHLVGLTSSLAKCKFRKPLTWLSVQANGAVIPKGFVHKDLAKKDTWLKALIAIPDIQPRYAFAIWKKYPCMRSLLNEYMDGSKTVAEKELLLSDLKWEDRLGDEGKRLGNKCSRRVYRMLMAQNGDLDADDPEAGGRS

SEQ ID NO: 60590 - protein, 98 aa, Zea Mays
MLAAHHVTAGSKASGNGSSLGCNRVSVFGYPVQLSPQELEIEDLSAIELTIIVVSCWPIVNFINSVLRNGWCTLCRRADRNRECRVRPGYRVIPSFPT

SEQ ID NO: 60591 - protein, 480 aa, Zea Mays
MGNTCIGPSAPSDRHSFFNTVSLAVLWRPPAAADRAEPSPTAEPSSSTPCSPPSRAPNPVTISDSEHPPHSTSTALGPAAPPNPNGKPKPKPKVKRVQSAGLLAGSVLKRDSERLKDVYTLGKKLGQGQFGTTYQCVEKATGKHFACKSIAKRKLVTDEDVEDVRREIQIMHHLAGHPNVVSIVGAYEDAVAVHLVMELCAGGELFDRIIQRGHYSEKAAAQLARVIIGVVEACHSLGVMHRDLKPENFLFVNQKEDAPLKAIDFGLSIFFKPGEIFSDVVGSPYYVAPEVLKKRYGCEVDVWSAGVIIYILLSGVPPFWAESEQGIFKQVLKGGLDFSSDPWPSISESAKDLVRKMLNRDPRKRLTAHDALCHPWVCVDGVAPDKPLDSAVLTRLKQFSAMNKLKKMALRVIAENLSEDEIAGLKEMFKMLDTDNSGQITLEELKIGLKRVGANLKDSEITTLMEAILITVVPSTMESS

SEQ ID NO: 60592 - protein, 495 aa, Zea Mays
MARRRPMDYEELNEKVKKAQYAVRGELYLRASQLQKEGKKIIFTNVGNPHALGQKPLTFPRQVVALCQAPFLLDDPNVGLMFPPDAIVRAKRYLAMAPGGLGAYSDARGIPGIRKEVADFIHKRDGYPSDPELIYLTDGASKGVMQMLNAIIRNERDGILVPVPQYPLYSAIISLFGGSLVPYYLEEEANWNLDFANIRQAVAEARSKGITVRATVIINPGNPTGQCLSEANIRELVRYCYHENLVLLADEVYQQNVYQDERPFISARKVMFDMGPPISREVQLVSFHTVSKGYWGECGQRGGYFEMTNLPPKTVDEIYKVASIVLSPNVPGQIFQVHPRIFEEESAHDDRRFQQLPKRGVQFHRRSYVLFPPNTAASKSHRGGKESRQSSRRFLLPQAPGGNGDFHCSGIWFWAEGRGVPPSDNYPSSRGRLPYHHVELQEVQRLISWSNTRATPGCDVNMKRSDRATILLLLPILVETVIGALCDILLLQLRP

SEQ ID NO: 60593 - protein, 430 aa, Zea Mays
MSGSSPWTSTSRPPACSSLTVVNSLLKKYKIDPKLIGRLEVGSETVIDKSKSIKTWLMQIFEESGNSDIEGVDSSNACYGGTAALLNCVNWVESNSWDGRYGLVVCTDSAVYAEGPARPTGGAAAIAMLIGPNAPISFESKYRASHMAHVYDFYKPDLASEYPVVDGKLSQTCYLMALDSCYRQFCNKYEKIAGKQFSICDAEYFVFHSPYNKLVQKSFARLYYNDFLRNCSSVDDDAKEKLQSFSNLTGEESYQSRDLEKASQQVAKHLHDIKVQPSTLLPKQIGNMYTASLYAALASVLYNKHDSLNGQRIVMFSYGSGLTSTMFSLRLNNGQHPFSLSNIASVLDVTEKLQSRHETLPEKFVETLKLMEHRYGAKDFETSRDTSLLQPGTFYLTKVDSMYRRFYSQKLSEETGGGKTKCCNGLANGH

SEQ ID NO: 60594 - protein, 1193 aa, Zea Mays
MADSRRTWSWDVSGFEPPQPATTQAASAPTAMPRAPPTAMMPRPSAGAPRASAGAVPVADQLDQLVDSVQLAREDCLELRQEASDLLEYSNAKLGRVTRYLGFLADRTRKLDQAALETEARITPLIHEKKRLFNDLLTLKGNVKVFCRCRPLFEDEGPSVLEFPDDFSIRVNTGDESLTNPKKDYEFDRVYGPHIGQGELFLDVQPFVQSALDGYNISIFAYGQSRSGKTHTLEGSSHDRGLYLRSFEELFDLSNSDTTSTAHFNFYFTACELYNDQVRDLLSESSSTVPKVRMGVQESFVELVQEKVENPLEFSAALKIALQNRSVNSPKAMVSHLIITIHIHYRNYVTGEHLYSKLSLVDLPASECLLEEDANRDNVTDFLHVSKSLSVLGDAFASLSAKKEPVLYGNSRITQILADSLGSSSKILLIVHVSPSASNLSRTLSTLSFSARARNAELSLGNRDTIKKWKDVANDSRKQLHDKEKEVLDLRQEVIGLKHSLKEANDQCILLFNEVQKAWRVSSSLQADLKSENLMLAEKHKTEKEQNNQLRDQISHLLKVEQEQNLKMQERDLTIQSLQTKLKSIESQLNEALNASDARSTIGSESASVISSPKITESTADSSSVTKRLEEELAKRDALIEKLHEENEKLFDRLTEKSGLGSAPQVLAAVIKAGAAREHEILAEIRDAVFSFIRKMEPKKVMDTMLVSRVKILYIRSLLAKSPELQSIKVSPVERFLEKSNTGRSRSSSRGSSPGRSPVHHHGHGSRTALVDEHVHGFKVNIKQEKKSKFSSIVLKLRGIEEETWRQHVTGGKLREITEEAKAFSIGNKALAALFVHTPAGELQRQIRAWLAENFEFLSVTGADAAGGAAGQLELLSTAIMDGWMAGLGTAQPPTTDALGQLLSEYTKRVYTSQLQHLKDIAGTLATEEADDPAHVSKLRSALESVDHKRRKIMQQMRTDTALLTKEEGGSPIRNPLTAAEDARLASLISLDNILKQVKEVIRQSSTGPMRKSKRKALLELLDDLLTQMPSLLDIDHPCAQKQIMEARKVVESLQEDPDDPAPQSNALGEGEVSQWNVLQFNTGTTAPFIIKCGANSSGELVIKADLRVQEPKGGEVIRVVPRPTVLADLSFEEIKGVFEQLPEAVSLLALARTADGTRARYSRLYRTLASKVTALKETVAEMERGGVFKDVR

SEQ ID NO: 60595 - protein, 688 aa, Zea Mays
MSTIATPPPPSAAQEKAASRNKRKYRAETPSTELGPFGLEYPLTTDCVGFEFMSPEKVAMAAAVAAAEGVSLDLLQNSCENCKDLHPTAEDLLECQRYVNWGDPNEMQLEEILLKSLDTTFDNSVSLITTMGYSEAAARAAIMRTAAQYDWRESLAGFGEAAVEVLKTEGDMLPREGASVEDMRKIEEAVLGSMVTLVTEAQPFNTPGDVMYCLLMSDMNVANACAMDYNSFSLPAVSAQVIAQPVAGNYEPGSGSNLSVSITNPQTGVTFRGKLTPVPPGSYGAIKADSSTAQASPNVSNTEPSVSDKTQCVIPNIEPKKHHVPICDHSEDQPFVAAATQSVKNDKSSPSKRGGSKRDSFHRQKLTNYDKSSRALGSKGSLRSGKQSSSASAVLERKCRSFSDSTTSNLKGSSRVAKGFAASISGSEVSVDLSFTGTLSPSPSFDAKVVSNSNSAPAASTDLSLALSSSDSLTPSLSHDSNTEVVDSSSKINFSYDEEQKVWIPQDKKDEIVLILVQRQKELQAHTRDWTDWAQQKVMQVAHRLAKEKDELQSLRKEKEEADRLQEERHHLEESTRKKLLEMESAISRANAQLEKAEASARRREVENAQLTLQMEAAKRHAAESATNISELVKKDENSRKRSQRWQSDRALLQEDLAAQKSRLSRVQEHLQHAKELKDQVQAIVSIP

SEQ ID NO: 60596 - protein, 813 aa, Zea Mays
MPGNQSLMERFLKRKLPPASDSNDPGADGETSRRGANASNTNLDRTASHRPLRVSRNQVNFDELPYDPADRRSISDYIGQKLQDEIRKKYLIRGPFRPPVGFKYPQKIIAGHARRFQPEWFTKYDWLEYSIKVDKCFCLQCYLFRDSNEGQGGNDAFVKDGWDGFNKLKRLQDHVGTGPDSFHNTAVKRCDNLMKPNQSIDSAIGKQQNITKEQYLIRLNTSIDAVRYLLHQGLAFRGHDESEKSKNQGNFRELVKLLAKQNDKRNKALGLGNAQMLASEIQKDIANCFAEIIVKSIIEEIGGDVFCLLVDESSDVSGKEQMAVVLRYVSKLGLIKERLIGVVHVKETSASCLKSNIDSLFGKYGLSIKQVRGQGYDGASNMRGEFNGLRALILRENSSAYYIHCFAHQLQLVIVAVAKKNDDISDFFDMVSLLINVAGASCKRKDMIRECQQERVSKAICSGQLRSGTGLNQEQSLQRAGDTRWSSHFKTLQRLSSLFPDVIEVLQYVEKEGPNDAKRRQARGLMDYLMDFDFVFHLQLMLLILGHANALSLSLQRKDKDILEAMVEVKLTKQRFQQIRDDGWDSLLEDVLSFCEKHGIPKLDMDHEYINRHKPRQRTNRTNYQHYRYDCLNPVIDLQLIEFNDRFNEVNSELLTHMAAFSPNNSFGAFKHESLMELAKAYPDDFSPVELDDLSSELHCYIDNVRADARFAQLGTISEHGKLMVDTKKHLAFSLVYRLLKLVLVLPIATASVERSFSAMKIVKTVLRNRIGDDFMNDCVISFMEQELLDTISNNDVIVRFQKMDGHNRRVKL

SEQ ID NO: 60597 - protein, 146 aa, Zea Mays
MRSSASPFDFLLSPASFTPLARSGAGPCLAGPAPPPTPSSPSLDPWLPRPSRPDPRSCDLPGSIRRSFGRIASSRLDPSLSWPSRSDPSFPFYSAAGTDSMTGADAYAAVGLPGGAPRRLSFTILQKRITKINPRIVDNYYAWIYS

SEQ ID NO: 60598 - protein, 321 aa, Zea Mays
MRRESMLSGPHKDAVAYADWVKKHHQFSDMLVQTSPAVTGHAFPRLKLRYKPSLVQLEGGSLHLPLLDPNMRATPLTPSEWKERLEARTCLDVSSGETSGRGLLLLDVRNDYEWDVGHFEGAQRPNVDCFRSTSFGLSGETDPLNGVDKERTDILMYCTGGIRCDVYSTILRKKGFRNLYTLEGGVSNYLKVEGPAGWVGNLFVFDGRLSLPPATFNEEEDEEEQQENKRWVGCCYVCGSEVVELRHRNCANIDCNRLYLCCGWCAEELCGCCCSDCKVAPRLRPLLPGHQRYLKWHVYRDGRTDDENKLYGFVDDDSSGL

SEQ ID NO: 60599 - protein, 962 aa, Zea Mays
MALEFRSAVSVPLHVLPLLRGWHLGFPVARVEGCGLGGTIGEEEHMANNVARAMYLDHGILAPECCGVATVYLDVSYGCATFFTGPMPATKEIGSQHRVLHINEDLKVPEQSTKGARRKNALDPRNIAMSRPLDFAVLNYKNQRLAEQLEVHKFEFRALESRFNDLKEKQRTHNETLILVENYWERVFVVLCSFRNYIYDDKRFTCISPELAVYQLMIVKGQALCRMLPHKWDGICFRLGAGFLNGLLEAGASATESSGFSNCQLGNDVSSEESTTIDILQKMFLPSSGPWHANNELAGNYQKQRDSSAWNRAEQKRLKEELTSVVAKLEESKQKLAVLKAQGDNKQATPILVPMLGKKTAEKVGDKQTELQDLEATHKELMESISKRLEEIRRLHTERIGILNNLATFQNILTDFKSIHSSKAFQLVNDQLQKSQAELDGHQTLLEKLQVDMDTFVWRERQFNQKVDLAEISQKVSAYYVSRIADLEKDVQKLCNEKNMLVLKLEGALREPGRNQVISEFKALVSSLPREMGAVQTELSKHKDASLQLHSLRAEVHSLSSIRTRKEQEIEETSRSAHAGSDISQLQSLVHELRENTQELKLFVELYKHDSADSRQLMESRDRELAELAGVHVLRYSLNESKLEQRVIAANEAEAISQQRLATAEAEVAELGQKLETSRRNLVKQSDILKSKHEECEAYMVEIESIGHAYEDIMSQNQQLLQQIIERDDHNTKVWRHGVEIFSGLLKLFMEGVKAKQSHDALHLEVCSLQRNLQHASTLMDLCNQKLIHLEDKLRGWSERLRRLSEDGMQQSISLGISQTKLTGMHGEAPKLGQALNVLQAKVGSNRLEVAELLIELETERFSKKRLDDDLDLMSSKASSLREKADNSQVLQKLLHEAKEYRGILKCGICHDRQKEVVIAKCYHLFCNQCIQKSLGSRQKRRLAPVSHTPELPGALLIPGIW

SEQ ID NO: 60600 - protein, 1252 aa, Zea Mays
MATQSHSSSAAAIDMYETASQPDASVAGDAYTFLEFNTQGDEFDYPDFPELSQPPPRSTPLTSSIPGAGASSSSWPAPPPPPSDAASAEPDLTSLDVPTPPASSSSPSPRSASKARSLAAADGLASGVAALSFEDPVGAGAGEDGYDYGKGDFVEHACRYCGIHNPACVARCNVPSCRKWFCNSRGNTSGSHIVNHLVRAKHKEVCLHKDSPLGETILECYNCGCRNVFLLGFISAKLENVVVLLCREPCLSVNALKDMNWDLSQWCPLIDDRCFLSWLVKVPSEQEQLRARQISAQQINKVEELWKTNPDASLEDLEKPGVDDEPQPVVLKYEDAYQYQNVFAPLIKLEADYDKMTKESQSKDNVTVRWDIGLNKKRVAYFVFPKEDNELRLVPGDELRLRYPGDSSHPTWQSVGHVIKLTAQEEVALELRASQGVPTELNVGFSVDFVWKSTSFDRMQGAMKTFAVDETSVSGYIYHHLLGHEVEHQIIRNTLPRRFGAPGLPELNASQVLAVKSVLQKPVSLIQGPPGTGKTVTSGAIVYHMAKQGQGQVLVCAPSNVAVDQLAEKISSTGLKVVRLCAKSREAVSSPVEHLTLHYQVRHLDTSEKSEFHKLQQLKDEQGELSSSDEKKYKALKRATEREILQSADVICCTCVGAGDPRLSNFRFRQVLIDESTQATEPECLIPLVLGVKQVVLVGDHCQLGPVIMCKKAARAGLAQSLFERLVILGVKPFRLQVQYRMHPCLSEFPSNCFYEGTLQNGVTVNERHSSGIDFPWPVPNRPMFFYVQMGQEEISASGTSYLNRTEAANVEKIVTTFLRSGVVPSQIGVITPYEGQRAYIVNYMSRNGSLRQQLYKEIEVASVDSFQGREKDYIILSCVRSNEHQGIGFLNDPRRLNVALTRARYGIVILGNPKVLSKQPLWNSLLTHYKEHECLVEGPLNNLKQSMVQFQKPKKIYNDRRLLLGGAQGMHGANFGAGASSQAADKRSGRGKAGQSFVSYGPPNGVHKPGVHPAGYAVPRMPFPPFPGAPHSQPYAIPTRGLHGPIGAVPPVHQPGSRSFGAPRSNTGGPIGGHLAHQQNSQQAMGGIGSNFNYAGMENSSSQPSGVAQMSQSGLMTQDFIVDDFKSQGSHVPYNIAEFSTQASQGGYGVEFTQAPQSGYSGNYMNQNTHPGYSHIGTTNDIVSQDHMAHGSHGMFTQVGYNDPSQDESSQIHYGMAAAGPLHSQSMMNPLYSQSYAHYNTQPHSLQPPPQ

SEQ ID NO: 60601 - protein, 194 aa, Zea Mays
MEFFSEYGDANRYKIQEIIGKGSYGVVCSAIDQHTGEKVAIKKIQNIFEHLSDAARILREIKLLRLLRHPDIVEIKHVMLPPSRRDYRDIYVVFELMDTDLHQVIKANDDLTKEHHQFFLYQMLRALKYIHTANVYHRDLKPKNILANANCKLKICDFGLARVAFNDSHTTVFWTVCYFYSATMVDPHHNILSK

SEQ ID NO: 60602 - protein, 251 aa, Zea Mays
MSSSVGGGSAGGGGVDMVSLLEKAKDLDQLKKEQDEIVADINKIHKKLLASPEMVDKPVDTILLKLRGLYARAKELSENEISASNALIGLLDGLLQSGASTAQKKKIEVGEQKKKRIKSDTDSARFSAASMRNQLDQAASLKGEQVAARVKSDDEKDEWFVVKVIHFDKETKEYEVLDEEPGDDEESTQKKYKLPMSYIIPFPKKGDPSSAPDFGQGRQVLAVYPGTTALYRATVASHRKMAQAPSMIKEF

SEQ ID NO: 60603 - protein, 1042 aa, Zea Mays
MEMNLRAESPLCSRGRPALVVRPAAAATGLALSVVRCSRFTRGGLVRCMVSSSDYPKRNPRRASTSKSKGVASGGYASRPTAESSTKKIEQSRNNEGDFSRANGSLYGEAAEQASTAEESSQVYMTGDILSGAERDGAGTEEEADQNQSSALPSASMDDDSIDRQLDEYRGKISALVSSKPEPSSLASVAGQNESVGGFHGQHEPITGSEEHGSSIVDAPTKGRLFAEAVVGHKDFTESAAGKASSENEEGQAVSLEDDVGISTDADEELPVSEDDPEVLLRRLQELADENYSTGNNCFVFPEVVKADSMIDLYLNRSMSALASESDVFVKGAFNGWRWNRFTETMHRSELRGDWWCCKLYIPKQAYRLDFVFFNGDTVYENNNHNDFFLEIESDIDEHSFEDFLVEEKRKELERLAAEEAERKRQAEERHRREEERAAMEADRAQARSEVEMKKEKLRQMLSSASRYAENLWYIEPNTYRGGDRVRLYYNRSSRSLMHNTEIWMHGGYNNWIDGLSIAERLVKSHEKEGDWWYVEVTLPERALVLDWVFADGPPGNAWNYDNNGRQDFHAIVPNNISDDIFWVEEEHRIFTRLQQERRERESAERIKAERSAKMKAEMKEKTMRAFLLSQKHIVYTEPLEVRAGTTVDVLYNPSNTVLNGKSEVWFRGSFNRWTHPSGPLPPQKMVKAENSSHLRTTVSVPLDAYMMDFVFSESEEGGRYDNRNGMDYHIPVSDSVAREPPMHIVHIAVEMAPIAKVGGLGDVVTSLSRAVQDLGHKVEVILPKYDCLILSSVKDLHYQQSFASGGTEVKVWFGKVEDLPVYFLEPQNGMFWVGCVYGKNDESRFGFFCHSALEFLLQKGSSPDIIHCHDWSSAPVAWLYKEQYALNGMGNGRIVFTIHNLEFGAHHIGKAMAHCDKATTVSDTYSKEVAGHGAIAPHYYKFHGIRNGIDPDIWDPYTDRFIPVHYTSENVLEGKSAAKKALQQMLGLQQTDSPVVGIITRLTVQKGIHLIKHAMHRALERNGWFYWVLHQIIAYKVTLQI

SEQ ID NO: 60604 - protein, 837 aa, Zea Mays
MDSTALQYENQKLVQQLEVQKSEMHALERKFKELSDDQCSYDKTLISLNKLWNQLIDDLVLLGVRAGGDLDNLQALDHEELSEESLESCPSEEIFLLRLLKTNNIRDNSDTSLLKFVEEALAFRSSATVTLMKSLQETISSQQARSESLSLALNGQKSNEDVIVALRNHNDCLKEVAENASQAISIINEKHKRYLDEIEAFKSNHSRELQEIKRISGELEESIAELEESQRKLVVLQLQRHGSVMDASGANAVNGGISTHKSSDKSMSWQDLKDAVDAAKTLAGNRLLELHQTQEDNLILSKELGDLEGQLKDEKYVLVSKPYMILNDKLQHLNAEIERYRGLVEVLQNDKDQLMQREKEISAKAESLDSVKQTIITYEKKIEELETQIQILFSEKNDLETKVEETLQDSGKKDFKNEIHVMAAALSNELGMMENQLSRSKDAASEALALREQAESLRSLVAKKIEEHKKISDKYNSQVIEIKSLKALEKQELEFIADMYVKESSESRTIADIEESETRARNQAEYLRSNLEEHSLELRVKAANEAEAACQQRLSFAEVELEELRTKVDASERDVVELKEAIRIKEAEGDAYISDIETVGQAYEDMQTQNQHLLQQLTDRDDFNIKLVSDSVKMKQACSSLLSDKLMLEKQLQQVNTSLESSKLKIARGEEQMKTCVAQAIKTSAENRHLTISLERIALELSNTDKELKWLRSSVGSSEKEYEQTQQKISELRALLEHERSERRRLEEQYEEVKNEVMELTSETEETTVRKLEDEIKECKGILKCGVCFDRPKEVVITKCFHLFCSLCIQRNLEIRHRKCPGCGTPFGQNDVREVKI

SEQ ID NO: 60605 - protein, 183 aa, Zea Mays
MEGDEMLRVKLGRQGLEVSKLGFGCMGLTGVYNAPVPDQAGIDIIKHAFEAGITFFDTADAYGPHTNEVLLGKSKHPRYSGENLEKNKVLYTRLEMLSKKYGCTPAQLALSWVLHQGEDVVPIPGTTKAKNLDENIGAVKVRLSKEDLEEISGAFPAGEVAGSRLLGVLEPFSWRLANTPPPK

SEQ ID NO: 60606 - protein, 131 aa, Zea Mays
MEGNPHPGAIKGRMSFQNFNPSIDKLNEEARGDQQTESASPSNCDQDNANSSRGNEVPASRCRDFGIPSSESISLNELKRKEPDLDMETPASYKEPKTNVGGRSSSQSNGRGSHKSNKREKLDFNHLRPKK

SEQ ID NO: 60607 - protein, 275 aa, Zea Mays
MGMLAAAVAPALLASPQASLVRRRLSGAWTLRLKPAAASHGVAALRVHNFLPKCYITNVEVDVSTVNKEETFDDHPSLAPGRNIPLVNLRGDILDSSPFPLHDRASCPSGFEELPVLSEGEQHTLASTPAHPAGLYALYASYLFGNLVEQLWNFAWPATLAILHPNLLPVAIVGFFTKLSVFVGAPIVGKLMDHFPRIPMYTALNAVQVGTQLISAATVIYALRNLSHASTTAVVLRPWFIALVAAGAIERLAGLALGVSMERDWVVLEQTGLLH

SEQ ID NO: 60608 - protein, 543 aa, Zea Mays
MNRSICHHLLAHCKKLRELQRIHALAVTHGLHPNHQSVSCKIFRCYADFGHVADARKLFDEIPHPDLIFFTSLMSLHLKLDHQREAISLFARVVAAGHHLDGFAVVGALSASSGAGDLVVGRAVHGLIFRLGLDHEVVVGNALIDMYSQCGEFESAVKVFDRMFLKDEVTWGSMLHGHIKCAGLDSALSFFDLVPVRSAVAWTTLITGHVQGRQPVRALELFGRMVLEGHRPTHVTIVGVLSACADIGALDLGSVIHGYGSKCNASSNIIVSNALMDMYAKSGRIEMSFSVFQEIQSKDFFTWTTMISCCTVQGDGRKALELFQDMLRAGIVPNSVTFVSVLSACSHAGLIEEGRELFNRMRQVYKIDPRLEHYGCMIDLLGRGGLLEEAEDLIADMNLVPDIVIWRSLLSACLVHGNNRLAEIAGKEIIKIEPGDDGVYVLLWNMYASSNKWREAQELRQQMLTLEIFKKPGCSWIELDGVVHEFLVEDKTHDDRREIYETLEYMTRQLKTHIRLSSWEQHGSSISVDEEIIESYTAHLLHD

SEQ ID NO: 60609 - protein, 399 aa, Zea Mays
MPPPVEPYIPSFTAGLSAHEAADADKDYLYFLRHVRLDGDAYTVVIPSKDGASCPPQIIRYEQPHSDHNAGAPVAGSECGRQRAHPPSEENSWATGEAAPHGVKRKVPGASPAGEVRSGAVRMEEDTPTLVAKSAWYDLQPDIDDDYRFFLQNARVVNDKLVFKTGNCSITIGDHSDAEEHDDTEEEEKEEEGEGEEDDEEEADDLPASGQSGEDGIGMEEAGPVSETEDGVDSDLPIPKVKDEVVSKNEEDDVGPGSDLHITNDQVYCETEKVKEGGGNTLNDLARRTTDLDPLDKKEASSSKGHLAMPLNPSELQGVIWPPHINERPNSVFKEKLIEFLIKPFTQEEYDRYFALASDRIPMVKERRTRNTVAYYHWTHEMSKSYFDRSCSAIQSPTQ

SEQ ID NO: 60610 - protein, 297 aa, Zea Mays
MCQSDKHTCILDAIIKQANWDCSKMLEKFRRDIEDHALSIRESKLSEMTRHAKDKLRKALAEPVESLFDAADQTTWQSIRNIYKRETEAILPEFLNNLCQFEMEYAPAEEMVSKLKDYARSVVESKAKEESSKVSIHMKERFTTVFSHDKDSIPRVWTGKEDVRAIVKEARSAALKLLSVMAAIRWDDEPDRIESILTSTLLEGSVVSKIASAASADPLASTTWEEIPPKHTMITPYQCKSLWKQFKVETEFTITQAVSTQESHLSVLAICGLLDGQSFGDAARCQQRIPEWSVSVV

SEQ ID NO: 60611 - protein, 142 aa, Zea Mays
MGVTPGAPPRVADPRPAPRLVLFASPFPRVCVGRLVPDEGVAVGGGRWRGVVVGLGLGAQRRRGLVARRQRVAAVAGPHLPRARRALRHRLRRRAGPIDQNRVQGARVWVDDAESVPFPKLPRERREVCRVRAAAECATRRA

SEQ ID NO: 60612 - protein, 251 aa, Zea Mays
MLFRILVLESCLYCRYDFFVIFILKWRVWIWGRKQGSYSNFYGGLYSGGSAQMVEKSLDIHGDEILYVGDHIYTDVSQSKVHLRWRTALICRELEDEFNALVKSHDQKEKLVTLIQQKEIVGDLFNQLRLALQRRSNSRPAQTLAATCMDDQELTESMQKLLIVMQRLDEKIGPMLEADGELFNKRWGWLSRAGLWDKSHLTRQIEKYADIYTSRVSNFLHYTPFMYFQSQEQTLAHDAHSYSGGKDIKVH

SEQ ID NO: 60613 - protein, 412 aa, Zea Mays
MGAFAKEEHQFLAELGLAQRNPGAFACGAWGGSGPTVTSTSPTNNQVIAEVVEASVHDYEEGMRACFDAAKTWMAIPAPKRGEIVRQIGDALRAKLHHLGRLVSLEMGKILPEGIGEVQEIIDMCDYAVGLSRQLNGSIIPSERPNHMMMEVWNPLGVVGVITAFNFPCAVLGWNACIALVCGNCVVWKGAPTTPLITIAMTKIVASVLEKNNLPGAIFTSFCGGTEIGQAIALDIRIPLVSFTGSTRAGLMVQQQVSARFGKCLLELSGNNAIIVMDDADIQLAVRSVLFAAVGTAGQRCTTCRRLILHENIYQTFLDQLVEVYKQVRIGDPLEKGTLLGPLHTPASKENFLKGIQTIKSQGGKILFGGSAIESEGNFVQPTIVEITPSAPVVKEELFGPVLYVMKFQAPW

SEQ ID NO: 60614 - protein, 277 aa, Zea Mays
MGKHVWAAALMALAVIVGLGVPPGRIAEARTLEKDDLLGGGGDFGAGEGGGFGGGAGGGLGGGFGGGGGLGGGGGAGGGFGGGAGHGGGLGGGFGGGKGGGAGGGGGLGGGVGGGGGLGTGGGGGFGGGKGGGLGGGGGLGSGGGAGVGGGLGGGAGGAGEGGGLGVGAGGGGGLGGGAGGGFGGGAGGGVGGGGGLGDGAGGGAGAGSGLGGGAGGGGGLGGGAGGGFGGGAGGGVGGGAGGGAGGGAGAGGGLGGGAGGGFGGGGGSGGGIGGGL

SEQ ID NO: 60615 - protein, 60 aa, Zea Mays
MDLFPENEAGAGAGGVREASVLRYKEKRRTRLFSKKIRYQVRKVNADCRPRMKASTTRTD

SEQ ID NO: 60616 - protein, 373 aa, Zea Mays
MHQNKITSIPPSIKGCSSLAELYMGNNLLSSIPADIGTLSKLGILDLHSNQLKEYPVGACNLKLSFLDLSNNSLSGLPAELGKMTTLRKLLLTGNPMRTLRSSLVSGPTTTLLKYLRSRLSSDEEASGSRSTPTKDDQIAAARRLSLSSKELDLSGLGVTSVPAAAWETSDVVKLDLSKNSIEDLPNELSLCSSLQSLVLSNNKIKRWPHTVVSSLPCLSSLKLDNNPLVEISSTDLVPLSKLEVLDLSGNASALPEPSAVSALPQLQELYLRRMKLHEFPNGLLGLKLLRILDLSQNHLTTVPEGIKNFTALIELDLSDNNITALPAELGLLEANLQVLKLDGNPLRSIRRTLLERGTKAVLKYLKEKLPSE

SEQ ID NO: 60617 - protein, 813 aa, Zea Mays
MAYGFSIRGYAASMRGTAELGPFSLAARELQPMEVRAFRWWEDELASIKAAEAEAEKEKEKEAVAGAGAEGEEEEEEEEASGNGRAPKKRSITDLFAEAPAVGAGSGPDAVVDDEEEVLRSIVRRSKELRRKRRLEQAALASVAEEPETSAAGERRAAEGNFPRKKSADKPSLGDELDTSGPSKEHQNDLITEKQKIPDLKRRKHGRLSNSLQKKAERLKYLESRKAVKVGKQRDIKKVLPLHSILKKYTKHTSVKMVKEKHGNSKGTGVIQLCRKSVKRVKFSETDDAKKQCSKRPPLESIRELLSAISSSSSSSIEMSSEEEHVIAESSSSHMTEKAVTMASEANENTNHDNQYELSSTRLSTGLLDLNQALPEPTDLNNPYVPNSEVSNLEQAQVGTWNLDQQVLGNGRKNIDSSFDLHGQEQLRHSTELDTTSKGKSPCTLSNGFQDSVHLQQNWSSMTLHHGVSQLSTGGEPSSFEVRESNISHSEKRNFSSETNVEQELRPSAGQTLRLMGHDLTVSDTRVDYLSDAAQNHTNNTADHLTTKVVLELPRQGQPFLALQTQSIPSVSASSARTAQAHFGYRTTHNISHPLLAANVFSGDPSVYEDRCRDFTNLQSHRNSILGYPPLSNHGSAAFLQNSPPWRYYSDHSTRRDSLSAPFTPTVMQHVATPSDYRANLPHQSYGVYSGSSTVRPLNSASFTCTNQIVQAVDSRATANLPSRSPTTGTTRTHHNSNTSSSSRLVLRSGPVKLSAGAKHILIPNENTEDDNSAPMYSCVSFGSSGGNVSAAYQNKGAGSHRHQNKGAGSRRF

SEQ ID NO: 60618 - protein, 79 aa, Zea Mays
MLLLHFCLPLSDAHLHLSRHHIVPQLIDWHEGGYLTVDLPMSRGEVVIGGPNVTKGYFKDEAKTNDDCEPIYGEHYNQY

SEQ ID NO: 60619 - protein, 52 aa, Zea Mays
MEVLFASSAFWYMCNICYMPFLRNAASKTLGKNIELLSRFMLLAVIYNFDLC

SEQ ID NO: 60620 - protein, 319 aa, Zea Mays
MGQAAFLSKNIPAVYNSFYLSIPSPLFWPVFVIATLAAILGSQAIISATFSIVKQCLALGCFPRVKVVHTSRWIRGQIYIPEINWILMVLCLAVTLGFRDITVIGNAYGLACITVMFVTTCLMSLVIIFVWQKNLLISLLFFVFFGALEGAYLSAAVMKVPQGGWAPIALSAVFMFIMYVWHYGTRRKYLFDLQNKVSMRWILNLGPSLGIVRVPGIGLIYTELVTGVPAIFSHFVTNLPAFHQVLVFVCVKSVPVPYVPMDERYLIGRIGPREYRMYRCIVRWRPRSRPRRGRGGATSRRRRAGWRSCTPPARRGPGW

SEQ ID NO: 60621 - protein, 315 aa, Zea Mays
MPDTGASSLVLEPVHCKADCECHDEGSIICVKKHVREAREKLKGSVGADTFRELGLNDMGEEVGSRWTEEEEHLFQQVVLSNPASLCRNFWDELPLAFPSKSSKELVSYYFNVFMLRKRAEQNRFDPVNIDSDDDEWQAGDDGEYPITGRTDEYLPTESLTDQDDVACNPVPLERDLYEDSDDEDELDNASGDRHNGAQRAGMLSEGNRVMSVIEHNQQTFKLDAEAQDDSCTSFEAHQVGVEGGTHTDIADDNHYRSDGFGGGAEHGFFGNQCDTKEWDFGLSIGWEKHDFLSTNNVIEEVFGKCCDTADQDLI

SEQ ID NO: 60622 - protein, 328 aa, Zea Mays
MCSMLYTVQGAGSIGGKPLLELNRVLRPGGYFIWSATPVYRQEQRDQDDWNAMVTLTKSICWRTVVKSQDVNGIGVVIYQKPASNSCYAERKTNEPPLCSERDGSRFPWYAPLDSCLFTTAITTSDERYNWPVPWPERLDVSYASVPDDSASNKEKFEADTKYWKQLISEVYFNDFPLNWSSIRNVMDMNAGFGGFAAALIDQPLWVMNAVPIGQPDTLPLIFNRGLIGAYHDWCESFSTYPRTYDLLHMSNLIGNLTNRCDLIDVVVEIDRILRPGRWFVLKDTLEMIKKIRPILKSLHYEIVVVKQQFLVATKSFWRPGKPASTSG

SEQ ID NO: 60623 - protein, 622 aa, Zea Mays
MEVVRTTVACECVYVRAMVIKALIWMQNPHESFEELKSIIACELSDPAWPSSLLNDVLLTLHARFKATPDMAVTLLEIARIFATKVPGKIDADVLQLLWKTCLVGAGPDGKHTALEAVTIVLDLPPPQPGSMSGLTSVDMVSASDPKSAMALQRLVQAAVWFLGENANYAASEYAWESATPPGTALMMLDADKMVAAASSRNPTLASALTRLQRCAFSGSWEIRIAAVQALTTIAIRSGEPYRLQIYEFLHALALGGVQSNFSELQLSNGENQGASGTGLGSLISPMLKVLDEMYRGQDDLARDIRQHDNSKQEWSDEELKKLYETHERLLDFVSLFCFVPRAKYLPLGPTSAKLIEIYRNRHNISASGGLSDPAVATGISDLMYESKEVHKETNTVQSGIDPDLAMAWAAGLEDDVWANNAPAVDKVKDFLAGAGTDAPDVDDEEYMNSRPSVGYDDMWAKTILETYDAEEDDGRYSGGSSPESTGSVETSISSHFGGMNYPSLFSSKPSSHGASQQTIREEPPSYSTSVLQRKESFENPLGGGGGRSFGSHEDEDKSSGNPQSGKALYDFTAGGDDELSLNSGEEVEIEYEVDGWYYVKKRRPGRDGKMAGLVPVLYVSS

SEQ ID NO: 60624 - protein, 288 aa, Zea Mays
MAGDGNGRAELPRIAVIGAGIFARTQYIPRLREIAHLVVLKSIWSRTQESAKAAAELARDFAPDIECKWGDAGLEEIMGDSSIMGVAIVLAGQVQVELSLKMLKAGKHVIQEKPASGSTTEAETALSIYHSFQNLFPHKPIWAVGENYRFEPAFIESSKLINDIGDMMHIQVIIEGSMNSSNPYFNSTWRRNFVGGFILDMGVHFIAGLRMLVGSEITSVSSISRHVDMALPPPDNICSLFQLENGCAGVFVFAVNSRSPKILWRVDGTKGTIQVERGVDSGKHGYQV

SEQ ID NO: 60625 - protein, 728 aa, Zea Mays
MAPKAGRGKGRGGKGDKRKKEEKVVPSVVDVTVVTPDESQVTLKGISTDRVLDVRKLLGSNVETCHLTNYSLSHVARGHRLEDGAEVVALKPCALRIVEEEYATAEQAEAHVRRLLDILACTTAFARPRDGAAKHRASRHGRPATPPSSPTPASTGAHGVASGEAAPPISEAHDMAAIRPPPKLGEFYDFFSFAHLTPPVHFIRRKEANGASQEGDHFEIEVKVCNGKLLHVVASVKGFYLSGKPHNVSHSLVDLLQQLSNAFANAYEALMKAFVDHNKFGNLPYGFRANTWLIPPIYVDSATRCPALPVEDENWGGNGGGCGRDGKYDRRRWSKEFSVLARMPCKTEEERVIRDRKAFLLHNLFVDTAIFRAASTIRRLIDQSMNSVGSHSGTHGSNVFEERIGDMNITVKKDGADASLKVEDKVDGVAFCQTGAMDIAQRNLLKGLTSDENVVAKDSSTLGVVIVKHCGYTATVKVSGRAKDSNDVKQTNDISGKFDGMLTIDVHDHPDGGSNALNVNSLRIPLPRVIHPETVVGNQHHSPKSHASNPAKKLARKILKDSLVKLDSMPSINSRIIRWELGSSWLQQLQKKDTPASENGKGNAMKTDKEPAVRGLGKHFEQLRKLKKKECNNEGSSSEKEECSNNYSSMNGTQVSDMIAADEANNGADISKLMSEDAFLSLKSLGAGLHEKSLEELTKMAHNFYDDTALPKLLILRPLSFLLWMEEP

SEQ ID NO: 60626 - protein, 234 aa, Zea Mays
MIPVVCLMEWVLNSKHYTTKVISAVIVVAAGVGICTVTDVEVNAKGFICACVAVFCTSLQQITIGSFQKKYNIGSFELLSKTAPIQALSLIILGPFVDYYLNGRSLLNYPFSGGATFFILLSCSLAVFCNMSQYLCIGRFSATSFQVLGHMKTVCVLILGWILFDSALTVKNILGMLLAVMGMVVYSWAVEAEKKAAAPIPRNKGGMLDGEDVPLKARVSGVPAVDLEDGDVKG

SEQ ID NO: 60627 - protein, 86 aa, Zea Mays
MVLLRRQMNYQGAKPLHQKVSNALEGSWLKKQLLFLGVSTNKETQMPQGLTDQYECLNNNWFVFLDYNHNAKTSGVQTYKLTVKLV

SEQ ID NO: 60628 - protein, 164 aa, Zea Mays
MDADATTSNIQRFLFRAVSYMDMESGFLSVESFLKALSSMQRQPKMDSLQDLSILELYILVCMHRLESKEQTSYNFTSIMKEYRSIQDAYKTSDKYASTVCFRAFEHLSDRELISFGDNRWRNQALEYRPVKLLISSRELAESLKLNTTCPAVLQKLFDRERYM

SEQ ID NO: 60629 - protein, 265 aa, Zea Mays
MAAAPAAAGGLMQLQPPLCVSPRASASCAPSIWGALPQLRRRRALARAASSVAAGEAEAYTEPELVLLEALLGIQGRGRAVAPRQLQEVESAVQALETQGGIPDPTSSSLIEGSWRLIFTTRPGTASPIQRTFVGVDSFRIFQEVYLRTDDPRVVNVVKFSESVGDLKVEKQLLRMESAYFSVLTEQHLPSSFCHLKFHTQCHLDFLEMKLMVGLTQRTCPTLGTYEFQGETSAGNHFCPTEECRPKTNLIVSYICKNRSRRGHQ

SEQ ID NO: 60630 - protein, 199 aa, Zea Mays
MLKHTNVLNDAFYISCDEVIARINNFRLGRLPNVEVEWDEINVAWGQAALLLHTMAHYFTPKFRYRIKIHPMGSYPRVTDIHNHTYELFGPVNLFWSTRFDKAMTWFLTCLQEFAEFAISLDKENNVPPEKTLKLPHKIDGDKVGNHTIVLSFNQDETWTKALKYMLYDLKFVLSWFIGNTSFAPPSRSLHTQFLKNKS

SEQ ID NO: 60631 - protein, 584 aa, Zea Mays
MNTLAGTPPGSAAAKRASSSSCAWPPTAKPSSTASRSTAPSLTFRIATESIGLPEERRPPSVAARELGQLRQRHPVSGLRLENLVRGQADSQVDASSVHDVELSTNDRSELRPPETTQERHERTSEIVSLQQIDSTAMTSGFESGSPNIAEVFCGSHSQAESQDDLEHERRDWQRFSHAVIGEESERTWRENADNMSSHEGTAVEDDNNDHLPEANEESTSVDHLPEGLEGSITDGSLPEAQEDQHDSDHLPAVLEELHGNNHFQESHGEWRRDDRPVEVYDEWQSDDHLPEVNEEWHNDDESNDTADNWHDNNSDQPIDHDAALIRRANTFIPGDDDNVYSTELRELLSRRSVSNLLHSAFRENLDRLIRSYVERQGRGPLPWDLEGTTPAPPSPVQIQEEQRDDEDQELQRTVNRPPLVIPPPPMPPRQPLWHSELHRTNWIRQNIHRSSSDIEWEAINDLRADMARLQQGMSHMQRMLEACMDMQLELQRSVRQEVSAALNRFIGEQGGESKEIIDDGSKWINVRKGTCCICCETPIDSLLYRCGHMCTCSKCANELVRGGGKCPLCRAPIIEVIRAYFIM

SEQ ID NO: 60632 - protein, 590 aa, Zea Mays
MAAATAFRSGTRRGDALAPVEDAGSATRERQAAGRGGGSVRRSKSLSRFPPPSPSTEDTATPSSRFVNKVRGGGSGGVFPPQVSLDDLADEFFRARAESEDDDDEETAARGRSRLPAAAERGGGGAGGRRSSTARYARQTESSRQRGRSVSRPPAERRGVAANAVDGGPAARRQRYASVDRRAAMDRQRWCDSDNDMEVPHQYVSRGMHTKSSSGNSLQSSFHKPSKANQALKRSTSQKDFFHSRDSSSSHSSITDDESRSSLSFHSRNQKAVCAVYGLDKEHGIDDGAGNVLYDVMRKEVRQAVEEIRNQLEEAMTKSEPSEKAINSDAQPTQVITQLRRSYTSKLEESEKRKQELLAQLAAEEHHGHELTKIVRELLPTPKKTANLQRQPHYRRRSNDRSRMSKRLTEEAEQYFEDFLSNVEDTDFSSFDGEKSDSSSTRKDLLLLHAMTETPVKLPEVALPAEADGVVLPWLQWETTNDFQTSPCKTKAQGESTRGSTSNQTASSRGSWSPGDHATSSVASKNSLLTRFGEVGICRSSLSDYARTLSFHIDDYLHLRQSEDLLLETWMQKQRIDSGGLVLCSKSTIL

SEQ ID NO: 60633 - protein, 138 aa, Zea Mays
MNRSDSLWQGPPITSMDRTANNAVLDIESLPQPPDKCCSGSPKMIRALSRKGSNRMERRGGGGGEQEQEDLAKKLVIKVVPSQLEQQPLGQNKALVAPHCTPVLVDSGEGRSKRFISRFTSINPRKILLLFATLKAEA

SEQ ID NO: 60634 - protein, 68 aa, Zea Mays
MAMAIMMRCRYQERVVRGQDCNVSGSESKWQVPVRYFLPLYMYVHTYILVTNARLARDRLYNFIKMCV

SEQ ID NO: 60635 - protein, 213 aa, Zea Mays
MDLKTGLNSPVIADHLPTLALPAAVMTFTTPTSFPSPGLCLNTTKKIPLPGKIEEVRAAGWLDLMKASSPTRKRQIKDVICDAQSDLDLQYCNWTVNYPSALISFEAISDLAGSKRLALFLDYDGTLSPIVDNPENALMSDEMRAAVRHAASLFPTAIISGRSRDKLNELYYAGSHGMDIMGPVRKTTDSNGVECIRSTDVHVKLLSRSLPSI

SEQ ID NO: 60636 - protein, 147 aa, Zea Mays
MSDILHAMEMARLICGGCQTLLMYARSATTVRCSCCDTVNLVRPVSSIAHVNCGQCQTVLMYPYGAPSVKCAVCNFITNVGGVTPMIPLPPPALTASSGTSYIIPSISVPTNQPRNVTVVVENPMTVDDKGKLVSNVVVGVTSGGKK

SEQ ID NO: 60637 - protein, 884 aa, Zea Mays
MKVSSRRKQPPPPPQQQQREEAEAMDADAGVQEVEEEEAAGCSGKAPEAEGRTVVVGVRADAESRALLTWVLVNVAAPLDRVVAVHVALPSAAEAPDFDAMLAVYQGFCNLKQINLKLKICKDSSVRKALVREASLLGAAKVVLGVAKKRRAISSSHSVAKYCAKKLPAKCAVLAVSNGKIEFRRESSAHSGKVSAEVLPCADDEMYCAVRFQAHEPKDGGEGGTTHDVGTKGSELEDTIKHEQLVSSVVLPADLATDQVKIDADLSSSKAVESTVKQRDETAELPGKGASVLYCVLPGRSSDSAASTSSRQDQDSVDVLPSEGTGELYCLLPPRNGHSVRSSGDSKRSNASQRDDRPANPSPEGDGDLDCRLPRSGRPSRSSSAVSMEAEDSPKDAARNAETPSSSPMSLRRMIEGRSDRSRLPRRIFRHHRSSSLEWAKISMVQWATRLPSRYTSVHTDSRSLKQDTSPRLNCGSEPTTTAVEPESSSMFSFAFYGVAWPPSELESLREKYSSVCRLFSYEELKLATGNYSPDMLIGKGGTSQVFKARLDDGTFCAVKILKPSVDAVHEFVTEIETVSSLQHENIVALRGFSFENYNLVLAYDYMPQGSLDRALHGKNGGTEFLVWERRIRIAIDVARAVEFLHLGGVTQSVIHGDVKSSNILLSEDFGARLCDFGLAKRVSASTPHLTCTDITGTFGYMAPEYFSHGTVNEKIDVYAFGVVLLEIISGRRPITPGSTKGQESLVGWAKPLLCGGGIRELVDPLLGRNEYDCDEMERMTLAASLCTRTSSRSRPEMSLVLRLLQGDDEAIGWARAQVTASFDGSDEEAAAAAPDLNMQSHLNLALLGVEVEDDDTLSQSQSQCSSTVDTSADGYWSRSSSFD

SEQ ID NO: 60638 - protein, 704 aa, Zea Mays
MHVDMSHRVRLAAAALVVVAALALAPGAAAAWQLTKNGTVVSYDRRSLIIDGRREIFFSGSIHYPRSPPDMWPELIAKAKEGGLNTIETYIFWNIHEPEKGQFDFEGRYDIVRFFKLIQEHNMYAMVRLGPFIQAEWNHGGLPYWLREIPDIVFRTNNEPYKMHMETFVKIIIKRLKDANLFASQGGPIILAQIENEYQHLEAAFKNDGTKYIKWAANMAISTNVGIPWIMCKQTKAPSDVIPTCNGRNCGDTWPGPMNKSMPLLWTENWTAQYRVFGDPPSQRSAEDIAFAVARFFSVGGTMTNYYMYHGGTNFGRTSAAFVMPKYYDEAPLDEFGLYKEPKWGHLRDLHLALKLCKKALLWGKTSTEKLGKQFEARVFEIPEQKVCVAFLSNHNTKDDVTLTFRGQSYFVPRHSISILADCKTVVFGTQHVNAQHNQRTFHFADQTTQNNVWQMFDEEKVPKYKQSKIRLRKAGDLYNLTKDKTDYVWYTSSFKLEADDMPIRRDIKTVLEVNSHGHASVAFVNTKFVGCGHGTKMNKAFTLEKPMDLKKGVNHVAVLASTMGMMDSGAYLEHRLAGVDRVQIKGLNAGTLDLTNNGWGHIVGLVGEQKQIYTDKGMGSVTWKPAVNDRPLTWYKRHFDMPSGEDPIVLDMSTMGKGLMFVNGQGIGRYWISYKHALGRPSQQLRTTCWCCSRRSSGGRMRS

SEQ ID NO: 60639 - protein, 539 aa, Zea Mays
MFKFLKEVVAGSGSGLKDFPYTIGETYASAWGSWTHHRGTSKDDGSPVSIFSLSGSNPQDRHMVAGRNGVKRLRTVRHPNILSFLHSTEAEVADGPAIKHTIYIVTEPVMPLSEKLKELNLGGTQRDEYFAWGLHQISKAVSFLNNDCKLVHGNVCLASVVVTQTLDWKLHAFDVLSEFDANNEASGSPMLQFEWLVGMQYKPMELSKSDWASIRKSPPWAIDSWGLGCLIYELFSGAKLARTEDLRNTASIPKSLLPDYQRLLNSTPTRRLNPSKLIDNSEFFQNKLVETIQFMEILNLKDTFEKDSFFRKLPNIAEQLPREIVLKKLLPVLASSLEFGSAAAPALTVLLKMGSWLPTDQFSIKVLPTIVKLFASNDRAIRACLLHHIDQFGESMSAQTVDEQVFPHVATGFSDTDGTIRELTLKSMLILAPKLSQRTISGSLLKYLSKLQVDEEPGIRTNTTILLGNIASYMNDGTRKRVLINAFTVRALRDTFPPARAAGIMALSVTGSYYEMTEIATRILPNIVVLTFDPDSKFL

SEQ ID NO: 60640 - protein, 179 aa, Zea Mays
MKSWSWRRAKARPPPRGSAHGSGAPSFWGSQPGRTPAAGGGGARRRGTSCRSGRRRPTRGPAPAASRSLTTPSRTRSRRSTPSSPTPSTNAAAGGGDNDGGDENVTAEKDDAESRELASMTKQISSWLQLKQQIRAPVSAASFQSSTKGPKSQQVESLECQQQVITRAGPEILGAQSKT

SEQ ID NO: 60641 - protein, 198 aa, Zea Mays
MVRKAGGLCIADEVQAGVARTGSHFWGFEGHGVIPDIVTMAKGIGNGIPIGAVVTTPEIAQVLTRRSYFNTFGGNPVSTAGGHAVLKVLEKEKLQENAFVVGSYLKEQLNNLKDKHEIIGDVRGKGFLLGVELVTDHEKKTPAKAEISRVMNHMKDMGVLVGKGGFYGNVFRITPPLCFTKEDSDFFIEVMDIALSKL

SEQ ID NO: 60642 - protein, 102 aa, Zea Mays
MVTGKRPTDPTFKDGLDIVNFVSSNFPHQISRVVDPRLSEECKEFSRDKVEPENAAYQCLLCLLQVALSCTHPSPSERVSIKEVANKLHATQMAYEGAKEKK

SEQ ID NO: 60643 - protein, 221 aa, Zea Mays
MTSVYGVTYIGARQQITKRLQEKGLITDDKLLYDVSCYATRVTLDALGQMFQSARGIMAWLGDCAKMIASKNQPVKWTSPVGLPVVQPYKKYKNYMIRTSLQCLALRREGDAIAIQRQKAAFPPNFVHSLDSSHMMMTAIACKESGLHFAGVHDSFWVHACDVDQMNQILRQQFVELYSMPILENLLEEFQTSFPTLEFPPCPPQGNFDVREVLTSTYFFN

SEQ ID NO: 60644 - protein, 250 aa, Zea Mays
MLVSESTAIPSSLSCSLELDPLLRDLVEKKLSLKRNVTAMATELRDARNRLASQELLLAQEIEARKVAELKTRNLEDEVSKLQKCLGDKDEQLRASLCSADQFRNELDGFRSQLPVMTTLLHCSYLLGKLNDRNNSMSEGEFPVNNLAEQLNHLEKCLESRDPTLRQFKDCYSLRTESDITDAFARVAFDNDDGVAKPGEDIRALSAHWVNRSKELESQLDQHRRTAQELKRRVMRLELCILEPYGNSIG

SEQ ID NO: 60645 - protein, 745 aa, Zea Mays
MASAQAPSSAAAPSRKDHLEAGKKRLEQFRKKKAAKKATAASAEQAKAPAPDVVENPPPIVNAGSLGDGLVSDVDPNQASTSSVPLSVYENGPASASRGAEFMSNGHQQDAVSDGGRKFYGNLSFSDLVNGHHENWRGDGARKKDEHSPYKDVESKSKLSAFGNGSSLNLPSTENMPSWGRNSLSSQVHDTEQSSSYSSSTLFGKSKNAYAQDYSTNSDIFGRLRATSEDSSKVEQSMYASTRDYGNAFNSSMIAGTVDHDTNVGITRTSADSTPVNSERQDPFLSSGYPTTYTRSRPSFLDMIGVQRAPLTTEASYREPAKANQLSSYSNYQSSFLQQSNQQSTGSNAADIPFASESQEYSHEKGSYGSSTPPDFLLPKEERSKHHGNQTFQNFTTHGKDDDFAALEQLIEDLTKEKFSLQQSLQKSQELAETLATDNSALTDKFNQQAHVISQLTSDMERLQEEIQAQLLALESIRTEYANAQLECSAADERAKVLAAEVILLEDKGLRLRSSELKLEKEVEGLHSEISSYRRKVSSLEKERQHLQSTVKALQEEKKLLRNIPVNEKATTTVEKPWVDKRDASTATEDLDIGENSSSETLTSTVDTLEDAGISVLRSNIMSDFSSLEEVSSSIPDDQLRMIDNINSLMSELVVEREALLRALRIESSNCSKLKELNKDLTQKLEIQTQRLELLTSQRMANENALAKPIDTRSINDATMYADEGDEVSIPHQVYSGNLIVDPTT

SEQ ID NO: 60646 - protein, 399 aa, Zea Mays
MPLLLRGASLLRLCQCTSGLSSVKFSSRVTVLVNLNAMRDGMRATYSRRAASKNSEVKKDEQPVTEKVSRAASKNSEVKKDEQPLTEKEDAAETDLEVERGRSSSPSQLQSMTVKELRELTRRRGISVKGTKKDLVSALMNSMAVEANGEGGKSSVELVSPLEVPLKRKGGASVVVEQKLESSEIISETPNKKSRTKQKSSKNTTREEISVTNVKLSKTVVQKETVAGLSPDDDSEPWTILVHKKPQASWIPYNPRTMRPPPLSKDTRALKIMSWNVNGLKALLKSRGFSVQQLAQREDFDVLCLQETKMQEKDIEVIKDTLLDGYTNSFWTCSVSKLGYSGTAIISRVKPLSIKYGLGISDHDTEGRVVTVEFDDFYLLTAYVPNSDLQGHRVGSIPW

SEQ ID NO: 60647 - protein, 1373 aa, Zea Mays
MKRGARDDALMGSQLKRPNVGRSDPSAQPQHMPVPGLASAAAPPPQAGAAPPAQPQQTSGAALTNQKLTTNDALVYLKAVKDKFQDKREKYEEFLEVMRDFKSERIDTNGVIGRVKTLFNGYPELILGFNAFLPKGYAIKLQEEKKPVDFVEAINFVNKIKNRFQHDERVYKAFLDILNMYRKDNKSIQDVYHEVAGLFKDHKDLLEEFQHFLPDTSVAPQAVASSRGGLVKREDRSSLPPANRTLHNEKRERACLSHADRDFSVDRPDVDHDRQRRRLDKEKERKVERDRRDYEREDKDGEHDSRDLEIGQRKRKPFPRKMEDNAGAETHQGGPSENHGIHSVSSSSYDDKDALKSVYTHEFHFCEKVKEKLEHEAYQEFLKCLHIYSQEIITRSELKNLVNDILQHYPDLMEGFNEFLEHCENIDGFLAGVFNKRPTTRIVKTEDKEKDRDRDREDRDRDREKEREKERERLDKGSTFNSKDGSCHKPPMFSGKEKYNLSKPISELDLSNCQRCTPSYRLLPKNYPMPPASNRTDLGASVLNDHWVSVTSGSEDYSFKHMRKNQYEESLFRCEDDRFELDMLLESVNAATKRVEELIEKMQDNSVKPESPIRMDEHLTPLNLRCIERLYGDHGLDVMDVLRKNASVALPVILTRLKQKQEEWSRCRSDFNKVWAEIYAKNYHKSLDHRSFYFKQQDTKNLSTKSLLTEIKEINEKKRKEDDVLLAIAAGNRRPIVPNMSFEYVDSEIHEDLHKIIKYSCGEICNSSDQLDKVMRIWTTFVEPILGVQRKHGSEDPDLVKPKSRTTKSGIANVGESNTGAGIVSKHNNDDESEQGLPSRARIANGVAANAQNGFHDADRIARRGEESLNVTLNGRVHGAASADETPSLSTQNIASTERSAENAAVVRTEQHKANLELTPGVNGSRSSHGAVEVAGEGKAVNETLPSAVGGETGRLGPSFNGISEGIKGRLNNDGSAPHISKVEREEGELSPNGDFDEDHFVPFEDGTSKGKEGSTSRSFQGRHGEVVPSAEAAGENDADADDEGEESAQRSTEDSENASEAGEDASGSESGDGEECFREDHDEEEEDMDHDDQDTKAESEGEAEGTTETHDVEGGISLPLSERSLYSVKPLAKHVPTALHDREKFSRIFYGNDSFYVLFRLHQILYERLLSAKTNSFTAEKKWRNSKDTNPPDLYAKFMSALYNLLDGSSDNTKFEDDCRAIIGTQSYVLFTLDKLIYKVVKQLQAIATDEMDNKLLQLYLYEKSRSPGRFFDLVYHENARVLLHDESIYRFECCSSPTRLSIQLMEYGHEKPEVTAVSIDPNFSSYLFGEYLCSTSDKKLSEGVYLARFFEGNGWYQSCEWSRMQDILQDL

SEQ ID NO: 60648 - protein, 95 aa, Zea Mays
MRSLLPLSLFPCVIFVNSLCPLLPSHSALWPPACTPALRATCNRTCTVLRVPHSAFPSPKTPPVGVEYEPGVPVGKHLWELCVTTETVGTGTGSD

SEQ ID NO: 60649 - protein, 109 aa, Zea Mays
MAASMISSFAVVCSKKKIKTDKPYGIGGGLTVDVDANGRKGKGKGVYQFVDKYGANVDGYSPIYNEDDWSPTGDVYVGGTTGLLIWAVTLAGILGGGALLVYNTSALSG

SEQ ID NO: 60650 - protein, 623 aa, Zea Mays
MTTMENVIVLVNRIQRACTVLGDHGGGDAAASLPTLWEALPTVAVVGGQSSGKSSVLESIVGRDFLPRGSGIVTRRPLVLQLHKTEAGVQEYAEFLHMPKRRFTDFSIVRKEIQDETDRLTGKTKQISPVPIHLSIYSPHVVNLTLIDLPGLTKVAVEGQPESIVQDIESMVRSYVDKPNCIILAISPANQDIATSDAIKLAREVDPTGERTFGVLTKLDLMDKGTNALDVLEGRAYRLQHPWVGIVNRSQADINKNVDMIIARRKEQEFFDSSPEYSHLASRMGSEYLAKLLSQHLEAAIRSRIPSITSLINKTIDELESEMDHLGRPIASDAGAQLYLILELCRAFDKIFKEHLDGGRPGGDRIYGVFDNQLPSALRKLPFDRHLSVQNVKRVVSQADGYQPHLIAPEQGYRRLIESSLNYFRGPAEASVDAVHSVLKELVRISIGETQELKRFPSLQTELAAACYKALERFREDGRKTTLRLVDMESAYLTVEFFRKLPQEVDKTGTGNPRNANPPAPSDDRYADAHFRRIASNVSSYIGMVSETLKNTIPKSVVHCQVREAKRSLLNHFYTQVGGKDAKQLAVLLDEDPALMERRLQCFKRLELYKSARDEIDAVSWTR

SEQ ID NO: 60651 - protein, 850 aa, Zea Mays
MAASPDQFRGHARLPHFAAPLRYDLRLRPDLAACTFTGAAAIAVVVSAPTRFLVLNAAELDVDRASIRFQDLAPTDVAQFDEDEIMVISFDRELPFGEGVLTMDFTGTLNDQMRGFYRSKYVYNGESRNMAVTQFEAADARRCFPCWDDPAFKAKFKLTLEVPSDLVALSNMPVAKETVSGLTKTIYYEESPLMSTYLVAIVVGIFDYIESSTSEGTKVRVYTQVGKTNQGKFALDVAVKSLDLYKDYFATPYPLPKLDMIAIPDFSAGAMENYGLVTYRDTALLYDELLSSASNKQQVAITVAHELAHQWFGNLVTMEWWTHLWLNEGFASWVSYLAVESLFPEWNNWTQFLDETTSGLRLDALAESHPIEVEVNHASEIDAIFDSISYDKGASVIRMLQSYLGAECFQESGEPVKDLMTTWTKQQGYPVIYAKINGHDLELEQAQFLSDGSSGPGMWIVPVTACCGSYDAQKKFLLKDKMDKINIKEFSDSQSADGEKNQIIWIKLNIDQTGFYRVKYDDELAAGLVNAIKAKKLSLMDKIGIVEDSYALSVACKQTLTSLLRLLNAYNDESDYTVLSHVTSVCLSISKITVDATPDLNKDIKQLLINLLLPAVIKLGWDPKDGESHLDVMLRSLLLTALVRLGHNETINEGVRRFHIFFEDGKTSLLPPDTRKAAYLAVMRTVSTSSRSGFDALLKIYREASEPQEKSRVLGSLSSSPDQDIVLEALNFMFTDEVRNQDSFYILGGISLEGREIAWTWLKENWDHVLKTWKSSSLISDFIESIVPRFTSEEKAVEVTEFFAGQVKPSFERALKQSLERVRISARWIESIRSEPKLGQTVQELLQADA

SEQ ID NO: 60652 - protein, 646 aa, Zea Mays
MQTNNSNYGELTRNIRENQLGGVIFGCKHDTIEECFRKQLFGLPSVHYSYVRNVKPGMPLFLFNYSDRKLHGIFEAASPGEMYIDSYAWSNDGCLRSAFPAQVRICTKTRYPPLLESQFKTLLGDNYYNHHHFYFELDHAQTRALISLFKSLAPSNFIQVPAVSSKRNLAVPDPKKITANSKEINPFSVLSNTAAPVNWADDVENASNSDEKKSGGSVSDYDNLDDNFLQNQFGPHSNPDEVSQTSSGKIDGQGLELIECNHPLVNTVNGKRIITDESMLLNSHNEHNGAVEVDEVEIEVHNNPGGGVGLQPERQTVLEKLKGLSFLRQQDAITSKDCTHSGSDQRVPDETQINPNLSCGPFDATMEDKTSFDECSHGNAEVLQIITDLQKRTEALEKKLIGSDKEILSLREIFKDSGRKVQQLEYIVDELQFKLDSSLAHLGNMCNTLATPSIFLIGGYNGVTWLSSLDSFSPEKDAVLGLTPMSSPRSYASAAVLDGHIFAFGGGDGMSWYNTVECYSSRNNEWTECPSMNQKKGSLAGICLNEKIYAIGGGDGNEFYSEVEIFDPYLGKWICSPSMLTSRFALAASGLNGVIYTSGGYDGNMYLKSAERYDPREGFWVRLPSMSTRRGSHTLTVLGDTLKLQR

SEQ ID NO: 60653 - protein, 95 aa, Zea Mays
MDRPIDRMGVQSCAKTYPTTARPIFFSVSLSPSLSTLSDDSSACGGLRNRRLVVVAVLHVLRFPDHRVLPASATTERGKRRPAGRTQSTASLKVF

SEQ ID NO: 60654 - protein, 345 aa, Zea Mays
MDQIATPDETAHASAPSVHKLFDAKLGHHSVMDGTLASTSQSSNIKTQLIRSSSLSRSISVNLEKRSPESDPESPQSHVSHPKFAEPMFSNSSTFCTSLFSSSSTTEPCRQMGTLPFLPHPPKCEQQVSAGHSSSSSLLLSGDTGLDVAEQSDDLNDLLNLSGDASDGSFHGENNALAFDEQMEFQFLSEQLEIAITDNEKNPHLDDIYGTPPQLSSLPVSSCSNQNLGSPVKVQLSSSQSSSSSATANKSRLRWTLELHERFVEAVKKLEGPEKATPKGVLKLMKVEGLTIYHVKSHLQKYRLAKYIPEPKDDKKASSEDKKAQLGKGSIDSSKNKCKGSCSYG

SEQ ID NO: 60655 - protein, 392 aa, Zea Mays
MARPRKPPPPSPPKAAAPSIADALLLATVCMVGLPVEVRVRDGSAYAGVLHTACVDAGYGVVLKKAKKIANGKGDVNLSLGSFVDTLVVCPDDLVQVIAKGLSLPLKGVCKPLDSNVVAASGSLKPQISHANDPKMSNKTKNMSPLMQAEKCTSVGQEKNTSVKRNGQDNGITTSLSSSTRHVGACLSNNWDSRSGSMVPKVDVITSSASAVPVVASGVKPSQPVNNSVAKIVTSSKTAAKEFKLNPSAKVFSPSFASSRQVLAAAAPVDTYYISHSAPEVPMGVPVYEPKSVSGVSPLSNKVYCSNLSPANYAISPQYVPSIMGHNASRLDPSRIGTPYHPMQVGATYTTPSPQPVMAGKFSPVVYVQPGPQVSDSQLLFALRLEVDKYQE

SEQ ID NO: 60656 - protein, 487 aa, Zea Mays
MPGLAASASAAPAPFSLATSRLTPVARPAPSFRTQACGLRCWIAAKLKLRKALKRHHGWQLQRNLDARGNDNVPDCLEAASLTEKRSHWNMHLAYDSGGEMANTSSDTLDSSTVQEKPVVPGHIISEISSHVQKEESAVSKRRSNNEPSLCIAVIGATGELARTKVFPALFALYYSGFLPRNVGIFGYSRKKLTDEGLRSIIEANLTCRVDHHENCDDKLIEFLKKTYYVDAGHDNQEGMVRLNSRMSQIEGIGAANRIFYLAVPQEALLDVALPLADGAQTKQGWNRIIIEKPFGFTGLSSLRVTQSMLSRFEEKQIYRIDHLLGKDLIENLTVLRFSNLVFEPLWSRTYIRNVQVIFSEETSNEIQGRYFGNYGIIRDIVHSHILQTIALFAMEPPVSLDGEDIRDEKVKVLRSIRKVNLDDVVLGQLKDMSGKVDRYTKSMIPTYFAAAMYIDNARWDGVPFFIRTGMGLMTNRNSNSVSPCPW

SEQ ID NO: 60657 - protein, 231 aa, Zea Mays
MACFLLQAYDFTRILSSFYFKGYTLLTKIQRIEWNNSAHAIFITAVSLYLVMSTDLFSDRVKGPITFRYSIISTSALGVSVGYFITDLAMIFWLYPSLGGMEYVLHHTVSLVAIAYTMLSGEGQFYTYMVLISETTTPEINLRWFLDTAGLKKSSAYLVNGILMFVAWLVARIFLFMYVFYHIYLHYGQIMQMHAFGYYLTFVVPSVLFVMNTMWFMKILKGVMKTLAKWP

SEQ ID NO: 60658 - protein, 359 aa, Zea Mays
MIKRGTVKEQLAVDSVSRKMAGLCPLMPEEVGLLLQAVGYPPTTIIFLAGSETFGGQRMLIPLRAMFANLVDRTSLCSQRELFDLVGPEDPRTPDLPQPPPPKSEKQLIEEWRRAGPRPRPLPPPPARPFYAHEKEGWYGWIGENDTEPDASLIEFRRQAHQLLWDALDYFVSVEADAFFPGFHNDGSGWPDYSSLVMGHRLYQTPSGITYRPDRKIIAALFEDVNDHRYHPPRNWTIAAREHLNRSANVEGVVSSAMLSRPVSFLAHPLPECSCSTSKSPAVEPVKDSNGRFLFGGEEECAGWMARSPAMASARNNEPQIEDYEDNLPEEGSSSDMQESDRSDSNKSSEQDEEMDLDD

SEQ ID NO: 60659 - protein, 176 aa, Zea Mays
MADTDSAETEKEKMVADDGGKPAELSKSARKKLQKQERQAERKAARKAAEKERRRADIERRRREWEDALAAAPSDEARAEMVAARRETRRERVGRRAEERGARADRLRRAAEGAGQKVVLDLEFADLMRPNEIHSLTQQIMYCYAVNGRSANPAHLWLTGCSGEMATHLQRIPGRC

SEQ ID NO: 60660 - protein, 396 aa, Zea Mays
MHHSEGQALCSGESCLTESPGRRFTAVSPHLRGKIDLVYFSLDPTCGSLQHWVSGRLFNSDAMPRRSQRLKDTTTNSNTSQIGGNGTDHLSGKLRVNSSTQSKLCSTAIRSVQVRKGKPRATENFDEDNMSGTSSSVSTADGRSFEQDRAERILLQDSKVALGIRELLGLFRTLGEGFRLSCLFKCQEALEVYRKLPESQFNTGWVLCQVGKAYFELVDYLEADHYFELAHRLSPCTLDGMDIYSTVLYHLNEEMRLSYLAQELISIDRLSPQAWCAVGNCFALRKDHETALKNFQRSVQLDSRFAYAHTLCGHEYSALEDYENSIKFYRCALQVDERHYNAWYGLGVVYLRQEKFEFAEHHFRRAFQINPRSSVLMCYLGMALHSLKVDIIDRQQ

SEQ ID NO: 60661 - protein, 270 aa, Zea Mays
MRWDASEAEVALERIWELHDRLSDAILAASRAHLFLLAPQPPPVPSAPPVKGAHRVSGGRNGCVFVKGGGEALAAAAESVSEVRSLHAIRSALEDVEDHLEFLHTVQSRHQAERDSAIARLEQSRLVLATRLAEHQGKKHRIIDEVLAFVGEVSDKSQFISFEDVCATHSRSEDDAEDNRGNGSRIMSNMLSSSLSLAKNSFRLDKIGGALGNAAMFAVSVLAFFQLHQITFGSKTPAMEYRKRIEYSIQPRSSQSNGKGKLLEVYLARG

SEQ ID NO: 60662 - protein, 317 aa, Zea Mays
MVYCTHCADYCPSIKDPDKGYICCGTCGKVLDQEVYTDEPTFVKDNKGQSRLAGSILESIESGYSMSRQRTLDKGRDEIRQIVNNLHISGGETIVSKAFRFYELALDRNFTRGRRTTHVAAACLYIACRQSKKAYLLIDFSDHLQISVYVLGAVFLQLCQVLQLAEHPVVQKLVDPSLFIHRFTKLLLGRRNNDVSDTALRIVASMKRDWMQTGRKPSGLCGAALYIAALSHGCNYTKADIVSVVHVCEATLTKRLIEFENTDSGSLTLMNLMKSLFQNIRPSLEKFSANTRIKVLSILLMDFVKNATISSLNCRVD

SEQ ID NO: 60663 - protein, 53 aa, Zea Mays
MTWGYRPGGSPCCVARARPPWEGGNQPFVPQLLADAKDPWAFRRASWSGRLSA

SEQ ID NO: 60664 - protein, 419 aa, Zea Mays
MDPSVARRQEAERFMNIAEKLLMARDLEGCKQFVAQALSFDPRTPGADDLLAAADALLAAQRRRLPSGPLDPYAVLGLDSAVPASRDPDVVHSHYRRLSLLLNRSHPDRPCSLAFAEAARLVADAWAFLSDPLRKASLDSDLDAAAAATNAAAAAAAAAAARVPIDPHPEKQNQLQSQPPPPPPLAPQPMQTVSGTPPPKRGRPPRAAKTPATPPAPQTVSGTSPTKRGRPPRAAKQSPEVERNQEGEAQQAPVFWTACPSCCHLHQYDHSYESQTLLCPSCRRPFVATAMSTQPPIVPGTDMYYCSWGFFPMGFPGGPAFAEPLNSPQQQAPAALGFYPMGPYLPLPSLSGIVEGEGNKAVDAGTGIPVIPTVAAPASASSPAPTAATPVEFLHVKVGAKKRGRPKGSKNKKAVVEVN

SEQ ID NO: 60665 - protein, 534 aa, Zea Mays
MGNCCAAPSTEGSGKTRPKKQKENPYNVAYNRGAAAPPPPPARPGLVVLRDPTGRDLGAEYELGGELGRGEFGVTYLCTEPATGARYACKSISKRKLRTPVDVEDVRREVDIMRHMPPHPNIVSLRAAYEDRDAVHLVMELCEGGELFDRIVARGHYTERAAAAVMRTIVEVVQKCHRHGVMHRDLKPENFLYASKDSSPLKAIDFGLSVFFRPGERFTEIVGSPYYMAPEVLKRNYGPEVDVWSAGVILYILLCGVPPFWAETEQGVAQAIIRSVVDFKREPWPRVSEPAKDLVRRMLDPNPLTRFTAAQVLEHPWLHDSKNTPDVSLGDTVRARLQQFAAMNKLKKKALRVIAEHLSAEEVADIKQMFDKMDVNKNGKLTFEEFKAGLRKLGNQMHDSDLQILMDAADVDRNGTLDYEEFVTVSVHVRKIGNDEHIQKAFAYFDRNKSGYIEIEELREALADELDGSDEDIIGGIIRDVDTDKDGKIGYDEFAAMMKAGTDWRKASRQYSRQRFSNLSLKLQKDGSLGADTR

SEQ ID NO: 60666 - protein, 78 aa, Zea Mays
MMESGCEEVTLEAEVTNKGALALYGRLGFIRAKRLYRYYLNGVDAFRLKLLFPRPDPGLPPMMVGNDRDDQKMDSPYL

SEQ ID NO: 60667 - protein, 150 aa, Zea Mays
MATSSPGRRRTGTSCLPEGLRTELFSSPPSPEGFRPSLQCLFLSPSHGSRVRHSRAPLPPRWPGEIFPRPALPGQGRRGGVLERRREGGGSARREAGGGCGRRHAEAPRGPHAAAQEAWHPLQACNALISLHLVPVVQLRRLPRRARMRG

SEQ ID NO: 60668 - protein, 240 aa, Zea Mays
MEDFYDVKLTEIDGQAVSLFGVFDGHGGSRAAEYLREHLFDNLLKHPDFLTDTKLAISETYQKTDTDFLESEASAFRDDGSTASTALLVGDHLYVANVGDSRAVISKAGKAMALSEDHKPNRIDERKRIENAGGIVIWAGTWRVGGVLAMSRAFGNRLLKPYVVAEPEIQEEQVSGGLECLVLASDGLWDVVENEEAVFLGRSEDTPESAARKLTEIAYSRGSADNITCIVVQFHHDKTG

SEQ ID NO: 60669 - protein, 388 aa, Zea Mays
MNRLRLLTQFLEHLVSEGSQDVHVHNALGKIIIDSNNNPEHFLTTNPFYDSRVVGKYCEKRDPTLAVVAYRRGQCDDELIIVTNKNSLFKLQARYVVERMDGDLWDKVLQPENEYRRQLIDQVVSTALPESKSPEQVSAAVKAFMTADLPHELIELLEKIVLQNSAFSGNFNLQNLLILTAIKADPSRVMDYVNRLDNFDGPAVGEVAVEAQLYEEAFAIFKKFNLNVQAVDVLLDNIRSIERAEEFAFRVEEDAVWSQVAKAQLREGLVSEAIESFIRADDAAHFLDVIRAAEEANVYNDLVKYLLMVRQKAREPKVDGELIFAYAKIDRLSDIEEFILMPNVANLQNVGDRLYDEELYEAAKIIYAFISNWAKLAVTLVKLKQFQG

SEQ ID NO: 60670 - protein, 944 aa, Zea Mays
MICFDTETVRQRPAGLQAPSSIAHPAIPHPASKACLACSFDLNQSALYIHGRMKTRIVYSREFLLSLGELEHCKKLPPDFDAALLSELQELSAGVLERNKGYYNTSQGRPDGSVGYTYSSRGGNTGGRWDTRSSGSSDRDGEPDRESQTQAGRGANQYRRNWQNTEHDGLLGRGGFPRPSGYTGQLSSKDHGNAPQLNRTSERYQPPRPYKAAPFSRKDIDSINDETFGSSELSNEDRAEEERKRRASFELMRKEQHKAVLGKKSGPDILKENPSDDIFSKLQTSTAKANAKTKNEKLDGSVVSSYQEDTTKPSSVLLAPAARPLVPPGFANAFADKKLQSQSSNITHEPKLEDDQSATGFTSESKEKGVSGNDATMGPKHTLPPGSVTSSAELASSVLKGSEDWDADVMDKYSIGKEGKSKNIDPVRKDDSVAILEQFFGNVLSKSGSNLPTYVENQPLKTDDDMITSVPESSKFAHWFLDEDLKPAEDLSSKSLLSMIVKNENPELISFTSSTPANGVLEQCIHSDVPEAVPIMTCEDLEQTMLAQVSNSSSTQINATKEQLTVMDEPVAMQKVTVDNHASQHLLSLLQKGTDNKGAPSLGFQRESTDEPLSVDTNLMANGGISGSDPVNSVENVPTSGKDLTLEALFGAAFMNELHSKDAPVSIRGATTGGPTEFAEMGKTLLSSSHEGYYPVEQTVHFNNTKDAAVRREPGIEHSAVPGLSQGSASFDKKGMEIHLPEEDNLFTMSDSLLGQNSDILASVGSSRVEGLLPEKALDNLSYRFQSLVPGDAEHIQVYGPDALGSHPRDSQNMYHLLQGVPHLDPAGHIMRQHMSMPGRFPPEGLPRGVPPSQPVHHMAGYRPEMGNVNNFHMHPRQPNYGEFGLMMPGPEVRGNHPEAFERLIQMEMSARSKQQQVHHPAMAAGRVPSGMYGHELDAKLRYR

SEQ ID NO: 60671 - protein, 582 aa, Zea Mays
MASAAGAAFAAITLLILVPLTAASDSDHKYQAAEPVTLWVNKVGPYNNPQETYNYYSLPFCHASENHVHKWGGLGEVLGGNELIDSQIDIKFGKNVDKATICSLDLDLVKAKQLSDAIENSYWFEFFIGFVGEADRNNDNKYFLFTHKNIVIRYNGNQIIHVNLTQESPKLIDVNKALDMTYSVKWEPTNITFAHRFDVYLDYPFFEHQIHWFSIFNSFMMVIFLTGLVSMILMRTLRNDYAKYARDDDDIETLERDVNEESGWKLVHGDVFRPPCNLVLLSALVGIGTQLAALILLVILLAIIGMLYIGRGAIVTTFIVCYALTSFISGYVSGALYSRHGGGAGKNWIKAMAMTASLFPFMCFGIGLVLNTIAIFYGSLAAIPFGTMVVVFILWAFISFPLALLGTVVGRNWSGAPNNPCRVKTIPRPIPEKKWYLTPSVIALMGGLLPFGSIFIEMYFVFTSFWNYKVYYVYGFMLLVFLILIIVTICVTIVGTYFLLNAENYHWQWTSFFSAASTAVYVYLYSIYYYHMKTKMSGFFQTSFYFGYTLMFCLGLGTLCGAVGYLGSTLFVRRIYRNIKCD

SEQ ID NO: 60672 - protein, 903 aa, Zea Mays
MTSVDPLFRRLALRGFRYNLLVLQEPSFETLLSNLTNLRELYLDGVDISSSGREDWGRTLGKYVPHLQVLSMEECRLVGPIHRHFLRLRSIEVINLKMNGISGVVPEFFADFLNLRVLQLSFNNLRGTFPPKIFQLKNLAVLDVSNNDQLSGLIPKFLHGSSLETLNLQDTHFSGPIPQLIGNLTTLEYLTISDCAFTGQLLSSVGNLENLRFLQISYNHQGLSGPITPTIGHLNKLTVLILRGCSFSGRIPNTIANMTKLIFVDLSQNDLVGGVPTFLFTLPSLLQLDLSSNQLSGPIQEFHTLSSCIEVVTLNDNKISGNIPSALFHLINLVILDLSSNNITGFVDLDDFWKLRKLAQMSLSNNKLYIKEGKRSNSTFRLLPKLTELDLKSCGLTEIPSFLVHLDHITILDLSCNKILGTIPNWIWHTWDHSLRNLNLSNNAFTNLQLTSYILPNSHLEFLDLSSNRIQGQIPIPNMLTMESNYEQVLDYSNNSFTSVMLNFTLYLSQTVYLKLSDNNIAGYIPPTLCNLTYLKVLDLANNDFRGKVPSCLIEDGNLNILNLRGNRFEGELTYKNYSSQCDLRTIDINGNNIQGQLPKALSQCTDLEVLDVGYNNIVDVFPSWLGNLSNLRVLVLRSNQFYGTLDDPFTSGNFQGYFLGIQIIDIALNNFSGYVKPQWFKMFKSMREKNNNTGQILGHSASNQYYQDTVAITVKGNYVSIDRILTALTAMDLSNNKLNGTIPDLVGNLVILHLLNMSHNAFTGNIPLQLGRMSQLESLDLSWNYLSGEIPQELTNLTFLETLDLSNNNLAGMIPQSRQFGTFENSSFEGNIGLCGAPLSRQCASSPQPNDLKQKMSQDHVDITLYMFIGLGFGLGFAVAILVMQVPLGKFYRTISILRNLS

SEQ ID NO: 60673 - protein, 701 aa, Zea Mays
MKSRTATLAVGILLLVALVVVAEADTDAGDVAALGNLYSSWNSPAQLTGWSASGGDPCGAAWAGVSCSGSAVTSIKLSGMELNGTLGYQLSSLQALKTIEYRNLAKNNFSGNLPYSISNLVSLEYLNLSHNSLFQEIGELFGSLNSLSELDVSFNNLTGNLPFSMGALSKLSSLYMQNNQLSGTVDVLSNISLATLNIADNNFSGMIPQEFSSIPNLIVGGNSFVNMPASPPSTLKPPLEEPQGPVSAPTSPDTPIDQDDRKIQTGPLIGIAVGSIAAASCVLFVLVFCLHNARRRNDDEISEPKDLVGSLAVSIETAASSREVLNNNHENSAVATSDLQHAGKMMMTPDRVLHDTTNGSSTAKRPKVPVTVTSYTVADLQVATNSFCEDSLLGEGSLGRVYKAGFPNGKVLAVKKVDDSALLSLYGGGEDAFLELVSNVSRLRHPNIVPLTGYCVEHGQRLLVYEYVGNGTLRDVLQHCLSDDEGASKKLTWNTRVRIALGTARALEYLHEVCIPPVVHSRTFKASNILLDEEYSPHLSDCGLAALTTVVSPEAVGSFGYSAPELAMSGTYTAKSDVYSFGVVMLELLTGRKPLDSSRERSEQSLVRWAAPQLHDIDLLARMVDPALDGLYPSKSLSRFADIIAICVQPEPEFRPPMSEVVQQLVRLMQRAAIIRRQSDDLGYSYRVPDRDGGAAAGDVL

SEQ ID NO: 60674 - protein, 334 aa, Zea Mays
MNKPRDETDKAKCANDLPDFLKQRLRARGILKDETTNKNYTSTQTVDSQEIENKSAQELPPGWIEVKDPTTGAPYFYNQSTGVSQWDRPDSVVNIMQHQVSPSLPENWEEAIDKSTGHKYYYNTKTQTTQWEPPTSVNTSVRPPASTNTAVEPVAQAADIWNSQMQRCLGCGGWGVGLVQPWGYCNHCTRVQNRPFQQYPSYTNNTMHASGNNAPKAQGNVSAKNRSSSKPPLGKPNRKDHRKRNRPEDDELDPMDPSSYSDAPRGGWVVGLKGVQPRAADTTAAGPLFQQRPYPSPGAVLRKNAEVATHGKKRGGMAPITKRGDGSDGLGEAD

SEQ ID NO: 60675 - protein, 300 aa, Zea Mays
MDTQRERARRTRHLRLVAGRAAGNPPHRTSGTTYSRWPGFFVTIWIAAVMFKSNDILRKQTALKRERKIPVLVGITILFVVHVSGFYWCYKNGDLIRPLMMLPPKEIPPFWHAIFIILVNDTMVRQTAMVVKCLLLMYYKNSRGRSYRRQGQMLTIVEYFLLLYRALLPTPVWYRFFLNKEYGSLFSSLTTGLYLTFKLTSVVEKVQSFLTALRALSHKDFHCGSYATSEQVAVAGDLCAICQEKMHVPILLRCKHVFCEDCVSEWFERERTCPLCRALVKPADLRSFGDGSTSLFFQLF

SEQ ID NO: 60676 - protein, 238 aa, Zea Mays
MSFMSPFPGMDLSKMDPGTLTLLGAAGCVMLTMHFTVQLVSQHLFYWKNPKEQKAILIIVLMAPLYAISSFVGLLDIQGSKTFFTFLDAVKECYEALVIAKFMALMYSYLNISISKNIVPDEIKGRVLHHSFPVSLFLPRNVRLEHKTLKLLKYWTWQFVIVRPVCSILIIALQLLGLYPSWVSWTFSIILNFSVSMALYALVLFYHLFAKELAPHKPLAKFLCIKGIVFFSFWQTTH

SEQ ID NO: 60677 - protein, 585 aa, Zea Mays
MKKETMEGHVPLPLPLLPDGETAVGYSKDDASSPLQEEISSLRSRQRRVDRRRREALDRLVELKGSVRVFCRVRPLAHTNSLHAQSSPVTVEQERITVKQPGSRGSSALIGFSARSPRKEGTGGNKLGVVPRAIQELFSRASEDGSCAYSFSMSMLEVYLGSLRDLLAAPRQPLFRRTECKAAACSSSLSILATKGGAVEVEGLTDVSTPDLKNASQWYRRGRRARSTAWTNVNDASSRSHCLTRITIRRRMRHGGGGGVSKLWLVDLGGSERLLKTGASGLTMDEGKAINLSLSALGDVIAALRRKRPHVPYRNSKLTQILSDSLGDGSKVVMVVHVSLSEDDVGETVCSLNLAKRARSIEPNREIPQDLKTLKQKRVAELDREIRAAEEELKRLDEQIRRAEEKEISLEEEEEEEEEKKLFASSVCQALSDDEKGSPRSTLVVVGHTDAAESPRATTEKAKGRRPPPARGHGGSAAPHFMSSTVCSRQRRYPPPAAELSGSQNAAARASRSASVALSSGVHKLRCLRVNKSDQVNVISNSSVDSTAASAPPPRRRESCFGSRPVLQRAAAPLHLHRRRMSSLT

SEQ ID NO: 60678 - protein, 393 aa, Zea Mays
MLFACSATKSYDTVSKDVIQRWTYPMVPDVVSSRDSSESRLHRQGIYKASDVTLSPSAQIGANSVVGSVTSIAGHCKVLNSVIGQGCKIGKNVLINGSFIWDNVIIEDGCKVSNSLVCDGVHLRAGAVVEPGCVLSFKVEVGKNVVVPAHSKVSLLPQPSNEDSDEELEYADTNSGIADSPPFSSMRSNGDQATVPSEEDELGTSETGTCGVVGYIWTSVDSGIMEEWRQSIAPIPKEKLEELQHAVPDDDRSEDESNNPTLPDKDDSSDSLVEDDDHISKFEKEVEETFQRALGGGVNRDNLILEINGLRLAYSLQHADCAGAVFYSVMKSALLAAQSSNDTLLKTTADALGKWKDLLRNYTKTVDEEMEILLKFEEMCQETTKDFSPLFPK

SEQ ID NO: 60679 - protein, 1225 aa, Zea Mays
MERILDIEVLEAPREDSSSTEPRSKKMERYLIKWKGLSYIHCSWVSEKEYSEAANIHPRLRTRLNNFRRQKEAMKIEAERSGEDIVAIRPEWTTVDRILASRKNLVGDREYYVKWNELTYEECTWENESDITVFQPEIERFNEIQFRRKKSGDKGKATREPRQFKESPTFLSGGTLHPYQLEGLNFLRYSWFHNKRVILGDEMGLGKTIQSIAFLASLFEDKFGPHLVVAPLSTLRNWEREFATWAPQMNVVMYFGAAASRDIIRKYEFYYPKEKLKKLKKKKSSPSNEDKKQSRIRFDVLLTSYEMINMDSSILKNIEWECLVVDEGHRLKNKDSKLFGQLKDYNTKHRVLLTGTPVQNNLDELFMLMHFLEGESFGSITDLQEEFKDINQDKQIEKLHGMLKPHLLRRFKKDVMKELPPKKELILRVELTRKQKEYYKAILTKNYEVLARRNGGHTSLINVVMELRKLCCHGFMIDEPDLEPANPEEGLRRLLDSSGKMQLLDKMMVKLKEQGHRVLIYSQFQHMLDLLEDYLSYRKWTYERIDGKISGADRQIRIDRFNAKNSTRFCFLLSTRAGGLGINLATADTVIIYDSDWNPHADLQAMARAHRLGQTSKVMIYRLVSRGTIEERMMQLTKKKILLEHLVVGRLTKANNVNQEELDDIIRYGSKELFEDENDESRQIHYDEAAIERLLDRDQVDGDESVEDEEEDGFLKGFKVANFEYIDEAKAQAEKEEARRKAAAEAENSERNYWDELLKDRYDVQKVEEHTAMGKGKRSRKQMAAADEDDIHDLSSEDEDYSLEDDISDNDTSLQGNISGKRGQYSKRKSRNVDSIPLMEGEGRTLRVLGFNHAQRAMFLQTLNRFGFQNYDWKEYLPRLKGKSVEEIQRYAELVMAHLVEEINDSDYFSDGVPKEMMRVDDVLVRIANISLIEEKMAATGPGKITNIFPNYLLYEFQGLSGGRIWKAEHDLLLLRGILKHGYARWQYISDDRENGLFEAARRELHLPSVNEIIGAQLNEGNLEGAQEGQANTTSMSHYKEIQRKIVEFLRKRYHLMERALNMEYAVIKKKIPVPDDITEQGVPAGHAPFIPDISELLRELPNLEPISTNELVSEGTAGQLQVPHLYNKMCGVLEESGAYALSSFFGDKSASSSLANSLRQFETVCENVVEALRPHQNGTGSAIKEELVDAATKAAAAAAPQQDSGHDAPHGQSSTAKADMEIDG

SEQ ID NO: 60680 - protein, 773 aa, Zea Mays
MQQWVCSKRSDIAKSLSRNHSGKAFDKVIPGAQKSDRNNMLGFNDSQVPESPAGAFSSESPEYMATTSEAIGVEQSNGPSKVLRSIPTWSSKTHRLQSSVMPKTPRSAAALAKRKIKEIGRREATKLDNYNIVRNPTSVKRSETRTLSFTAGPSNGSNRLASTSKKIRKHRSLLRTGKRAFSPFSTRVVHGFGEERELDTRHVNKKFRITSNEVPKKFLKHTEEDTADNDFSLASDMTVSGQQNDQYDVAQETEGTQMDCEGEDAETDVPYDSVSRSDPADCCNQISDVSLSPENNRTTDDDVLVEGYSVAVEDPNSSEKLAHGHESNCATNNEMDEWQMDPTSTKESSPCLVSNRDMGPGGPQDNSSITSNGENFNQEHGLPLGQDSLDSPVSTASTMSPPAALKDSRINDEEPGPSTGRTVEEQITGCLNQEAKSIPMAREGELPKEKPFRCSCQENISRESHQSVVARPTLNFTGKQVPQLHIGSRASSSFSMYQRTSAKPNPCLDSHEHLSAAKVAAESAVSLPSYSTDCISPSLQTQLPSPSNPILRLMGKDLMVMNNEESVHPQAPSSDYILRGNYEAPVGFMPPSYQHLGNSGFISMPPTAASHQIPLPSVQASGLVAPPLHSVSMMQPEHHSQQKSYRNIMPAMHHPTYMMKEVIVIKDSPERSRTEPQASMLFPPAPPPALSIPNNTPPRPFYCLPPQIPILPRERAAGSMPVYANFGALAGVSPSSQESQTGVTNPYMPNPFFVQSRTGYMNHPPVYYSQNLG

SEQ ID NO: 60681 - protein, 307 aa, Zea Mays
MASRVASGLLRRRAVATLGLLRSHTHVRNYSSQLSALIPATSQCSNLTRRRYYLPNPSLYQVWSRSFASDSGDKFEAVVPFMGESVTDGTLANFLKKPGDRVEADEPIAQIETDKVTIDVASPEAGVIEKLIASEGDTVTPGTKVAIISKSAQPAETHVAPSEEATSKGSSPPKVEEKSRVEEKAPKVEPPKMQAPKPTAPLKTSPSEPQLPPKERERRVPMPRLRKRIANRLKDSQNTFAMLSTFNEVDMTNLMKLRSDYKDEFVTKHGVKLGLMSCFVRLLFLHFKTSQLLMLSLMAMTSYTETT

SEQ ID NO: 60682 - protein, 658 aa, Zea Mays
MNPAPRHPSTAQTQNQTNERYGTYPVAARNLREDELGGVIFGCKHNTIGECLSKQLFGLPSSHFSYVKNVKPGMPLFLFNYSDRKMHGIYEAASAGKLNIDQFAWSDGGRIKTQFPAQVLISMKTACLPVPESQFQSVISGNYYKPRHFFFELDHEQTRALIFLFKPAPVHDVSNKCHPSKSIQSPIVEAYVNPDGEYASESRTSTSHLDKEASNWDDVTTKEGTEFVNNDHPHINPPHKQQDMFVLRQHEAESSKDTVDSASNKSMPQEAQFDATLPTDPSNSTSVGDVCIKDLTSLGQSRGNAELLHIVKELSKRNQAMEKKLSESDKEILFLRESMKDTGRRIQELEYQYEKLQSNYNSLVPLLGSRHDNMEGPSIILMGGYRGSTCLSSLDSFCPTTDRVVPLCSMSSARAYAAAVALKDHLYIFGGGNGSSWYHTVECYRMGSNKWIACPRLKHAKGSLAGTTLNDKIFAIGGGDGSAVFSEVEMFDPALGRWIDNVSMRQKRFAAAAAVLSGTLYVTGGYDGNTYLQSAERYDPREGFWTLLPSMSARRGSHSVAVMGESLFAVGGYDGNSNISTVEIFDPRANSWRIGRSCSIARGYGCAVTMDGNLYFIGGVNDAGETLGTVEVYNERQGWSISGCKSVGKRAFACAITV

SEQ ID NO: 60683 - protein, 68 aa, Zea Mays
MAAVPCQSLVNGMSTIRLPQTDLLSYSTKPEMRRRVGMVKTQTHLPRTPGLRGWSLMLQNQARNGFVV

SEQ ID NO: 60684 - protein, 181 aa, Zea Mays
MGVVSAQSKWLVAGSLAFAAIWKRDAEIMWFLLGAVGNSLLSMVLKKMLNHERPAPALRSGPGMPSSHAQSIFYAATILALSLYYWLGTNYLTMILGPATLSVAAYLSWLRVSRRLHTLNQVMAGAVVGSVVGALWFVLWHSLVQEAFASSLLVRIAVVLGSSAFCVGFVIYMIRHWLKDE

SEQ ID NO: 60685 - protein, 1310 aa, Zea Mays
MAGKTKGGKNKGKAQGAGQSASAEPEVPATDGAEVVNPENGEVNEPPVTEDGVKNVEKGDGDALEVVQPARKPAEGELHLYAVPVRTQSDGSAHQLEDYNEISEIADITSSGCSLEMVAAIYDERSIRSHLRRVRELLSLSSLYVSLSTSLALHQESAQGKSAGPEKGPIQELDGLNFMEDSAGALTNLLASAPAEIKCVGSIVFSSFNPPPSYRRLHGDLIYIDVTTLEGNKYCITGSSKFFYVNSSKGSIFDSKPTKQGLEASTLIGLLQKISTKFKKGFRELLDRRASAHPFENVQSLLPVTSWLGAFPVPEHRRDEARAEDSVVLSYGTELIGMQRDWNEELQSCQEFPHGNPQERILRGRARYKVTCDFVDAAVKGAVGVINRCIPPINPTDPECFHIFAVDADYEYISKDHKPDCQNGSSRSTKVSSPDVITKPDHDESAEVVDSKSEEAQITDSEQATYASANNDLKGTKAYQEADVSGLYNLAMAIIDYRGHRVVAQSIIPGILQGDKSDSLLYGSVDNGKKISWNETFHSKVVEAAKRLHLKEHVVLDGSGNPVKLAATVECKGIVGSDDRHYILDLMRVTPRDSNYIGQGHRFCVLRPELIASFVEAESMKQSLKQKVPDAPVASTSDAKATSVEADDKSEESSVHTHKENDNSSSEILFNPNVFTEYKLDGSPEEIAADEELVKRAGTYLIDIVIPKIVQDLCSLDISPMDGQTLTDALHLHGINIRYLGKIAGMVKHLPHLQDLFSAEIIVRSAKHVIKDILRQSLDHDIGPAIAHFLNCFMGKVLGASTEGSLSDMQSKTLKGHENSQTQKSTKGHKLSNAAASRKSLSAYSHLTSDGIWFSIKEFAKSKYQFEVPDDARLSAKRVAVLRNLCQKVGITIAARKYDLDASTPFEASDILNLQPVVKHSVPTCTEAKNLMEAGKVRMAEGTLNEAYALFSEAFSLLQQITGPMHKDAANCCRYLAMVLYHAGDTAGAVVQQHRELIINERCLGLDHPDTAHSYGNMALFYHGLNQTELALRHMSRTLLLLSLASGPDHPDVAATLINVAMMYQDASNMNTALRYLQEALMKNERLLGPVHVQTAVCYHALAIAFSCMSLYKLSIQHEKKTYDILVKQLGENDSRTEDSKNWLNTFKLREEQANPAVLQAMKAAAIQSGGVSANVNRSLNAAVVGEGVPRLRGVDERAARATAEARKKAAARGLNVRNGPVANHASDELAQILKLINAVSGSSTPGSAKTEVSASEGQATNGCIQNGTDTEPKAADTNGLSASVKSTVNAPFGLGTTLESKKQKSKQKS

SEQ ID NO: 60686 - protein, 435 aa, Zea Mays
MAGAHQPGAEPAVAAFRRLRGIGSSSDQLLVQPVVPGHGGGGGGCADAGDAERQPLDPSRFHKASNREIRRAAITRGRRLKACTCPSPDHQHRRRRRRRLPLRAPCLMGCGGRGASAAAVEGDDTTTTSDEEDEEVRASSFAASDVTKSPAAAAAWAAAGAGAPGRRERYCLVACKQMVGLFATVWVRRGLVPHVGHVRFSCVGRGIMGYLGNKGCISVSMSLHQTSLCFVCSHLASGEKEGDELRRNSDVVEILRNTQFRRLCKRSGRRIPERILDHDRVIWLGDLNYRIALSYTEAKKLVQANDWAALFEKDQLKTERESGVFRGWNEGKILFAPTYKYSWNSDTYAGEDVSSKKKRRTPAWCDRILWHGEGIVQLSYIRGESKFSDHRPVCGVFIVEAAVVPDSSRLVKFASGPNMKVGAEELLLASSKYDL

SEQ ID NO: 60687 - protein, 134 aa, Zea Mays
MPMPSPCHAPPYYGRGSPPRAGKRVQGHRTQSSTRHRFILDERTVDVTREPWKLVQTSLGTGDALLTVDCTPTEVSAMNLPHTASRSLRDITTGEEKVSPEETTTMRSRCRLLVNCWRRGNNYLSSIYLLSIIL

SEQ ID NO: 60688 - protein, 189 aa, Zea Mays
MSAEKPAPVRVLYCGVCGLPAEYCEFGPDFERCKPWLRAHAPGVYPDDKDVDKVGDRLQGVGISDGSTSAAGDASASKPQEAKRLPGGKLKKKEKQEVVIEKIVRNKRKCVTVVKGLELFGVKLSDASKKLGKKFATGASVVKGPTEKEQIDVQGDISYDIVEFITDTWPDVPESAIFFIEDGRKVPAA

SEQ ID NO: 60689 - protein, 104 aa, Zea Mays
MFRLMLRSCKFLISLTLSRSQWILVTVHKKLQSGSCTSPSDFAADARLTFNNAMAYNPWGHAVHDMTIQLNKMFESRWRPNEKKLAFAATEKFEEEDNTSYGLQ

SEQ ID NO: 60690 - protein, 313 aa, Zea Mays
MYTSLAPHGPLKLYHFVIMVAVVLAFLSQLPSFHSLRHINFVSLLLSLGYTVLVAAACVRAGLSKNSPAKDYSLSSSKSEQSFDAFLSISILASVFGNGILPEIQATLAPPAAGKMMKALVLCYSVIVFTFFLSSITGYWAFGSNVQSNVLKSLMPDSGPALAPTWLLGVAVLFVLLQLLAIGLVYSQVAYEIMEKGSADAARGRFSRRNLVPRLLLRTLYLAFCALMAAMLPFFGDIVGVVGAVGFVPLDFVLPVLMYNMALAPPRRSPVFIANAAVMVVFAGVGAIGAFATIRKLVLDADKFKLFSNNVVD

SEQ ID NO: 60691 - protein, 264 aa, Zea Mays
MVAAGRNRAERWNLAGATALVTGGSKGIGHAIVEELAGFGARVHTCSRNAAELEECRRRWDEKGLQVTVSACDVSARADRERLVATVGATFGGRLDILVNNAGQSLFKRTAECTGEDYSRIMATNLESCFHLSQLAHPLLRLASGGGGGSVVHVSSVAGFVGLPALAVYSMSKGALNQLTRSLAAEWAGDGIRVNCVAPGGIRTDISSDKTIDPELAKREMARVPMGRIGEPEEVASMVAFLCMPAASYMTGQVICIDGGRTIA

SEQ ID NO: 60692 - protein, 607 aa, Zea Mays
MFNGLILGKHKDPQRLVIDLRNLRRSNVIGEFVSIFINEKQHCVHIASDGGRVCRPLIIADMGISRIDETHMEKLRHGTCGFDDFLRDGLIEYLDVNEENNALIALYEHMDQDDVERSSITHIEIEPLSILGVVSGLIPYPHHNQSPRNTYQCAMGKQAMGNIAYNQLFRADSLLYLLVYAQRPLLTTKTIELVGYDKLGAGQNATVAVMGYSGYDIEDAIVMNKSSLDRGFGRCIALKKYTVLKDNYGDGVSDMIVEPQRDNGVLIKQNMRALDEDGIAGPGQIIRNHDIYVNKRTPKNTSKGIGRALRESDYKDSPALYKGVDGETTVVDRVMLCSDTNDKLSIKCIIRHTRRPEVGDKFSSRHGQKGVCGTIVQQEDFPFSERGICPDLIMNPHGFPSRMTIGKMIELLGGKAGVSCGRFHYGSAFGEPSGNADKVADISSTLIKHGFSYNGKDFLYSGILGQPLEAYIFMGPIYYQKLKHMVLDKMHARASGPRVLLTRQPTEGRSRDGGLRLGEMERDCLIAYGASMLIFERLLLSSDPYQVQVCRKCGLLGYYNHKLKTSYCSMCKNGENMAKMRLPYACKLLFQELHAMNVVPRLKLTEV

SEQ ID NO: 60693 - protein, 412 aa, Zea Mays
MIHHMCETWSQHTWRLCLRPGLGAPKHGCDKTAILPKFGEGTSSTAGIEQTTPVGLSAKKSTEVPKVPVAEPAEAKEEAAKKPELEKVIVPPEILSPQAEAELPKVTKAPATTPKRRRMASVLDAVMETTRALTPAPTKKVAEAATACAETEARPSVPAKAEPAATKQRAEQEFPDTSTTVKKDVAEKAKSPAPEAPFENLDFIVRHASGKRLSEEEIAEVKHYARELKYPKGALVFNGTNKDDFLYCLPDNKEISICQEMAKNMGFPKLEAGLSAMSKDDLGDSLAYNSLKGLILRNAFRAQKNAEDESCVIALGNLRSEVIKLRNEALEKDKILLSLVDRVKEDESKLNTQSETYKAEIEDLQKKLAEANENFALAKASQEISEWSKTRLEKSVEELRESKERCFDKSLD

SEQ ID NO: 60694 - protein, 421 aa, Zea Mays
MVVDARDPLFYRCPDLEAYAKEIDEHKRTILLVNKADLLPLNIRKRWADYFKAHDILYVFWSAKAATATLEGKKLSGYSEGESASLDLDTKIYERDELLMKLQAEAESIVAQRRISPTVDDHEASSSDSVSSVTKHVVVGFVGYPNVGKSSTINALVGEKRTGVTHTPGKTKHFQTLIISEELTLCDCPGLVFPSFSSSRHEMVACGVLPIDRMTKHREAIQVVADRVPRDILEQIYKIALPKPKPYEPQSRPPTAAELLRAYCASRGHVSHAGLPDETRAARQILKDYIDGKIPHFELPPGVTGPEVDFEQIAGSESPTTSAANESVTDDLDEEDDDAVDPAESNMRDVLDDLESFDLGNGGSKTTAKKKEASHKHHKKPQRKKDRSWRVGNDGGDGTAVVRVYQKPAVNLSTVSLSGRV

SEQ ID NO: 60695 - protein, 116 aa, Zea Mays
MDIEGTDAGETDKALSSKTVKQKDSVESVIKQISGIAISESHATPSTNTTNNSQPESSAPDIDKKIRALKKKIRLAEAQVQGDPEKLRLEALEKMKKIDGWLKELKLLEDKRAPAA

SEQ ID NO: 60696 - protein, 770 aa, Zea Mays
MLRLRAFRPTSDKVVKIQLHPTHPWLVTADANDRVSVWDWEHRQVIYELKAGGVDERRLVGAKLEKLAEGDDSKGKPTEAIRGGSVKQVSFYDDDVRFWQHWRNCSAAAEAPTAVSQQSSTFIAPAPSTRGRHFVVICCENKVIFLDLVTMRGRDVPKQELDNRSLLCMEFLSRTSSSDAPLVAFGSSDGVIRVLSMLTWKLVRRYTGGHKGAIACLMTYMSAAGEVHLVSGGSDGLLILWSADHIHDSRELVPKISMKAHDGGVVAVELSRVMGSAPQLITIGADKTLAIWDTVTFKEIRRIKPVPKLACHSVASWCHPRAPNLDILTCVKDSHIWAIEHPTYSALTRPLCELSSLVPPQVLALHKKLRVYCMVAHPLQPHLVATGTNIGIILSEFDPRALPAIAPLPTPTGNKEHSAVYIVERELKLLNFQLSNTANPSLGNAGVASDAGRSMNNSIEQLIVKQTKKHISTPAPHDSYSVLSVSSSGKYVAIVWPDIPSFAVYKANDWSVVDSGTGKLFAWDTCRDRYALVESALAPRMPLVVKGGSSKKAKEAAAAAAQAAAAAASAASAATVQVRILLDDGTAHVLQRSIDGRNEPVVRLASFQYAPSIPPFIVPKQSKFDGDDSVFQKELDDRRYAEVAVAGGGVSVAVTRFPPEQKRPIGPLVVVGVRDGVLWLVDRYMCAHALSLSHPGIRCRCLAAYGDPVSAVKWATRLGREHHDDLAQFMLGMGYATEALHLPGISKRLEFDLAMQSNDLKRALACLLTM

SEQ ID NO: 60697 - protein, 69 aa, Zea Mays
MAELHRHILGLISIKHADLWESTVCGRLGEASKNSSPHSQCEFGRGLSFVGWEFRHRALTCAGTSGENF

SEQ ID NO: 60698 - protein, 1066 aa, Zea Mays
MHSTVFVSGLAFATYFCWRLALVSFPLVLLLIIPGLIYGKYLLYLSRRSRHEYAKANSLVDQALGSIKTVYSFTAEKRIIQRYTAILDKTIKLGIKQGIAKGLAVGFTGLSFAIWAFLAWYGGRLVVFHHVTGGRIYAAGISFVLGGLSLGMALPELKHFAEASVAATRILDRINRVPQIDAEDPKGLVLDQIRGELEFESVRFEYPSRPNMPVLKNFSLQIPAGQTIALVGSSGSGKSTAIALVQRFYDASEGTVKVDGFDIKELQLKWIRSKMGLVSQDHALFGTSIKENILFGKPDATMDEVYAAAMTANAHNFIRGLPEEYETKIGERGALLSGGQKQRIAIARAVIKNTAILLLDEATSALDSESEKLVQHALDQASMGRTTLVVAHKLSTVKNADQIAVVDGGTIAEIGTHDELISKGGPYSRLVKLQKMVSYIDQENDQFRASSVARTSTSRHSMSRASPMPLTPAALKENDSDVHPPAPSFSRLLAMNAPEWRQAVVGSLSALVYGSLQPIYAITIGGMIAAFFVQDQNEMNAIIRRYALIFCSLSLVSIVVNLLQHYNFAYMGEHLVRRIRVQVLEKILTFEAAWFDEETNSSGALCSRLSNEASLVKTLVADRISLLLQTASGIIIAVTMGLMVAWKLALVMIAVQPSTMMCYYAKKMVLSNVSRDLAKAQHQSTQIAIEAVYNHRMVTSFGCSSKVLQLFEHAQEEPLKKARKKSWVAGITTGLSPCLSFLSWALDFWYGGKLAQSGEISAGDVFKTFFVLVSTGKLIADAGSMTSDLAKGSNAVASVFEVLDRKSISPKNSQVEKEDQKKKIEGRIEFKKVDFAYPTRPECLILQDFSLDVKAGTSVGLVGRSGCGKSTIIGLIQRFYDVDRGAVRIDGMDVREMNILWFRGFTALVSQEPAMFSGSVRDNIAFGKPEADEDEIVEAAKAANAHEFISTLKDGYDTDCGEHGIQLSGGQKQRIAIARAIIRNPTILLLDEATSALDAQSEQVVQEALDRIMSGRTTIVVAHRLNTIKNVDSIAFLGEGKVVERGSYPQLMNKKGAFYNLATLQK

SEQ ID NO: 60699 - protein, 64 aa, Zea Mays
MHPTTSSDSPSPRLPAPLPPASARPRWQSCCGGAYAGPNNPSVRIEAHPPLLLLLCSVLGYHSN

SEQ ID NO: 60700 - protein, 897 aa, Zea Mays
MEAVKASEARRDPPLLRAVELSRVVAEEGAGAELAGILVSNLCFAHNSPSLWKLLGQAVASRLLCPLHVLALLTPRVLPQRRAQPEAYRLYLELLKCHATSSLLAMEAGPNRDNILEDCGFPSVMAEGQESVYAIEGPQPMDLDIKRGSTENQNEHREQLRRKNTFMALDVLHMMAADRKIQSFLSLIFLNMPEKFSSLRQRLSSIEAHKVTLETLLPSGHKINDLLINIWRVCKAGYQPNNKHILGVLGNMGSGGSLLGQLTGAGRPACWIIFDIYVENAIDGKHLSVTSAIGIIKEMTKTMQVLNEASWQETFKALWISTLRLVQRAREPLEGPIPHLDARLCMLLALIPLSIAAILQEESDMFGVEGNKILPQRQGLISSLQDLIQYSGLLVPPSSVVNAANAAASKAAIFKANYKAGAGNTSMMDQTDSSMKAAGNMLHLIIEACISRKLIDTSAYLWHGYVVPSRTLKDTALPQESPWLNFMKGSQLSEPLIDALVATPASSVAELDKLYSVATNGSEEEKTAAAKILCGASLVRGWNIQEHVVSMVVKLLSASLPSDSSTSTPGSMSHYLAHMSTLNEILLGVSYGDVIHILSLYGMVPDVAVALMPLCEAFGSIAPPPNHKSTILGETSVYLVFSCAFLCLLRLWKFYRPPQEYCLTGRGGSVKLELTLDYLLLMHNNRIFSNSSAPNRDSYNSMGSVNEVSAQPIYIDSFPKLSAWYFQNQACIASTLSGLCNKNPVHQVANKILNMICRKMNKGGVSSSNLSSTSSSSVSGSSVSASDDSYQRPAVPAWEFLEAVPFVLEAVLTACAHGRLSSRDLTTSLRDLVDFLPASLAAIVSYFSAEITRGIWKPVPMNGTEWPSPGASLHSIEAEVKEILASAGVQINSCYPP

SEQ ID NO: 60701 - protein, 249 aa, Zea Mays
MTTRIAPGVGANLLGQHSAERNQDATTYVGNLDPQIMRDPETGNSRGFGFVSYESFESSDQAIEAMNNQHLCNRPITVSYAYKKDTKGERHGTPAERLLAANNPGSQKNRPHTMFASGPPTQGHPNGGPPVPRPYGNGTIPGQIQHIRQPPPPPVGQFPPPMQMHGQPTWPAQHSMPPPMPSQLQYRLPMRPPPPNMMPPPVGMVRPPPPPTGMSAPPMWMPPPPPPHQGGGMPPPPMSMPPPPPPPSS

SEQ ID NO: 60702 - protein, 548 aa, Zea Mays
METRTSLDNNVDRDDLQRKIVRPPANLLVFEGDVLDSEASELDSYLLSTCDFYGDFLLLDPCDAPSVFDFLQGKHSGKENSVARQGSPAPSKSQANVFTSPNARSAGTGCKAASGKVLGGLDSTQKNPDQPSTQETSPDDKHWSDPVEPNFTDDVEKPHPDDIGDPVGDYSDDEDPWKPLNPHEPGSLKIRPYRRVKGSLRGVIGTLRKKTLTSIFPVAKMVGVIIPEHAKSFEAQQSQQEEHYGSQSPPRFEKYLASFEFGEENSNVFGDLKDDNGSDIGINFDYNDPDMPNDIDVDPDVPTYPDEIIAATPKGTHGTQDDRDTRESLDDLCRSHLNALLASIAEVEKQSEMDARVSTWKERIEIALEEQDKNPPFDIGSYGEQILDALSSRTDSTGTASFSEIVCGRPKYEVARTFSALLQLVNSRSVYLDKGQATNELVCYTAENPFHVRLISPNRRPEMEAHFARKRVKSPLRNAGKGGESSLARHECPKKPLHKNGKIQVKTAIRLTPDGKRRRRSVTHLMQPINLESADECQWQTDSWASRA

SEQ ID NO: 60703 - protein, 70 aa, Zea Mays
MHYHLISPIPISVFSAMFLDGSGSFLACFALFAGAIGDEVVYCAEVTGDYRTTKITIFRLRDCYIARLWF

SEQ ID NO: 60704 - protein, 101 aa, Zea Mays
MLSGLASSLCQWASQVKKHTSYMMTIEMSFIGSVCLLASTYRSPDGEAIRKYGVFHEWTFWTMVPVLMNAVGGILVGLVTTYAGFCYSLSSPCNCTATIRV

SEQ ID NO: 60705 - protein, 208 aa, Zea Mays
MSVAGESGGDPAAARRRWDLSNKGPDSTPMLKEAVEMSTDEESDGVVICHPNGNTDGCDEAISGSHDDDSPEGQETSSIKDPDVEGDTQEDKCVNQDSLKLIDQETSAPPKSPAKSATASSGPEKPKRVVTQPLSLSTQRRSSGVNGGVTNPSPNKDKSGDKSSISPASMTKKCTPLAPRKTLQPEQAFHPLEEDSCSVTSSYPFSVC

SEQ ID NO: 60706 - protein, 360 aa, Zea Mays
MHLLYDMDAQVILPNDKKQKLTRLLITMQRRIGTAKTDMEDLIARLNQEGAVKEYLTTKVKDLEVELEATKQKGRETLQQAILAERERITQMQWDMDELRRKYSEMESNLKTEHNEKTRAESERTTASGENETLLEELEIKQKEVESLKQQLVEAEAKSKADKKVLVKEVKSLRNSQTEMKKVLNQYLEEKTDLERVINRDKQRSARTKLSRVKILHECRLLRERLQDCSAKFLAEEQDNFTIDPSSLPDALDLLATSDNRIRLLVAEAQLLARDDEQGSSDGGDDSDSRSSLTMSSEDAKVTDEDTTKMLSDLLIDNAQLRLRLNAVIRNAVNTSVKPEKEGSGEVLPKKTVLNWLLDR

SEQ ID NO: 60707 - protein, 717 aa, Zea Mays
MSTSRQIDDGPAVLQLCRWTLLQPHLKLSKFREAFISPTRRLFGLLSDHGDLVLATAEINSSQVESHRALSDTCTQAVFKTFSTIPRVKSLAWGYCSDAFDDSSFNEILVVSSDASITVHAFCHSRKSTLTVNSMSDAKELHGEWKEWRPTECSVLEDGESGPENWFCSFLTTVTASVSNGKYQARLPMKSLLPNSAEVVSFSIYDITLSFLKYWYSKCSLKTMAETDSESPRRFLRASCSCQWECLKVLSSSSCYLIGLVLTPNESVRCEAHPSNAECILVTVLELNHWGIQWNFVADLQDVSDGITPSPKWVDFQLSDVFLACLNTAGFVAIWNVKTGGLVTSFSVLQQCRTDLEMPLRSSMSIVTNLDEGNIHVENFVGRMFKRLVLASYSYLLAVVDEVGVVYVFYADDILNFKANVHENFDLPVMNQFADCFSIWEAAGHEIGSLSFCANQSIQQGSLSLTKLVPEFSGKSDDIVRPRERRKYRCDENEVDSWPSGFVTAGQMKVGAGYRRTNSSCFFRRIILPPCRSQQDVISLCPLGLTRIFKGSIADGNEHVKIFHSELLMYSSFLGKGDIDIGFMDEMLPFKKDSTFVGDSVVCSCQGYLYLITQYGLSVVLPPVSISSFSSQCDAIKFWQMGPAAGSTCNALNLLSVDKSDTSWKTWQIEVLDRALLYEGPALADRLCWENGWDLKFSRLRWLQLALHYSMIGDLEQ

SEQ ID NO: 60708 - protein, 643 aa, Zea Mays
MTTRNSGVVTKVEEVYRLKPLSTENSEKLFYKRIESQEGESLDGELSSKIIHKCGGIPLAIIAIASLLVERSREEWPEVYDKIGLGNEDNTTKIMLYSYYDLPPYLKPCLLQLSIFPEDCFIDTKAVIWMWIGEGLVHLEKEEGSLFEVGERYFKELVNRSMIQPIEEKYHWFVERFCIHDIMFDLICKLSKDEDFITLSGQHSSQSLQSLFNLRSDCKLRRLAVRNQRVQRFPEETMDMPEVLRSLSIIDCNIEVMAPIDSFRVCRVLHIENNYVPISLKHLGKLLHLKFLEIFDTTIDELPREIGHLRSLQTLVLVSTGLDELPVAVCSLTRLMCLIAYGFERLPADRIGNLTSLEELQLHRVVGRSATQDLVAELGKLTRLRVVRITFSEQLEESSQEALVQSLSNLRLLQELVLFSEMPERGSDMWGDWELPRQLRRLIIEGIVFSRQPRWINRSCLPRLYSLYLMVHAVEAQDLDNLARLPELQYLMLFGFSWPPRYTVGPDDFRNLRFCEVGTTFEFRKGAMPRLEVLRFGVCVPFEQFPTKDVIEDLDFDLDNVILLQQVRVKVNCAGATVTQVEEVEAVVMRAVENHANRPTIKMDRVYEQNILSDEEREALPAAEVSTSSESHYFHRLFGCQHV

SEQ ID NO: 60709 - protein, 1499 aa, Zea Mays
MDAARRERRHHRKAAAAGAVGVGGVGGGGAAAARAAYGDVFGGPPRFAAPFGAAPLDYAEVFGGVAATCSIPYLDLPPAPSLAAAEGFFACRGKGDYGEIFGRFDFADFALPYEDLFGEPQPEPVPDAAGETDPEIASSSGSSTRSSFRKESSQLEDEPSILPQHYQNLDHHQHFKDHKFSPISFSTDTESPQFVMSYNKTAERRPDDLIEMMTCTVKPSVDFVIDSRNSLHGPATNHVSRIDYGTMANDDSNKKPSPANTSVQSAESDFAVDQKQQSQSWTPISGSISANENHKNSDSHSTRSTVTPPDYAFLQVSDSDTQTQSIKVQQPLKQQPKLLNKKESAAKEDVRIVDDNCSPTSAHITSSSNMSHTDKKVDANPTSASAAMKEAMNFAEARLKAAKALLEGKGDSFKLRKKPSHLKSTRSTEIKSPISVEADTSEQKLWVKKSSEEEKNPDDSLSDKHKKLTAVRLDHFDDNGKKVLPLEKPEHMVQHCTESCQTSSKLQKLGNWKSGNDFFELTRDDQKCKNDEATEGGDKCEQMNPITSVINDHNEIEFNAAGSDLDRYEKLWEVNDGRSVGVKPVNLRENKTAPVDKDSVSVILESSTENKAHQKTHNSIGEGLVTLKNAKESHGTDKCFELPSMSGASTKLDVFKDVSGSFPEARSSVNASDLGDHGNISPNLSPLAGTSQEDTTSKLVSEVSCDGGMQHTSRSNEKLQESSDVSDVAISQGSNIKSFILEELKESDVCDAFMRGPNGKGQEAENYGREKFSFIDGSLLLRPHFHNKGAKMNVISEEVQKVKNEEKLGPCTHPEVTIVDLDGDCPKDLNDVILQNDDFADPEESNMPNVFEVASKLIKRDLDQEMHGSLGHGEEENMEEGTDVHLCDINGKEVDETLLENSVCTDTEEGCAHCNQEDQNSSDSTNRGKSDVDNMCYTSCDEVLSSEMYTRMQHSMQKDGTAAFQTSGGVPGLEEIGDVSNRGGRELSTERSTCEDHGNAIIMEEKDTTTRISKAEHASSPLETMCGVTKSAEAPTTVPTVTRKKEVHGVQRTKERENMTTADSACEKDKGSSQRVQEENESERRLEKEREVEEKERRKLEKERELAEEKERRKFEKERELAEEKERRKMEKEKEHAEEKERSKLEKEKELAEEKERHKLKKERELAEEKERRRLEEAERERERKKDRLAVERATREAHERAFAEAREKAEKMALERINAARQRASAEAREKEDRASVEPAAERATREARIKAERAAVERATAEARERAIEKAKAEKALAEARERRERYKSSFKESFKSTNQDIRQESQFHRATSSNFIRNPDSSNRAMVEVESALRHKARLERHQRTAERVTKALAEKNTRDLLAQREQAEKHVRHLHTKNILSVPAFIHSIGVYVFQRLSEFLDPEIKRWSNGKEGNLRALLSTLQYILGADSGWQPVPLTDLITAVAVKKAYRKATLCVHPDKLQQRGATIRQKYICEKVFDLLKDAWNKFTSEER

SEQ ID NO: 60710 - protein, 1283 aa, Zea Mays
MSTVDKMLIKGIRSFDPDNKNVITFFKPLTLIVGPNGAGKTTIIECLKLSCTGELPPNSRSGHTFVHDPKVAGETETKGQIKLRFKTAAGKDVVCIRSFQLTQKASKMEFKAIESVLQTINPHTGEKVCLSYRCADMDREIPALMGVSKAVLENVIFVHQDESNWPLQDPSTLKKKFDDIFSATRYTKALEVIKKLHKDQMQEIKTFRLKLENLQTVKDQAHKLRENIAQDQEKSDASKSQMEQLKEKICGTEREILQMETSLDELRRLQGQIDIKATERSTLLTQQHEKLAALSEENEDTDEELMEWQTKFEERIALLETKISKLAHLTMKHERDSDIKNICTKHNLGPVPEHPFTNDVAMNLTNRIKARLSSLENDLLDKKKSNEDQLDVLWKHYLKINARYSEVDGQIQSKIESMSGILRRRKDKEKERDAAEVELSKFNLSRIDERERHMQIEVERKTLALGERDYDSIISQKRTEVYSLEQKIKVLLREKDIINRNADERVKLGLKKDALESSKDKLNEIVNEHKDKIKKVLRGRNPFEKDMKKEINQAFWPVDKEYNELRSKSQEAEQELKFTHSKVTDAREQLTKLRRDMDAKRRFLDSKLQSILQISANVDMFPKVLQDAMNKRDEQKRLENFANGMREMLAPFEHLARKNHVCPCCERAFTPDEEDEFVKKQRMQNSSTAERSKALAMESSNAEALFQQLDKLRTIYDAYVKLVEETIPLAEKNLNQHLADESQKAQAFDDLLGVLAHVQMDRDAVEALLQPTDTIDRHVHEIQQLVKEVEDLEYALDSSGRGVKSLEEIQLELNFLQRTRDTLIVEVDDLRDQHRMLNEDMSSAQVRWHNAREEKVKASSILERFQKSEEELVLLAEEKEQLIVEKKLLEESLDPLSKEKESLLQEYNALKQKLDEEYHQLAERKREFQQELDALGRLSMKIKGYLDSKKNEKLKELQGRHVLCHSQLQSCMAKQQRISAELNKSKELLQGQGQLKRNIDDNLKYRKTKADVEQLTRDIESLEERLLSIGSLSAIEADLKRHSQEKERLNSEFNRWQGTLSVYQSNISKHKQELKLSQYKDIEKRYTNQFLQLKTTEMANKDLDRYYTALDKALMRFHSMKMEEINKIIKELWQQTYRGQDIDYISINSDSEGAGTRSYSYRVVMQTGDAELEMRGRCSAGQKVLASLIIRLALAETFCLNCGILALDEPTTNLDGPNAESLAAALLRIMEARKGQENFQLIVITHDERFAHLIGQRQLAEKYYRVSKDENQHSIIESQEIFD

SEQ ID NO: 60711 - protein, 114 aa, Zea Mays
MLSLAHLEKRDKKLCDDLCYDYQFSLCVYLYSGNLLIYLKVAAMDDGLSAKERICFLNSMMDLGSDVQVRAAGGLLAILDNERLLDTIEQMEGGASIAIDSVVQISFYPLMEIN

SEQ ID NO: 60712 - protein, 856 aa, Zea Mays
MEIEIHDNLVEGRDYILLPQQVWEKLHGWYGGGPTLPRKAINTGFSQTDLAIEVYPLRLQLILMSRGERTFIRISKKGTVGQLHKMACKVFDLAPDEVCIWDYYGRTKHSLMDSLDKTLDDANIQMDQNILVEVTTDASGSLDGLVKRNNFFESDAPKSGLPDENFAANNYASRSYSSSLTPSIYLRSPNGDLDNVHGSSGMITRGSPLGLTGLLNLGNTCYMNSAIQCLVHTPQFTKYFCEDYHREINRQNPLGNVGELALAFGELLRKLWAPGGRAPVSPRPFKMKLSRFASQFSGYNQHDSQELLAFLLDGLHEDLNRVKHRPYINSGDADGRSDEEVADEYWANHIARNNSIIVDVCQGQYKSTLVCPVCGKVSVTFDPFMYLSLPLQFASTRSVTAVVFSCDGSVPPTPFTVNVPKQGRCRDLLQALGAACSLKNGEKLLIAEIRNHKIYRFIDDPVLQLSTISDDDHLAVYKLPKLEKRVNYIQFVHRHEDLDHGNNNSLTSWKPYGVPLLAQISRNEIVTGFDIHELVHKMLVPVLRNPDSLHLAVQSSVSTRTHSYHTDSSKCQLLLVDDSNTVIEKSNDAIRIPQSSLATVFFINWPKADLKKIDTHHLEYLPEVFMYAPPAKRTRGEALSLYACLDAFLREEPLVPEDMWYCPRCKEQRQASKKLDLWRLPEVLVIHLKRFSFSRSTKQKLETFVNFPIHDLDLTNYIANKKTSERQIYELYAVSNHYGNMASGHYTAHIKLVDENRWYNFDDSHVASIDEDEVKTAAAYVLFYRRVREQDIARGTSNGSQLYAKRSHGYSHSHCQEYMACWKKCSSRAVNAPLSSCHRRYFVQCWYKMGILYEVS

SEQ ID NO: 60713 - protein, 376 aa, Zea Mays
MKERFISSGGAIFEEKSLSSIYVYDDLAVLKLSDGDSLSCRLVVDAMGNFSPIVRQIRSGRKPDGMCLVVGACAHGFEKNTTSDIIFSSSSVKRAGNSGVQLFWEAFPAGSGPNDRTTYMFTYVDPTFGGPKLEELLEVFWDLMPAYQDVLLQNLDIRRVIFGIFPTYRDSPLPAAFDRILQVGDASGIQSPVSFGGFGSLTRHLGRLSSGICEAVEGDFLDAHSLQLLNPYMPNLSASWLFQRAMSVRPHVNVSPTFINELLFANFQSMQKLGDSVLRPFLQDVIQFGPLVKTLGLVMITRPQILPSIFKQVGLGVILEWSGHFMMLGYYTFLSTYIDPILRSWVESLPPRDKYQWKRYLEAWRYGAGLDYRQGE

SEQ ID NO: 60714 - protein, 774 aa, Zea Mays
MRKEQHKAVLGKKSGPDILKENPSDDIFSKLQTSTAKANAKTKNEKLDGSVVSSYQEDTTKPSSVLLAPAARPLVPPGFANAFADKKLQSQSSNITHEPKLEDDQSATGFTSESKEKGVSGNDATMGPKHTLPPGSVTSSAELASSVLKGSEDWDADVMDKYSIGKEGKSKNIDPVRKDDSVAILEQFFGNVLSKSGSNLPTYVEPLKTDDDMITSVPESSKFAHWFLDEDLKPAEDLSSKSLLSMIVKNENPGLENLNHTPLSDAAAQNLSPRAPIDKLDSASELISFTSSTPANGVLEQCIHSDVPEAVPIMTCEDLEQTMLAQVSNSSSTQINATKEQLTVMDEPVAMQKVTVDNHASQHLLSLLQKGTDNKGAPSLGFQRESTDEPLSVDTNLMANGGISGSDPVNSVENVPTSGKDLTLEALFGAAFMNELHSKDAPVSIRGATTGGPTEFAEMGKTLLSSSHEGYYPVEQTVHFNNTKDAAVRREPGIEHSAVPGLSQGSASFDKKGMEIHLPEEDNLFTMSDSLLGQNSDILASVGSSRVEGLLPEKALDNLSYRFQSLVPGDAEHIQVYGPDALGSHPRDSQNMYHLLQGRPPMIAPHPMMDHIVNRKQPAPFDMAQSIHHDSHRSFPSNVNHMQHNLHGPGVPHLDPAGHIMRQHMSMPGRFPPEGLPRGVPPSQPVHHMAGYRPEMGNVNNFHMHPRQPNYGEFGLMMPGPEVRGNHPEAFERLIQMEMSARSKQQQVHHPAMAAGRVPSGMYGHELDAKLRYR

SEQ ID NO: 60715 - protein, 1303 aa, Zea Mays
MASRQHNAQFHKSKTLDNKYMLGDEIGKGAYGRVYKGLDLENGDFVAIKQVSLENIPQEDLNIIMQEIDLLKNLNHKNIVKYLGSLKTKSHLHIILEYVENGSLANIIKPNKFGPFPESLVAVYIAQVLEGLVYLHEQGVIHRDIKGANILTTKEVIEMSGVCAASDIWSVGCTVIELLTCVPPYYDLQPMPALFRIVQDVHPPIPEGLSPEITDFLRQCFQKDAMQRPDAKTLLMHPWLQNSRRALPASLRQPTPLRNIDGDDESSRGDNNSGFCDTPGDTRATIASNVDQVNGRNGPNMDSAAQSKSEELHDGNLELTEGISSNNVALVKDNVVLNKDPTLVLHEKLPVESSFGDADLNGKVMAHELLQGGLPSKIELENKESSTVEDGDVFSFQAGRQNIDFQMVVEPSVVEGPKQLSRFSDKPEDASLEDLFPPIDKRGDNGAEPSTSTTVQELQYNGVHNGFVKGLNARVEKQKENDSESMNGGKLIEFAMQLENIDASGFGEHIPGESLFPLQSVEYSKIVAQLKPGESEDVILLACQKLLSIFSHRPEQKQIYMAQNGFLPLMELLEIPKNRILCSVLQLINNIVKDSTGFLENACLVGLIPVVMNFAEPNRPKDVRVQASLFLQQLCQASTLTLQMFIACQGIPVLVSFMEPDYAKYRDMVHLAIDGIWQVFKLQHSTPRNDFCRIAAKNGMLPRLVNTLYSLNEATRFASVSGSGASVTQNGSTPRRRSGQLDPSVLESCKARLDHHHSSGSLQSLQADADKHHILMDSSSSPRFSDKTSSNLERNENDLVIRPQRLSVSAGRTSTDRSPKHIELVSNGHNNSQNDQVRPLLSLLEKEPPSRHVSGQLDYVRHISGLERHETILPLLHTSTERKTNGELDLMMDFAEVSRHGRENGHLDSSIKASNRVHSMKYAPSASASNEGASTSGAASQTASGVLSGSGVLNLRPGSTTSSGPLAQMFSSMSADVAREYLEKVADLLLEFAQADTVVKSLMASQSLLTRVFQMFNKIEPPILLKILRCINHLSGDPNCLETLQRTDAIKHLIPILELRDGPLVYQIHSEVLNALFNLCKINKRRQEQAAENGIIPHLMKFVMSDSPLRQYALPLLCDMAHASRNSREQLRVHGGLDVYLNLLEDDAWACTALDSIAVCLAHDNDHRKVEQALLKKEAIQKLVKFFQDCPEQYFGHILDAFLKIITKSSRLNTAMATNGLTTLLIARLDHREAIARLTLLKLIKVVYEHHPRPKQLIVENDLPQKLQNLIEERRDGQRGGQQVLVKQMATSLLKALHINTVL

SEQ ID NO: 60716 - protein, 373 aa, Zea Mays
MQGQRNSMEHFADVFGFDVASSSGNPVMDQQSYWNNVLGSVESHNLQGYQMAHSDAAMPYGNEPQQDGTFLGFWESGEASSSASALNYGSSNNVKTEHLNIGGGGGLRIGESRLVADNGISLDVDINLNANVNDLCGQSSNVNCASQGPEQYCGSDRNAINSQPTDLGLHPFRTFLLDAQQAESFTLNPSENPLGDFSSMQESIEQRPGGSLDGRRLACKRKNIEGANGQSSAGASTSFPHRNDNAFHNIASSSYNPAPIRNSSSPKCLPVPSSIEDQLPRYGTNVGLSAGTYDLHGGVNNAVNSQRSFRARTTTSQQEVIPVVSSLNLQYQHPMNVPGVPQAANRFTDHGASSSRAGSLENRIIGSEEVPRS

SEQ ID NO: 60717 - protein, 638 aa, Zea Mays
MSSAPVAGAAFERYQQRGGGGPAAANGNTVFKSGPLFISSKGIGWKSWKKRWFILTRTSLVFFKSDPSTLPQRGGEVNVTLGGIDLNNSGSVVVREDKKLLTVLFPDGRDGRAFTLKAETSEDLFEWKTALEEALAQAPNAALVMGHNGIFRNDTADTYEGAIPNWREKRPIKSLVTGRPILLALEDIDGSPSFLEKALRFLEKHGIKVEGILRQSADVEEVDRRLQEYEQGRTEFSADEDAHVVGDCVKHVLRELPSSPVPASCCTALLEAFRLETKDARINAMRSAISETFPEPNRRLLQRILKMMHTVASHTSENRMTASAVAACMAPLLLRPLLAGECEMDEVFDMDGDDSAQLLAAANAANSAQGIVATLLEEYEGIFHDEHLRCSLSPESQIEDSGTEASTDDGNLEAKGNGFHDAENDVDQEMDDDNGVERILSGKLSESSGYAGSDLYDYKAVNAEESDAERPVKMLEGNLNLSKVQNSLSTENGSANVDSLLSENNPSNPTVGHETLSMGEILSSFDPGISVPTHSPEYSVERQTNKTNGSHPHVKRSNFWGRNNARKGQNSESVDSSGEEELAIQRLEIAKNDLQNRIAKEARGNAILQASLERRKQALHERRLALEQDPQGCPVYLG

SEQ ID NO: 60718 - protein, 236 aa, Zea Mays
MHKLGRGSRDKVQQFMAITGASEKAALQALKASDWHLEGAFDVFYSQPQIAVANTRHLEELYNRYKEPDADMIMVEGISQICNDLQVDPQDIVMLVISWHMKASTMCEFTRQEFIGGLQSIGVDSIEKLQAKLPSLRAELKDDQKFHEIYNFAFAWAREKGQKSLALETAIGMWQLLFAERSWPLIDYWCQFLQVRHNKAISRDTWAQLLEFVKVDDPLKPVSRSWNLPHHGTEHS

SEQ ID NO: 60719 - protein, 558 aa, Zea Mays
MMLSGSSGISSEPKRHLLTTGWSVFVSAKRLVAGDSVLFIWNEKNQLLLGIRHATRPQTVMPSSVLSSDSMHIGLLAAAAHAAATNSRFTIFYNPRASPTEFVIPLSKYIKAVFHTRISVGMRFRMLFETEESSVRRYMGTITEVSDADPVRWPSSYWRSVKVGWDESTAGERPPRVSLWEIEPLTTFPMYPSLFPLRVKHPWYSGLAALHDDSNALMWLRGVTGEGGFHSLNFQSPGIGSWGQQRLHPSLLSNDHDQYQAVVAAAAASQSGGYLKQQFLHLQQPMQSPQEQCNLNPLLQQQILQQASQQQMVSSDAQNIQSVLNPGAIQQQLHQLQQMQHTHNDQKQKIQPDQQYQVASSAVLPSPTSLPSHLREKFGFSDPNVNSSSFISSSSNENMLESNFLQVSSKSVDLSRFNQPVVSEQQQPQQQQAWKQKFMGSQSMSFGGSVSLNSPTSKDGSVDNKVGRDVQNQSLFSPQVDSSSLLYNMVPNLTSNVADNNISAFPSGSTYLQSPMYGCLDDSSGLLQNTGENDPTTRTFVKVSIIESTKNKFKPFLM

SEQ ID NO: 60720 - protein, 1101 aa, Zea Mays
MHRYSSNSAGFSGGRDGARLEASPFSSSSSGYPVSSRRQQQLVPYKLKCDKDPLNNKLGPPDFYPQTPNCPEETLTKEYAQAGYKETVEGIEEAREIVLSQIPYFCKPDAVIKCKEALKKRLRAINESRAQKRKAGQVYGVPLSGSLLIKPGVYPEQRPCNEDARRKWIEALAQPNKRLRSLSEHVPHGYRRKSLFEGLIRYNVPLLRATWFIKVTYLNQLQTRQTPNSISVAGSDNQRSNQWTKDVVEYLQHILDEFCSKEGAFVHPSFREQSSPGPTAGTNQIKMKTEASPAAGDIEEPLVHFKWRYMVRLIQWHLTEELLVPSVLIEWLSNQLQERDSVDVLELLLPIMLGLVDTITLSQTYVRMFVELLVRRLNDASVVDSPKGPSVSSVIAELLRYMVLAVPDTFISLDCFPLPSFVVPDVYGRGALLKITSSGGISSSKRCDAYRYLSCGYAVCSIQKRAYDLATVANPNLQARGAAKVVQALDIALVTGNLSVAYSSLFNDLSDTLMEERWIKEVSPSLQSSLMWIGTVELSLICSIFFLCEWATCDYRDCRASPSRNVKFTGRRDLSQIHMAVSILKNKMDEMNNLSRSKSSTRVTLNNITKGSSLTDACLTAAAVDDTSGLQSNAKNVDEKKDTNDIFESPGPLHDIIVCWLDQHEVSSVAGFTRVDVLIVELIRNGIFFPQAYVRQLIISGITDKNDTMLDVERKRRHHRTLKQLPGSSLFDILEETRTVEEQQLYEMMSTYSSERRLVLSELSCDHSFYASGRGEYTASSCIRKQSDLPLASGGDKHGRVPEQVEDVKALLSSLLGFTYPSPVESEPRQIKTSFQESATSTLSQVETGEAKSGCEVCMRSKGQKLDDTATPFQGFSLIQSDEEDIWWVRKGTKLQESFNIEPVQKSVKQTSRGRAKVVRKTQSLAQLAAARIEGSQGTSTSHVCESKMSCPHHKPNIDGDNVKDFDHTRVANLTEIGKSLKRLRLLERRSVSSWLLKTVRQLIEGNETTAAKATNSISILSLQSDDKTTSKWRLGDEELLSVLYLLDTCCDLVSCARFLVWLLAKIRGGMGSSGQPGRSSMHTRNRDHQVCQVREHTSCG

SEQ ID NO: 60721 - protein, 442 aa, Zea Mays
MATEEELPEAAAAPAPAGGGGGDDAEMPDAAVPSGSHSDSSDSDSDDEAATAAAELRIQALEKTLQEQPLDYETHVQYIQCLRKAGNIEKLRVAREEMNKYFPLTPKMWQEWAKDEISLSSSEESFGDIEKIYGHGVQEYLSIKLWRDYLDYVEEHDHSVSQCTPSGLSKMRNLFESAITAGGLHVTEGSKLWAAYREYEMAILITIADANDEEREKQVQRIRMLFHRQLSVPLADMESTLAEYKSWEAEQGNANDPGADFDGVPSNVVSAYKKANDMYNERKQYEDQLSNAGTFEGDKLQQFMKYIKFEEASGDPARVQVLYERAVSELPVSSDIWMGYTSYLDRTLKVPSVVRSVYYRATRNCTWVGELWVHYLLSLERIRASEEELQHVFERAIQCTFSTIQEYFNIYLTRVHGLRRRISDGLDFQLIRQTLTNFSHLN

SEQ ID NO: 60722 - protein, 1167 aa, Zea Mays
MMTQTLQGKVMAYTPSSFPVQQQILPEDLEMLQLDNMDQGTSPVRAVIIKRIETCLRNREEFCNLCPDSLLKASEIIDNLLYKIDPQPQYMDLDTIEARVNDLLRSFLYGNQRDPWISSAVPSTKDLRQLPGIQMTDSSVYHNRVVPGFTNLPARPGGIPSHAVFTAQRYVPLNHNMTAASFALVERPESFMSTVVAPSVSGLPNCISGPGGIDSSGLQNGYSKDHFPGDAYHVDSPQLSMSGSPSPLSALCDPITSSGAMIRSSMDFIPKASGQKLFTGKGQMFQQYREYEKELDGAWSHPTEKPVHSNRTTQSDEIYLKGECGPDTLTEMKENYGRISDSRDPCDPEREIVERSEQTSNITVSKATSPISDESSGRRPAKRLKADAPRLVNVNQVESPQEQKPVVNENHVSGGETVQSEITELPAKPPCSSLGDINAESNNMLEQGSEDVPNMDIVKEEELSRAKGDIEMKDAKTVALDHTPKGVNLSSRRKRGASILYGLTAEELRDHMSSLINRHTCQSKVTSQEFPSIDGLPDQNTCSLCGMEKLLFEPPPRFCALCFKIINSAGCYYVEVENGTEKSSICSKCHHLSSLRAKYQKKFNYAETDAEAEWWVQCDKCKAWQHEICALFNRKCEGAKAEYTCAKCFLKEKDSGDIQALESSTVLGAQELQRTKLSDHIEQRLSERLEQDRQQRASASGKVAEEVPGVKGLTVRVVSSAERLLQVQPRFRGFFKQGKYPGEFPYKSKAILLFQKIEGVDVCLFAMYVQEYGSDCPPPNQRHVYLAYIDSVKYFRPEIKSATGEALRTFVYHEILIGYLDYCKKRGFVSCSIWACPSTKRDDYVLYCHPTVQKMPKSDKLRSWYQNLIKKAIKEGVVVERNTLSDFFLQPTNECKANISAACLPYCENDFWPGEAERLLEKKDDNASQKEETQVGRLLRVAKRDDRKGNLDDILLVHKLGERMRTMKEDFIMLCLQQFCKHCHHPILSGKSWVCTSCKNFHLCDKCHAEEQNTAQKDRHPATTKQKHAFERMEVQPLPETDDGDPTMESKYFDSRIDFLKHCQDNQFQFDTIRRAKHSTMMILYYLHNSTCSACHRAVDQCLVWRCLECLGCTFCGQCYKQNGQGLHIHELRQIDTRETSQKHTLQVSCGSHHHSSKQNFAQMIFI

SEQ ID NO: 60723 - protein, 66 aa, Zea Mays
MIMCVLCNLCCHCATSQVSTCCTPALGCLAYAGQLEYNSWALLSVFVVVMYRCASANVCCRCSRSM

SEQ ID NO: 60724 - protein, 86 aa, Zea Mays
MYQNICILTSWLLPGLINRVKWFCGHNWRHFNCSSWAVWSYGVFMAFALNLEISSLRMVSTTTTFKILNVLQLCCTSKFIFKIPSV

SEQ ID NO: 60725 - protein, 604 aa, Zea Mays
MMDLLIAQITTDLRSSDALRQSSALLQALQQCAAGRDVSALARTAATEILSAPSSAVCKRLALDLLRALPLPPDLLDPLLLSSLRSDLSFPDPDVAASSIASFPSLPSHLLPSLLSSAHAEIANALSSPAESLRLAAVTSLSSLLPRDDLTLMCSTNPSLMAHATTWWGRLAELALDSADAVSAGAFEALARLFQELEGRRMSRLAGDKLVDGEGALAVRAQWAADAIDFIWSRRNMLIARSMVMPVESFRVTVYPLVHAAKMVASGVVNTLRRVAKPGDTTIADSVESSAEKLVGVSDIVSHLLPFLSSLDPPLVFEVGINMLALADVPGGKPEWASAAIIAILTLWDRQEFSSMRETIVRAVVTNLHLLDLGMQVSLFKRLLQMVRNLRAESDRMHALACICRTALCVDLFAKESVRRGQKPVPGTDVISLFEDVRVKEDLNSVTSKNLFREELVASLVESCFQLSLPLPELKNSGTESRVIGALAYGTGYGALNWTEPALDVVEVCRPCVLWDCDGRTYAIDCYLKLLVRLCHIYDTRGGVKTIKAGASQDQILNETRLRNLQLQLIRDLREVHTPRISSRLIWAISEHFDLEGYKMCRLF

SEQ ID NO: 60726 - protein, 474 aa, Zea Mays
MLLLTLAVSVPALKPPPCDPGAGATCPRASALQLGVYFGGLYTIALGHGGTKPNISTIGADQFDEFHPAERLRKLSFFNWWMFTVFTGILFSTTVLVYLQDNVSWSWGYGVPTLALAASVAVFLAGTPLYRHKLPQGSPVTKMGRVVCAALRKCRVAVPGDLSELHELEPDHYASRKRFRVNPTSSMGFLNRAAVKVAGEEEVSGGWTLCTVTEVEETKQIARLVPLLATMFVPCAVMAQVGTLFVKQGVTLDRRVGRGSFRVPPASLGAVVTLTMLVCVAVYDRALVPAVRRRTENPRGITLLQRIGAGLVLQVATMAATAAVESRRLSFASRSHGATAGGELPLTIFVLLPQFVLMGAADAFLVVGQIEFFYDQAPESMKSLGTAMSLTAYGVGSMLSSAILAAVERVTARRGTPWVTDDLNASHLDWYYAFLAVLAAANLGAFVALSRGYSYRAEAIGVTARVHSEPVVAP

SEQ ID NO: 60727 - protein, 58 aa, Zea Mays
MGCQLSRYLYYITAWSPRQRLQQLGKSTVRIVPPHIQADNGNATRTSRAVRRSPPGNH

SEQ ID NO: 60728 - protein, 249 aa, Zea Mays
MHNAELDGRNISVNKAHPRIADDDYGYGGGGGGGYSSGARGGYRSGGDVVPAVSDECFKCGHSGHDVVPAVSDECFKCGRSGHWARECPYSDGSGRTGRYSPASRYGGGAGGRGDRVGGSDRFARYDDDRYDGGRSVDSRDTYYGAGRDRYARDRHLPATDHHSGDRYSGADRYTSSGFAIERSYERDGGRSTGTYYRDDPRGTGGYGRGGSRGGGGGPARFGGSYRDRPAPYDRPSRGGAARAYDDRY

SEQ ID NO: 60729 - protein, 825 aa, Zea Mays
MALAMTSSSTQPPSPHHRRRRRSQPTTATPNANSKPKPKPRAKALPLLSDVGVGRDPAAIKYYARVASNLAGAGRLRDFLLAAEGLRAAACNDPSFAARISARLLSRGVAAAVRERGLPFMLEFFRDAERVRVPVVEMLDADASNAVAGACRMLLEERRMVEFVEVVEALARYGFYVQDIVNPMDVLKIFVKQRDPDIAIRYARIFPSSQLLLCNTMEAFGKRKELKNALLIFGALKNQLGGINMFACRSIIDICGHCGSSVQARIIFEGLLADKITPNTYVFNSLMNVNAHSLSYNFSVYKHMQNLGVPPDLTSYNILLKTCCSVREFNLAQEIYEEMKKKERDGLLKLDVFTYSTMMKVFADAKMWKMASNIKEDMQANGVRLNLVTWSSLINAYANSGLVDRAIEILKEMIRDGCQPTAPCFNIILTACVKSCQYDRAFRLFYSWKESGIKISLSSEQKRVIDGGFTFCKEYPNNDSTILVVPFRPTVTTYNILMKACGTNAERAKSTMNEMRRNGLCPDLISWSILIDIYGSSQNRDGAVQALRRMQRVGMRLNVSAYTVAIKACVENKDLKLALHLFEEMKTHQLKPNLVTYKTLLAARINYGSLQEVQQCLAIYQEMRKAGFQANDYYLKELIVEWCEGVLSSRSDNQDFYNLDLQPETERKESFNLFLEKVVTVLQKDTDQNQIVDVRGLSKVEARIVVLSVLRKIKEQYLLGRVVQDDVVIITGHEKTSTTEAETTTSAVDVVQAIVTVLTDDLGLEVLIGPGSCPPVSSKPKAPTKSRSNLEQISKEFTRRPQGMIKIPINSLNHWLRKKAVRIAE

SEQ ID NO: 60730 - protein, 114 aa, Zea Mays
MLALRDSGLVPLLMAVRQGEVAPTCAEVNRHQGCLEHLPAHLPHFLSCKEATSSSLYAHSRRRPEPCGQRQLVLLMLHCCLDLQQPLLNLLERGLHLCEISPYVGPQISHRWSW

SEQ ID NO: 60731 - protein, 115 aa, Zea Mays
MGTREVYEEKLRSGAHLHRDPTINPGLGSPRCPRCLSLLNPTAGKRDWAITSVLHDATAVAGSGAGALLSAVHGFNTGIPFVQKHVKGPKWLQLLVGVPPLLIFSGASAVFGVSR

SEQ ID NO: 60732 - protein, 1050 aa, Zea Mays
MDNILPNSDFSEGLHLWQSNSCHAFVAVEGSGYHYGVRPHSGSTYAVLTHRTQSWQGLEQDITEKVTLGTEYFVAAYVRVHGEVHEPIGVQVTLKLEEDGSSTNYLSIARILASQERWEKVEGSFNLTTLPRRLVFYLEGPPPGVDLLIDSVTISYKKTASSVGGTENIILNYDFSKGLHPWNPIRCHAYVASQWSGFLDGIRGNSGENYAVVSKRTEHWQGLEQDITNQVSTGTVYVVSAFVRVDGIVQGQVEVKATLRLQNADGSTHYNPVGSVVASKEKWNKLEGSFSLTNMPKNVVFYLEGPPAGVDLVIDSVTVACSRHKQSKEVKVPSGVETIIKNPHFEDGLKNWSGRGCNICRHEFSAYGNVRPLNGSYFASATGRVHNWNGIQQEITGRVQRKVLYEISSAVRIFGSANDTEVRATLWVQEYGRERYVGLAKNQTSDQQWTHLKGKFLLHAPFTKAVIFIEGPPAGIDILVDGLVLSPARKLQAAPCPKIENVLYGTNLLHNNGFTRGLSGWSPMGSCRLSIQTEAPHMLPSILKDRASQKHISGHYILATNRTDVWMGPSQVITDKLRLHVTYRVSAWVRVGSGGHGRHHVNVCLAVDKNQWVNGGQVDADGDQWYEIKGAFKLEKQPSKVTAYVQGPPAGVDIRVMDFQIYAVDRKARFEYLKEKTDKVRKRDVVLKFQGSNAVNLLGSSLRIQQTENSFPFGSCIARHNIENEDLAEFFVKNFNWAVFENELKWYHTEAEQGRLNYKDSDELLEFCEKHKIQVRGHCLFWEVEDAVQPWVQSLQGHHLMAAIQNRLQSLLSRYKGRFRHHDVNNEMLHGSFYEDRLGRDIRAYMFREAHKLDPSAVLFVNDYNVEDGCDTKSTPEKLVEQVVDLQDRGAPVGGIGVQGHISHPVGEIICDSLDKLAILGLPIWITELDVTAENEHIRADDLEVFLREAFAHPAVGGIILWGFWEMFMFREHAHLVDADGTINEAGRRYLALKQEWLTRMNGSVDHQGEFKFRGYHGSYTVEVNTPSGKVARSFVVDKDSPVQVIALNV

SEQ ID NO: 60733 - protein, 1589 aa, Zea Mays
MLQVLLSHPDAILEDIEVIERINWEAVIVDDCQNSRVSKWLEQLRRLPTNFRMVLLSSSLKESIAEHISLLSFLNPEENGTLSVSNGVSFDTAGTLVVLKEKLARYVAFERKTDSSKLLEYWVPARLSPVQLEMYCYILLSNSPALRSHSKTDSVGALRNILISLRKCCDHPYLVDQSLQSTLTKDHPVTDILDIGVRSCGKLLLLDRMLQQIRIQGLRVLILSQSGGESGKPMGDILDDFVRQRFGYESYERVERGLLLQKKQTAMNMFNDKTKGRFIFLIDSRACGPSIKLSSVDAIIIYCSDWNPMNDLRALQRVSMESQSEPVPIFRLYSSFTVEEKALILAKHDHILDSNIVNITPSLSHCLLSWGASFLFNRLEELQQHSYSNVSGDELFMDNVDLEFLTKLLSKVELRTESGNTAISQAYLCGSFYSRAIVVAGEREGIPSVDGDLPKFWAYWLSLLNGRSPQWQYISEPVQRSRRKINNMEQQLKNTDKQLKITTEETDEARVKRRRIGEIMDSSAIDSPGKNKDTILPGNNTPPSSHQISVEDTWQELERSNLHATQKGLHVQLKPEISKLYKLLQLPEKVKSLCEEFLEYILKNHQISQEPKGILHAFNLALCWRAASLSKHKINHTESLALAVKNLNYECKEELVDFVYGKLKILKKKFARRAGEVSKQNYMVSVSDISTCEQVTSVRLRNDELVPSQVTLTDGNFENGSHHEATGDFWTEEMVSGEKELLPDPVTHEGEHLLRDELLSKIMDKRIKLVDKVFSLRGRSIYDKHSNQVSFLDMHRQKVVDKLRRACSLVVEHLRSSQNHIAQEDRDGKIKLIIEWFTMLLYAFLEHMKCQRNRLDMQQSASRIKESQLKEETLQAARCGQLDQNFDQHIPSPDFEFAMEEFRHFREVVGSCYVDPAALVPESLDDNSAMEIMLVQSATDAEVIEEVLNRPTEVLVQGPASEVVGPSVDVICNCSDGINSQRDASLAVHSLEPSSDDLRSTDHVEENTVGSQIQGGTSKHLGDAAMEVETGNRNTALADSPHFDKPALTAPSRQATLLVSRETEMLSNLVDQCAQQSLVSAQPLQDESEQADLSSAASTQPLQSERQQLISVSNNLLERAQLDQSQPNYQTDAAPGCAQSTELFPVTSMMFNHAPIDSEPLKNELHKLRLHMDTLNKVHEMKKTQLQTACSQELEKVKRKYDLLIKEHDSTHLQQKKALGDFYEKVQRNQSLAEDFRAKFISLSAAQGAAKGHTPPVRHTPQATQVVSSTSSIALSSACRPPVPRPRVQAPQVDQPLLSLSQFSRPSLQVVQPPNLELGNLFRATSTTLSHMPPQRGSYGVQSELAPRSPAPHLQFRSPRAHSMAPGNQQQSPAISVDAMSSRTQPVLAASTSPSDIHVGPLAASALSSLHSVLPSTSLPSSLHPSHLAQRVPPTPNPTLQAGAPKGSNATMPSIPTGMQLPDSGSLSLDAWLTANLGLNDASTAPAKDTASLGLSSDAPRAAPDTNTASLGLSSDVPRGTAPATNTASLGLSSDVPRGTTPATTTTSLGLISDSPRVIAPASSNSPGAIASATNGGSEIDVVCLSDDE

SEQ ID NO: 60734 - protein, 474 aa, Zea Mays
MDAAAKEALILDLHAVEAVKLGTFVLKSGITSPIYLDLRVLVSHPRLLASVASLLGALPATRPYDLLCGVPYTALPFAAALSVAASVPMLLSRYDTKRVEGAFRAAQTVLIVEDLVTSGASVLETVAPLRAEGLVVADAVVVIDREQGGRENLAASGVALHSLMTLTEMLAVLARHGKVGEEKIAEVRRFLQANRKVAVPGVPAGPPKPSATARRKSFAERAGLATNPMGRRLFEVMEAKQSNLCVAADVGTAKELLELADKVGPEICMLKTHVDILSDFTPDFGANLRTIAGKHNFLIFEDRKFADIGNTVTMQSEGGIFRILDWADIINAHIVPGPGIVDGLKLKGLPKGRGLLLLAEMSSAGNLAYGDYTAAAVKIAEQHPDFVIGFISVNPASWSPAPSSPAFIHATPGVQIAAGGDALGQQYNTPFSVINDRGSDIIIVGRGIIKASNPVETARQYRMEGWQAYQSGFS

SEQ ID NO: 60735 - protein, 377 aa, Zea Mays
MDTAEKMRWPFSDGSVTDLLDARSLHGSPDIKKKAQFHSSLVQKLALEKEMEGHVGCVNAIAWNSSGSLLVSGSDDTRINLWNYNNRELVHDIDTGHSANIFCTKFVPETCDEVVVSGAGDAEVRVFNMSRLSGRRPREISMEPTMVYQCHSKRVKKLAVELGNPNVVWSASEDGTLRQHDFRECSSCPRAGSANQECHNVLLDLRCGAKKSLADLPKHPLALKSCDISSVCPHQIIVGGSDAFARLYDRRMLPPLSSCQTKTKPPPCVKMFCPLHLANSKKTYLHLTHVAFSPNGKEVLLSYSGEHVYLFDVDPDNLSSVRYTADYVREQLFVPPFHKVPAKEHAKEKKTSVNTAPRNLSRICARNLCKLQQDLWR

SEQ ID NO: 60736 - protein, 943 aa, Zea Mays
MGNSTSRVVGCFAPPDKAGGIDLDFLEPLDEGLGHSFCYVRPGAVADSPAITPSNSERYTLDSSVMDSETRSGSFRQEPADDLAAAAAAGLQRPCRSFGETTFRTISGASVSANASSARTGTLTVSLIRDVQEPAAAFESTASFAAVPLQPVPRGSGPLNTFLSGPLERGFASGPLDKGSGFMSGPLDKGAFMSGPIDAGSRSNFSAPLSYGRRKPRLRLLVHRISRPMKTALSRTFSRSSQNPGWVQKFLSHPMSQLPWARDAKSRSEGSQDGLESGIPEPEYNVTRNLQWAHGKAGEDRVHVVLSEEQGWLFIGIYDGFSGPDVPDFLMSNLYKAIDRELEGLLWVYEDSSERSDHVSTHEEGGLVAASVDAPHDDSGQCQSDSGRQELGNFGKQNVSPGKGCDDSALQFQPNCTSSEEKDLAPHGSSSEMLGRDEIVEEMVEADLGNDLQSREPHSSNRDLSGTDLNTSCRCATETSSYCDQHAKFLKGNRKSKRLFELLQMELLQDYNTRLSKEPPEESKIPNLHVTQADTAEARSRNTAEVSRCSLAATGECFDDSEGLGSSRHADSVLGIGIKECTGCSISTSSSGHKQVTRRILIGSKLRKMYKKQKMLQKKFFPWNYDWHRDQPHVDESVIKSSEVTRRCKSGPVEHDAVLRAMSRALEITEEAYMKIVEKELDRYPELALMGSCVLVMLMKDQDVYVMNLGDSRAILAQDNDHFDQYDSSSFSKGDLQHRNRSRESLVRVELDRISEESPMHNPNSHLNSNAKAKELSICRLKMRAVQLSTDHSTSIEEEVLRIKVEHPDDPQAVFNGRVKGQLKVTRAFGAGFLKKPKFNEALLEMFRIDYVGTSPYISCNPAVLHHRLCANDRFLVLSSDGLYQYFSNDEVVSHVLWFMENVPEGDPAQYLVAELLCRAAKKNAIRYYISTFDGEVFLQHCS

SEQ ID NO: 60737 - protein, 677 aa, Zea Mays
MIYKDEGHLVEAAEAYQKARMADPSYKPASEFLAIVLTDLGTSLKLAGNTEEGIQKYCEALEVDNHYAPAYYNLGVVYSEMMQFDMALSCYEKAALERPLYAEAYCNMGVIYKNRGDLDAAIICYERCLTISPNFEIAKNNMAIALTDLGTKVKIEGDINRGVAYYKKALYYNWHYADAMYNLGVAYGEMLNFEMAIVFYELALHFNPRCAEACNNLGVIYKDRDNLDKAVECYQMALSIKPLFAQSLNNLGVVYTVQGKMDSAASMIEKAIHANPTYAEAYNNLGVLYRDAGSITLAIHAYERCLQIDPDSRNAGQNRLLAMNYIDEGSDDKLYEAHREWGKRFMKLYPQYTSWDNSKVADRPLIIGYLSPDYFTHSVSYFIEAPLTHHDSTVCKVVVYSGVVKADAKTLRFKDKVLKKGGLWRDIYGIDEKRVASLVREDKVDILVELTGHTANNKLGTMACRPAPIQVTWIGYPNTTGLPTIDYRISDSLTDPPMTKQKHVEELVRLPESFLCYTPSPEAGPVCPTPAISNGFVTFGSFNNLAKITPKVLQVWARILCSVPNSRLVVKCKPFCCENIRQKFLATLEELGLESLRVDLLPLIHLNHDHMQAYSLMDISLDTFPYAGTTTTCESLYMGVPCVTMAGAVHAHNVGVSLLSKVGLGRLVAKTEDEYGA

SEQ ID NO: 60738 - protein, 710 aa, Zea Mays
MSYQLALKFFQLAKDEGMMGQGYVWITAYGLTDIFNVVGYPALEVMEGVVGIEPYVPETVKLNKFRRRWREKYRSENPGTSINEPITSGLYAYDTVWAIALAAEQAGFVNSDFVLSETNNGSTDFDKISAYKAAEKFRGAFLKVNFTGISGQFVIQDMQFQLVSTTYKIINIAGREKRAVGVWTPGLNMSKILEKKDGISTIIWPGGSENTPRGWLLPANKELKVGVPVKPGFGSFIRSEDGIPKGFCIDVFEEVISNLTYKVPKHYVEFGNGEGESNGTYDELVYKVYLKEFDAVVGDITILANRSLYVDYTLPYTESGVRMLVPVRDQRQKTAWTFLEPLTADLWFGTGSFVVFTGFIVWFIEHRTNQEFRGPPASQIGSVFYFSFSTLVFAHRERIVNNLSRIAVVVWLFVVLILQQSYTASLSSILTVEQLQPTVTNLDEVIRRGDYVGYLNDSFMPNLLKRLKINETKMRAFSSPEEYNDALSTGKVAVIVDEIPYLKVFLAKYCHNYTMVGPTYKFDGFGYAFPRGSPLTPEISRGILELASNGRMDELEKKLYGDTSCPDKDDSQTSSSLTLHSFLGLFIITGASSLLALILHVIITLYDHRSNWINGSGQISWRELLAILVKIFHERDSANTPDEEVPGMEDIDPATAESPWSMSNHVIENVDSDTDTGSTPEGEGTPGREVANQGPGPLSFAYMHSEGAME

SEQ ID NO: 60739 - protein, 241 aa, Zea Mays
MSRRNSRTIYVGNLPGDIREREVEDLFYKYGRILDIDLKIPPRPPGYAFVEFEDPRDADDAIYGRDGYNFDGYRLRVELAHGGRGQSYSYDRSSSYSSACRGGVSRRSDFRVMVTGLPSSASWQDLKDHMRRAGDVCFSDVYREAGETIGIVDYTNYDDMKYAIRKLDDSQFRNAFSRAYIRVREYDARSRSRSRSHSYSRSPSYSRSRSPKSVSQSPSSVDERFAFVFPRFGHAAIWGLH

SEQ ID NO: 60740 - protein, 178 aa, Zea Mays
MLSRGICGGGGHGGKGGDGFYKGNLAEGGAIYGNADLPCELGSGSGNDSTELSTAGGGIIAMGSWEYSLPSLALYGSVESNGGSYTNGSVGGPGGGSGGTILLFVHTLSLAESSVLSSVGGFGNAGSGGGGGGRIHFHWSNIPTGDDGGVSKGLGYSGGNGTVTGKACPKGLYGTFCK

SEQ ID NO: 60741 - protein, 472 aa, Zea Mays
MLDGRVKTLHPSIHGGILARRDQEHHLKALKEHGIGTFDVVVVNLYPFYDKVTSGAISFEDGIENIDIGGPTLIRAAAKNHKDVLVVVDHKDYPALLEYLEGKQDDPDFRRTLAWKAFQHVASYDSAISEWLWKQSNKADSFPPSFTVPLTMKSTLRYGENPHQKAAFYGDRSLSLVNAGGIATAIQHHGKEMSYNNYLDADAAWNCVSEFESPTCVVVKHTNPCGVASRHDILEAYRLAVRADPVSAFGGIVAFNTTVDEDLAREIREFRRPTDGETRMFYEIVVAPGYTAEGLEVLKGKSKTLRILEAKRRRSGKGTLLSLRQVGGGWLAQEPDDVTPEDVAFTNVSERAPDARELSDAKFACLCVKHVKSNAIVIAKNSCMLGMGSGQPNRLESLRIAFRKAGEEAKGAALASDAFFPFAWNDAVEEACQRGVAVIAEPGGSIRDQDAVECCNKYGVALVFTGVRHFRH

SEQ ID NO: 60742 - protein, 307 aa, Zea Mays
MGHIWDHAFYSELKVDPSECKILLTDPPLNPVKNREKMIETMFEKYNFAGVFIQIQAVLSLYAQGLLTGLVIDSGDGVTHVVPVVDGYSYPHLTKRMNVAGRHITSYLVDLLSRRGYAMNKSADFETVREIKEKLCYISYDYKREYQLGLETTILVKSYTLPDGRVIKVGTERFQAPEALFTPELIDVEGDGMADMAFRCIQEMDIDNRMTLYQHIVLSGGSTMYPGLPSRLEKEILDRYLDVVLKGNKDGLKKLRLRIEDPPRRKHMVYLGGAVLAGIMKDAPEFWITRQEYQEEGVACLRKCGQS

SEQ ID NO: 60743 - protein, 280 aa, Zea Mays
MSITCCLPVVECVYCLACARWVWQRCLHSGGYDSETWGVASAEEFEPVPRLCRIILSVYEDDLENPQWAPPGGYGMEPRWVVQRRIYEDTHGHAPTYLLYVDHQHSDVVLAVRGMNMAKESDYAVLLDNKLGQRRFDGGYVHNGLLKAAEWVFDAECDVLKDLLERNPGYTLTFAGHSLGSGVVSMLALLAVHNRELLGGIDRKRIRCFAMAPARCMSLNLAVRYADVINAVILQDDFLPRTDIPLEDIFKSLFWVPDVVLFVQLTMPSMWKMPNRHMYT

SEQ ID NO: 60744 - protein, 552 aa, Zea Mays
MFSAPAPSTRGRHFVVICCENKVIFLDLVTMRGRDVPKQELDNRSLLCMEFLSRSSSSDAPLVAFGSSDGVIRVLSMLTWKLVRRYTGGHKGAIACLMTYMSAAGEVHLVSGGNDGLLILWSADHIHDSRELVPKISMKAHDGGVVAVELSRVMGSAPQLITIGADKTLAIWDTVTFKEIRRIKPVPKLACHSVASWCHPRAPNLDILTCVKDSHIWAIEHPTYSALTRPLCELSSLVPPQVLAQHKKLRVYCMVAHPLQPHLVATGTNIGVILSEFDPRALPAIAPLPTPTGSKEHSAVYIVERELKLLNFQLSNTANPSLGNAGVASDAGRSRNDSLEQLIVNQSKKHISTPAPHDSYSVLSVSSSGKYVAIVWPDIPSFAVCKASDWSVVDSGTGKLFAWDTCRDRYALVESALAPRMPLVVKGGSSKKAKEAAAAAAQAAAAAASAASAATVQVRILLDDGTAHVLQRSIDGRSEPVIGLHGGALLGVTYRTSRRISPLTATAISTVQSMPLSGFGGSGSSFASDDPFSSKEGPPQNFQLYSWETYQP

SEQ ID NO: 60745 - protein, 1376 aa, Zea Mays
MEAIQPSLKAVTREELLKHEDDNVKVLLATCFCEITRITAPDAPYNDDILRDIFYLIVGTFGGLSDVNSQSFGRRVAILETVARYRACVVMLDLECDDLITNMFQTFLGVVSDSHEENIVKSMQAIMILIIDESEDVQESLLRVLLSALGQKKTGAAMSARKLARSVIEHSATKLEPYIKKFLTSSWAGNGSSSNDQIDHQGVVFDLYQCAPKVLKAIVPYITGELLADEVDNRSKSVELLGEIFSLPGASIVECFKTLFTEFLKRLTDRVVEIRISVVEYLKRCLISNPSRAEAPEIIKALCDRLLDYEENVRKGVVAALCDVATHSPYAIPIDTIKVVAERVRDKSQAVKCYTMERLADIYKLYCQRDSDSSTNSDDFEWIPGKILRCLYDKEFRPESIDSILSGSLFSPEYQMKGRVKHWITAATYFDKVEMKALEQILLHKQRLQQEMLKYISLREPSQEDAPDLQKRIFGCFRNISRLFSDSAKCEENLNMLHQLKDADFWKIFTSLLNCSTTFEKAWSLRAELLKILGENHVLYNFVGTLTMRCSYLLVNKEYAKEILAEASAQKTSGNTKLISSCMNLLTAISSFFPSLLAGLEEDIVELLKEDNEVLKEGIAHVLSKAGVNIREQLASTSSLDLLLERLCLEGTRRQAKYSVHALAAITKDDGLMSLSVLYKRLVDLLEEKKVNIPSILQSLGCIAQIAMPIFETRKEEILSFIIKKILDCNDDMVQNSSNKSEWGDSTHNCLLKIYGIKTLVKSYIPCKDAHAQPGIEKLIDILKNILTYGDISPNMVSSAADKAHLRLAAAKAVLRLSKQWDHKVPVDVFYLTLRISQDDFPQVRKLFLCKVLQYIKERALDAKYACAFMFGVNDYHGPQLEEFKYNLTEVVQICQQVKMRQLSVQADMNLLTAYPEYIISFLVHALAHDPSSPDIEEHENVKAFGPTYWRLYLILSILLGEEGLQHSVPGMKKDSFTTIISIFKSIKSSQDVVDGNKNKTLWAICDLGTLIAKRLCQDQTSLSEAQTVPLPPQLYAPLQDNQNENSVESYGQIWPGCEKVLAHFEAVMTANMDKVESPKHKMLIDMTDEFGNEVPLGKIVKLLKLRGEKKAEKKQKAPSSSSVNAENDDDVLGLVREINLSNQEDLEELQKGKPKKRQTDTKNSNKKPLDFSSPKRKRSISKSRPHSAKGSKNSDDRLIHTPNTERTSISLETKLKEKNRDDSIDTELLVSPSIRTPVSKGNKGAKRSHIDILSSVPKKSADAESTKRTVEPRSLNGSLKSQKSKPISGLVQCSTQDSSGTDLVGHRIKVWWPLDKRFYEGTVQSYDSSKKKHTVLYDDGDVEVLILAKEKWILIESNDSSVKKQKKDLGTNQGR

SEQ ID NO: 60746 - protein, 1080 aa, Zea Mays
MASDSDVDEDELLQIALQEQAARDLSHQRPPAANKPVVNLVRPPAPNARGGNARAGGAAAKARQPSRGGDEDDDSEVELLSISSGDEDDNPRARGPPPPRGGGGGRAGARRAASRDDGDFDDEEPRSWKRVDEAELARRVREMREAKVAPNIQELDQKAAAAAAAAARKALTSVQTLPKGVEVLDPLGLGVIDNKSLRLITDASVSSPISREKSQGLDPNMRDTSAADLEAGALTLKTDLKGRTQQKKQLVKENFDCFVSCKTTIDDIESKLRQIEEDPEGAGTAHLYSVTQKISGVANRAFEPLFERQAQAEKIRSVQGMLQRFRTLFNLPSAIRGNIRKGEYDLAVREYQKAKSIVLPSHVGILKRVLEEVEKVMQEFRGMLYKSMEDPHLDLAEIENIVRLLLELEPETDPVWHYLNIQNSRIHGLFEKCTQDHDSRMEVLQNKIREKVLSDSKWRQLQQDSNKSLEVDSTIGDSPRVDQLSTNFMAEEADSLRATYIRRLTSVLIQHVPAFWRLALSVFSGKFAKAASGNVVSDFDVNAKPTANKNDEKGGEVKYTNHTLDEVGSMVQATISAFDTKVQSTFRDFEECNILCPYMSDTIKEIAKACQTLEGKDSSPTAVKMLRTLHFEMTKLYILRLCSWMRATTKEISKDETWVTLSTLERNKSQYAISCLPLEFRDITVSAMDRIDTMILNLMSETAKSYDISQPLQEINESVRLAFLNSFLDFAGYLERFGGELTENRPNKENNYVSNGYINGTRETFVNTDGDLHKKLLVVLSNIGYCKAELSEELYSKYRHIWSPVRNNEERSSDMRDLRTSFSALEEKVLDQYTFAKSNLIRSAAQSYLLDSGIYWGAAPMVKGIRDATLDLLHILVAVHAEVYSGARPLLEKTMKILVEGLVDIFLSVFHENKTKDIRLLDANGFCQLMLELEYFETVLHTYFSPEAQQAMKSLQENLLEKACESVAEAMENPGHQRRPTRGSEDTASDDRQPSVSPDDLLVLAQQCSSDLLQGELERTRLNIACFMESTLQPTAAPAGPKPAAHSSYQAQHAPVQTSSPSFRRQQTGTSSPVVSRRRR

SEQ ID NO: 60747 - protein, 534 aa, Zea Mays
MGQCCSKGAGEAGATEAAPKAQAPSRGASANNADGQRASSSSAVAAAAAAAGGGGGGTTKPASPTGGARASSGSKPAAAVGTVLGRPMEDVRATYSMGKELGRGQFGVTHLCTHRTSGEKLACKTIAKRKLAAREDVDDVRREVQIMHHLSGQPNVVGLRGAYEDKQSVHLVMELCAGGELFDRIIARGQYTERGAAELLRAIVQIVHTCHSMGVMHRDIKPENFLLLSKDEDAPLKATDFGLSVFFKEGELLRDIVGSAYYIAPEVLKRKYGPEADIWSVGVMLYIFLAGVPPFWAENENGIFTAILRGQLDLSSEPWPHISPGAKDLVKKMLNINPKERLTAFQVLNHPWIKEDGDAPDTPLDNVVLDRLKQFRAMNQFKKAALRIIAGCLSEEEITGLKEMFKNIDKDNSGTITLDELKHGLAKHGPKLSDSEMEKLMEAADADGNGLIDYDEFVTATVHMNKLDREEHLYTAFQYFDKDNSGYITKEELEHALKEQGLYDADKIKDIISDADSDNVRNKHYLNFSRQTKL

SEQ ID NO: 60748 - protein, 327 aa, Zea Mays
MALQGKKLINNPDDVVTEFIEGLVETYPGLQYLDGFPQIKVVLRADVERGSYDKVAVISGGGSGHEPSHAGFVGPGMLTAAVSGDVFASPPVDSILAAIRAVTGPMGCLLIVKNYTGDRLNFGLAAEQAKSEGYKMEMVIVGDDCALPPPRGIAGRRGLAGTILVHKVAGAAADAGLSLAEVAAEAKHASEVVGTMGVALSVCTLPGQITSDRLGPRQMELGLGIHGEPGVAVVELQPVDVVVEHVLKQILSQETQYLPVTRGCNAVLLVNGLGATPIMELMIAARKAVPELQLVYGIAVDRVYTGTLMTSLDMAGQFFARFFEMMM

SEQ ID NO: 60749 - protein, 529 aa, Zea Mays
MTRNQFFTVAFICSFAYYIFPGYLFQMLTSLSWICWVFPSSVIAQQLGSGLHGLGIGAVGLDWSSISSYLGSPLASPWFATANIAAAFFIVVYIITPINYWFNVYKARNFPIYSDGLYTVAGQKYNISSIMDSHFYFDTDAYEKSGPLYISTFFASSYGLSFACLTATVSHVLLFHGSEIWQLSKSAFEDKKMDIHTKLMRRYRQVPEWWFICILVASVSATMLTCEYYIEQLQLPWWGVLLACALAIFYTLPIGILKATTNQAPGLNVITEYIMGYLYPGRPMANMCFKVYGYVGPHQALEFLQDFKLGHYMKIPPRAMFTAQVVGTLIAGSVYLGTIWWLLDTIPDVCNTELLPAGSPWTCPYDHVFYDASVLWGLIGPRRIFGDLGTYSAVNWFFLGGAIAPLLVWCTHKAFPAQKWIRHVNAPVLIGATTFMPPATAANYTTWILVAFLSGYVVYKYRRNWWERHNYLLSGALDAGLAFMAVLLYLCLGLENKSLNWWGNDLDGCPLASCPTAKGITVDGCPVHN

SEQ ID NO: 60750 - protein, 350 aa, Zea Mays
MSLGLFSSNFVGNPRGLELQDVDLHAGMRRQYHSSGNLSMLWSEQQEKLDVLNSLDRLSDLASEEDSTFEDTVEGCATLGKRESSVHRANYVRIVSKQMVGIHVSVWVSRKLRRHVNNLEVSPVGVGLLGYMGNKGSISISMSLFQTRLCFVCSHLASGHKSGDQQKRNADVYEILQRTRFSSLFAAGRPQKIPSHDRIFWFGDLNYRIDLPDSEVRYLVGMKKWDDLLKSDQLTKELVSGNTFVGWKEGLINFPPTYKYERNTTRYVGELHNEEEKKRSPAWCDRVLWFGKGTKQLSYWSSGLNLSDHRPVSAVFLVEVEVFNQQKLERVLNFNPGFVSNGDYYMMADP

SEQ ID NO: 60751 - protein, 222 aa, Zea Mays
MASSSVAADMELDRPNLEDYLPPDSLPQEAPRNLHLRDLLDISPVLTEAAGAIVDDSFTRCFKSNSPEPWNWNIYLFPLWCFGVVIRYGLLFPLRSLTLAIGWLAFFAAFFPVHFLLKGQDKLRNKIERKLVEMMCSVFVASWTGVIKYHGPRPSTRPHQVFVANHTSMIDFIILEQMTAFAVIMQKHPGWVGFIQKTILESVGCIWFNRNDLRDREVTARK

SEQ ID NO: 60752 - protein, 217 aa, Zea Mays
MMNEHREEDALRGQAVKNQKAIWDKTMEMRFLLQKAFSTSNKLPQESIRTRFCNHDKQIEQAYDDLLNSTKHTLSSMMELQEALLESNQATKDANEIPSASNGDNDEWSEVQRLQARITTFRNTEIDKWHRKIQVTTGAAALKGKLHAFNQNISDQVAGYMRDPSRMINRMYLTNSAVRVFGKDVGEPGTAEEVRAFTTFPLKIFQTLFGLLQSTEV

SEQ ID NO: 60753 - protein, 1340 aa, Zea Mays
MDIPEQRLSPVGFTTLDAFDHQIMAPAQDVVAKVQEPHNDTATPAQSHSQVLSSGRFDYLTKAEAKLTFAPEYAAVEILIAEAPTPLFTNPYFPRSKKPGSSSFSARVYSYDVAQSSQIESTGDKPDKTSKLISGNHLHDISSSNLYTLVQGGNKGSDKILKSTDTQPSKGELSPPISGVTSFNFSLVSQKKSGNMFNAGYFLLSMKTALATEIECITFQAAMCRIRHTLLSLRSKASAEFNSATSSFIQTNVSNKSDLTPRSLMDNVGVWRPVVTPKGPKSLESLSANTLTGASPSLSIQRQPVVDLLCAMTLLVQQSTSFVDMSLDMDDGDGSFFWLSLDEQKRRGFSCDPSMVHAGCGGLLGTCHSKDCAGVDLVDPLSAEVSEPSMISLLQSDIRVALKAAFANMDGPLSVIDWCRGRGNAAESAGTGDAYSFQYSSGDILEPSSSLSIGGDSMSPPQPTSSNRGISELEFQKGYHRVRPTIAVLPSPSMLVGYQDDWLKASVNSLKTWEKAPFEPYALPKPVTYYALCPDIDMLTSAVADFFMQLGTVYEVCKLGTHSPQNNGGQMELSPGKYLPSGLVLVDCPEQLKKVRCGHLGPISSTSDCLQAFSKHWSVKSFVTSISRILKDIKLTSNISTNQKESSSGPCTVIYVVCPFPEPCAILQTLVECSVALGYVISSPERERKLLYSQVAKALNSSASVDEASASNVVMLSGFSIPKLVLQIVTIETVLRMDKPNKELAVLKDIAFTVYNKARRIPRAVSTSDMFQSPTYLGRSQSTMMHVTSPAPTLWKECLVPRMSGPTLSRETDFDASMRSATWDNSWQPARSGGLLDPSKLPDLCAQDDRKYAFEPLFILADPGSADLNALMEPSKSGADASGSRVYGSISGSNSDSGVSPLLDVSESDSAASLHCCYGWTEDWRWLVCIWTDARGELLDSLIFPFGGISSRQDTKVLQSLFIQILQQGCQIMSSSPEASNMRPRDVIITRIGGFLELEIQEWQKAIYSYGGNEVKKWPVQLRRSIPEGIPPSSNGPTLQQQQQQDMALIQDRNMPSSPNPLYSPHPKSSFMKGALGQSGNKKQILVEQSGMDTSRGSLHLVRSISLVAVSQDHSLHLTCQADLLSRPASAGEGSQGSSGPWSYLEGFTPVKSIGSMSASHSYLLVPSPSMRYLSPATLQLPTCLTSESPPLAHLLHSKGTAIPLAMGYVVSKAVPPVRRDSAQLTKDEQPSVLSVSIIDHYGGSSGTVQEKMSRGGGGGSKQARNLSQETTGRECEMEMHSVLEAVAAELHSLSWLTVSPVYTERRTALPFHCDMVLRMRRLLHYADKYLSEPKGETTH

SEQ ID NO: 60754 - protein, 271 aa, Zea Mays
MPLPPLLPRLYPTPPPLRAGDRGNAVPLSPGRRRPALLAVVRAKRKDEASFTDRILDYIEGGPKLRRWYGAPDLLPKDGAAEDEEDESQDIEESRDAVLVTNGDSEIGQMVILALILKRARTKALVKDKRTTEEAFGTYVECMVGDIGDKSFTKRALRGVRAIICPADDGFFSEPIDLKGVQHIVLLSQLAVYRNSGGLQAIMNSKLKTLAEKDEEVVLASGIPCTIIRTGSLQSTPGRERGFDFTEVSAMKPSLPPVHINYCAVSLPSIQ

SEQ ID NO: 60755 - protein, 178 aa, Zea Mays
MRLDLTSLGHAPMFLFVSICDQAEPLTPSSSLAPCYCALRPRRGRETAVELRSFLFVSCAQHTIVFMFLASPGVRSRSPSPARPRRRTSPCQSSFFAQQGFVLSCATLQVRVLGGLAPLCRVCSSMLSARTDSGLASVALPSMQRGVVPLLCPARQVPKICTHVIVGAQHLRVAFRVL

SEQ ID NO: 60756 - protein, 469 aa, Zea Mays
MTPLGGPGMQVPWNTSYPDVVKFMRSGFALGFPVWYGDNIRECLANNMRTFHKEPRNSTGIRQQILDILTFETLWFCVIEQLGSTNNGVKSVLIHIIEEIPYVLSGLKSAHVICRFILMPLAVFVFLAYKYWKTRITIDAVEKFLRMHHMLVPMRYAYTNIIAITGHFRDKLGQGGYGTVYKGVLQPGEVHVAVKMLGNSNCNGEEFISEVATIGKIHHVNVVRLIGFCSEENIRALIYEFMPRGSLDKYIFSSEKTFSWDKLNEIALGIARGLNYLHHGCDMQIVHFDIKPHNILLDSNFVPKVADFGLAKLFPRDDSFVPLSAMRGTIGYIAPEMVSRSFGVISSKSDVYSFGMLLLEMTGGRRNADPHAGSSSQAYYPSLVYRQLSQGDANRISEGVDMHELEKKLCIIGLWCIQMKPQDRPTMSEVIEMLEAGVDGIQMPPRPYFCDEEGESSYSTISELDTIEE

SEQ ID NO: 60757 - protein, 219 aa, Zea Mays
MAGAVSALFLLDIKGRVLVWRDYRGDVSALQAERFFTKLLDKEGDSEVHSPVVYDDAGVTYMFIQHNNVFLLTAARQNCNAASILLFLHRVVDVFKHYFEELEEESLRDNFVVVYELLDEMMDFGYPQYTEAKILSEFIKTDAYRMEVTQRPPMAVTNAVSWRSEGIRYKKNEVFLDVVESVNILVNSNGQIVRSDVVGALKMRTYLRKQLALLSANLF

SEQ ID NO: 60758 - protein, 636 aa, Zea Mays
MRHLALLALLLAPVLGSTGTTLSPSPAATDSPANQGQASSPPQSAFALGPVAVPTAPTTPSASPSPEKAAAVSPAAPTEPRIAPAPVAPPKEYSAPPPVEVAPTDPTDEVPPPVAPPQAAVGNPTPILPGTPALLPYVQAPAPSVVLKPNPPVVVSPPPANNQPSRPVGSVPPYPPPASPPPANGIPPYPPSGRFPAIPPATSVPPPATSPVIAQAPQRRADPPSRDYKNGNAVPPANTYPPTNLKKHHVPHASPPKGSTGQTVPGHKSPVTGSAPATSPLPQNTNMPSIPKNASSVPHAHPSPPSIAPELAPTGRSHAQGWKSSNPNNKTNRLHAPSYPPPRAQGPEVSRTPRQTGTKNYTHHAPPPFPQGHPSFPVHSPSPSPASSRGPANAKKKPKAPSAHPIWTLPPPPPNSDCNSLSCPEPLTDPPAGAPCACVLPIRVGIRLSVDLYSFFPLVSDFAEEVASGVNMAQRQVRVMGANVAGDQPDKTMVLVDLVPVQVKFDNATAFSAFESLWSKKVSLKPSVFGNYEILYVVYPGLPPSPPSGQGVGDGAFGNNRNARAVKPLGVDVRSPKRKVNGSLIAIVVLSTVIALIICCLAAWSLILRFRGPSHTARGFPHTALPKFSRSSGTCN

SEQ ID NO: 60759 - protein, 886 aa, Zea Mays
MWREILISSGHPTWVLNFYTTLRQKYSYDTLWGDSPIAVSCRQLIVQLCSLAGSVFPNDNGDAQIKHLMLILSAVVLWIEPPDVITASIRNGGSESEFIDGCHALLSIASLTTGSLFDNLLKSIRPYGTVNLLSALTSEAVKSVLNNQSEEETWGIDSLDILLETWNVLLGDVDADKNPISTDGALASSSLFKMIVESHLKAAADSAFEDTDDTEYFHVSVSKRDEQLALYALIARASANTTIPFLAQLFSERFARLNQRNGESDPTQTLEELYWLLLVTSHVLTDSGEGETLLIPEALQAGFPNVIEAAHHPVVTLSWSIINFSRQCLDPGIRAKYFSPRLMEAVIWFLARWVATYLVPLDVSRGKVSREIDNVGTNGSQHSRKLLNSFAWENNQGELVLDFVVLISMLALTTYQGENELQTLTCQKLLATVVRRKHTCTYLVQLDSWRDLTRAFASGRSLLSLSGRLQRSLAETLASAASCIKDPEASAQYLRDLMGPVAGCLVENASRSDLKSVAQQADVIYMVCCLLERLRGAARATQPRTQKVLFEMAHTVMNPLLTLLEVYKNHSTVVYMILKFVVDFVDGQAVFLDAKETSALVSFCLQLLQIYSSHNIGKVMLSLSSSLRNESQAEKYKDLRALLRLLTNICSKDLVGFLSDCGGEGSPDIAEVIYIGLDIVTPLISLDLLKYPKLSRDYFVLISHLLELYPEKVAHLNSDAFTRIIGSLDFGLRNQDSDVVERCLAAVNALASYNFKERLGGRGRLNSQLMESEGSNGKLQESISSHFLRLLLQILLFEDFRSELAGYAADALLPLLFCEQELYQRLVHELLDKQQNPTVKSRLATAFHNLTSSNNLSSSLDRPNRQRFRKNLLSFMADVSGFMQIK

SEQ ID NO: 60760 - protein, 345 aa, Zea Mays
MKGHLEEMRTCIEAAQGGLFLEELQRKWNDHNKALTMIRDILMYMDRTYIPTNKKTPVFEHGLELWRDTIVRSPMIQGRLFDTLLELIHRERTGDVINRGLMRTTTKMLMDLGLSVYQDDFERPFLEVSASFYSGESQQFIECCTCGEYLKQAERRLHEESERVSQYLDAKTNEKITAVVVKEMLANHMQRLILMENSGLVNMLVEDRYEDLTRMYTLFNHVPDGLATIRSVMVSHIKDTGKSLVTDPERLKDPVDFVQRLLNMKDKYDNIINVSFSNDKSFLNALNSSFENFIKLKQTDHLSSYHCFVDDKLRKGVKEANEEDLETVLDKVMMLFRYLQEKRSI

SEQ ID NO: 60761 - protein, 278 aa, Zea Mays
MVAHAKSSKSNPVARWHICQGSINAISFSPDGAYLATVGRDGYLRVFDFSKEQLIFGGRSYYGALLCCTWSSDGKYLLTGGEDDLVQVWGMDDRKIVAWGEGHNSWVSGVAFDSYWSPPSSDGNGENVYRFGSVGQDTQLLLWDLALDEIVVPLRHPSSASPTFSSGSPSTHWDNACPPTGVLQPSPRMRDVPKLSPLVAHRVHADPLSGMVFTSESILTICREGLIKIWVRPEQSENNQQSNSSEFALGPASKDRAITSSNKASSSSFKKLPPVLVT

SEQ ID NO: 60762 - protein, 561 aa, Zea Mays
MEQRNVLALGEHVLKATVWKRKHKTAMEHPEGNDVMVFSQHDQRKHPVIFDDRAKCKKSKLISCGSGVILESYWNFKTSGLPVRVLFYQHGDWSDFPEDVVNLAQQDFQLKKPITTAVFQNKHILLDFIHMICIDYEMTIDKPLAWVDDNGKRFFPDLSAGLYTSKPSQHENGEADECDGTPTSVAESSSSVSVGEVVSHGKRINDIAEDNMRAHNILYEAVGENISGPSFHLNEYSSGTIQATGKPNDCRRIDSAVRNLLLKGLGQPFSEEDIIGIYRTPLLDQRGQVRCGLFQKEIEETRSRRGNANVRYAWLPCSRYTMEQMAMRGALEIAKPHKGSICGVGTCLAPANCTNSCARYSDFHEDGIIRMMLCRVIMGNVEVVLPGSKQFQPSNGSFDNGVDDLQNPQNYIVWDANVHKHIYAEYAVIVQAPLVTNECSGLKDSVPNISEIISSGSRDNLTKEDRFAPCGVEQEAPRLGRAPRAPSSPWMPFSMLFAAISTKVPRSDMELVIRYYEEFKRKRMSRSDLVVRMRQIVGDKILVSTIMRLHHQKKLLLVEGS

SEQ ID NO: 60763 - protein, 164 aa, Zea Mays
MYQPAFQQFMNYSSPHGGDPNANTNSTTTRIAADPDTHQDFEPKSRISDMTLHDAIAQDIKENPVLIYMKGFPESPMCGFSALAVKVFQQYGVPVCGRDILGDLKLKECVKAHTNWPTFPQIFIKGEFVGGSDIILSLHQKGELKDLLGDIAQRDEQKVHAHDS

SEQ ID NO: 60764 - protein, 894 aa, Zea Mays
MTAVELRIGPLEWAMDDESPGVGDEDGKDEDWALDMERKGRGKRKRSAPRRRSGPKRRRAAAAMAPAPARSQSEPCPGTAEPSPEHGFNAAAAAAGVKEENGVRKEEGENVAPSTSGRGGGGGRKPGARRSCHQCKRVKRLKEMVRCQCCDERIYCDLCIRNRYAMMSPDAVREQCPFCRGLCNCTRCLNKDRDKQLGPENLVLRKCNSNESSKREKRPTSAGVISPQAHSAAPCTKEIGLSFVTTNRMNNVSAMWAKVDTSDVRAEEVDPETKRKYASYLLHYLLPCLTQLNKDQMEEREAEAKIRGLQLSELIVEKAVSWNDERVFCNNCKTSIFDLHRSCSNCSYELCISCCKELRGNFLKINCQKGLVPEHKSRGIDYMHGGDCKPPNLENDRETGLSSYQSKSIKWEADPGGTIYCPPSELDGCGNHVLELKQIFETDRLIKLEMEALRLSNQIEPSDISSIDICECSCSANNVSSRKAATRENSTDNNIYCPISDNGGPDDLKHFQKHWVKGEPVIVQGVLSEMSDLRWEPEKMWAEVHDANTSSEMKSVKTTDCMSCCEVEISAKDFFNGYYHGRMYHNLWPEMLKLKDWPTSDHFENILPSHGKTYINSLPFQPYTNLKSGLLNVSALLPGDVLKLDMGPKSYIAYGYAEELIRGDSVTKLHCDLSDAVNVLMHTAKVVPSEEQKEGIRDLKIRHAEQDKKECLGNSSIDGNKTSMEHAHISSVSCEDGGGALWDIFRREDVGKLKEYLTKHSKEFRHMYCCPVEKIFNPVHDETFYLTNKHKRKLKEEYGIEPWTFVQRLGDAVFIPAGCPHQVRNLKSCTKIALDFVSPENIQQCLSLTEDFRRLPVGHRAKEDKLETRFGLILTASIRVSSALIGGATTTMVA

SEQ ID NO: 60765 - protein, 55 aa, Zea Mays
MVTELLLIFPLTILDDLPYNLSVPSLILFFSIHACVLIQHTNDYLCFIAPSSLES

SEQ ID NO: 60766 - protein, 563 aa, Zea Mays
MIYPGYTPRPGIEPLILHYGLPFKVGNWSFSKLEHHEDGIIYDCNRLFDPPPFPREVEMMESDPNIKRGLFLSIECINTLNEGLLLHHASAGCPKPQWSKYLSFLKSRRFSELTKPKYWKGEQVDSIMTMQHVALSKANNEYPKIHTLFSTECSSYFDWQTVGLMHSFRLSGQPGNITRLLSCTDEDLKNYKGHDLAPTHYVPSMSRHPLTGDWYPAINKPAAVLHWLNHVQTDAEFLVILDADMIMRGPITPWEYGAKRGHPVSTPYEYLIGCDNILAKIHTRNPSACDKVGGVIIMHIDDLRRFALLWLHKSEEVRADKAHYATNITGDIYNSGWISEMYGYSFAAAEINLRHIIRRDIMIYPGYVPLPRAKYRVFHYGLRFGVGNWSFDKADWRNADVVNTCWAKFPEPPDPATITKQDLDARERDFLSIECGRALNKALYLHHKRRNCPRLDTISSTSKKTDQVSASNKIVSVAQKSRSISRGNIESMDEGRLKTVKRTAASVQPLHRSRRLARSSRMWIIAVWALSIVVFLLVISMFFTEQRRNASRSRVSRSLKAHV

SEQ ID NO: 60767 - protein, 214 aa, Zea Mays
MNDYIENAKKDAEDILSKESYTPESRKQAMAKKVDALIFLWSAIDGYDMDSVQRSSIKAEITQLLHKYANKQQSLAGVPASISSSHQQQKFQEEYRQRPPVEQETQQRKAHELQQETEEKQHHQQRKAQETQHQHIQDQQETQKREMWQNRKRRRQNKNRKRKQRRQNLQQQSKRPRLPPYVRPGVGNQHGQPFSGGRFAACATTIPPYYWSMG

SEQ ID NO: 60768 - protein, 921 aa, Zea Mays
MAPAKRKRAAAAAAAAAAAAAKWKVGDLVLAKMKGFPAWPAMISEPEQWKMPSTKKKPLVYFYGTKQIAFCNYADLEAFTEEKKRSLLAKRHGKGADFLRAVDEIIEVYDSLKEKGSNKDDLAAEVKPGVEKFADNNVCMDTENMVSSSYIQNHQEIDDHYVTTKGHDMIKSDRLSVTIMSDERCVINSAPDEPTENVSVLDEMREISLRTNSFSNKQRDAQPQNCYTRSRVPSLRKSRSSISVESRKAQGSGNFFDHTNLSSIGSVPNENKERSSRHRHADDKANSGSVSILDNVWLHSGRGTSNQPVTLGTTCNGSKMLNPPVKADSTCNSEASENGTSETELKSNGTSNLPMNTEVIFRRIRKSDRKPVPHYEDCTTPNKDELRAEYSEILSDSPNSKNEVCKSDGDEHLPLVKRARVRMGRSHLEDSPVDEVDVSNKKPELTTTSDQCDRNGKPASPVNDYSADQVSTVVSSASNPSCKSDMPILSKEGHLPWKNKEYHPKILALDVEAALPPSKRLHRALEAMSANVAENVKNIPEVTGPNEMALNGSLLTANNHSNKSADAVVTVSNKPVIVQCSEPSLDTQFKHTQSGKCTSESTLQNNTIPDSASVPSKENDIMLKENDTNGSWVCSELDNGSCGKTSALCMILNRPGLDVTQTTSVPDRLSSSFEKESENVATSSVKETKPFGSAVCEVDRSAEAEQIDHSNNNVISNTIRHSETIVVDSVNNVGDTASNSSMATKSSSIQSDADTRTSEVHTFSSLALKELNHRKIKDRSTSPDSMPMKELIAVAQARRFSRLTSFPDIFLNAKYIPERATNTPPKEGSHRQLSPSNRIFRSTSGNDNVHSRSPFDIIQQKKLAGHVEANAARRSFKDFLSTLTRTKESISRATRLAIECAKFGIAGELLKRTTWPLFRQQ

SEQ ID NO: 60769 - protein, 85 aa, Zea Mays
MVSFEMNDLKKIGLGLTGFGIFFSFLGIIFFFDKGLIAMGNILFLSGLGLTIGLKSTMQFFTKPKNYKYHLLSDYFLKNPCVFTE

SEQ ID NO: 60770 - protein, 145 aa, Zea Mays
MICRKKYLKLWFSFRLSEFGATWYRYAMTGQLTQKSDVYSFGVVLLELLTGRKPVDHTMPRGQQSLVTWATPRLSEDKVKQCVDPRLKGEYPPKGVAKLAAVAALCAQYEAEFRPNMSIVVKALSPLLQQRPAPTTEEPAPQPGS

SEQ ID NO: 60771 - protein, 125 aa, Zea Mays
MLGQVLGTPTREEIKCMNPNCTEFKFPQIKAHPWHKVFNKRMPPEAVDLVSRLLQYSPNLRCTAVEALVHPFFDELRDPNTRLPNGRFLPPLFNFKPHELKGVPADIVARLVPEHAKKQCSYVGS

SEQ ID NO: 60772 - protein, 363 aa, Zea Mays
MARGLRGVRDDLSELGRHLLDIACFLHPLLNPAHTDSPSPHPAAPPSPSLLAGILSDLAEIGGSFRGGFSRSSPAPDHPAPDALESQQAASSPSPRPPPPAAADQIADDVVGAARALAARPEAWIDFPVLALDEGSVISGIQRDHMESIEKLVPDLASLRGRLCPSYMDEDIFWKIYFRLLESNINEHSSEEDIRSVPNSVHHNNEIESDSPPHVCEIESVKSNQEGYQSSDGRAFPKTRSERSIDQWVFAKSKSEESMDQWSEIPSDVESFREGKRYLSSEELSDVDSANVVVMDKYMDSLLSDRRNLPYASSSVRRDSVRRKPASSADYSRRPPQPTPPASLSKKESWDVIEDSEFDILDS

SEQ ID NO: 60773 - protein, 441 aa, Zea Mays
MMGPSTMAARAAGCCSSAALAFFRLHPLRCAVRPAAALVGGCSSGLRGGCRSRLAHSIVDLVMEELRSRRRVRVSAKIGLQGTKELPDNKIVKRTLQKGLLLEFQKDPERSLLAVVERPDGKKNWMVTDQNGVMSSIKPQQVTYVVPGIMNFDYSKIDEFLEKTQNLLDPTILECAWMELSEKDKSITVEEFAEIVYGTKESLESYCAHLLLSRDVVYFVKVESRDYSMYQPRSPAQVEELLRRKLAKEAADKELEEFVHLLKSAKALPMESKPPKASWLVEEKVRQKIESLQAYAVDACDDEQRRLAGNILKAMGFTRTSSAALKLLINVGYFPVHVNLDLFRYDVRIRYTDEVLSAAEELLVDSPDTDMHIRKDLSTLKVYAIDVDEADELDDALSATRLPDGRIKGGNAQRNINLSTNHYFSDVPREACHEFYELAAG

SEQ ID NO: 60774 - protein, 638 aa, Zea Mays
MDPEKQNEMSLIDKRELVYEVARWPQGAMEILRCWTRRELLELICVELGKERKYTNVPKAKMIAYLLKLVSRNSGKNGQLKNDNPNVMLLGQDNKDEIQMKESDEQSRPLKTANSDSSISREACAGSSVVCSNVACQATPNAGDKYCKRCSCCICNKYDDNKDPSLWLVCSSDNPYSGCSCGVSCHLNCALKNKRAGIVKNGCNKLDCSFYCVSCGKINWLMSYCRCLQKQLAIAREARRVDVLCERLSLSHKIIQGSERYKEIASIISSAVKTLEIEVGSALDQVSVITGRGIVNRLTCGAEVQKLCSSTLEIVDSKVDNILEFESNNSPKLLGPQPQILFHEITPFSVVIVLNYQHDIGKEQIDGSKIWHRSARVCNYSSEPTCHILRPNTRSLVSGLSPSTEYFFKVLPFSSTHGFTEWETKCSTRSLDHGSSQCSTQNSESMCLKDDSMQHHKKDLNVQNHQRTIQYDSPKGSTNSSENNLSCDRYSKRAKVARLDGASDNDESQLPPTSEVLPFASSNSSPSEAPSKPDLLIGTPDSASKNYVEQQYEYCVRVVRWLEHEGHMDNDFRVKFLTWFSLKATTQDRRIVGAFVDVLIGDPASLVGQLVDAFKDAICIKEKPSQAQQKDACCKVWH

SEQ ID NO: 60775 - protein, 877 aa, Zea Mays
MEAGFLWKEIGDQAGAARMSGGNKNRSLDWDLNDWRWDANLFLATPAAAAPSESISRELSRGQGEIDFGVVVDKRRRLSPEEDGSGGCSNSAVADGDNSHVVCVQRGRNTEETRPRKGANSSTTPSCQVDGCQADLSGARDYHKRHKVCEAHTRTTVVCINNVEHRFCQQCSRFHLLHEFDDGKKSCRSRLAQHNGRRRKVQPQPAVNGNSMNEDQSLSSTLFLLLKQLSGLESGSSSEQINHPNSLVNLLKNLAAIASTHAYQDVLKNATSISSNDGNNAANGSIMHEQTIRSIPVRRESLAEEPAVKRRVQDFDLNDSCIEEAESRTDKIVFKLFGKEPKDFPVDLREQILNWLSHYPTDMESYIRPGCVILTIYLHLPNWMWDEFNDDPASWIENLISLSNDGFWRTGWLYARVQDCLTLSCNGSLMFASPWQPVIGDKHQRLCVTPIAVDCSSSVKFSVKGFNIVQPTTKLLCVFDEKYLIQEETQMLLEDSTMQQGPQCLTFSCSFPCTSGRGFIEIEDYDQSSLSVPFVVTDKDVCSEIRMLEHGLDLVSFDQTSKRIDDLMIYRSRALHFLHEIGWLLQRSHVRATSEQRQYCPDRFPVARFRWLLSFAVDQEWCAVLRKLLNTMFQGDIDVLSPIEFALGENLLHTAVKKRSKPLVEFLLRYTTTNIAPVGGGDGAPVQFLFTPAMTELSNITPLHIAATISDAIGVLDALTDDPQQLGIKAWKNARDATGFTPEEYAAKRGNISYIQMVQDKIDRRVTRAHVSVTIPSTIDTVGKHGSRMKPADQITFGVEKKQLSINQTLSCRQCVQQAQQLAFHPRTNRFLSNRTAMLSLVSIAAVCVCVGLIMKSLPQVGCMKPFLWDNIRWGPN

SEQ ID NO: 60776 - protein, 604 aa, Zea Mays
MIVDFCCGANDFSRLMKEKLDKVQKKCHFKNYDLIQPQNRFCFEKRDWMTVQPNELPHGSQLIMGLNPPFGVKASLANKFIDKALTFKPKLIVLIVPKETKRLDQRRTPYDLIWEDSECLSGKSFYLPGSVDLNDKIVEGWNASAPPLYLWSHPGWTKKHMQVAEEHGHTCMGKIACHVEESNLSDDLSVRKQSDATNKLNSRSGKETPFNDRMSNLLDDGSARKQARSEEEKRTLGKIEHHVKKANIPDNLPVKKEPEASSKVMSHSGKDRKIGRYNRRRHDNRSSKGTPDHTESLPPEKQVEVAYEETRVIPSKKIAHNEKKSAQYNYEQTAAGMPNMRSRGGDSDMSISPPVSCNARSKPMSYSLTRPIEHLDTNAHLLAEEPSDSVLNRVPNHDSYLAIKEEYCDGFKRKNDPIFSHIDDSSRMRGSSIEEVTKPYITAPNSDPWSKGDGSFYRHPSSEDLNANADVLMPGYSARYGQIGGDSNPQASMVPLATDSRLHGGTVADNYLSARYSLGSSGARVSQPAPTVPPFGLSGASSQRGSVMDRYSYGLSGPTGTQRSVIDRYAPSLDGTNTTRSRSSLPEQYPFGQPGSSGGGWPHH

SEQ ID NO: 60777 - protein, 114 aa, Zea Mays
MLSLLRLRSSVAPTLSSAQYAASAHLPAVLWRSLPPALAWRAPPSYPPARRVFSSMATTTITTSGIKGDDGTSSLAKACNDEQDGRTAAVHGDKHTRKKIGHDIFLRCGDGPSR

SEQ ID NO: 60778 - protein, 56 aa, Zea Mays
MKCHESLCYIAAGAQVTAIDLRTMKKASVLALQNHRILSYGYVNGCAVQKNEEKGI

SEQ ID NO: 60779 - protein, 547 aa, Zea Mays
MLQLGYNQLTGSIPTQLGHLNKLTVLALQSNQLSGAIPASLGDLPALARLDLSSNQLFGSIPSKLAEIPRLATLDLRNNTLSGSVPSGLKKLNEGFLYENNPELCGAQFDSLKACPNDGNDDGRTPRKPESTSVKPQQIQKTADLNRNCGDGGCSKPSTLSTGAVVAGTVVIVAGAAACGLSAFSWHRRQKQKVGSSSVEHLEGRPSLDRSKEAYQRSAVSSLMNVEYSSGGWDTSSEGSQSQHGVARLSSSTEGGSPSVRSFNLEEVECATQYFSDANLIGKSGFAATYKGVLRDGTAVAVKSISKNSCKSEEADFLRGLRTLTSLRHENLVGLRGFCRSRASGGCFLVYEFMANGSLSRYLDAKEGDAADAAAVLDWPTRVSIIKGVAKGIEYLHSSKLAHQSISADKVLLDHLYAPRLSGAGLHRLLADDVVFAALKDSAAMGYLAPEYATTGRSTDKQGDVYAFGVVVLQVLAGRRAVSPPHLQQGGGGGGRLDDLVDPRLRGRFSRAEAAKLAGVALLCTAEAPAQRPTMTAVLQQLGTSSQ

SEQ ID NO: 60780 - protein, 152 aa, Zea Mays
MAPNTLSAPAAAPPPGSPPPLGVQACPTMAAPPPSPPSPPGYPDSMAAAAPAISLVADLAPAPATAPPSALLLQALSPSHGTRRNPMIWGKTKSKHNPRQSLDEKSKPKPSAFSWVPEGFYVGVVRCDLQFPIADVLLHHDLREGCFPLNYS

SEQ ID NO: 60781 - protein, 719 aa, Zea Mays
MEPPAAKEAPPLQPAAEEDAMLSATAAMAKEAAVAFQGCRYADCAAVLTRLLDKKEGDLKVHHNMAITEFFLDDCPDSNRLLKILGDFKDIVQYLERSFGVANTMNPNENASIAQQQLAQAKPPVKISMPPDSDSNAYAGGYENLSSGIFPDEQIEFESLCSSFDGHQNVGRRILNDFSRASADLAATAADLKVRLQIYKVRLLLLTRNLKVAKRELKVLMNMARGRDSSTELLLKSQLEYARGNYRKAVKLLSTPNNRTEPAMLAIFHNNMGCILHQQRSYHASIWCFSKALKYSLSFRSEKPMKLSTLSQDKSCLISYNCGIQHLMCGKPLLAASCFREAMPLFYKRPLFWLRFSECSLLALEKGLLCANGASSFNDEIEINVVGSGQWRQLIVNPVNSRSNLDSAGVTLGEHKNLVSLGFARQCLQNALLLLDATEKENWVIASDTEDWDQGTVHGYKSSGQKNTTSTDSKTPSGPTLANVNGEQKGTSLNATLQSSLAFYDEIRRKEYIKIRQAVLANLAFVELCLDNPLKTLTYAKSVLQVTDCSRMYAFLSHVYAAEALCTLNRTEDAAENLSVYIRDGNHVELPYSVENSEKALVEKDSDGEDLVAPAVTKLATEEPEQLRPEEARGVLYINLGMIAARQGEVEKANYMVSRGLAMLPNNPRAVLASVYVDLLQGKSQEAVVKLRRCRNVRFRPASIAASSQQSSLEKPPLS

SEQ ID NO: 60782 - protein, 409 aa, Zea Mays
MIPLNRRASLPRAGMEYFDARRKPRNVGKIIAALVLTTLCIFALKQSPGFGGNSVFSRHEPGVTHVLVTGGAGYIGSHAALRLLQDSYRVTIVDNLSRGNMGAVKVLQGLFPQPGRLQFIFADLGDQKSVNKIFAENAFDAVMHFAAVAYVGESTLEPLRYYHNITSNTLLILEAMASHGVKTLIYSSTCATYGEPEKMPITEATPQFPINPYGKAKKMAEDIILDFSKSKGADMAVMILRYFNVIGSDPEGRLGEAPRPELREHGRISGACFDAALGVITGLKVKGTDYPTTDGTCIRDYIDVTDLVDAHVKALNKAEPRKVSIYNVGTGRGRSVNEFVDACKKATGVNIKIEYLSRRPGDYAEVYSDPTKINKELNWTARYTDLKESLSVAWRWQKSHPSGYGPNRI

SEQ ID NO: 60783 - protein, 69 aa, Zea Mays
MWASCVGARPSRGERDEERDQELPDFSSFIPFLPPLSAANLKVYYATCFTIIVGIMVFGGFLAPILNLV

SEQ ID NO: 60784 - protein, 240 aa, Zea Mays
MALARLGRSLAGRLHRSIYRPPAPTDYHASVSRPFAPTHTGVCVRGFASLTYNASSMIGHNLEGPLPVHIVKVLDLVVHMNHARPMSTAAASKVPVGARKVGLKVAMMSPGFVYEPYSPRERIPFWKRWFTLSGWRRTKEDIILEMKNAYAVSRLRKKTGYTKNQFYDQALKIYKEVNTLMAHGDTSSLRKILTERMHSTIKNELKRRQSMWNSVHWELVEPAVSIRTLRARMLECCLLC

SEQ ID NO: 60785 - protein, 73 aa, Zea Mays
MEAPGSPYASSPESAPKRAPRSPPQQQPPSEEGGNCHAPPSPFSVPSRERGAGRFALPGVCMYVAHELVCLDP

SEQ ID NO: 60786 - protein, 599 aa, Zea Mays
MFGSTNPFGQSSTSPFGNNNSFGTPQGFGQSSTAANNPFAPKPFGSPTTPFGAQTGSSLFATTSTGAFGQQQSAPAFGTTSTGAFGQQQSTPTFGTPSSSQFGSSTPAFGASPTPAFGATSSGSLFGQKPSFGGFGSSPSQSSPFGSTFQQTQPTFGTTPAFGTMTTPAFGTSTPAFGTTTAPAFGATTTPAFGSTSTSLFGASSTPVFGSTAFGTSATGFGTSGTTAFGVSSTTTGFGSSSTPSFGTSASVFGFGSSPSFGQTTVSSGSTPFGTTPSPFGAPVPAFGSQTAAPAFGQPQFANQAGGTRIKPYSQTPDVDSATSGTQPAAKLDSISAMPEYKDKSHEELRWEDYQRGDKGGPNTSGTQAVAPSFPSLIQQNAPNPFSTSNPFSTNNPFAPKPAPTITSPFNTSFNNASVTSSSPFTSSPSTTMFGQTGVSTLSASNSPSLFGNTNPAPVTSSLFATSVTNNPSPFGTGSLFANTQSAPLFPSAFAQPTSSTPAFSSGSLFGSTNPGSLFSSSGPSLFSTPTFQPSAPAQTSNLFSFQPPIQPASTGGFPGFSNTTNQALMGQPYDLLLLFKCTPLFLSYLVISFDVLKR

SEQ ID NO: 60787 - protein, 145 aa, Zea Mays
MYSPGIPLSIIWVDEVISSPLITSLHMGPNPTFSNTSRRKDQDTESKALEMFFSYSLEDRIEPRHRTLVANRINMKLRYMLTGSDEEFAQRVREAVERRARFEAGKAAGLETFSCSSETSSDAEATEAAACQNSTDVVGVLQKQA

SEQ ID NO: 60788 - protein, 241 aa, Zea Mays
MGLGAAMALGDPPADYASIAAVGLFVALMCVGIIVGHLLEENRWMNESITTLFIVLSQDETPFLYSLVFGEGVVNDTTSVVLFNAIQNFDPGNISGAKLLNFISSFLYLFGSSTILGVASGLLSAYTIKKLYFGSPVKSIALSNTILALVLVSRAAFVFPLSFLSNLTKKTPNGKISFRQQVIVWWAGLMRGVVSIALAYNKVLWKCEAFWEVCEAFWEGHHHAQLEVVRDHNSERGGVHG

SEQ ID NO: 60789 - protein, 144 aa, Zea Mays
MTKQFCNRWQACHTQACKMSRPRLVSSSLPRDVSTPPILTGCRHQPAADPRRRVTTHDPLWFQIRPESRAAICTSSPFARLARWRTRCTAPGHSDPGTRRTRTKSSCGSTRCTGTSTRRSTGCNPGSACSKGIYIKCFNNEQNA

SEQ ID NO: 60790 - protein, 249 aa, Zea Mays
MDAGQQDAWDWDWEVLLPDHRSSSSVRHHHGSNNNTLDDQEEAEELDLLLPAPGGDDVVDAHDDECKDIGVVPDDEAKKSSSVAPSAAAGDPTMASSEGAVEAKEPFQSPDDAKATADDGGKFAAQQQEEEEGEDEEEDAGKENDDDDKAARAPQCVVFSVGKLKVNGIGALCSFGVAAATLCVFLVGGRQHHRRQEQREETIQLQFYGDDKVVQQTSRLNQAMSSVMGAGGGASARANISFGGFYDGF

SEQ ID NO: 60791 - protein, 101 aa, Zea Mays
MGGSSGGNSEGKTSRNCYKRLVTNVDKMLAISSIEKKSIFANQGIATSISSMSFKKIRFSSKHDRRFQFNLLLNFCLISWFLMGTCSSIFISLYNFSKSQR

SEQ ID NO: 60792 - protein, 356 aa, Zea Mays
MLMAASAGAANPSQGSNPNPPPLAAPLTDAGSTERRARPQKEKALNCPRCNSTNTKFCYYNNYSLQQPRYFCKTCRRYWTEGGSLRSVPVGGGSRKNKRSSSSSSSSSSSAAAASASTSSSATSSSMASTPGAASKSPELAHEGAHDDLNLAFPHHGGLHAAEFAAFPSLESSNDMCDQGGGMTSNGRGGGAGPAVGALSATELLRSSGCYMPLQMPGGDYTAAGFALGEFRTPLLPPPSSQSPLGFSLDAHGPGSSGAAAAAGYGSSAGLPQGVPGNAGRLLFPFEDLKPPVSPGGGGVGGGGASATGGAGDGNSSHDQFDHNKERGGGGGRGAGAGHDTPGFWSSMIGGSGASW

SEQ ID NO: 60793 - protein, 455 aa, Zea Mays
MKLWEQISGNMVLGAYNQIPEWQLKLGPRDRGPVLVILDDVWSLPQLEELTFRFPGCKTLVVSRFKFPTLVKQTYEMQLLDEAAALSVFCRAAFDQECVPRTADKRLVRQVSAECRGLPLALKVIGASLRDQPPKIWLSAKNRLSRGEAISDSHETKLLERMAASVECLSEKVRDCFLDLGCFPEDKKIPLDVLINIWMEVHDLDEPDAFAILVELSNKNLLTLVNDAQNKAGDLYSSYHDYSVTQHDVLRDLALHMSGRDPLNKRRRLVMPRREETLPKDWQRNKDTPFEAQIVSIHTGEMKGSDWFQMNFPKAEVLILNFASSLYYLPPFIASMQNLKALVLINYGTSSAALDNLSAFTTLNGLRSLWLEKIRLPPLPKTTIPLKNLHKISLVLCELNSSLRSLPRSSSSLKSLGHVVCDEETALLWREAEQVIPDLRVQVAEECYNLDWLAD

SEQ ID NO: 60794 - protein, 268 aa, Zea Mays
MIKNDRVHSSGDIHGQFVDLLRLFDLGGYPPTSTYIFLGDYVDRGKQSLETICLLLAYKLKYPDNIYLLRGNHEDAKINRVYGFYDECKRRFNVRLWKIFCDCFNCLPMAALIDDKILCMHGGLSPELTSLDQIKDIERPTEIPDYGLLCDLLWSDPSHDTEGWGESDRGVSCTFGADKLVEFLEKNDLDLVCRAHQVVEDGYEFFAERRLVTIFSAPNYCGEFDNAGALLSIDESLMCSFQILKPNETGAPHSRKPLPSKAPKGENV

SEQ ID NO: 60795 - protein, 295 aa, Zea Mays
MASSSASSRHQVTITLGRSGQVVKRRTISDDINGDEMPLSGKKRSVRDRLGSNVSDSDFYGSQQRNKRQQTEINSSHGDDGSDRLVGKDDLRLKLMRKGSFQRSNGGAEQNTMDLREKLSRNHKKLPRYDSRGHAAESRASYDMRDEPPELRSRYFSREDVLGSRNSSVVSRVPYSRTADDLLKSNPSRKSYPSWTDDGLRHRSPERILSVRSDVSPPVGYDQIRSMPPLRSAGSSRPQSFITRGAPDTPRSQPYAGKATISVDTVQRTNGITPSSAPLPKVPVMVCICTSSHIP

SEQ ID NO: 60796 - protein, 121 aa, Zea Mays
MRCGVARLPRAPRRWRGKGRTRARARERIAVDGLVSECCCLPLSLCLRSPGAALPLLPCFDLPPFPTVSWISRIQTTALVSLPSCLLPAYVQEGPWVIRVLGFLVLRLSLLLDLPSRSRRR

SEQ ID NO: 60797 - protein, 614 aa, Zea Mays
MLYQMWIFDSNDGGARLLRFRSGHSAPPRCIRFYGNGKCILSAGQDRAFRLFSVIQDQQSRELSQRHVAKRAKKLRVKEEEIKLKPVVTFDCAEIRARDWCNVVTCHMDTPQAYVWRLQNFVIGEHVLTPSSSTVTPIKACVISACGNFTILGTEGGWIEKFNLQSGFSRGSYIDTSLAMQCAHDGEVVGLACDARNGFLISAGYQGDIKAWDFKTCKLKSRLDVGKSVTKIAFHRPNGLLATVAGDMVLILFDTVSMKMVRRFEGHTDRITDLCFSEDGKWLISSSMDGTLRIWDISLARQIDAMHVDVSITSISMSPNMDVLATTHVDQNGVYLWVNQSLFSVSTNTENYASGKHVRNVCLPAVSSTERSEEEQVQNLGESYKSSIKPFVITDHQIPNLVTLSLLPKSQWQSLTNLDIIKVRNKPIEPPKKPEKAPFFLPSVPSLSGEILFEPPASSKDTDISTTKNTNHKMSELSSHFSQQLQFCGETKNYSAFTDYLKGLSPSSLDMELRMLQILDDEESEDLEQRPELQSISSLLDYFIHELSFRNNFEFVQAVLKLFLKIHGETIRRHSMLQSKVKKLLEVQSLVWQKIDKIFQGARCMVTFLSNSQF

SEQ ID NO: 60798 - protein, 281 aa, Zea Mays
MVQSLILRCLQMYMDQKEVVDALSHHSKIEPCITELVWRQLEHQNPLFFKAYYMRLMLKNQIMVFNKLLQDQFEVINKEFSSGIPSMSLPNGSNSNLLKQNPCFLPETAPGSAMPDGIMHNGSSRGIINGTPSGDQLLNASKDLHGLHNGIDASTSLQSDQNAAAVLYGVDNETSATIKTESCYSSNADFAFCGNTFLESCQSIGDASGGGSFSSSELNGQPLNDSILDMESSSFSFLNQMPQSFIFPDLGDDFNQSAEITQFLTPETNFSDSTGGDHTAG

SEQ ID NO: 60799 - protein, 341 aa, Zea Mays
MVMETGDPGKLLRGHSLSRVPPASPFPRLRPQGDLVRAGDERARASGMPGEEDVRKVSREDIQLVQNLIERCLQLYMNQKEVVDTLSFQAKIEPSFTEIVWQRLEEENRDFFKAYYARLMLMNQIVSFNKLLEQQHQIMNKDHHYGMPAMPSTAPNGSNTNMLNQAMPFLPDTIPSTAMQDNLLSNGGSSSIVNGAPSNDQCSYSGKVAHGLPGVMDASSSLLAAHKSTVGQFNGHNGTTTKTESDYSSNSDFGLGNETVFLEQSFGDISGGSFSSSELNGQPVGSSSYGFLSQIPCNFSLSDWTDCFSQSSEIFENYGGSPFIPYDANNIPESSARENTG

SEQ ID NO: 60800 - protein, 685 aa, Zea Mays
MEGATSFLFTEYQYVGIFMAIFAVVIFLFLGSVEGFSTKSQPCTYSKDKYCKPALFTALFSTVSFLLGAITSLVSGFLGMKIATYANARTTLEARKGVGKAFITAFRSGAVMGFLLASSGLVVLYITINVFKLYYGDDWEGLFESITGYGLGGSSMALFGRVGGGIYTKAADVGADLVGKVERNIPEDDPRNPAVIADNVGDNVGDIAGMGSDLFGSYAESSCAALVVASISSFGIDHDFTGMCYPLLVSSVGIIVCLITTLFATDFFEVKAVKEIEPALKKQLIISTVLMTFGIALISWLALPAKFTIYNFGTQKEVSNWGLFFCVSIGLWAGLIIGFVTEYYTSNAYSPVQDVADSCRTGAATNVIFGLALGYKSVIIPIFAIAVSIYVSFSIAAMYGIAVAALGMLSTIATGLAIDAYGPISDNAGGIAEMAGMSHRIRERTDALDAAGNTTAAIGKGFAIGSAALVSLALFGAFVSRAGVKVVDVLSPKVFIGLIVGAMLPYWFSAMTMKSVGSAALKMVEEVRRQFNTIPGLMEGTAKPDYATCVKISTDASIKEMIPPGALVMLTPLIVGTLFGVETLSGVLAGALVSGVQIAISASNTGGAWDNAKKYIEAGASEHARTLGPKGSDCHKAAVIGDTIGDPLKDTSGPSLNILIKLMAVESLVFAPFFATQGGLLFKYL

SEQ ID NO: 60801 - protein, 432 aa, Zea Mays
MTGTNGGMAKEGGDNDSARLCGWTGGVIVAILNRVAILSIPADSFRSCIDSCRQSISCVSVDVRQSQGFMGESDVKEQQPNRLQEELRKEKEKARALDEIQDLQGELEAARDSEKKMLLSLQAQTKQLEQTKVSLEEAKIEIASLRDSRQPFKNFRRRGLMSFSFADPGEAETWSLQRELRLAVESEEKCNKAMDDLAIALTEQTTEAREANVKLSLAQAELNNARTQVETLKASLESTEGKLQLALEEADRLKVESDELAAASKEKERGLVDCIKMFEEDLSKGKEENDKLIESQRVTRDENSRLREMLKHAVGEANVARESLEIARVENSRLNEEMFKKESTLQSINQEYESLKISEAAAQSSIKELKDMIDAMFSSESTKTSAEASPREAKGSKMKETSVAADYVYSDVERSTRLDDIKNPLRTAHYNL

SEQ ID NO: 60802 - protein, 62 aa, Zea Mays
MVINSDEKLSLARERILHWVATVTIPEQWRRTPSGNPVDPAVGIGDDVRPLPLTRTYRNPDV

SEQ ID NO: 60803 - protein, 404 aa, Zea Mays
MYRAKRAALSPKVKRRVGKYELGRTIGEGTFAKVRFAKNTENGEPVAIKILDKEKVKRHRLVEQATNGRLKEDEARKYFQQLINAVDYCHSRGVYHRDLKLENLLLDAAGNLKVSDFGLSALTEQVKADGLLHTTCGTPNYVAPEVIEDGGYDGATADIWSCGVILFVLLAGYLPFEDDNIIALYKKISEAQFSCPSWFSAGAKNMITRILDPNPTTRITISQILEHPWFKKGYKPPVFDEKYQTSLDDVDAAFGDSEDRHVKEETEDQPTSMNAFELISLNQALNLENLFEAKEEYKRETRFTSQCPPKEIITKIEEAAKPLGFDVQKKKYKMRMENPKAGRKGNLNVATEVFQIAPSLHVVELKKAKGDTLEFQKFYRSLSTQLKDVVWKCDGEVDGNSAAA

SEQ ID NO: 60804 - protein, 1361 aa, Zea Mays
MFACSCPPDIREEFSIKSAREVFHMIFPSLRHGSEAYALAATSALGHSHLEVCEIMFGDLALFVEEVSSETEGKPKWKNPRSRREDLRTHVANIHRILAEKVWPGMLSRKPVLCQHFLKFIEETYRQITISLADSFQDLQPLRYALASVLRYLAPEFVDAKAERFDNRIRKKLFDLLLTWSEDSGSSWGQESSSDYRREIERYKSNQHTRSRESFDKLAFDREMAEQLEAINWASMNAIASLLYGPCFDDNARKMSGRVISWINSLFMEPSARAPFGHSPVDPRTPSYSKHTDGRFGGRDKQKTSHLRLLLAKTALKNILQTNLDLFPACIDQCYSPDPQIADGYFSVLAEVYMRQEIPKCEIQRLVSLILYKVVDQTKLIRDSALQMLETLSLREWAEDDTDGVGHYRASVVGNLPDSYQQFQYKLSSKLAKDHPELSEHLCEEIMQRQLDAVDIIAQHQVLTCMAPWIENLNFVRLKESGWSERLLKSLYYVTWKHGDQFPDEIEKLWSTVASNTRNIIPVLNFLITRGIEDCDANPSAEITGAFATYFSVAKRVSLYLARICPQQTIDHLVFELSQRMLEDDEEPVRLGKVDVSANVVLEFSQGPTASQVATVVDSQPHMSPLLVRGSLDGAVRNVSGNLSWRTSAVTGRSVSGPLSPLAHEVSIPNPTAGRSGQLLPALITMSGPLSGVRSSAGNLRSRHVSRDSGDYYFDTPNSTDDILHQGGSGIHGINANELQSALQGHQHLLSRADIALILLAEIAYENDEDFRENLPLLFHVTCVSMDSSEDIVLEHCQDLLVNLLYSLAGRHLELYEIESSERENKHHVVSLIKYIQSKRGSLMWENEDPTLFRIELPSASLLSALVQSMVSAIFFQGDLRETWGSEALKWAMECTSRHLACRSHQIYRALRPSVKSDSCVLLLRCIHRCLGNPVPAVLGFAMEILLTLQVMVENMEPEKVILYPQLFWGCVALMHTDFVHIYCQVLELFCRVIDRLTFRDRTTENVLLSSMPRDEFDINGYASDLHRLESRTTSERLLSVTGTGKVPAFEGVQPLVLKGLMSTVSHGSAIELLSRITIPTCDSIFGSPDTRLLMHITGLLPWLGLQLTREAPPSLGSASPLQEQNQKAYYVSSNISAWCRAKSLDDLAEVFRAYSFGEIMSLEDLFARASPPICAEWFPRHSSLAFGHLLRLLERGPLDYQRVVLLMLKSLLQQTPVDPSQIPQVYNFVSQLVESTLCSEALNVLEALLRSCGGGGQGEEAGFGDNGGHGSGEKVLQSMLLPQSSFKARSGPLQYAAGSGLGSLMGQGGGGSSSAADSGLVARDVALQNTRLLLGRVLDTCALGRKRDHKRLVPFVANVG

SEQ ID NO: 60805 - protein, 1508 aa, Zea Mays
MESAMEKVWESGRRMSRSIGRGMGMEAWGVDDAFVPQHGSRSRGGGGGGGDDDEEALRWAAIERLPTYSRVRTAILSTENAAVVDDDDDKTRRPPPPQQQHFKEVDVRKLGVGERQEFIERVFRVAEEDNQRFLQKLRNRIDRVGIELPTVEVRFERLTVEARCHVGSRALPTLLNTARNVAEAALGLCGVRLGGRQARLTILRDVSGAVRPSRMTLLLGPPSSGKTTLLLALAGKLDPALVVAGGGEVSYNGFRLGEFVPQKTAAYISQTDVHVGEMTVKETLDFSARCQGVGTKYDLMTELARREKGAGIRPEPEVDLFMKATSMEGVENSLQTDYTLRILGLDICADTIVGDQMQRGISGGQKKRVTTGEMIVGPTKVLFMDEISTGLDSSTTFQIVKCLQQIVHLGEATILMSLLQPAPETFDLFDDIILLSEGQIVYQGPREYVLEFFDSCGFCCPERKGTADFLQEVTSRKDQEQYWADKQMPYRYVSVPEFAQRFKRFHVGLQLENHLSLPFDKSRCHQAALVFSKHSVSTTELLKASFDKEWLLIKRNSFVYIFKTIQLIIVALIASTVFLRTHMHTTNLDDGFVYIGALLFTLIVNMFNGFAELSLTITRLPVFYKHRDLLFYPAWVFTVPNVILRIPFSIIESIVWVLVTYYTIGFAPDADRFFKHLLLVFLIQQMAGGLFRATAGLCRSMIIAQTGGALFLLIFFVLGGFVLPKVFIPNWWIWGYWISPLMYGYNALAVNEFYAPRWMNKFVLDQNGVPKRLGIAMLEGANIFVDKNWYWIGAAGLLGFTIFFNVLFTLSLMYLNPLGKPQAVISEETAKEAEGNGHSKGAIRNGSTKPKDGSHNKEMKEMRLSARLSNCSSNGVSRLMSIGSNEAAPTRGMVLPFNPLAMSFDNVNYYVDMPAEMKHQGVQDDRLQLLREVTGSFRPGVLTALMGVSGAGKTTLMDVLAGRKTGGYIEGDIRIAGYPKNQATFARISGYCEQNDIHSPQVTVRESLIYSAFLRLPGKIGDQEITDDIKMQFVDEVMELVELDNLRDALVGLPGITGLSTEQRKRLTIAVELVANPSIIFMDEPTSGLDARAAAIVMRTVRNTVDTGRTVVCTIHQPSIDIFESFDELLLLKRGGQVIYSGKLGRNSQKMVEYFEAIPGVPKIKDKYNPATWMLEVSSVATEVRLKMDFAKYYETSDLYKQNKVLVNQLSQPEPGTSDLYFPTEYSQSTIGQFKACLWKQWLTYWRSPDYNLVRYSFTLLVALLLGSIFWRIGTNMEDATTLGMVIGAMYTAVMFIGINNCSTVQPVVSIERTVFYRERAAGMYSAMPYAIAQVVIEIPYVFVQTTYYTLIVYAMMSFQWTAVKFFWFFFISYFSFLYFTYYGMMAVSISPNHEVASIFAAAFFSLFNLFSGFFIPRPRIPGWWIWYYWICPLAWTVYGLIVTQYGDLEDLISVPGESEQTISYYVTHHFGYHRDFLPVIAPVLVLFAVFFAFLYAVCIKKLNFQQR

SEQ ID NO: 60806 - protein, 74 aa, Zea Mays
MFFALQASKLYHVICTKDWIRAERKDPYNVTSLLDDLSNIIDTVSDDNVDHDGDASDVVDHNVDDNDIVQVEED

SEQ ID NO: 60807 - protein, 251 aa, Zea Mays
MTKLAIIPCTVILETLFFRKKFSRSIQMSLSVLLLGVGVATVTDLQLNAVGSILSLLAIITTCIAQIMTNTIQKKFKVSSTQLLYQSCPYQSLTLFLIGPFLDGFLTNQNVFAFNYTSQVVFFIVLSCLISVSVNFSTFLVIGKTSPVTYQVLGHLKTCLVLAFGYVLLHDPFSWRNILGILIAVVGMVLYSYFCTVETQQKNVEVSPQQVKESEAGPLIADSMSKVENGGGGVDDEPLKVPMWSSKYSRE

SEQ ID NO: 60808 - protein, 597 aa, Zea Mays
MALSASRVQQAEELLQRPAERQLMRSQLAAAARSINWSYALFWSISDTQPGVLTWTDGFYNGEVKTRKISNSVELTSDHLVMQRSDQLRELYEALLSGEGDRRAAPARPAGSLSPEDLGDTEWYYVVSMTYAFRPGQGLPGRSFASDEHVWLCNAHLAGSKAFPRALLAKSILCIPVMGGVLELGTTDTVPEAPDLVSRATAAFWEPQCPTYSEEPSSSPSGRANETGEAAADDGTFAFEELDHNNGMDIEAMTAAGGHGQEEELRLREAEALSDDASLEHITKEIEEFYSLCDEMDLQALPLPLEDGWTVDASNFEVPCSSPQPAPPPVDRATANVAADASRAPVYGSRATSFMAWTRSSQQSSCSDDAAPAAVVPAIEEPQRLLKKVVAGGGAWESCGGATGAAQEMSGTGTKNHVMSERKRREKLNEMFLVLKSLLPSIHRVNKASILAETIAYLKELQRRVQELESSREPASRPSETTTRLITRPSRGNNESVRKEVCAGSKRKSPELGRDDVERPPVLIMDAGTSNVTVTVSDKDVLLEVQCRWEELLMTRVFDAIKSLHLDVLSVQASAPDGFMGLKIRAQLLAPVPSCPG

SEQ ID NO: 60809 - protein, 67 aa, Zea Mays
MLGEKFRLPQWSILPPLATSTFQATQRSSQTRRGPSSLRRGQKRRWRTLPALGSLFRSGDGVWSWLW

SEQ ID NO: 60810 - protein, 260 aa, Zea Mays
MAFGRRSPGSSRHPPALTIVTALLLASLYFAAAAAALSPTDAMHNNNWAVLVCTSRFWFNYRHMANTLSLYRTVKRLGIPDERIILMLADDMACNPRNSYPAQVFNNENHQLNLYGDNVEVDYRGYEVTVENFLRVLTGRHESAVPRSKRLLSDEGSHILLYMTGHGGDEFLKFQDSEELQSHDLADAVKQMKEKHRFKELLIMVDTCQAATLFSQLQSPGVLAIGSSMKGENSYSHHLDSDVFLLWIGLPIIHLLSLRN

SEQ ID NO: 60811 - protein, 715 aa, Zea Mays
MHVLDERMDPFLGRLARPVTIDQSWFTAQGDLSLLNRPASSDTKTSAELNNGLIEFNDATAPSPGLSCHNCSSVASNFKPFATVVSGLHQHFLDANVEVTYAEYLDLMKVEVDQQLNKLIEDIRVLKSYNVAHKCDLNDPCSTLGHVGKLTEIDEGFNSLKLLLVVVFRQIREMLTLVNSSIHDFQWEHELQLEITGFIIGDCVRGLKDELERKLYEQSSIVNSLRKNSQETVAQCASIREDLIAISNMLLPSEEEHHIPLCRHESLGNWSDRWKFSFFRKIPQKDHSLSSSEENQKSATQKSISPSEVISEKSDFRHLKGMTGQEILNYFRSEISKLKMLHELDLQEKTEELFKFKREKWSLALKYDVEFEPLRKRFPEVISRFDQIMSNGMEAPTISTSDAVDERSRLNSRIDSLYCENQHLRNLLAEKTKNVQELSCQISDASKKMSSQYYLEKEHLRQVKNIKEEYEDLYVESTIRDEIYQTVTSKLVDSHRDILEETTQILHAKVSSLEAAHSEKDMALCLSNEENRKLKEKLSILEKVHFIKDNQHDQLLMKQESEEMILRDIEMEPHVPPQRSCQISDQDMQYEELIKLNQTLEMASTTLKEVETKKLDYSDITSERKQEKQLDSILISIMDLSKEFVEMEHKMSEEIKGNEKKTENLNDRCNHMVQQAIVLTKKGLWYKQMLEIRRSELQKAESEVDVLGGKVNALL

SEQ ID NO: 60812 - protein, 129 aa, Zea Mays
MLASPALAGAHSFAASVYGSLLVPSPPVPAPARRAALSVVAKVKVATPQDDRIARHVRLRKKVSGTTERPRLSVFRSNKHLYAQVIDDTKQCTLASASTMHKSLSKEFEYSAGPTIHHWKLGDKLCGKG

SEQ ID NO: 60813 - protein, 281 aa, Zea Mays
MSSVHFFPASSQTPVPACLLKTSPKSPLPCPRTLATTSLQSVGGNCNAWHRPHLRLQRRVRTPAAPSDAPPVGPDGGSGGGGAGGGSGGEDEEEEGEKKKGLLPEWMNLTTEDAKTVLAAVAISLAFRTFVAEPRFIPSLSMFPTFDVGDRIVAEKVTYYFRKPCVNDIIIFKSPPVLQEVGYTDNDVFIKRVVAREGDVVEVHEGKLVVNGEGRNEEFILEPPSYDMNPVQVPENSVFVMGDNRNNSYDSHVCKKHIGEINFSVLASWSNRGYYQGLLQP

SEQ ID NO: 60814 - protein, 339 aa, Zea Mays
MCSPGRSVQSNAQLMAMEGPVFCRPAMQAKLPAAALINNSLTKSGQLGTALFGAISKYRNISRFISPISQTSTKNIGPCCSFSSSSDGNGYMAGNSSESDEDYVNSTVLEAVEVRSGSEGYVIKMRDGKNLRCVHSNFQGRNIPENTPQPAIVLRIEDGSGTLLPIIVLEMPSVLLMAAIRNVHIARPTIYQVVKEMIDKMGYEVKLVRVNKRIQEAYCAELYLTKVNDPTDNITFDLRPSDAINIAVRCKVPVQVHRSLAYSDGIRPVEPARMAVTAGLSDGLLFTELDRPDGQPCVEAQEFGLVRNMLIAAIEERYKDAASWKDKLIRLRSKRENWA

SEQ ID NO: 60815 - protein, 961 aa, Zea Mays
MSQSPGGREGIYYSRQRKPSERNGSVFTPIAAMYPSGHALPDANRNHSLVFGGTSKDWDNIRQFIASLERASENSSAIASKTGGGKSTNHSVEPAEQKGKGDIIVLDSDDEDGDGNSPEHNKLASEMNKELGTSVLASNIAERMATNGSQTFETVHAYGGSKNTQIVPYGQGSALVNQFPLQTSWQPSIQFERVVLTKRPEEQRMQDLVAATIAEKRAETQMFLSLPTERKRRRTDHSLLMLDSFVPKQRRRKGDTGLAPADLSLDLHQTATSQEPDIAIEEEEKRKNDGDGLEDYWKDFALAVESTKLDDVDEAAANEKEDNGKMEDIDCNHDIRIHEDLGHVCRVCGMIVRRADSIIDYQWKKASRRRMNGYGGNSKDADEIDCGTVKLSEDFIVADIAIHPRHAQAMKPHQVEGFNFLVKNLIGDKPGGCILAHAPGSGKTFLLISFIQSFMARYPSARPLVVLPKGILVIWKKEIQRWQVQDIPVYDFYSVKAEKRVEQLQILKSWEDKMGILFLGYKQFSTIVTDDGGSKVTAACRDRLLKVPNLLILDEGHTPRNKETDVLESLSRVETPRKVVLSGTLFQNHVEEVFNILNLVRPKFLRMESSRPIARRIMSQVEIFGRSSKGLADGAFTEAVEGTLLNDENFKRKVHVIRGLRELTRDVLHYYKGAILDELPGLVDFSVFLKLTPKQKDIVHKLEMHDRFKRSAVGSALYIHPCLSGLSEVNAENRAHTLRDDSVDSLMDSINVRDGVKANFFMNILSLANSAGEKVLAFSQYILPMTFFERLLVKKKGWHVGREIFMISGDTSQEDREAAVDRFNSSADAKVLFGSIRACGEGISIVGASRVVILDVHLNPSVTRQAIGRAFRPGQQKKVFVYRLVAADSDEVKVHETAFKKEVIQKLWFEWSEQCTTENFKLGQVDIDDSGDELLDTRAIRQDIKALYRRPGLLRINCYGV

SEQ ID NO: 60816 - protein, 387 aa, Zea Mays
MAAAADSASDQNPKDAERHVLTAESDADFSEEDYDEDGEEEYEEEEELDGPAAAAAERERMQSVLRRLSSDPVGIRVHDVIIKGNTKTQDELIEAEVAELLRAAPTVQDLLRAASVATARLHDLDIFDAVKITLDAGPPELPGTTNVVIEVVEVANPLTGTAGVYSKPEARSWSLEGSLKLKNLFGYGDIWDASGSFGWDQTTEVGVGVCLPRFKSIPTPLMARASLSSQDWLKFSSYKERLLGLSFGLLSTRNHDLSYNLAWRTLTDPSRVSSKAIRRQLGHNLLSALKYTYKIDKRDSHLRPTKGYAFQSTSQVGGLWNSKGLRYFRQEFDVRGAVPLGFYSAALNVGVGAGVILPLAGGFMNSTSSVPERFYLGGNSSPVCSLG

SEQ ID NO: 60817 - protein, 92 aa, Zea Mays
MGWPPSSGWGDRRRNVSAAALLFLHLLLLFSAPASRSSTTRRPGAASAATSSSCPDRSNGNDNGDGDGGATSPCCAHAGTGALVHLSLTGSI

SEQ ID NO: 60818 - protein, 435 aa, Zea Mays
MQTRKKGAAKNAVGYHANPKTSRPSRRATQSTVAEKKVSDLITSSSKKQRPVGVTSKKHSKGGRKLLVSCDTTDAGNDAPQAQHSDGVADDRPNDSIFSPTYHHHKEGGVNNLSKGLEEQTTHVHGSKEASLKSGSNLACNTHDGINDHSGTLKLQSAGQSTLLEVDEYSELGNLSSEVSAIYLAMQQSKLECIDEQSQDSTSTEGYGEAEETEEYDDFDPYSFIKDLPDLSMVVPKFRPVLLPKQTRSCPTMTLVLDLDETLVHSTLEHCEDADFTFPVHFNFREHTIYVRCRPYLKEFLDRVASVFETIIFTASQSIYAEQLLNVLDPKRKLFRHRVYRESCVYVEGNYMKDLTVLGRDLTRVMIVDNSPQAFGFQLDNGIPIESWFDDPNDMELLKLLPFLESLVGVEDVRPYIARKFNLREKVFFRCQRSP

SEQ ID NO: 60819 - protein, 883 aa, Zea Mays
MELLLRRGHVDPSAFAAASLSSKHANAVRTACLRFGRQRPELIRHISRCDIQVALRCGCPSIDRKVVNSGKRLRAYVGLVEGELAKKLHPDTNKGDADAEPKFQEVQRAYEFFRNIFRDRDFGSHDIKVALELSFMEAVQGCSKTINFQTSVTCETCNGAGVPPGTKPETCLACRGSGFMFMQTGPFRMQSTCTKCGGSGKTVKDFCRFLGRASPGRPVMCSQWLPASPSSRRSVAQRLRCWRPKMMARRDVQLLVARGISSSPRLSRRINQTESEIVRMFHPPIRKSEEAIATIAPRYTHSVRVLDERFIRILKIFKWGPDAEKALEVLMLRVDHWLVREVMKTDVGVNVKMQFFRWAAKRRNYEHDTSTYMALIHCLEVVEQYGEMWKMIQEMVRNPICVVTPTELSDVVRMLGNAKMVRQAITIFYQIKTRKCQPIAQAYNSMIIMLMHEGQYEKVHQLYNEMSTEGHCFPDTVTYSALISAFCKLGRRDSAIQLLNEMKEIGMQPTTKIYTMLIALFFKFNDAHGALSLFEEMRHQYCRPDVFTYTELIRGLGKAGRIDEAYHFFCEMQREGCRPDTVFMNNMINFLGKAGRLDDAMKLFQEMETLRCIPSVVTYNTIIKALFESKSRASEVPSWFERMKESGISPSSFTYSILIDGFCKTNRMEKAMMLLEEMDEKGFPPCPAAYCSLIDALGKAKRYDLACELFQELKENCGSSSARVYAVMIKHLGKAGRLDDAINMFDEMNKLGCAPDVYAYNALMSGLARTGMLDEALSTMRRMQEHGCIPDINSYNIILNGLAKTGGPHRAMEMLSNMKQSTVRPDVVSYNTVLGALSHAGMFEEASKLMKEMNTLGFEYDLITYSSILEAIGKVDHEYTDQG

SEQ ID NO: 60820 - protein, 228 aa, Zea Mays
MQPLHEIKNPSSEGRKAIDSGIEDCVKKPMHHRLQYKPVDQENAASNDQKSTEFNEPTAEGTSAGVKRKLTTPSSPVKKQKPLGQWSCTICQANPASQRQLEQHLAGKRHQSNVAALQPSQSNSSSPEPDTKATPARSRIIATNAQQDGKQDVPENRWTCTLCRAKCYTELNYYSHLGGLWHREKAQARREEHLRFYCSVCDLQCNSEKMLESHLGGRRHRETLEARD

SEQ ID NO: 60821 - protein, 532 aa, Zea Mays
MAAASTPARSSAHLSQPVRVVLRVRPFLSSEAASATAPCVSLLGCHPGGGVTVQLKDQHTSRSEQYKLDAFFRQEDSVSQIFDQEVRAVIPSIFEGINATVFAYGATGSGKTYTMQGTEDFPGLIPLAASTILALCTGTWCSVEISYYEVYMERCYDLLEPKAKEIMALDDKDGNMQLKGLSWVPVRSMEEFQELYSIGVQRRKVAHTGLNDVSSRSHAVLSLRVSSTDVVKGKLNLIDLAGSEDNKRTLNEGIRLQESSKINQSLFALSNVISALNKNEHRIPYRQSKLTRLLRDSLGGGCRTVMIACLNPAEYQESANTVSLAARSCHIENFTSSSKQETPKLKIDMEAKLRAWLESKGKTKSIQRMDGLFSPIASKTPLSVSHMKQPTSSRIPCRVKAMDQDGGKIKKILFDPVVHVPTENIPREHRQTEVNTPKKVVLPSVTPCNEKHEASLRKALSPISSNMVPVEQQIPDNGNCPVLLEPQTPIEKRNIVEETPGATPLERFNALGSNLKEALVQQYLDLLNVANK

SEQ ID NO: 60822 - protein, 962 aa, Zea Mays
MELALGAMASLAPKLGDLLMEEYVVQKGLKPDIESLSRELVMMNAALVDASRVPPDQLTEKTLATVKDVMSMKKFKDRRQISDKVKDIKKLSNELAELRAKYTVRGVGADLAASTGIDPRVINLYKKETDLVGIEESRDKVIRMLSMGTKDDDAHESHQDLKIVSIVGVGGLGKTTLAKTVHDMLKKQFDCSAFISIGRTPNLNRTFEKMLLELDREHKQVDMARWDLEQFKNELDEFLKDKRYLIVVDDIWDVDSWEAIRYVLKDNNCGSRIIMTTRNSGVVTKVEEVYRLKPLSTENSEKLFYKRIESQEGESLDGELSSKIIHKCGGIPLAIIAIASLLVERSREEWPEVYDKIGLGNEDNTTKIMLYSYYDLPPYLKPCLLQLSIFPEDCFIDTKAVIWMWIGEGLVHLEKEEGSLFEVGERYFKELVNRSMIQPIEEKYHWFVERFCIHDIMFDLICKLSKDEDFITLSGQHSSQSLQSLFNLRSDCKLRRLAVRNQRVQRFPEETMDMPEVLRSLSIIDCNIEVMAPIDSFRVCRVLHIENNYVPISLKHLGKLLHLKFLEIFDTTIDELPREIGHLRSLQTLVLVSTGLDELPVAVCSLTRLMCLIAYGFERLPADRIGNLTSLEELQLHRVVGRSATQDLVAELGKLTRLRVVRITFSEQLEESSQEALVQSLSNLRLLQELVLFSEMPERGSDMWGDWELPRQLRRLIIEGIVFSRQPRWINRSCLPRLYSLYLMVHAVEAQDLDNLARLPELQYLMLFGFSWPPRYTVGPDDFRNLRFCEVGTTFEFRKGAMPRLEVLRFGVCVPFEQFPTKDVIEDLDFDLDNVILLQQVRVKVNCAGATVTQVEEVEAVVMRAVENHANRPTIKMDRVYEQNILSDEEREALLRRYRHLQKAIIFIDCSGASMCEVQKVEAAYRHAAEVHPNHPSIELIRTNTDGMASSSSDHPNTEPRN

SEQ ID NO: 60823 - protein, 660 aa, Zea Mays
MSEEYNMDVALKAKNVAETKFHARDIRGARKYALKAQNLCPTLEGILQMVSTLEVHLAAESKIDGESDWYRILCLGAFADEEEVRKQYRKLALLLHPDKNKSVGAEEAFKLISEAWSVLSDTSRKVVYDEKRRNHSVVNVTNGIYTYDKKANKRARKNAAAAAAAAAAAAAAEATTRPVGIDTFWTSCNRCRMQYEYLRIYLNHNLLCPNCHNAFLAVETGFPCNGSSSSFSWSTKQQPQQNHNSTKHSYGSTSRTSSIPGTGNGGYQQDNTYDSYNNQGFQWNQYSKTTTAAVTNAYSTQALEKQRRKHDESYSYNYSESGNTYVHEKAASRRGRFSKRRRHNYDAYTTVDYGGDNKETVAATASTEPTAVFTDVGRVNGTSVERFKSAVSGRRANILGEITQIDTRNLLLEKAKATVCEKLHELNITPSSRAADRRGSEGKLYPCDNNIKVNGVLSDKPGKGVKLCNSRSMEIQVPATDDKNPEQRRVPVSIDVPDPDFHDFDKDRTEKAFDTDQVWATYDCEDGMPRLYVMVQKVLSTRPFRIRMSFLNSKSNIELAPINWVASGFQKTCGDFRVGRYQVAGFKAVFHRHVDPEEVRRIPKEELFRFSHRVPSRLLTGEEGSNAPKGCHELDPAATPVDLLKVITEHKEDAVAQSPK

SEQ ID NO: 60824 - protein, 142 aa, Zea Mays
MSSHAVGTSNGGSGDAAAGGAARRNTRMPKYSKFTQQELPACKPILTPKWVVSVFLIVGVIFVPIGVVSLLAARDVVEIIDRYDEACVPVNMTENKLAYIQNETISKECIRNLTVTKYMKQPIFVYYELDNFYQNHRRYGVF

SEQ ID NO: 60825 - protein, 464 aa, Zea Mays
MTSYTKKMVCHVPTQMQRRFSLKQDASHQAELALWYILSRRGVKREGNFLKKDDPKVATLLQQSDFLCSLATKIKSDNTSKSMDEAWQQLQDHLVKKEHNKVPENSGSEIASLLEELDDLIVDPYERKDEDEQKLSEHNGRTDVDNDHCNGSSQTSIVVTTNMVPEEMMGDCPVDNCNEDSSLCRKVLSGSTEPCPGAKMTGCGNLSEDQVAEGSVLQRVESISPVITDIDDLLVDPYESEAEDEEKSGEQNGQIDVHAEQCFGSSQTIIEVISDMAPDEVMETCSADNREEHSSICRNVLSGSMAPCPGAEIPTSEKMSELAEDSRLQCMEFASPVLANFASKECGETPEPQVLNEIVEDSRLQCIEFNSPAHTILPDKTGAENFASPSFDVVAKDSKPPSLEFTSPAHTVATFQPYADGIPTPKFTASERSFLLSVLELTSPGSRPETSQQPSCKRALLNSL

SEQ ID NO: 60826 - protein, 390 aa, Zea Mays
MGRPTVAASSFISSFPAGPRRPLLSSLVPTRRHGRWRRRTPRSPRPRRPRLPRITKLLEDEVEQDEAFWNQEALKDEENDDNYVEEPDAGDEFDSDFGEDESETDDEPEKEVRERLPIKKRLMFPGKTLRKTNVKKKKATPKPEDGTKADKSADKPSSSTQADLPDELEAEKAIRKSTRTSVIVRQAEREAIRAEKEATAKPIKRKKEGEEKRMTQEEMLLEAAETEIMNMRNLERVLAREEEVKKKAVVHKDTYEGPTIRFFSRDGESRLEFINGASFGSELCTTSSPYPEKPVCVVTGLPAKYRDPKTGLPYATMEAFKIIRESFLKEEADRKRPNMSNMGELFESITGGHLMPKKRRVEIRSPNMLGGSRHGGRTWRIPAFDMVDED

SEQ ID NO: 60827 - protein, 497 aa, Zea Mays
MTGPGEELAELLWDRGPALRRAPPPFQPFTCSAAGSSRSQELKRHASDTTKASAFVTAVSVPLGTHDAGSGLGLAGLPVHDDDDAVPWLHCPVADDGDGDTAPLPPEFCAGLLSEYSEVAAPAPAFHAAATPPAEAAANKLAPPSAAGGGEGVLNFTFFSRPLQRPQAAAAPAAAAASNPVESTVVQAAANRLRSTPLFSEQRMAWLQPPKAPRTTAAAAAPPPPPLAPLLPDSRHGETVGTVAQPQPRSQPEARPPDAAAVTTSSVCSGNGGRSQLKRSRHLAADCSVSPDEDLDDEPGATRRSAARSAKRCRTAEVHNLSERRRRDRINEKMRALQELIPNCNKVDKSSMLEEAIEYLKTLQLQVQMMSMGTGLCMPPAAMLLPAMQQQLLHHHPMAHFPHLGMGLGFGMGAAAGFDMLPFPCVAAGAHFPCPPGAMFGVPGQAMPSLPAAFAHMYGAGSGAGPAGQTEAADAAAPARPGEAEQGDQQVQHAKQT

SEQ ID NO: 60828 - protein, 276 aa, Zea Mays
MIKRRKPPSAVAPLRQQRAPASCLEVGEFGFEEEIDRLKRDKNILITEVVKLRQEQQSTKDHVRAMEERLRVAEQKQVQMMGFLARAMRNPEFFQQLAQQQDKRKELEDTISKKRRRPIDNTPFYSDGESEQLDSQLKMFESGVLNGLNEPELENLAVNIQELGKGSIDDGNLTQVSDQSELNDDFWAELLVEDFGDKAGQPELEGRTEDVNDLAQQLGNDDGSGRQVDWWWRGVHTEGVLWRGHCLDVEGLALYSAVGVTCGVLAKCLFRRLLAK

SEQ ID NO: 60829 - protein, 504 aa, Zea Mays
MAEDARGEKKDAYAAAPASKLPAKQRGGFRSMPFILANDFCDRLASVGFTTNLISYLTLQLHLPLVEASNIITNYNGTANLTPLIGGLIADSFAGRFWTITFGSIIYQLGMVCLTLSAALPSLHPPSCAKHAADCQRASSYQISVLYLSLLCTSIGTGGTRPCTMAFGADQLELNAHRHRGAKPKWSFFNLYFFAVELAKLAAVTAVVYIQDNVGWSWGIGVPTVAMVAAVIAFVSGYSLYIRMPPGGSPLVRLAQVATAAYKKRKAVVPDPSLLYEDKELDAGISTTGRLLHTDQLKCLDKAAIVTDGDVLPSGQPKLWRLSTVHRIEELKSIIRMLPICAAGIILVTSASHNHSFAIQQARTMDRDITPHFKIPPASMLIFTNFAHGRGTDDRHAVQRGGRGRRAETQVRCRCEWAARRSQGHPADERLLAGAAVRHPWHRQRLHGRRPHGVPVRPGTREHAELSDGALLADLLDRELPRHAAGDHRARQDEANRAMAPGQP

SEQ ID NO: 60830 - protein, 399 aa, Zea Mays
MEDRKFYKIRDIFGIIKGQEEPDRYVILGNHRDAWTYGAVDPNSGTAALLDIARRLGIMLQSGWKPRRSIILCSWDGEEFGMIGSTEWVEDNLEDLHSKAVAYLNVDCAVQGVGFFAGSTPQLDKLLVDITRQVRDPDVTGKMVHDTWNEMSGGIKIERLARTDSDFAPFLHHAGIPSVDLYYGEEFPGYHTALDTYNWMEKHGDPFFLRHLAITEIWGLLALRLANDPVLPFDYQAYTSQLQEHIKTLSALTSNGHAVNLMNGCVNDLSGAAMEVLKEMKKLQQMDLYDEHARMRRRLLNDRLLLAERSFLQPEGLQGRGWFKHLLYSPPEDYESKLSFFPGIADAISRSANLSDKEQEVAMQHEVWKVCRAIQRAASVLRGEFSEQKPTNFSSLVTP

SEQ ID NO: 60831 - protein, 585 aa, Zea Mays
MDSGIWASVWSFIKFLPFFFALLLLGIIKGALFGPWAWLVMTIGISALILGLWPMHVIWTYYCIIRTKMVGPVVKLLLLIVATAVLVIWLIIGVVGSILAGLAYGFLAPVMATFDAIGEGKENPLVHCFLDGTWSTITGSCTVVRDMKDMLVHSYFSIMDEVRLHAPPDGKPYEIRLLQIPGAIFAAACGLVVDAIMFTLIALYKFPVMLFKGWKRLIEDLIGREGPFLETACMPFAGLAILLWPFAVIGAFIASVICSVPFGVYAAVVVYQESSLFLGLSYAISSVSIFDEYTNDVLDMAPGSCFPRFKYRTNEASSHGGSLSRPASFKDKHDGKKAPQRVTSFKSSFDEFNPFKLLDHLFIECKHHGKDLVAEGVITPKDIEGTKAGKASTGVLNVGLPAYVILKALLRSAKANSDGLVLSNGSEITSDNRPTSKIFEWFFDPLMVIKDQIKAENFTEEEEAYLEKQVLLISDPKRIKENLIRLPPLSERKQAEIEAFARRLQGITKSISRYPTSKRRFDALVKALSEELARTMGGNQSANGSQVRKIRSGIVRMLSQRSLGKTTGIPGDDHEAQLTSDGFTS

SEQ ID NO: 60832 - protein, 206 aa, Zea Mays
MANADQVLLAGCSSGGLAVILHCDQLRAFFPSGSTVVKCISDGGLYLDAVDVSGGRSLRSYFGDIVAMQGIAQNLPPACTARLDATSIVLSLAPDRADPSGAWRACKSNRTACSASQMSFLQDFRDQMVASVKGFSGSRSNGVFLSSCFAHCQSEQLGTWNTKPGGSPTIQNKGISKSVGDWYFDRAEVKAVDCRYPCDNTCHHII

SEQ ID NO: 60833 - protein, 684 aa, Zea Mays
MLGPTVLVLAPTRELASQIQAEVVKFGQSSRVSCTCLYGGTSKVPQLRELERGADIVVATPGRLNDILEMKRINLHQVSLLVLDEADRMLDMGFEPQIRKIVDELPNARQTLMYTATWPKEVTKIAGDLLRDPVQVNIGSIDELVANKSITQYVEVVPPMDKQRRLEQILGDQERGSKIIIFCSTKKMCDQLARGIGRNFNAVSIHGDKSQAERDNVLNQFRTGRASVLVATDVAARGLDIKDIRVVINYDFPTGIEDYVHRIGRTGRAGATGVSYTFFSEQDWKYACDLVKLLQGANQLVPPQLQDMAARSASGGPRNQASGMSRWDGPGGRGFEPGVGGPVGYGGVREGPGGFGGREGPGGLGVRESPAMFGGPGGFGDREGPGGFSGHEGHGGFGGREREGPGGFVGRKGPGGFGGRDGPGSSGFGGRGQRGSGGFGSRGGASPGGFGGRGGRGDSPGFGGRGRGDFSGFGGRGRGDFSGGRGGRGRGFGGRGRSDRFVSDGRGRYDNRRGFGDKGRDRSYSRSPDRVRARGYDRRSDSRSISRSRSRSRSWSRSRSRSRSWSRSSSRSHSRSRSRDHGAAPERRPRARSGFDVLPPATGAAGPAPVPVPGPAAPPVPAPAPEQSLANTSSMSPMSPGGLVQPAAAPAGGQPSQGTGAAFPSSPAGETFPGAAAQHPAPDV

SEQ ID NO: 60834 - protein, 199 aa, Zea Mays
MGASNLTYPNFISKAETADETSDVPDKPSAVTPQQHDSSFPQAGKKQKGFAATTLNQCSNEDLKKGFALKVEPLNAFIPFEQQMMDLSHRKQENAACDDSCSLSKLMLKEDIEAAPSLPTGIQVQNGSKNRRRRQPNVQKTTATPTRSPARGQRRKNNDAMVKSEMGLIEQSKLVLTEQEPELGDVPVKRPVGRPRKAR

SEQ ID NO: 60835 - protein, 447 aa, Zea Mays
MMSPASERSLIIQSDDDDDARSGHDVEEPEQDSDSSSSSSSCATPRRGPSSPPYIQQWPQSYRQSIDILSSVQSPNLSFLGTPTLSRLSNSFLAITDSFRSKAPETISSFIKPLLGPTPSDEQQRQHEGTRKSSEYLVPSRRSSLQQIPEDQKPPVGGHGASHDQNCSYTQGVMNGINVLCGVGILSTPYAIKQGGWIGLAILCTFALLAWYTGVLLRHCLDSKEGLKTYPDIGHAAFGSTGRIVISIILYVELYACCIEYLILEGDNLSKLFPNAHLTIGSMTLNSHVFFAILTTIIVMPTTWLRDLSWLSYISAGGVIASILVVICLFLVGVVNDFGFENEGTALNAPGIPIAIGLYGYCYSGHGVFPNIYSSLKNRNQFPSILFTCIGLSTFLYAGAAVMGYKMFGEATESQFTLNLPDNSVISKIAVWTTVANPITKYPWCAN

SEQ ID NO: 60836 - protein, 559 aa, Zea Mays
MSFTGSAPVVRIISLEFRRGRARRMVSKMRFRNALGSRPFQCCSRENHTYVRKLLDRVSERSKLLKKVSVLVGYSNPQDLVEKQRAPGESSAELISALKEIDFPEITAKFPCIKVGDASPVELYEDSTNMKFKEAALSEKLTNFIQGSARNLESAYEFHNDCHPLNQTPTTAGDLSISEEIPLIEPIVDTKSPESLSDAITSDNSILDKSIRCLPGTTSRQYRQLEDGGFHTVRKLLQHFPRTYADLQNPQGPIEYGQYIMLSGTVISSRGIKVKSTLGLLEVVVGCSIIESELSSSVESSHSGAEQKRIHLHLNRFFSGARFSSQHFLNLMSAKHKEGDLVYVSGKIKKVLANGHYELKEYTIDAIEGEGEHSTMLARKPHPIYPSKAGLKPSLLGLSISRALKILSPDVDPVPPDVLVEFNLPNLFDAYMGIHKPKDRSEADFARRRLIFDDFFYLQLGRLFQMLEAVGTRVEKEELLYKCKSHELNTVGVDDWSPLTKKLLRALPYWLTPSQLDAVQEIIWDLRRPVPMNRLLQHRSEFFVMFEALSTLHLGLMIC

SEQ ID NO: 60837 - protein, 406 aa, Zea Mays
MDVHGGGTGAGKLTRTPSSLLRSPTVRNCSSFQAVVVEDPEPDDKKAQAHPKPPPHHFHPGGGSNHPLLVLVLPLAFLPLLLLLRGGDGRHLALLAASAAAALAAAAGAARLLRGRLRRSPGSGSVQWFIGDDDDKPQKRADKAAAAPHGRVVREGVEFYSNGDCYEGEFHKGNCNGSGVYNFFGKGKYEGDWVDGKYDGYGVESWARGSRYRGQYRQGLRHGHGVYRFYSGDCYAGEWAGGQSHGIGAQTCSDGSSYVGEFKCGVKHGLGSYHFRNGDRYAGEYFGDKIHGFGVYSFANGHCYEGSWHEGKKQGFGMYTFRNGDKRSGDWDSGTLKTPLPPADPSVQRAVQAAQRAAENAFRLPRVDEQVHRAVMAANRAATAARVAAIKAVQNRMDGKFCETYV

SEQ ID NO: 60838 - protein, 629 aa, Zea Mays
MAPEYLDDGVITMKTDIYSLGVIIRHMVKGRNSADTTDEEVLANWLIRLEKDPSQMMRQQTTRLLFETEYKEQIKACMDISWRCTLRKPMDRPTTQHILLTLEETEAKIKSVVGPTPPNAGQLQIAKFGPWGGDGGKTRDIRMTPCHLHSVTISSGTIIDSIGFSFTDHYGQHHTTGPWGGKEGTNKIELGPSEFLTGVSGTSGPFKNLTNVVTSLTFVTNTRSYGPFGKGRGTPFHIQTQNNGRIVGFFGRSGQYLYAIGVYTNQDARVARIGRPLGGDEGVLHGITDLSGQQRSRGGGPSGECGDSDDEPNGDFAKFGPWGGDGGQPQDIGTLPCRLDRIKISSGLIIDSIEFSYAGPDSQYRTAGPWGGHGGDNSSFQLAGSEFLTGVSGSIGTFNGHANVITSLTFVTNARSYGPFGRGRGTSFHIPVQGNGCIVGFFGRSGRYLNAIGVYTAPKPEPKAVGKQDGGDEAVVARIGPWGGVGNALHDIAERPHRLHRVTIFSGTIVNSLEYLYSDGDGQQHTTGPWGGCGGTGRKIHLAPEEFIVEVTGTFHPCAWDRTIPSVVSSLTLVTSTGKTHGPFGTQLGAAFQVPVQSDSRIVGFFAHGDNYIEAIGAYVKKLTESSNR

SEQ ID NO: 60839 - protein, 373 aa, Zea Mays
MGRDISQLLFNYYKIINFGEDNGSHLTSSKNTNSGEAEVLGSTCRSEESLYFRGPGQRKIKPARVGGFIYDGNEVDLDASKDADFSMEPCSKSKKKSLKKTVKPRDEVVAVNGRNSTGNVKASLSSNEQNKSLPLITAKQYACRAAHLSSLVVSWSPVVSLSDRTSCLLRHWCILAVGSKSGNISFWKLYKPEYYTIDAGVVTSDPMLIGVLHAHESWVNAITWQVLSAGSSKSSLLLATGCSDGSVKIWLGNIEGLNQCAIGEEVPFVLVAEVAANLSAPVSSISLGIPARSQHEVSLAIGRVSGLLEIWIWNASTNKIESSSAWHAHDQVVYDGLSMAIVYSAAVRTILHVVGYLTKTTLKNFFCIQNFQS

SEQ ID NO: 60840 - protein, 350 aa, Zea Mays
MTEDIISNIDPTFVFSALVVATSGAGYVLGSGNIVDIAGLCCTCAGTMMVAASANTLNQVFEIKNDAKMKRTMRRPLPSGRISPAHAAMWATSVGVAGTALLAWKANGLAAGLAASNLVLYAFVYTPLKQIHPVNTWVGAIVGAIPPLLGWAAASTELSLNAMILPAALYYWQIPHFMALAYLCRNDYLAGGYRMFSFADPTGKRTAWVSLRNCLYMLPLGLFAYNWGLTSEWFSFEASLLTLGLTIGSLSFVLKPSPKTARRMFYGSLLYLPAFMAGLLLHRLPNEQKAHNLAEKSELDGVLYGADLQDKERATQKRQDRNPSSMQSRPPVAYASVAPFPFLPVPIYDS

SEQ ID NO: 60841 - protein, 103 aa, Zea Mays
MTEYWVSQGNKWCDFCKIYIANNSFSIRTHELGKRHKDNVTKRLSTMQKESETKEKEQQQAARALQQIEAKAKKSYQKDLENNQRNVDGDTSAAPGDGCVWLY

SEQ ID NO: 60842 - protein, 215 aa, Zea Mays
MAIAGALLLLLGLLAREAAAGGWQSAHATFYGGGDASGTMGGACGYGNLYSTGYGTSTAALSTALFNDGAACGSCYELRCDNDGRWCLPGTITVTATNFCPPNYGLPSDDGGWCNPPRPHFDMAEPAFLRIAQYRAGIVPVAFRRYFSCSSHAVLPATRRWSRTLHCTAHVTHARRPPAATTARTTTTYVLARSIRFQNDPNASDVGSKVGGPGA

SEQ ID NO: 60843 - protein, 203 aa, Zea Mays
MEWNTAVYHHNHQSTECVRGCFSLPLLPPDAAGDPQLELLPAAAREEERHVPVDDEPVEAVPHLPVAVPDAPRRALPRQLPPAPAHLQAVPEPLRLALLAHEPQERHVHRRHPQHERLEVQAEVLPETLENLHVSNTSHKCVITFRKKQDVSEVSLLVRKIAMQVTLVKCIYLPYRYNPDQITSKIPHVSKPKHEQNSSFYLQ

SEQ ID NO: 60844 - protein, 139 aa, Zea Mays
MFLVLILTRLSLELAQENAADLELDIDLVWSDIKNLNLKGVHVDTVVMNPPFGTRRNGADMEFLSMALQVASQAVYSLHKTSTREHIKKAALRGFNAISAEVLCELRYNLPRTYKLHKKKEIDIAVDLWRFVPNAQRRS

SEQ ID NO: 60845 - protein, 276 aa, Zea Mays
MGKYMRKRKRNVGRTTPAAEHGVRTRAQSDAVASTASAAAAAAPKRPRKQTTAAVTGNTSGAAAPGSCYLHLRTRRLQFLPGGEGEVQRPVPPLPAAAAQRSSSVASGEPVEGAGSSRCSSTASSSVDVVVLAVAPASERGGGEAEEARNDDDDYCGDVESVVSDSAECCRRDRRRETTPSSQARVDRPCSDEECSQAADGPTRHRRRRKALAATATAAVACRARATPPAEEIEQFFAAAEKAQAERFAAKYNFDVARGLPLGAGRYEWTPVASGW

SEQ ID NO: 60846 - protein, 782 aa, Zea Mays
MLRSRCVRLPEPMPEPQSSVASSGSVDRLRNAFGGVLCIFTLLLIGVLAFSIRLFSVIKYESVIHEFDPYFNYRVTQFLSKNGIYEFWNWFDDRTWYPLGRVIGGTVYPGLTLTAGTIWWLLNSLNIPLSVETVCVFTAPVFSVNASWATYLLTKETKGPGAGLMAATILAMVPSYISRSVAGSYDNEAVAIFALIFTFYLYVKTLNTGSLFYAALNSLSYFYMVCSWGGYTFIINLIPMHVLLCIVTGRYSSRLYIAYAPLVVLGTLLAASVPVVGFNAVMTSEHFASFLVFIILHVVALVYYIKGLLTPRLFKVAMTFVITVGLAVCFAAAAILIALIASSPTKGWSGRSLSLLDPTYASKYIPIIASVSEHQPPTWPSYFMDINVLAFLVPAGIVSCFLPLSDASSFLVLYLVTSVYFSGVMVRLMLVLAPAACILSGIALSEAFGVLTRSMKFQRPTLDDGSFTAGDGSSDTPTNSEMGLKEKTSKKNRKKDKESEGSSPVDHRTEEKLLVLPCGPSAVGIMLLTILSGFYVIHCVWAAAEAYSAPSIVLTSRSHDGFHVFDDFREAYGWLRHNTDADDKVASWWDYGYQTTAMANRTVIVDNNTWNNTHIATVGTAMASPEKVAWEIFNSLDVKYVLVIFGGLIGYPSDDINKFLWMVRIGGGVFPQIKEADYLKDGNYRVDAHSTPTMLNSLMYKLCYYRFVETDGKGFDRVRRYEIGKKHFKLTHFEEVFTTHHWLVRIYKLKPQKNRVRGKLKFKSSLKASFMRKTGGKKSPWK

SEQ ID NO: 60847 - protein, 418 aa, Zea Mays
MPLTFSIFWIKVAISRGLNGIGLALVIPAVQSLVADSTDDDNRGTAFGWLQLTSSIGSVFGGFFALLLAQTTVLGIEGWRIAFHLVAIVSVIVGTLVWFFAVDPHFPTNDAAPPSSKKSALDEARELIMEARSIVQIPTFQVFVAQGVSGSFPWSALSFLSMWLELVGFSHEDTAVLTTTFAVATSVGGLLGGKMGDSLARRYPNAGRIVLSQISAGSAVPLAAVLLLGLPDNPSTSSGVAHGLVLFVMGLIISWNGAATNCPIFAEIVPEKQRTSIYALDRTFESILASFAPPVVGLLSQQVYGFKQDDGRGSSPGQDRENAASLAKALYTAISIPMVICTSIYTFMYRTYPRDRERARMQSVIQSELDQIELLGGPSLGGGGDGDGDKPDEVDGSYGSERSAEADAGTEKLLGRKP

SEQ ID NO: 60848 - protein, 260 aa, Zea Mays
MAAQGSLVMWRAVFAALGLLMVATLVYTLATDGSPFRLELFTPWMVATLADFYVNVIAISAWVIYKEANWVSSAVWVVLLFCFGSAVTCAYIVKKLLEVTSAGSSQDPLDLLFIRQGNLSQRKCSYVVIGRVIFSILGIFMAAVVTYTVITDGLPFRKELLTPWMAATLIDFYINVFAISVWVAHKESSWISTTIWIVLLICFGSITTCGYIVIQLFKVSYQDPIYHVLLNSHSKRSSDGLILNDGLEVSSSVSAFSWAD

SEQ ID NO: 60849 - protein, 479 aa, Zea Mays
MDHFLFCSAFGSVFDKFVLLPADGTRGGLIIAWKTSIIQALGSRVDIFSASVHFVEEQGRNWRFTGVYGPQNDGDKISFLQELRDVRTMCPGPWVIAGDFNRIYQAADKSNSNLNRAMMGRFRRVLDDLELKEIPKFTWSNERENPTLVRLDRAFCTTDWEEVFPDAVLQSATAGVSDHCPLILGLKVRNTGKQRLHFESFWSKLDGFHESVQQNWEDPVSSSCLVEILFLKLKRLSRGLQKWSHRKVGNVKLQLSMAKEVLHRLEIVRDSRSLSQGEDWLRRKLKMHCLGLTSLEHTIARLHSRVLFLQEGDANTNFFHQHTRFRKKKNFIAKLQVEDRIYVTQEEKQEVVDDFYEHLRSSGDLRNYSFNLADFHPLFQQDLSHLDAPFTAEEVWASVKDLPMDKAPGPDGFTGRFYKTCWGIIGSDILAALNAIYKGHVFKLQLLNSAYVSLLLKKTDASSVKDFRPISLIIALKSW

SEQ ID NO: 60850 - protein, 505 aa, Zea Mays
MFTGEIPIGHKSAFEALVEMRTQLGDKRGVLSDWKDNQMSPCYWANVNCQDNKVTTIILSSSGLTGSLSPSIAKLTTLQQLILDNNNITGGIPPEFGNLSGLTILNLGRNNLNGSIPDSLGQLSKLQNLDLSHNYLTGNIPSSFSNLLSLSDINLAYNNIRGAIPQHLLQVAQYNYAGNHLNCGQNLSACERGSTLTGGSKNFKLNVVIGSIAGAVTFSVTVVLVLLWWQRMRYRPEIFIDVSGQNDHMLEFGQIKRFSWRELQIATSNFSEQNVLGKGGFGKVYKGVLPGPNSIKIAVKRLLNVDSRDGEMAFLREVELISIAVHKNILRLIGFCTTPTERLLVYPFMENLSVASRLRDIKLNEPALDWSTRMRIALGAACGLEYLHEHCNPKIIHRDVKAANVLLDGNFEAVVGDFGLAKMVDIGRNTVTTGVRGTMGHVAPEYIKTGRPSVKTDIFGYGVMLLEIVTGERAIAFHPDRIEEAGEILLTDQSSYGWKKGDYST

SEQ ID NO: 60851 - protein, 624 aa, Zea Mays
MHTAPPMNGRSRRPAAARGAKAAPKSDSRVMEKDPRKAATPAKGPANAGTRVTMNRIQSRERKLALQQDVDKLKKKLRHEENVHRALERAFTRPLGALPRLPPYLPSQTLALLAEVAVLEEEVVRLEEQVVSFRQGIYQEAIIFSSTKNAQLPDGQVPVPAQLVPSYPVLNSEVSPATVSQGPPDHPPGARPSPHSGVANGKQTPRNPVATSPSQDDRSGAGKENQSCSNTPSTSSRQSPSQQKTPKCRATPPDRRRVTPAQTSPAVAPDRKRPADAAAGTGSNSDNVTTSHDDASSSVPNKVSEELLRCLLAIFSQMGGSAAGGGRGLGDEDQQALSPSVSGSSESSASSEADAYPQDPYGILELGARDIGAYKRFHVVDAASFDGNGDTPLVRRRLKALLRRLSSVDLAGLSHQQKLAFWINVYNSCMMNAFLEHGIPTTPQMLVAMMPKATVSVGGRTHSAMSIEHFILRLPYSAKQVKVSREGAKCDDGDVTAARGAFGLEWPEPLVTFALSCGSWSSPAVRVYTAARVEEELEAAKREYLQAAAGVWAAGRLAVPKLLHWYLLDFAKDVDALMDWVCLQLPPELRQEAVRAVEVGRRAGAGGRVRVLPYEFRFRYLLAS

SEQ ID NO: 60852 - protein, 172 aa, Zea Mays
MVFYFKARPEAGDYTIFMGLDKYENEDLIKYGFPEDIWFHVDKMSSAHVYVRLNKGQSMDDMSEGLLEDCAQLVKANSIQGNKVNNIDVVYTPWYNLKKTPSMDVGQVGFHNPKLLQKDELELQCTTMLLPVHNHSSCALPGVQALAIVLLLVQPMQSRFALLKWKRGSMRL

SEQ ID NO: 60853 - protein, 365 aa, Zea Mays
MASSILSDCSSARLLPLRRSLLPPRAPRLRSCPALATPRRLLVAARPQLLPRPRHMDSVPAATASSADSADAPAKLIDGKLVAKQVREEIAVQVTRMKDVIGIVPGLAVILVGSRKDSQTYVRNKKKACEAVGIKSYEVNLPEDSSEEEVIKHIASFNSDPSVHGILVQLPLPRHMNDENILNAVSIEKDVDGFHPLNIGRLAMQGRDPFFVPCTPKGCMELLHRHGVEIKGKRAVVIGRSNIVGTPAALLLQKANATVSIVHSQTKNPEQITRQADIVIAAVGVANLVRGDWIKPGATIIDVGINPVDDPESPRGYRLVGDVCYEEASKVAGAITPVPGGVGPMTIAMLLSNTLESARRIHGFK

SEQ ID NO: 60854 - protein, 719 aa, Zea Mays
MSQSYAAAASKRPFSSPTTSPSPTSSPATPLMKKAKHPAAASSSSVGTVEKNGIQLDTVAAAMGGGRTNGEEDADMVLVNQDKLPAPSVPASAGVAANLFRKKATLPQPSTSARKPLRIKIGQPKLPKNFEEDTWSILKDAITAIFLKQKLSCDVEKLYQAAGDLCLHKLGANLYDRIKKECGIHIAEKISALVGQSPDLVVFLSLVQRTWQDFCDQMLIIRGIALLLDVKYVKNVANICSVWDMGLQLFRKHLSLSTEIEHKTVTGLLRLIESERLGEAIDRTLLSHLLKMLTALGMYSESFEKPFLECTSEFYATEGVRYMQQSDIPDYLKHVESRLQEEHERCILYLEANTRKPLIATTEKQLLERHTSAIIEKGFTMLMDANRINDLSRMYNLFQRVNAVELLKLALSSYIRATGQGIIMDEEKDRELVPFLLDFKASLDKILEESFAKNEAFSNTIKDSFEHLINLRQNRPAELIAKFLDEKLRAGNKGTSEEELEGILDKVLVLFRFIQGKDVFEAFYKKDLAKRLLLGKSASIDAEKSMITKLKTECGSQFTNKLEGMFKDIELSKEINDSFRQSSQARTKLPSGIEMSVHVLTTGYWPTYPPMDVKLPHELNVYQDIFKEFYLSKYSGRRLMWQNSLGHCVLKADFPKGKKELAVSLFQSVVLMLFNDAQKLSFIDIKDSTGIEDKELRRTLQSLACGKVRVLQKYQKGEM

SEQ ID NO: 60855 - protein, 1536 aa, Zea Mays
MQEGLGQRMHVPHGINLCIATSSMPFQAQSFIEPSTGQVNPPVTSENLSANSQAVNDAGAVEGTDMNEKSVQKPKRKKHRPKVIKEGQSAKLQKPKTPKPPKENGNQPTGKRKYVRRKGLSAPAEQIPLCADTHTRAKPGVVQRCLDFDVEDQHGHLDLVPQTQETEIQTGPADTQPSISGVERSNVQISYHWGGTSSSISSVDPIAGIHGLQADCNSKRVSFDLNNSIVSQLPTNYSSPMDSSEQFFNFDLREEVRTNQLLPHLTSSVDHTRHPSVNFDQYISTSQDCPEKSPRHYQMVSSYRILENMTTASQYTERVSMGGNFNPEACMGEDAIIKQMAQSYRPLESPFVPPNHNERDMMNGNLNEFPVKNDYLKFSTNSNYQTGAGFDHCSPDYSDVLAMGTKREHDAISGHQISLGIDFINSNRTRKFCSDDPLSTSSQTSYCPQSCKRMRPEDHSNQLHGTMGKLSSASAFSDGLNTNKVSAMNPRIGTLADVQLLMALEKSKASQQMFEFDYVTSQNNMIHERTGLALQNIADKGFIALPNKQFPSFAAQNIPLPGSTVNQLGESNTLRNGVHQIQPWEITYRLHDSRDNFSLPGNTQFSNGTVNPSSENYIQSNAIHEHQCLENVVAKVPVLSETQNTSTQEGHNHCTAATTDEHIRTTSDEVVRSLTRRASQPTTNGNYNIKSSRVTAEANCTEKPRKRGRPRKVVNPNGEPKERGTKGKQNVGHAELISPKGSCADFLKTNGITYASESSTGITPRMSTVELKSSDQDKEIHGGAMPQATAASVDPLDGIIEKIKLLTINGPDKGVSEVPKNALVPYEGEFSALIAFEGKAKKSRPRAKVNIDPVTTMMWNLLMGPDMGDDAEGLDKDKEKWLDEERRVFRGRVDSFIARMHLVQGDRRFSRWKGSVVDSVVGVFLTQNVSDHLSSSAFMAVAAKFPVKIEVPKKPVAEMSHTPEQKDSCSGLFGDSIKLQGNIYIEEISDIKSLITTEDNEESNNNELIGNSAGNGVNCATGGCHVSYSKSLTGSHGNGLSGSVFPTTGFSGVVETEDGSLEDVISSQNSAVSSQNSPDYVVRRTDPIGSSSLQNFTEEGCIMRNMSNGTGISTDYTLFLPIQDPKGMLGLSEYCGLNPLPVSGVNKDMLLDLNRSYQPLHTYMPYDQNSESDFTGVSCLNHMGKSFHTGPDKVNLSSVTQSEASLYPIDPLEQGDFSPLIKQNFQPLHSSDEVPFFKEHSSCNDFLRNKTEAHFLEPLVCSNPQEVYTTSTDQMGAEQSQSGCGQKYNDARVQTASHERHQSSTLCDNQNSCSVVLQGVASDSTQKFVDTQKGPSKARQNGSKAKVRGRPKKKTDDWDSLRKKVLSNGGDKQRSHDARDTVDWEAVRQAEVREISETIRERGMNNMLAERIKEFLNRLVTDHGSIDLEWLRDVQPDKAKDFLLSIRGLGLKSVECVRLLTLHHMAFPVDTNVGRICVRLGWVPLQPLPESLQLHLLEMYPMLEHIQKYLWPRLCKLDQRTLFSAQKVSLIAIHVQ

SEQ ID NO: 60856 - protein, 183 aa, Zea Mays
MAGECKLVGSASCCHCREIVWKVMEQVKAESDQWTEMQEMLEQVRLEMQELQASRDAWQHRAMASDISLRSLNSQVLEWKNRAQASEQRVEELHREILELESKLHTFKAHLPAPAAIPNQKQWSDACKMEYPRAKPQHPRSQESGKEEIKKHVLICRVKRSPSSVLSKRSPFQEIGNISLPRH

SEQ ID NO: 60857 - protein, 148 aa, Zea Mays
MIDSKHTSRDIKCANILVDASGLVKLADFGLAKEMSILSQAKSSKGTVYWMAPEVAKAKPHGPPADIWSLGCTVLEMLTGEVPYPDMEWTQALLKIGRGIPPEIPNTLSEDARDFIKKCVQANPNDRPCAAQLFEHPFVQRPLQQYGV

SEQ ID NO: 60858 - protein, 146 aa, Zea Mays
MAMTVAAAWLPSTASRRRILSSPLPPFAAPISIHMPRRAPPPSPIHPKPRLFVAYAQLDFSRAVQTAWRVGNDAVEAGSNLVPGSVPRPIARIGVAFAAVSVAFFLVKSIVSTALFVLVSSHDICGNDGPYISQLPGYEPKGGIRL

SEQ ID NO: 60859 - protein, 724 aa, Zea Mays
MTTRNFGIVTKLEEVYRLKPLSNANSKKLFYKRIESQEGESLDGELSSKIIHKCGGIPLAIIAIASLLVERSREEWSEVYDKIGLGNEDNTTKIMSYSYYDLPPYLKPCLLQLSIYPEDCIIDTNSTIWKWIGEGLVHLEKEEGSLFKVGERYFKELVNRSMIQPTEDKNDRFVEGFRIHDIVFDLICKLSKDEDFITISGQHSSRDSLRREKKTCVPRSDCKLRRLAVRNQRVQRFPEETIDMPEVLRSLSIIDCNIEVMAPIDSFRVCRVLHLGKSYVPISLKHLGKLLHLKFLEIVYTPIDELPKEIGHLRSLQTLILDRTGLDELPPVVCSLTRLMCLIAQGFERLPADRMGNLTSLEELRLRRVVGRSATQALVAELGKLTRLRVVDITFSEQLEESLQEALVQSLSNLRGLQELTLLFKMTRWGSDMWGDWEPPRQLRRLIIEGIIVFSRQPRWINRSCLPRLCYLSLMVHTLEAQDLDNLARLPELQYLTLDGLSWPPRYTVGPDDFRNLRFCKVGTTFEFRKGAMPRLEVLQFRVFAGYYCWAYNGVPFEQFPTKDLDLDLDNVLLLQQVIVKVNCVGATVTQVEEVEAVVMRAVENHANRPTIKMNRAYEIAILSDEGREALLRRHIEKDCCVRTMKDKSDAFFISQLRRYRHLQKAIIFIDCSGASMCEVQKVEAAFRHAAEVHPNHPSIELIRTNTDGMASSSSDHPNTEPRN

SEQ ID NO: 60860 - protein, 508 aa, Zea Mays
MSQLKEKIAGLFGACTTTAEQLNLVDTLQHLSIDHHFSTQILSVLTSAHAAEELNSGGACLHDVALRFRLLRQQGFWVSPEVFDRFRDENGSFDVGVADDDARGLLSLYNAAYLLTHGEAELEEAALFARQRLESMSMRGSLEYPLAQQVSRALHLPLPRTVRRVETLHYVSEYGGDPTHEHEHDPSVLEFARLDFELLQRLHVKELKALSRWWKDLYNEAGVTYSRDRVVECYLWSYTAYYEEEHARARMILAKMIALIILTDDTYDVRATLEECRRFDEAIQRWDESAVSLLPDYLKKFYLKLMNIFEEFEDELEPHEKCRVAFSRKAFQTLSSNYLQEAEWFHGRYKPRFEDQVKVSTVCSGAPFAAVGLLVGMGGDVATQEALEWAMGCTDAVKAFAEVTRFMNDLASYKRGKNKNDVDSSVECYISEHGVTAEVAFAQISSLIEDAWKTINGARFENSKLLPAVQRVADITASMPLMYGDNKDAFTFSDGLKGLIERLFLNRP

SEQ ID NO: 60861 - protein, 978 aa, Zea Mays
MLTAGAAPDRFLLPQVLRACAGLGAPRLASAAHALAAKGGAELAGDPVVGNAIVAMYAALGDVASARAAFASLPDRDVVAWTALISAHADAGELEEAFDLFEEMQESGVRPDVISWNTLVSGFARSGDLVAALHLFDEMRQRGVDPGVNSWNCIISGCVQNALYEEALEVFLEMCESERPDAVTVASILPACAGLQALGIGKQLHSYVLRCGIKINVYVGASLISLYSECGEFDDARVVFSTIQEKNVNVWNELVQSYTREGRMDKAWDVFDLMQEDGLKPDIVTYNTLIAAYAKVGQNEQTYELFSRMADVGLKPNVVSMNALICGLHQHGLYTDALEAFRYMQRSSDGKAKGWTFLDNRGPIQPTGTTITGLLSLLADLKLDRLGKEVHCYALKNGLASNIYVSSKLVDFYGKTDDMTSAANVFQKIRNKNVVTWNSLLAAYKHNRKPEATLRLLAEMLESNFDPNLVTIHIALMSCGMTMALGYGRELHSYIIKCWPGGYPATLASALIDMYGKCGNIEDARLVFKSMVPKDVAVWNAMMSCYLLHRMPKDIIDLFNYLEQSGIQPDHITFILLLSACKQEGLLEEAQSYFYNMEDVYGIKPSLKHYTCLVDIMGSAGLLAESLTLIQKMPLKPDACLWSTVLKACKLYSNLEIGEKAAKALFELEPNNTSNYMVLSNIYADTGLWDSTKAVRDAMTEQGLHVERQCSWLYNGTTVHPFEAGNLSHPAIDTILSTWEDLATRMEQSGYSPQDIGPYYNVEVDPLSCHHTEKIAVCYGLISTSGQQPIRISKNFRMCMECHSSIKFISRDKGREIIVSDGRTYHHFKDGTQISAWQHLRTHLHCQLWLVSTIYATILKHSTLLSISSLLSRARRDPRQQIWPASCVNLKLFTVKGQATMNTLVIGCKVGYAPVASSVDANSGSLKSFTGFHKKKSHGHSSYQLRVVHAVDTHDSRTVQLFIYRRRFTLSTYFYGKA

SEQ ID NO: 60862 - protein, 402 aa, Zea Mays
MDKGTNALDVLEGRAYRLQHPWVGIVNRSQADINKNVDMIIARRKEQEFFDSSPEYSHLASRMGSEYLAKLLSQHLEAAIRSRIPSITSLINKTIDELESEMDHLGRPIASDAGAQLYLILELCRAFDKIFKEHLDGGRPGGDRIYGVFDNQLPSALRKLPFDRHLSVQNVKRVVSQADGYQPHLIAPEQGYRRLIESSLNYFRGPAEASVDAVHSVLKELVRISIGETQELKRFPSLQTELAAACYKALERFREDGRKTTLRLVDMESAYLTVEFFRKLPQEVDKTGTGNPRNANPPAPSDDRYADAHFRRIASNVSSYIGMVSETLKNTIPKSVVHCQVREAKRSLLNHFYTQVGGKDAKQLAVLLDEDPALMERRLQCFKRLELYKSARDEIDAVSWTR

SEQ ID NO: 60863 - protein, 257 aa, Zea Mays
MEVHTLVATHQVSMVSRLKHGNVVELLGYCVDGNTRILAYEFATMGSLHDMLHGRKGVKGAQPGPVLSWTQRVKIAVGAAKGLEYLHEKAQPHIIHRDIKSSNVLLFDDDVSKIADFDLSNQAPDMAARLHSTRVLGTFGYHAPEYAMTGQLSSKSDVYSFGVVLLELLTGRKPVDHTLPRGQQSLVTWATPRLCEDKVRQCVDSRLGVEYPPKSVAKFAAVAALCVQYEADFRPNMSIVVKALQPLLNARASNNPG

SEQ ID NO: 60864 - protein, 94 aa, Zea Mays
MLPLVARLRLVRTSPAPRCGCYNAAPAIACRARWSRPSSWLGVMDSWPRGAPDPFFRGIKRARHGLVAERSSWSIFSIEKNAPFRVTVTSAHGS

SEQ ID NO: 60865 - protein, 300 aa, Zea Mays
MRCMQALVRAQARVRARRLTQHPLLLLPPPTPPASSPTLLLGAGRPLCVELALQGDHDVGDDGEVADLLLQQRSRSRGRFGRGDDNGGARSPSGAWDSSSRTLEDARAEGARRHDAAARRERALAYAYAYQQWQRQEDEKAGLGFHWLERWMAATTQAQQQEHAPDHAKTHQSTPTRTTSSYVTAAAAFANGMSEKTVETETTSRSPLNQASAAAHGRPPAIPGYMAATRSARAKARPAPPSATPTHARSRSGGGLAGDTSSSGQNGSAVAGYSPDSSCTGDWTPPRLGVSTRTSRVAYT

SEQ ID NO: 60866 - protein, 329 aa, Zea Mays
MPPPTLHAGSYKRGLTSRHTARSTSLTPSLAPPPLLAFLGRIKNTSRKEKRRSPIRARQPISICTITVRAPDYQNPAEGNGAEQLRDGGFHPAVRRGQQQHPGPRSGGPGGGGGGAAGAEQDARGAQRGLPRAVRGMRRRFRGGGGGAHAAGGLRREAARRGHGSPRPDGRHRLDLEGSRVLRFRPSHRLLGRQLPGPLPLALPASGRQVLDDAAAVRGVLVPGCQDGGDLRSSVSGPAGRGRAVRVRGEDGAEDGAAGPQHAQMEDASGHPLLVHRLLPPPAQRRRCAEQTRRPPIRGAHPARRERRGCRDASKRSRPPWPCWRLHSR

SEQ ID NO: 60867 - protein, 135 aa, Zea Mays
MKLPARQRQNDRIHTVASPDRECPGRGNNNNGVPQTYPDDKKGSSSGSEGSIWPKFEITLSNREKEEDFLVFKGSKLPQRPKKRAKVIQRTVNFVCPGTWLCDLTLERYEVREKKVSKKRPRGLKAMHDMDSDSE

SEQ ID NO: 60868 - protein, 219 aa, Zea Mays
MGRGKVELKRIENKISRQVTFAKRRNGLLKKAYELSLLCDAEVALIIFSGRGRLFEFSSSSCMYKTLERYRSSNYSTQEVKAPLESEINYQDYLKLRTRVDFLQTTQRNILGEDLGPLSMKELEQLENQIEVSLKHIRSRKNQMLLDQLFDLKSKEQELQDLNKDLRKKLQETSPQNVIHDVSWEEGGHSGSSVLGPFQGLLQHHGNDPSLQTRPTWTS

SEQ ID NO: 60869 - protein, 330 aa, Zea Mays
MGDGRTGGANRPAWLQQYELIGKIGEGTYGLVFLARLKPPHPAPGRRGPPIAIKKFKQSKEGDGVSPTAIREIMLLREINHENVVKLVNVHINHADMSLYLAFDYAEHDLYEIIRHHREKLSSSINPYTVKSLLWQLLNGLNYLHSNWIIHRDLKPSNILVMGEGDEHGIIKIADFGLARIYQAPLKPLCDNGVVVTIWYRAPELLLGGKHYTSAVDMWAVGCIFAELLTLKPLFQGVEAKNPPNPFQLDQLDKIFKVLGHPTVEKWPTLANLPWWQNDHQHIQGHKYENPGFHNIVHLPPKSPAFDLLSKMLEYDPRKRITAAQALEHE

SEQ ID NO: 60870 - protein, 152 aa, Zea Mays
MLQRRGWKAVSVHGDKAQHDRTKALSLFKEGKCPLMIATDVASRGLDIPDVEVVINYSYPLTTEDYVHRIGRTGRAGKKGVAHTFFTQANKALAGELVNVLREADQVVPPALMKFGTHVKKKESKIYGSHFKELTADAPKSTKITFGDSDED

SEQ ID NO: 60871 - protein, 139 aa, Zea Mays
MVIKIDSTTCFYISVRDAMLAVSFFFLFFLPGLVGDAAADELARCMYVAAWLQVPFYWAAQFTGSICASFVLKAVLHPIAVLGTTTPTGPHWHSLVIEIIVTFNMMFVTLAVATDTRAVGELAGLAVGSAVCITSIFAG

SEQ ID NO: 60872 - protein, 1062 aa, Zea Mays
MEIWGKSRHPNVELRAFCSKHSAVGYTSSVENSNLASELNPRKSGPDNTTLNSGKIPILRFTRKNKDKFTNCGTSTSSSGNLIRVKTIEQGALANTVRNANTQPIQIWERGTGHPSVGGDHMGSSGDIAVVLRKLIDSGKISVSDIASEVGISSESLEAALVGETTTFSHGLTLKIMKWLQNYVQMHSAQGDVCKGSSEVVQESKSDRLVTTDTVDVKNPLVLDDDKGVGVLVDLLDSSVTEPAQTRSESNSKILNENSATCATGVTILQNGKKNMVKEGYNPECSAKEFANESTQDFSPISNKYVLKDEHGILHYQLYQFFELVALQFILREILNATSGNKEFGTSTEIPNENQGALRGRKINDLTDVELGPCLEKGVSSHDHCFVRGDNGRDRVDSVENSFNARDCDSNCSHGQPFFNFDDSHSYIHPFIQKKISHHWDITFNQNKEALNHYIQESSYPSLEKVPTDSSVEVEGTADTTATGQVLKARSLKILEHSPDDEVEGEMVYLQSRLLDNAVVLKHRYEKLIAMVVQNLSRELDALSKRKWDLIFVNQFLRDVREAKKRGRKEKRHKEAQAVLAAAAAAIASSSRNSTVRKDAKEDAPKSSPKLAAGSSRVGQRTSLPQANDSSKSSNSKISSDKKSGSFLLPISSKENGLYCDVCMRTETLLNRIFVCYRCKAAVHINCYRNLENSIGPWNCELCEDQDISSEAATVSDKSHCNGKKLPFAQCGMCHGTSGAFRKTVDGKWVHAFCAEWLLDTKYVRGQDKPVEGTESLVEGKDTCCVCLHNVGVCLRCSSGDCNITFHPTCARSCGFYMNTKGFGTTPQHKAYCGKHSVQQKEADAQQYGPEELTSMKRMRVELEKLRLLCERIIKREKVKRETVLCDHEILAKTKDTVIFSYLACGASSESATTSVNNRSYSGAAQRSDDVTVDSTISGKKTIRFSLNNRGADRNTADSSRTLLSFKRKLSERGPRAGKQLPQRPTIAAEKLEDEDKKTTDKKITMQQREMFQKELIMTSDQASTQNLRLPKGYAYVPRDSLSKEKLWKQNTQPHNPQEPGG

SEQ ID NO: 60873 - protein, 974 aa, Zea Mays
MDKQTIPLSPNQLLLRGCSLRNTEYIVGVVIFTGHETKVMMNSMNVPSKRSTLEKKLDKLILALFATLFTMCVIGAIGSGIFINEKYFYLGLRGHVEDQFNPKNRFVVTILTMFTLITLYSTIIPISLYVSIECTQFINNDLHMYHAESNTPALARTSNLNEELGQVEYIFSDKTGTLTRNLMEFFKCSIGGEMYGTGITEIEKGGAERAGIRIDDDEGKRSANAVHEKGFNFDDARIMRGAWRNEPNPEACKEFFRCLAICHTVLPEGEETPEKISYQAASPDEAALVSAAKNFGFFFYRRTPTTVMVRESHVERMGSIQDVPYEILNVLEFNSTRKRQSVVCRFTNGRLVLYCKGADNVVYERLADGNHDMKKISREHLEQFGSAGLRTLCLAYRDLSREQYESWNEKFVQAKSSLRDRDKKLDEVAELIEKDLILVGCTAIEDKLQEGVPTCIETLSAAGIKIWVLTGDKMETAINIAYACSLVNNDTKQFIISSETGAIREAEDRGDPVEIARVIKDSVKQNLKRFHEEARHSLISTPERKLALIIDGRCLMYALDPTLRVDLLGLSLSCHSVICCRVSPLQKAQVTSLVRKGAEKITLSIGDGANDVSMIQAAHVGIGISGQEGMQAVMASDFAIAQFRFLTDLLLVHGRWSYLRLCKVITYFFYKNLTFTLTQFWFTFQTGFSGQRFYDDWFQSLYNVIFTALPVIIVGLFDKDVSASLSKKYPQLYKEGIRNSFFKWRVIAVWGFFAFYQSIVFFYFTAAASRHGQGSSGKILGLWDVSTMAFTCVVVTVNLRLLMACNSITRWHYISVAGSIVAWFMFIFIYSAIMTSFDRQENVYFVIYVLMSTFFFYLTIVLVPIIALFGDFLYLSIQRWLFPYDYQIIQEQHKDEPHEYSRVPLPETSHLSPEEARSYMISMLPRESSKHTGFAFDSPGYESFFASQQGIGVPHKPWDVARRASMKPQRAGKS

SEQ ID NO: 60874 - protein, 155 aa, Zea Mays
MCGDPNSVLRFAFIEFTDEEGARAALNLSGTVLGYYPVRVLPSKTAIAPVNPTFLPRSDDEREMCARTIYCTNIDKKVTQADLKLFFESICGEVFRLRLLGDYHHSTRIAFVEFVMAESATAALNCSGVILGSLPIRVSPSKTPVRPRAPRQLMH

SEQ ID NO: 60875 - protein, 768 aa, Zea Mays
MEEGASSPGDGGGMQFQVAVAVRGDGRASRRAARWAAASLVPPGGRVALVHVIPPVSFVPSPSGERVPVDKMEPEVVEMYAQDNRALAQEIFLPFRRLVGRGKSVETVVLEGDSVAEALVRYAAESGVRSLVLGSASLSWFRRILRLQDVPFTILKTVPSSCNIFVVSRRRLTIKIANQARSSKPNASIRIQSISHKAFDQIQRDWLQDKQALNNLADDEIPKYSENSISGSFSQVCSSISTSSIAVKSSESHRRGFLGSLGRRTPGRERNKDFDAIGQLKEVHYVALSSVEEYQHIDEEEKLRKELKDTLMMYDRACGNLAHASKKIQLFSSDCCEDVNKVQDALQREEVLKQTVPDEKNKHLEAIGAVEMAKNAFTHETYSKHQAENAKAVDALLSTGKSCRRYSKHEIELATDYFSDAKKIGEGGYGNVYRCTLDHTEVAVKVVEQDSINKIDEFLREVEILGQLHHPNLVLLLGFCPEIGCLVYEYMENGSLEDLLINDKGQPLHWFLRFQIIFDVACGLAFLHGTKPEPIVHRDLKPGNILLDKNYVSKIGDVGFAKPISDLVPEGLTEYRDTVIAGTLYYMDPEYQLTGTVRPKSDLYALGIIILQLLTGKRPPGLVNSVEEGIKRGILSDILDKSQPDWPIAEAEMLAKLGLWCTALKCRDRPNLESVVLPELENILSRVTVSLKLENILAPSHFFCPILQEVMENPYVAADGHTYEHRAIKAWLEKHKISPMTNQRLPHLSIIPNHSLHAAIQQWKLRAS

SEQ ID NO: 60876 - protein, 182 aa, Zea Mays
MVEIKGRFSVTSENVDLAKVQEIPGSSASRKLQEGPSLRKSASVGDWSANDKTTSTNHQRKELCNSSVSTSILIPHLQNLVKQTAFQQDLITNLLSSLQQNERVDAQSRVQSTTSDTVVEAATAEREHSLLVKIFELQSRMISLTDELIAAKLKHVQLQEELNVLYCQEEILDMREDESEEA

SEQ ID NO: 60877 - protein, 418 aa, Zea Mays
MGWSVGGWKSDSSWRGCQLSSIREFLCSEAMHGLGIPTTRALCLVETGKSVVRDMFYDGNAKEEPGAIVCRVAPSFLRFGSYQIHASRGKEDIEIVRRLADYTIHHHFPHLENMKKSEGLSFETAIGDSPTIDLTSNKYAAWAVEVAERTAYLIARWQGVGFTHGVLNTDNMSVLGLTIDYGPFGFLDAFDPSYTPNTTDLPGKRYCFANQPDVGLWNIAQFTGPLSSAELISQDEANYVMERYGTKFMDEYQSIMTKKLGLTKYNKQLISKLLSNMAVDKVDYTNFFRLLSNVNADPGIPENELLVPLKAALLDIGKERKEAWISWVQTYIEELVESGVPDEERKAAMNSVNPKYILRNYLCQSAIDVAEQGDYEEVRRVLRVMHNPYDEQPGMEKYARLPPAWAYRPGVCMLSCSS

SEQ ID NO: 60878 - protein, 152 aa, Zea Mays
MQRAAPLLTHGRPTCNRQRGVRYCRLSRRPAARKVRASRARANQKTAGIQKSGRTFTDALGRPELFRADRWIDARVRVRVHCRCTLPAARAKRSDRHRRWGRPTQGPPRRASGRGGWRCMVVHYPGRQNARTQHGCLGPAPAGCSTCHRTWQ

SEQ ID NO: 60879 - protein, 794 aa, Zea Mays
MFFLCQSLVGYPLLINNCGIHLLARCVIVTVIPFNFCYDFKSLSLTESASEDPSSRPTSPEENPETSSSPSILFLHLNAQDVSHRRWQDNSSRLLEDKPTTSNSMSDSDFLVNSFTKPSDNARPSRRKSKKKSKKHRQRCRKPTDGSEAKFREGNGAASAADVGDCEDSTLSPKHVGDIRFEETSPSSSVKEASEEAPESDDDEYHCCSGGSVSSASYCDEMELSKSTTSCPALCGQCPSSNLQYLDNTQNSAPTGPSQETCYAGSKANCNHDTKSLFIFRNERGSDPCEATEFCSSSSGFDENWIEKFDYDSGICSPKSVGTYGGDQAAHLCSDTTGDNDFCLVISRKRARKEKKMSLWKSYGAHASTPALDRNKKYVGHSSMQMTNEFNSNDWSHRQNHVSRIHPQHGNALKSSTKNFMQRPSIGCRETQYGFPAKESKLGASLNHSTGPREKTCGKLTGGFDKTAQQLYLDRDLSNALNSSESIRCETRSISSSEPTTPKSLKGNYTSESGESTDITIGALPMQKRRLQDLVRTDDASETISGRSSPCSESSTTELIAGHSTDSSIEGNHGCQGLCNSRTHLAQMLRVVNDACKVQVGADVLLAAGYPISDLEKFICSATPVIGRAPCMISNTCSLDQVVSDSVCQHDISNVSLRRIWEWYEEPGCYGLEVKALSNLSSKTSSSSSSEFFAYFVPYLSAIQLFGLSRNNMHHSFGVQGRELLISSNTASSMSSHPVHAKAHTLLEESNACLPESSLVVEDPGELIFEYFETEQPSLRPPLFENEFVSNGTF

SEQ ID NO: 60880 - protein, 414 aa, Zea Mays
MGKKAWLTAVKRAFRSPSKDDSSSPARKASRLREDADGEDDKALVRVQARVRDRRMRLSQESVLSMSGGGGGAGAAPCGSSKSSYSVDTSAFWDPKYAHDYADRRSVERSRDGSSFAADDWDDRPRTIEEIQAMLQTRKDAALKRERALSYAFSHQIRRNPAAPSADMDVDVDVDGQPRWAERWMASRASFDTSRSSVRGAAAAAPGRASMEQHREPVKTLEMDTARPFSYSTPRRHAGASSPMHRAQQNQHHPAVATPSPVKARPPIQVRSASPRVDHHHRGTGGGGGSYTPSLLHSQRHAAAVPNYMAATESAKARVRSQSAPRQRPATPERERDRGAKKRLSFPAQLQHQVLAAEYAQSLRSPSFKSAAGRFSSEQRSTVSSSCADSLGGGCGGDVGSPSSSAADLRRWLR

SEQ ID NO: 60881 - protein, 212 aa, Zea Mays
MTRLEFKQRLSIAIGAAKGLSHLHSLAPPLIHRDFKTSNVLVDENFIAKVSDAGIHRLLRGPDGGAVAALASRGVFQDPEVHSSAQAQLSETESSDVYSFGVFLLELVTGREAAGLMPPGSSKDSLAQWMEARFASNELVDPRLGGSFTSEGMAEVVGLASSCLSPSARRRPRMRLVAAELDRILEKEMALTTVMGDGGTAIVTLGSQLFTS

SEQ ID NO: 60882 - protein, 210 aa, Zea Mays
MFWRMTGLSAASPVDTILDKENFTLEELLDEDEIIQECKALNSRLINFLRDKSQVEQLLHYILEEVPEDAERKRSFKFPFIACEIFTCEIDVILRTLVEDEELMDLLFSFVKPDHPHSTLLSGYFSKVVICLMLRKTAPLMSYVQGHPKIVVQLVDLIGITSIMEVLIRLIGADETIYSNYGDTLQWLENTDVLEMIADKFGSSIGKGEP

SEQ ID NO: 60883 - protein, 705 aa, Zea Mays
MAEPTPKSKRTKKAKKPSAREGDGEDMDTLKSDVATFASSLGLLPGAGDSNGGFDDSDFRKSGPMYKSSKFPSKQPHQKPDNTANPHLNPRPTKKPHPLELRDSYAATKPGAVNTNYPLMKAAALSGQWYTDADELEARVLGGRKQVPPAVGLQEMQGIVERKRELAEKLMLQYAREYDAVRRGHGDLKLLDISAKSGTSADKVSAFTCLVEDNPIANMKALDSLLGMITSKVGKRYAFTGFDAIKELFLMRLLPDRKLKSLIQRPLDILPETKDGYSLLLFWHWEDCLKQRYERFVMALEDAVKDMLPNLKDKAMKTVFMLLKSKSEQERRLLTALVNKLGDPERRAASSAAYLLTCLLAAHPNMKMVVIDEVDSFLFRPHVGLRAKYQAVNFLSQILLTNKGDGPKIAKRLVDVYIALFKVLMSSGDTKGDTYSKDSKKKVGKIEGGNNKMDSRSKGNNEVGSTAGSDLELDSRILSALLTGVNRALPYVASSEVDDIVEVQTPILFRLVHAENFNVGVQALMLLFQISIKNNIASDRLYRALYSKLLSPSAVTSSKPELFLGLLVKAMKNDVMLKRVAAFSKRLLQVALQRPPQYACGCLFILSEVLKAKPPLWGIVLQNESVDDGDEHFEDILEIPEDSSVASAVLHKHNEKVAAHEKHNLDAADGIDSVKQVNLVDENNASTDSSRQHAFYDPRHREPSY

SEQ ID NO: 60884 - protein, 237 aa, Zea Mays
MIYGMDLNTDKGLLLVADNFGFLYFLDRRSKTRIGHPILIHKKGSKVTSLHCNPARPEVLLSSGNDHYARIWDTRKLEANSPLASLAHGRVVNSGYFSPRSGNKILTTCQDNRIRDYTETVAVIGRYISENYNGVALHPIDFIDTSSGKLLAEVMDPDIITISPVNKLHPQDDILATGSSRSIFIWKPKIEDELTEERAKHDNSSDDDSGGDSGGKNKKAKKTRFTHAVKGKGKSKV

SEQ ID NO: 60885 - protein, 133 aa, Zea Mays
MAATAYSTALPGGARLPAAGAAAPPSALLLPRRNKLSPLPLRLQDAPRLSLLRVKASSDDSSAASGDELIADLKAKWDAVENKSTVLTYAGGAVVALWLTSVIVGAINSVPLLGDDWPAQQVHVKPGKSSCLV

SEQ ID NO: 60886 - protein, 110 aa, Zea Mays
MELPQGHEKPPPAANGRGAWRGGASSSSSSSAATPPKVYRVEPREFRDLVQRLTGAPPPTALRRPQQQHQHRAAVVAPVVHPQPVVAWCCATALLMHARWTLHRRHKEMT

SEQ ID NO: 60887 - protein, 100 aa, Zea Mays
MVAAGARTKNWRVTTAAAAESSSGMSTSAAADEKDAPESSADGDGGAASAAGESLRSHMARRLGAGLPLLLVRRVRCLCVPVHTLLCSVSFLPRTTTRVM

SEQ ID NO: 60888 - protein, 326 aa, Zea Mays
MDGRESTVASGPNFSSFYTQHRGIGAPGVPGHSAVLHDPPPAGYRQHLDAVSAGSGGGTSSGGDMDIGMGSAVCTNVKGELGSGPAQDEQVKKKRGRPRKYKPDGAVTLGLSPSSSLTPHSASLGMGTMISAPGSGFGSEGSGASGLGAPSEKRGRGRPPGSGKMQQLASLGKWFLGSVGTGFTPHVIIIQPGEGRFEILCLSGSYLVVDEGGGARTRSGGLCIALCGPDNRVIGGSVGGVLMAAGAVQVIVGSFMYGGGSKKNKVKAELDAEPEEANAGDQEVALAEHSSMAPHPAMSGGGGWASGMMRQMESRTPNIDINSIRE

SEQ ID NO: 60889 - protein, 641 aa, Zea Mays
MVETRRSAAAKRPAAGEEDKGAPASPASAPAENAGAGPRAGDDVASSQPPKRAKVGCTEADTEKPLVAPAEVGTVAGPLPNTAGLQALTGAMDKLEALLRPKEGQSNPAGHKRGTNDKDITAKIKRAMDLSEDLSAKIKKTKDNVAGILNKPQAAATSRRQEPWCRLISQYTMHPTLSIYGALFTIGHGAHHDFRLGESSTASPVCRLKQAKRGALLEVFESKVVRVNGKSLDKAAKVTLNGGDEIIFRSPVRHAYIFEQLHQEKSSTPALSSTCSSIQQGQCSHFKDIQGHLSSKGHKVPTIYFGRGRSSLLPSGSSADPLLLNLCKTMEGQSQHSSEDNISSGRFQLIKEDLINATVDASDIFESFDSCPYYLSDHTKCALMSSAYVHLHCKDYLKFTKDISSLSQRVLLSGPTGTDIYQEYLVKALAKNFGARLLTVDSSMLFGGQTSKEPETYKKGDRVRYIGSVQSTGVILDGQSPPDFGSQGEIFLPFEENRSSKVGVRFDKKILGGNDLGGNCEVDHGLFCPVDSLCLDIPGWEVTSKHPLDVIFEFISEEIRHGPFILFLKDTEKICGNNDYYHGLKSKLKHFPAGAFIIGSQIQPANRKEKAKGSSPFLSKFPYSQTILDLALQACLVLLWL

SEQ ID NO: 60890 - protein, 354 aa, Zea Mays
MVFPSPAEFFLSFLVKDEIQKDFSTSNKILNTIYILLLLQLSKLSRGIKTREVLRQESRICFVITLLNICRLLPTKNNRRMKEIDREIRKILHGIIRKRERAFIDSEGTNDDLLGLLVESNMRESNGNAKLGMTTEDIIEECKLFYFAGMETTSVLLTWTLILLSMHPEWQEQAREEVLNHFGMGTPDFDNLNRLKIVTMILYEVLRLYPPVVFLSRRTYKEMELGGIKYPSGVSLLLPIIFIHHDPNIWGKDASEFNPQRFEDGISNATKHQAAFFPFGWGPRICIGQNFALLEAKMALSTILQRFSFELSSSYTHAPYTVITLHPQHGAQIRFKFSFDMNNENQVCMNGVGV

SEQ ID NO: 60891 - protein, 206 aa, Zea Mays
MAGPGDSVRGGARQDGRATQDRRAGHHPAGAGGGRRRPLRVPHAVRHDGGADEGLLRRDRRAVARAEPGRQARRPLLQHRLPGWRPGDHAADGGDAADAPRDGVRACGVHVRRQDIRHGERARRQPVRRGHVRRGRVAVADGTGAGARLPPGQVLRRHRQEAQGRLRLISLAPSYTYTYRYVLVITCTRGMICIPCFRGGFDCIVV

SEQ ID NO: 60892 - protein, 521 aa, Zea Mays
MHVAERDILHDMVKIVKKKSDPRVKEKVLVLIDTWQDVFGGSHARYPQYYAAYHELVRAGAEFPKRPEKPAPLFNGQSQAARNMRSPDQQEAESSAANDFPALSMSEIHNACGIMDVLAEMLNALDPGNREGLRQEVIVELVDQCRTYKQRVVQLVNSTTDEELMSQGLTLNDDLQRVLAKHDAIAAGIAVRVEKKSKSLQALVETKDSTNQDSKKEQGLIDIEDPTSQDAAKDPNQSTSDQSPFEQLALPAPPVSNGAATSAPQSDLGIDLLSWDDTPATTQNPLALVPVTDPLADSTSSNQNALAIVDTFSENSTTNHNAQPADPFGLNPSSAIPGSQLYNTPTQQPFQSQQPPQQAALYANGGAVDPGTSYDQASQFKNVSSGWNGQAANPVVPLPEQALNYVIKVETFHRLLGRLSQRQTMNCQMANWEACNLSQVQLARSVACSSHCNHKLTTWEFHKASQCIVTNQCNPVRLPPQHRCSLASETSSSVRYHQHPCWACNSVACSLRRCMADRSQS

SEQ ID NO: 60893 - protein, 297 aa, Zea Mays
MKLARQLEEMECDKCWKVLADFWAEMLLYIAPSENVNEHFEALANGGEFITHWWALLTHAGILERAPRNVNNDIENQWEGSSSYGCPSTTQAAAAACATNQQPMAGDRTVQLIEMNVGDIEDAKTDRHYPGEISYGAALRLRRANSYISKCREAATLATSATIKPAIRGNCEQVRMMIRQQAYLGQNVELASPSASTAPSENKEIEIVIACSCQVGLQEEYIVCSNYRTWQNLIITGNSCTWVGYWRRLPEETTEAKLLMRYLVQLISCILCPCRLLYLTCVSNIFVNLKQLAHQQC

SEQ ID NO: 60894 - protein, 847 aa, Zea Mays
MELVLVKPAAGALVEVGSGSVAGAGSIPAMVAAQQEILHEQVDQLQRLVVAQCRLTGVNPLAQEMAAGALSIKIGKRPRDLLNPKAVKCMQSLFALKDILGKKETREISLLCGVTVTQVREFFTVQRSRVRKFVRLSQEKALRIETPKEQDNSYSINTEQIPPDIEAQAEVIEPLRTLEPVVLQSSLQPTCVPQISSQSMELQQSDLQHMEVFQNSLQQAEAQHNIAAPIMPSGAMVMQPTDAKISSDSVQKEVKQEGVHSGVASEDKKFLESIFALMQKEETFSGQVKLMEWILQINNVTVLSRFVTMGGLTIMSTWLSQAAIEEQTSVIHVIFKVLLHLPLHKALPVHMSVVLQTINKLRFYRTQDISSRARNLLSRLSKVLVRIQALKKPQKDLICKQRISEILRDESWKSEVDITEEVLALTDGANESRKPEPRKTPMLLTASAIETNKRSSVQTKSKQKRKVLLVEQPNKKATWKNANSVRNTSTNNSRPLSADDIQKAKMRAMFMQEKRGKIDINKLSDKPQAMDTKKAAGLVNSNPSAMPISPHTSAAQPVDPSPSTSKQSTDPQPDNTEISGGLKLNIGSKNNVIEKLDCKRVLWQIPPAVWIDPSWSVGAGDNSKELEVQTQRNRREKETFYTSQKDVPMNPKDPWDLEMDFDDSLTPEVPIDQVPDVDAMETESVGAAPSAVAPVKDKQIESASSTSGAVADDEEANTDYELLTVLLRNPELVFALTSNKGENMPNEQTIALLDTLKQTGLSLSELVNRLGNGAGLPKEPEPEPEPIPASLPSPTPPDRTSRAVWIPEHAMQVRAAPTLHLPSRGSTPPVANAVQQGFSNVSNMFPL

SEQ ID NO: 60895 - protein, 211 aa, Zea Mays
MTAVQVMVATVRCDEIANEKFGCITSDTEWLDVESAVQSGPVPGFGKKLGNIVDVHLQEYDKEAVYFDEAVRKGKRQHLESRILNLVQPAFQKMLTHLRVKALEKFKTGLNSSLESGKGFAVSARDNTECSLKEFEQGCADAIIKQANWDCSKMLEKVRRDIEDHALSIRESKLSEMTRHAKVMYGKLKEILITSLAMHNFLLDLFAYLIL

SEQ ID NO: 60896 - protein, 174 aa, Zea Mays
MSARMDHQPLEVSPSSDFVQIPADAVDVWEVDLRLLKFEQKLASGSFGDLYHGTYCSQDVAIKVLKPERVSVDMLREFAQEVYIMKKVRHKNVVQFIGACTRPPVLCIITEFMHGGSIFDFLYNRRGNFQLPDVIRIASDVSKGMNYLHQINIVHRDLKTANLLMDDQVLNCTV

SEQ ID NO: 60897 - protein, 357 aa, Zea Mays
MAAAAVASSSTPRPLRLAQRGAVSAHASHHVSAPPHRSRRPRLSVSASAGVEGTSGSERFYFNFTGFPFPLGPFLNRRTIRTEAVKGSIWLFEQEQALGFSSVSTNIRMTVIKLKSGGLWVHAPIAPTKECIQMLKELDAPVEHIVLPTFAYEHKIFVGPFSRKFPKAQIWVAPRQWSWPINLPLEFFGIFRAKPLKDEDDATPWVAEIEQKVLSSPEVGIGPYVEVAFYHKPSRTLLVTDAVIFVPQQPPECISKESLLASAKNGLAVKLLSKGKEVPDEPVVDNKLNRQKGWERMVLQILFLGPSNLLEPNASFAQMSQKLIVSPIVKTLVFSKVPEKDVEGLNWDDEGWIPGAG

SEQ ID NO: 60898 - protein, 225 aa, Zea Mays
MDGKKLGNRIIRVNEVRTRGPRDFGRDGFRRDPRRYGRDPYWDRRDREQSYDRERDPYHDRDSDRSREHDRERDYEHGGFNREVDYPMDRDHEVDDIHPREHDRAAETHNMDSDNDKYKEHGSRKSHPKGRDSKDLSSSSDLQNDVSQIKDKISAKGQHIADLQKKAQKLEDELAAARKVSSERQLAVTDLYKHFLQLQDYNDRVKTAEHRLQVCLCCWQGENGA

SEQ ID NO: 60899 - protein, 872 aa, Zea Mays
MGAAAAAFDSECKRDAYGFTVRPQHLQRFREYAKIYKEEEEERAHRWRDFLDRLAESANVPTTPSVSPYAATDDGASGAGQTQGNNGIGIHCDDEEVGSENAEDNNKFESPKEADASGESREPNGKPGDLKDVTKLDKVQEETGSSSTQAIKDLEGLMEASGDFEELRDLNGIPEELEEENNGNLEKLVELFLDKGLLDELKPIKVESQWRVRAALSIIDKMMSSRVVKGGNGANDIHRKDGPQLTSIEEEGMTAEVSHDGYPAEVEESCVAEKVELGQETTDDSTGTALDRDNDGSYFLWREELESLVRGGVPMALRGEIWQAFAGVSARRITGYYNNLLDDRTAILDEKDPVDPVVNEQRSAPRKATQPEKWKGQIEKDLPRTFPGHPALDEDGRNALRRLLTAYARHNPSVGYCQAMNFFAGLFLLFMPEENAFWALVGVIDDYFDGYYTEEMIESQVDQLVLEEVVRERFPKLAKHMDFLEVQVGWVTGPWFLSIFVNMLPWESVLRVWDVILFEGNRRMLFRTTLALLDLYGPALVTTKDAGDAITLLQSLAGSTFDSSQLVLTACMGFQSVGEMGLQELRKKHRPEILTAMEERSKDRGSWKDKKGLATKLYSFKHDPSFVCSPVKSKEGLDGSKVNGETGPANLKTYLSTSSILDTDLDQGVDLQDQVSWLKIELCKLLEEKRSADLRGEELETALMEMVKHDNRRMLSAKVEKLEAEVYELRKVFSYKQEQEQITLQILLRMEQEQKVAEDARIVAERDAAEQTCAAHLLQEKYEATMAALSQMEKRAVMAETMLEATKQYQAGQVKANQSFTSSSPRAEHVLGKINQEPNQDMSNRRIGLLSRGLGWLDKSKGRQNSTETSGG

SEQ ID NO: 60900 - protein, 241 aa, Zea Mays
MAQGLQNHSWISDIRGALSVQVLVEYLQLWNLFDNLALQQEVPDQHVWRLTNHGDYTSKSAYEAFFTGTIKFGPWRRIWKSWAPLKCKFIVWLAIKNRCWTADRLAKRGLPHPSACPLCDQAEETIQHVLIGCVLAREVWTSTLNSLGLNALAPQPGCRRFVGWWCTATKAVPKEMKKSVNSLIILVAWEIWKHRDACVLEGKRPCVRTVLQIVATECALWSAAGASRLRELLTCRLISGD

SEQ ID NO: 60901 - protein, 89 aa, Zea Mays
MNMNETVLRRGESAEAAVQVLQPEAPGPGAAVPAGQPVALRHGEEPPGEGTPAGARRADDDGGRRQGCPHGRDAAGRDRHPCLRGRCHT

SEQ ID NO: 60902 - protein, 72 aa, Zea Mays
MGILRAGKAREGHRRRSRGGPERRGGMPFLEGWPTMRPRRDEAASEHGQRRPDADRREGNLRGQDHQASRDR

SEQ ID NO: 60903 - protein, 881 aa, Zea Mays
MSDDGMASAAVEPPKREQNFLVKVGMEAWTQSFAVAHKVRLVHILKNLHTSEVKIYSDASKEFIGVLDGESGGEVLQEYVQQSPQLGELLEAWRLHRENPGMAHILLLFAAVLGHPDGKLRRHGSVKKSLDGVARMILEDKEKMGDVYLELNSGEFRRQNAALDLLAAIVRRGGGLASEVAERFDFKIPILPQLAGTMKKKGSRDGRNRRKGADFGSTRRSFIGFAMSFLEVGNPRLLRWVLQQKEVYSGVLRGIGNDDAETVIYVLSTLRDNVLVDESLVPPGLRSVLFGSVTLEQLSLISGNLESGEAADIAHEVLVMVCTDPKNGLMPGSNLRGNEKRLLDLMKKLKATEVVHHKKLLLAIVSNRLSLCSAYMNEFPYNIEPRSSPSWFSAISLAADVIASAKCNSIVQTLSSSSHGLVSVDDEEVQVVLKCMVPNVCSRAMINRGLLHSDDLVKHGSLRLVFESVNLLCYITESINCMVSKGRLKSEFIGSEKVTMKIDGFPVLSCSDATDASLVDEVHQGDEMQVKRWTSLREYIQDEVHGAMPDPQVFLKLLSSTSQKHQSYSQSIQKNNAQLSEPPQKKRRCSPSCEVDDIIIGGIDVEQDKDASEEQGLELKNDRTTTLCEIWSLDKQDPKTKDANVVENVFHSKLLDVLRLYLGVMPSSFDGSYDFFKIIPPNPLDLSMDEQQSLLSFLLEYSGQSRGCLDPERVPESMYKYLQPLVYIMLHSQIKNIRDQAYILVKAAMASSGAFDHNFTEIDAWLVFLPGYEAKWCVRENLRIGAPNKLSHIVIPFLCDAISVVGNNLYKYQEHTHKLISKSGQLEGRSPDFSPLIICVLQKCLRLLDTASRSTKLHEKSTISLYVCNTIHLILQSQVLF

SEQ ID NO: 60904 - protein, 360 aa, Zea Mays
MLPDAARLEDPPKFELWVIILLAVASVSFAALVAALLWIIMHRHYSRASSMKIELQVAREFSYQELSAATSNFFKDRKLGAGQFGEVYRGELPDPLMPPVAVKRLTRQMEARTRKDYVTEIMTLGRLSHRNLVKLVGWCQGGNELLLVYELVTNRSLDEHLHRSERLLAWPERYRIVLGIGSAIEYLHTGDQNPILHRDIKPSNVMLDDDFEAKLGDFGLVRQIHPGHGSSLEGTVMIGTRAYMDPVCMSTNTASTASDIYSFGVLLLEIATGLMPTEVAGPGGLLSNTLISTVREYYGRGSVLEMADRRLNGDFDEGEMERVLLVGLLCVQQDRRHRPEIRIAVNMLSNLKLPSPRIRS

SEQ ID NO: 60905 - protein, 208 aa, Zea Mays
MTMMTPPPLEQQQGDEMLVPHQELPVAGPEPAPQPMEVVAQTEPANTAETQPPEDPQTSRFTWTIESFSRLNTKKHYSDAFVVGGYKWRVLIFPKGNNVDHLSLYLDVADSGSLPYGWSRYAQFSLAVVNQVHPKYTIRKDTQHQFNARESDWGFTSFMPLSDLYDPNRGYLVNDTVVIEAEVAVRRMVDYWTYDSKKETGCISYANN

SEQ ID NO: 60906 - protein, 66 aa, Zea Mays
MCHEEALLLRVGLQGDQAPLRAPLMAAPREGEALQVLRPCRRRLLHVPILIWLCKIGGLRCSSSFV

SEQ ID NO: 60907 - protein, 903 aa, Zea Mays
MPPPSASAIATRFATHWIADALADDESFDFSVLQGEAPNPKLLRRSPERFRSLTWPLAGAPEATRERVALRCLQEASSVIAAGGDAAATAGVLRVDGARSCEDVLLRLIREVGSSRELEKDLLPPFSQDIQETICTKKSTLPETSFQLLKGLEPWITSMTPQSQMEHNDTEQCDIDQSLRSSHGCVNIEKPMFPTDNAEVQQETMADVVNGSETGNVQKDPPAPTSVFHQPCMHESRSYIPPQEDTIDVVGLGDRSLERSPIVEGNMSIGSVLASAGCDAPLQGRITEPFSQQDKHDHTATVEPKSCRQKSPNLSHCADGEGADDGGSSNQSSKVSIHEGPSAHAPVTSGFDRISGVLSTDASEPEHLSECIPAQDTSMISQLDSRKAHLSALQQERVEKVNQGPEDISANIGPVEKEHVHGDLTLQSASVLLSISCNGSNQGTKSETNLQPGTATEDRMAFEEQNAEKSHLELSGTNKANQALFDDGSVMKNNTVHGGLTAHTAPVSQSCSVTLHDKTSEANCFSEWKNEKNGQKDNCHTSIPGSSQDGGGESAKKTSNEVNSGDTSSKICVHSKDKDINDTLEGLSQQDLCIKCGKVGQLLECSSCSLAAHNSCFGSSVTFEETNLFYCPVCFYKRATEAYKKAKKTYGEARKNVAAFLGTIQVTKQHNEQLNGVQPGGANREDHSDTSKRTHENEVYNLAHQDEEPHQQMKKQKINAIGIDYRKEVLTEKVPFQNSGPASINKHSVLQNNGKTRVKDPEKKQQAGDEEARKEAGNEKSHETGASSQRRCDPPSNHDVEADQEGSLTTSIQSSGSDELEAKGLQEKKAAVSSKSRKGISKRDQHMPTSPRKRNSVHLQKRYSNPLAPPGRRKKLFWTEEEEAVLRGWQNSLHRIMRKFHGF

SEQ ID NO: 60908 - protein, 138 aa, Zea Mays
MLAKSRALFIKEYNNKLFNWLATFSLVMVVIGRFVIKFFLLEIVAWVMFIFLETYTRMFWSAESLYYNPAWHIIVSSWEMIVYSPILDLDRWAIPIVIMLSLGVLYWRCFGRRRKRVKGSLLPLYKNSYKNSSRPRSD

SEQ ID NO: 60909 - protein, 135 aa, Zea Mays
MSNFFAQPDALAYGKTPEQLHSEKVPENLIPHKTFKGNRPSLSLLLPTLSAYEVGQLLSIYEHRIAVQGFIWGINSFDQWGVELGKSLASQVRKQLHGTRMEGKPVEGFNHSTSSLLARYLAPSTPYDTTVLPKV

SEQ ID NO: 60910 - protein, 98 aa, Zea Mays
MGALIAGAKYRGEFEDRPKAVLKEVTDSDGQTILFIDEIHKVVGAASIARKIYQRQDIGVGGFRKIYSGCTSSASARWTAPTSTRPCWSCTMRSSLIV

SEQ ID NO: 60911 - protein, 393 aa, Zea Mays
MASNADQHAAVVSAAPSDSPVGAKKAGAAAAVWKLPAAAAVPVAEVVENPIMDAHSWPALPGLSSPPPPPPPHAGPTAKASPKAASPAPTGAATSPVSLGNPGAPDASHGNDARVRNPVARRALVMPAADGLEKSAPAPEPSPVYVPNARSNGADPHQNGRPGSHHHGRGGGYGGGNRRGNGGGGGRRGSEHHGGFDGQRRGGGRRDGHGPVHQLRGHQPTYIKAPVVAGAPPPPPPFVSPATPQTPPYGPPMGFHDMSAHVYYFPAPTSEGIQGLPFVPLPASPQAVLIDPSRKNLLEQIEYYFSDDNLCKDLYLRQHMDGQGWVPLSLIAGFRQVQKITNNIQFILETVMLSNIVEVQVMFSLYNYCYMISNMIPFGQKTYRLFTNHICFH

SEQ ID NO: 60912 - protein, 59 aa, Zea Mays
MKRTLKRESKECLKLPGRKADGGWRRAPGRMRNGSCWSRRSARGRGPLSPAPAAKARGP

SEQ ID NO: 60913 - protein, 92 aa, Zea Mays
MASATRGSSGSVTLFIEILNKYLYFFEKGIPQITNTVIQDLIELIRTEKQSDNSVADPSTEAFFSSTLRYIEFQKQKGGTIGEKYEQIKTSS

SEQ ID NO: 60914 - protein, 262 aa, Zea Mays
MMLKQENKSAMEAFREVLEKELSGVNLRSDYEDGYEEEDVNSKGGDNKGTSKKTSSRKARKQEGLKQQYNGEEDQNGGSNATTGGARKKKGGHVRQSSATHDAIDKNYSGSSAEGLRNKRQKSAAQSASVGRREGLRQRSDAKQHPDAAEGSTEPLADVPGSDGAAQGSMQHGTSAPHTEIKAMVRNILFKDIVDKEHDAEMAYVEEVINGICNATDSMVGGGGVEGESSNATERRRDEATENALAVKGNTPGNNGDDAGAA

SEQ ID NO: 60915 - protein, 717 aa, Zea Mays
MGRGTTHDETHILYQSEELACASREQADSANGVGNSAHSGSRGSGALLPFSSTHNASTYGDEFDTTIITFNMAVILYHLHDYESALSVLDPLYRNIEPMDEPTALHVCFLLLDITLALQDATKAVDIVQYLERSFGVANTMNPNENASIAQQQLAQAKPPVKISMPPDSDSNAYAGGYENLSSGIFPDEQIEFESLCSSFDGHQNVGRRILNDFSRASADLAATAADLKVRLQIYKLEYARGNYRKAVKLLSTPNNRTEPAMLAIFHNNMGCILHQQRSYHASIWCFSKALKYSLSFRSEKPMKLSTLSQDKSCLISYNCGIQHLMCGKPLLAASCFREAMPLFYKRPLFWLRFSECSLLALEKGLLCANGASSFNDEIEINVVGSGQWRQLIVNPVNSRSNLDSAGVTLGEHKNLVSLGFARQCLQNALLLLDATEKENWVIASDTEDWDQGTVHGYKSSGQKNTTSTDSKTPSGPTLANVNGEQKGTSLNATLQSSLAFYDEIRRKEYIKIRQAVLANLAFVELCLDNPLKTLTYAKSVLQVTDCSRMYAFLSHVYAAEALCTLNRTEDAAENLSVYIRDGNHVELPYSVENSEKALVEKDSDGEDLVAPAVTKLATEEPEQLRPEEARGVLYINLGMIAARQGEVEKANYMVSRGLAMLPNNPRAVLASVYVDLLQGKSQEAVVKLRRCRNVRFRPASIAASSQQSSLEKPPLS

SEQ ID NO: 60916 - protein, 169 aa, Zea Mays
MAAAAVAISTSVCTSSRRSTGCPNVRPQARPLLGMPSLRRRLQTALAATGKTPGEAEEQVPAWAKPGADEPPPWEREGGAARGQEARQVPFYAYLLASTITAIAAIGSIFEYTNQRPVFGIVGPDSALYAPLLGFFVFTGVSVVQGRADGEQRGRGARPQRRIPVRGCG

SEQ ID NO: 60917 - protein, 333 aa, Zea Mays
MDRPGHHQHHFFMPPPPQQQQQQLCVPMMDDPSSFLAELMGVGGGGGGGPSSSARGERKRRFTEEQIRSLESTFRARHGHAKLEPREKAELARELGLQPRQVAIWFQNKRARWRSKQLEHDYAVLRAKFDDLHARVESLRRDKLALSTQFVSCGDISLISSYEKVENCVYTSTILRKCARWGSMTLNPWNRCSKWKLAHAERFAADFYVADAKSGRRALVKAGHHSKVVPLIDENLLVTTSRGTELSSTLEHWLEERNLSSEEAQIIRLEEGYIREGMRLSVVGVLSKKNGDAVILPPLEPQSTGFVLLSCLLPSYFDGIVLRLAAVPNSGVS

SEQ ID NO: 60918 - protein, 257 aa, Zea Mays
MVGGRPLFVLFGSSIVQYSFSNGGWGAVLADIYARKADILLRGYTGWNTRRAVQVMDKVFPKDSAVQPSLVIVYFGGNDSIAAHSSGLGPHVPLDEYIANMRKIAEHLKSLSEKTRVIFLSCPPLNEEMLRKSTSSIAILSEIVRTNETCRLYSDACVALCKEMELKVVDLWHAMQKREDWMTACFTDGLHLSEEGSNVVVEEILKVLKEAEWEPCLHWKAMPTEFAEDSPFDLVSSSGDATVNPSEWTVHRRIPWD

SEQ ID NO: 60919 - protein, 925 aa, Zea Mays
MDVPTPPNRAGCNSNISNIGSPMQSFDDPFGGAAMTSFDGYSELSSPSVADHIFSLLNDPSSVQHMFALWSSSGSSPRASAVREDMSFDTYPGPMDVTASLAQRINSASVFNPTEVDRGLKDSDGLVPNNGSQQGSSIIPRSVGNILADRMLMALSLFRKSLSDGVLAQVWMPVEHNGRVVLSTSEQPYLLDQDLAGYREVSRNFLFSVKEEPGLHLGLPGRVFISGVPEWTSSVTYYSKPEYLRMEHALLHEIRGSLAMPVYDPSKGSCCAVLELVTNKEKPDFDAEMDIGVNLQTTTDRSNQKVYSENQKYASTEILDVLRAICHAHMLPLALTWIPTSNGTANGFCVAKNIRLDSQPGKSVLRIHESACYVNDAKMQGFLHACAERHLEKGQGIAGRALKSNLPFFSPDIREYSIEDYPLAHHARKFGLHAAVAIRLRSTYTGKDDYILEFFLPVNCKGCGEQQMLLNSLSSTMQRICKSLRTVSEAETDSVSATEPMYEKTNGSCLPTGNSESSSHDDQPITESAFHDLSSGDKQGDREPAKARSSSKRVAEKKRSTSEKNFSLDVLRKYFSGSLRDAAMSLGVCPTTLKRICRQHGISRWPSRKINKVNRSLKKIEKVIKSVHGVDRSLQYDPATGSLVPATSLPDKMPTSSAGVKTVEEKSSPEPGQDFSSPDGWQRESSQLHASSIPTRVGDEVQMLAINNEGSRNYASGIANIAQHSNSEDAHGPLYPVGAVNSSRTGETGYIDSPTSLHMDSVEGQTTVRDSRSVQQADVTMATKEQTLPSTSGTTDSSSGSASSQPAFKGNPGRALKVSSSDALTVKATCNGDTVRFKFLPAMGWYHLLEEVAKRFKLATGAFQLKYKDDEDEWVILANDADLQECVDVLDSIGSRSVKLQVRDLPCLVSSSGSSSCCLQVEGSA

SEQ ID NO: 60920 - protein, 86 aa, Zea Mays
MALVQAGMGLTRVVILVGAGVAGSVVLRNGRLAEILGELQEILDKGKKVKDGGGGDGETDLNEALTSQIPGHPTSSATQIHLFTTI

SEQ ID NO: 60921 - protein, 136 aa, Zea Mays
MDGLNYSKLRSSLRPRLQAFSGVLFSSLRSLDGLLHMASVAVLQFVHDPHDDPPVLGCVHLTLARVYALDRARSLSLVKDHFTTLGKDLTVIGYCCDDAEPRRRQLQFYVAESMFRVAGALVEHLMRRARAESTTR

SEQ ID NO: 60922 - protein, 135 aa, Zea Mays
MEEYLESMKSLRSYMNDLEDDAAKRSVEEQQQRTAIDAHDSDVALVMAQAKQASEEAERLATARAKVGMQMAEKQGRIATLDIECATLKQVAKSQSKQNFIEGEKHVIFNSEGSLDKFVSIYSPPSLPTTMLFSF

SEQ ID NO: 60923 - protein, 396 aa, Zea Mays
MAMPTTSSASPCQAPSPAGLPISPGARATILSFSRRLRRSRGAIISAPTGCLFLGLPKSCCSIAAFGEVAAVSDDYVESSPSSSGYLNSTMDASSHEDNQSERVAKMNQNSRDNNKMIKICDKLIGVFLVDKPTPTDWRKLLAFSREWDNIRPHFFKRCQEKADTELNPEMKHNLLRLGRKLKEIDEDVQRHNELLEVVKSTPSDKLGSIVAKRRKDFTVEFFNHLYYVAESCHDEPEKQTELAKLGNDCVDALQAHDDTTGSLEALNAAELKLKDILNSPSVDAACRKIDDLAEKKELDSALVLMLSKAWSAAKGTDITKSEAKDIMFHLYMTAVANLQRQMPKDIRILKHLIMIEDPEERSSALNDAFTPGPELQGDNVDTLYTGAAHLGKSYS

SEQ ID NO: 60924 - protein, 284 aa, Zea Mays
MPAGMKLLPTGRKSSLAIFTYSSLVGMTTYFLHYLSGMLRSVLVEIGIAEDMHNPLGIFVLVSVILAGAWFGYWGVRKFVLAEDGSVDEGVAYFVEWAILIVSAVMILQSSLDYLFAFTTLVLCGIIKVIARIEGKSKVLRYIFGGLSDGTSRNSSRYGDFDEDYSSMNEDRQDGFGNLHGGYQRHAPRRNSPLAGSAKTLSQGVAMDSFYSTFHTTPERMEFTKEEYEAFTRKETKKAMKQLLSSPDFNRWALANADRISVAPPGGSYSSNNSQQRHRFLGLF

SEQ ID NO: 60925 - protein, 189 aa, Zea Mays
MARCLALVSLLLLGLASAASAADAPFVVAHKKVSLSRPKPGVERVAVSLDLYNQGSATAYDVSLNDDSWPTQAFELVTGEKSKTLERLDPGATATHTYVLETKTQGRFQGSPAIITYRVPTKTALQAYSTPIFPLDILAERLPEKKFEWAKRLVAKYGSLVSVVSFVGLFIYLVASPSKSSSKGSKKRR

SEQ ID NO: 60926 - protein, 374 aa, Zea Mays
MEHDGTTNLAVTEAVRSVQLLKIDGYCATATMGASEFIKFRWHIDGHEWEVRFYPDYWYFFEDEDCFGTYGDDDHSEWVGLKLILVSEPQRDDDKVRVNLSCRLVCPSPTSQRPHLDTCWSEEKRVSHVFASDSKCSPELLLILKHELPSSGYLVDDSLTVECTVTVLRDLDAATDKALSSLPVPPPSDLHQHLGDLLQSEDGADVTFRVSGESFAAHRAILAARSPVFKAEFFGGMEERSSASVEVKGMEAAVFRSMLRFIYTDTAPELDGAQDQEPEAAVAMAQHLLVAADRLKLMCECKLSGGIDIGTAAATLALAEQHNCSLLKAKCLEFVTRSPETLDAILATDGYEHLVASCPSVLAELLRAARGRKI

SEQ ID NO: 60927 - protein, 319 aa, Zea Mays
MCSIHGDCLLSSCSHDFFRTLTWWIVPCLAVKVTREVSRFAHILQQGSSSAWTWRACAVLFASVASWTYLTTIILSSCMLFNLVCSLQVIHFDDYGKLLEQDADPLVYLKEHLQLRHNLSKISHRFRVFLLLLFLSVTAGQFAILFKTTAYSGPINFTNGGDIAVVGLVLCLHAAAKISHRAQNIAALASRWHALATCSTDSTYVTTPNSSGNLAPFPAHLFLRDYSGSDLESLDSASVQGSSHGTAQLASYMSSYHKRESLVLYLLANPGGITIFGWIVDRAFLNTILMLELTLVLFVLSKTVVIPAKTLVHSYIGYP

SEQ ID NO: 60928 - protein, 630 aa, Zea Mays
MGKGARRRSRASGAGGGGHGSKRPRRAEEEEQEEEEMEPLVGEEEEVAALEGEDYCFVCKDGGDLRVCDFRGCQKAYHPACVGKDSGFLNSDEEFICEWHTCFICKGRSRYYCFCCPWQAFCQNCVKQAEFVPVLRKTKGFCTNCLRMAIMIEKNVDVDSDGERVDFNDRATYEFLFKEYWEEIVKGKESMTLDKLEKAYAFLKEKLNCKQDLDLEKVHDEEHSSDDDFVGNSDDDDDNKPSSTTKFNGTSNTMKFFLREDRPMKNGYVGWGSKELMEFLSSIGKDTLNSLDQHGATEVVKVYIQQKGLLARDKKKLVICDDKLKILFRRSKVRYNRIYSLLGKHIAVNMTSEDETFANSDDNNETFVRKKARIGNYSSSTPKCTPEINKRCFAALVRHNIDLIYLKKSLVVDLLREPDTFGSKVIGCFVRIKIDLNDYSFYMHKKVHQHRKLYQLGLVTGTSKSPEEYKINDVSTDILLCISSIPDIKISSLSDEEYEEEECQDLRLLAKNESFKRPTVGDLEEKARSLRREIVNHWISKELQRLERLIDRASEKGWRKEKFEYLDKKQLLRKPSEQQRLLEEVPQVIPETEDNKDTEFQVTGQDKPIQKSTVALQGDTIKVSVIANCY

SEQ ID NO: 60929 - protein, 117 aa, Zea Mays
MVRHLLLLSFPRHSSAPAAPLLQIHGAQHLERPCRCSSTGISSSTRRPGLSHHGCPSSISSLPTRLPRFHGRRRPSHLPGGRPRPCPSHSSPFGPAAASTQPLPWHTVLVQPLSTGG

SEQ ID NO: 60930 - protein, 165 aa, Zea Mays
MIYAVMHSATITETMVKAVAVLAGTDVKGTIFFSQEGDGPTTVTGSISGLKPGLHGFHVHALGDTTNGCMSTGPHFNPVGKEHGAPEDEDRHAGDLGNVTAGEDGVVNVNITDSQIPLAGPHSIIGRAVVVHADPDDLGKGGHELSKSTGNAGGRVACGIIGLQG

SEQ ID NO: 60931 - protein, 52 aa, Zea Mays
MIGRADIKGSKSNVAMNAWLPQASYPCGNFSGTSSFKLRRSKGSIGHAFTVR

SEQ ID NO: 60932 - protein, 123 aa, Zea Mays
MKREVERKEQEKKRSPKVEFITGVQPPINASIPKIPGLAGVCTLPVPTEGVQKETRPNKKSKWDKVDGDVKNHVVPSGHDNLSATTAALLTSANVGAGYAGFAQQKRKEAEEKKNDHKSDRRS

SEQ ID NO: 60933 - protein, 561 aa, Zea Mays
MGDLKEVDHRILKAIAVEHRKDVDSAVVTVLDEVMPSMTGSAGTLFTHKEVLPSMDDSVGNLFANRSTHEVGSSSCAGHEIHIDEIDVSVHPAQHTSSGEAKTGKQENINNECVGRLASVEGVSEQLNLHSDPIPNGSQHDLIPNLDVLSSNTNPEKMLANIYNEVGYSGLSSECFSQQLTGKHGGDIIAPQSHDQDPNKMLPVGDYFSQNSSMEFFSGYEDMHFDGDLLPPGSNDKVSSGILGTEKDSSVPVLDVPGRNKEESPAGTSGFIEQKDTSNVTNMLPDLNLYHLASTASTHSSHSVSIESLEDSVADARSNKNDLLPSLELVTKMIEDVELLEEKAKVAKRESSVAGTGILTKVEELREMLTHAKEANDMHAGEVFGEKAILTTEARELQSRLQRLSDERNKYLVIIEEIRQTLDQRLVAAQQEIAAAEKEKLEKEVAAQTLLNEQENMMNSIVEESRKLQKEAEENLKLKEFLVERSQIVDMLQGEMTGICEDVSLLKRVVDERLSLSKLQPSAMSSLSSSLHSSHHKSWTSSDRTTEANGCQMATTLVKAF

SEQ ID NO: 60934 - protein, 191 aa, Zea Mays
MSLLPCLPQHEQLLQTVCLTIGAFSKWIDAAPAELSILPPLVDILNKGMSTSEDTAAAASMAFKYICEDCRTKFSGSLDGLFQIYHIAISGVGGYKVSSEDSLHLVEALSVIITTLPPESASRALELICQPVINPLQEFIQQGDQVLQRVPARHLTVHIDRLSSIFSNVKQPEVVAEAVYRYWPTLKSIFD

SEQ ID NO: 60935 - protein, 69 aa, Zea Mays
MSSIRPRTLMANLLAKSTTILLGWRTTTPTRYLSLIGTGSEKSLRHELSIRQTLGALLAPSSMLPFKVG

SEQ ID NO: 60936 - protein, 292 aa, Zea Mays
MELRTTERKDPGYINKNIRDSQNQRDDEPLLKMGLDSPELLDGNWSRLCITCKIVRPVRSKHCSTCDRCVEQFDHHCPWVSNCIGKRNKWDFFMFLILEVSAMIITGVMAIIRSVGDPASPASFGGWLGYTAINHSWVVSFVIMDLLLFLGVITLTVIQASQISRNITTNEMANTIRYSYLRGPSGRFRNPYDHGLRENCSDFLLKGYNEDIESTVQTLQSDEEMGPIQMSSPVSQNGESIPPHVNGTDHGSTISHANSKSHRQSPSNCLGLGLGTGHNNPSSRYARSLLPL

SEQ ID NO: 60937 - protein, 694 aa, Zea Mays
MSPDVDAAVATAVAPGGGCGGDGEAGAGTSSSPASAANGRALVRWDQILPRRSLRVLLVEHDDSTRQVVTALLRKCGYRVAAVADGMKAWGVMRERAYAFDLVLTEVAMPSLSGIQLLSRIVAADECKNIPVVMMSSQDSIGTVLKCMQKGAVDFLVKPVRKNELRNLWQHVWRRHAMNCQTNGSENNAASNHISANVANGSKTGENSDEESDAQSFGSKRDTEIHSVEAVQDIRRDEVAGSSKNNELQNKSYDGVNTKVDVSKYTNGAPSGSEKNVRSKCLNGITSAKVAEQIMDNALRITDASSRRPTNLGNGLAMTEPAADRKCQSSVMENNAVTENNPGDKSKGAAIGHADSCPSEFMVTNLGKEHHLNGYKNQEFREKDIFNHSNSSAFSRYGNKRIEPSGEIQFFPSPCVIGQGHVNGKNPVFQPNGVLLPPNEHNTGESTRQARISLDSRTEGAAILCSTSAREDAGANSSSHRKDSMSHPSYGFIPVPIPVGATMPYHYGAILQPVYYPQSPLMHCDSAGINKAAIQHASGQPNYHEAPGKPSHVLIEHKQSEENHQLHHSRQILRESGEPIDMARAHVDRANQTASCSQGICKGSGCTCSGEADINANTMVALESGNESGIQNGDRSRREAALMKFRMKRKDRCFEKKVRYHSRKKLAEQRPRVKGQFVSQKLNSATTTDAEADS

SEQ ID NO: 60938 - protein, 120 aa, Zea Mays
MVQRTPRRKRLSRWPPVNNSGHAWLDSRDGATFELSIPGLILSTGSRKFIRFNSAPVLIAIRYFQSSIFSSCLNRPPPSLFISGFLLRTELSPLIEFVHYTSVYNLTIGFLDQNRTDSKI

SEQ ID NO: 60939 - protein, 317 aa, Zea Mays
MAAGKVVVTGPADAVQLKERIEARAKKPVQIVSAGAGSPKKDKEKKADGGEKNAAKEKGGGDAEKKKADKKKGGGDGGEKNADKKKGGGGGDKKADKEKGTGKPKEEEEEEEKPKEPKEETVTLKIQLHCDGCMDRIKRRICKIKGVKDVAFDAAKDLVKVTGTMDAAVLPAYLREKLSRDVEVVAPGKKDGGGGGDKKGKGAGDGAEKKNKKKDGGAEGKNDRAAAAAAAAASASVAPIPLADAGGMYLMPPHYGYMPYPPAPGGYYGAAPPPNHAGFYANAGVHYPPPTAYGYGPAHLHAPQMFSDENPNACSVM

SEQ ID NO: 60940 - protein, 306 aa, Zea Mays
MEHLRWRPTVNERDFIECALQSDLRVDGRHSFDFRKLKITFGREDGSSEVQLGETHVMGYVTVQLVQPYRDRPNEGTLAIFTEFSPMADPSFEPGRPGELAIELGRVIDRGLRESRAVDMESLCVVAGKHVWSVRVDLHILDNGGNLIDAANIAALAALSTFRRPECTVGGDDGQQVTVHDPEKAGGEGVMSSVIMQCLRIASVKAADITSKIKKAVDSYTTEKALKKVKRLPTSVPQKINVTNVTMDGKGDGELEKQSVQMHSDVQQISKGDENQQSIKRNSPLTRDRIAKHKQTSTFIGGPSNW

SEQ ID NO: 60941 - protein, 239 aa, Zea Mays
MYTEIAPLCGMSFNKAKDFVWRHDLFEDSMVAAGLSGIESGTKLYISNLHYGVTSEDLQELFSEMGHLKHCAVHYDSYRHPTGSAEVIFTRRSEALAALKRYNNMRLDGKAMKIEVIGAELGLSAAAVPQISVVPGASRRGQREVVMMPGGSGFGQGASGPSSSLPGWKRGGFVRRGQGRVSFPQRGRGQVRSRGRGRGRSSFVQSRGRGYVRRGNAEKSAKQLDNELDNYNSGAMNVD

SEQ ID NO: 60942 - protein, 188 aa, Zea Mays
MPICPMIICTQVVCILLMDGHLENYTSDYTLQVLLRGVALVVFAATAGASSCYFLSKMIGKPLVFTLWPDKLSFFQRQVAKRREKLLNYMLFLRVTPTLPNTFINLASPIVDVPYHIFLLGTLIGLIPASYVTVRAGIALGELTSLSDLYDTQSIALLFLIGVVSVTPALLGKDEAQEKPSEMAVGAS

SEQ ID NO: 60943 - protein, 798 aa, Zea Mays
MEAKQRPRHGGERRPPPATDGGEEYDPWTAWLYKPRTISVLLVGACLLIWASGALDPEGTAAHSSVTSIKRGVWAMIAVFLAYCTLQAPSTILIRPHPAVWRLVHGLAVVYLVALTFLLFQNRDDARQFMKHLHPDLGVELPERSYGADCRLYVPENPKNKFINIYETLFDEFVVAHILGWWGKAVMIRNQLLLWVLSIGFELMELTFRHMLPNFNECWWDSIILDILICNWFGIWAGMHTVRHFDGKTYEWVGLSRQRSIMGKVKRSLSQFTPAQWDKDQWHPFMGPLRFIQVLFLCVVFMTVELNTFFLKFCLWIPPRNPLVVYRLILWWLIAIPTIREYNSYLQDRKPVKKVGAFCWLSLAICIVELLICMKFGHDAPALTAHKPRAAAAASCPGRILRAARAALIFPAPTRRTTRALAMSKKVGRAKKAAGGGELSRFLESHLQTISDTFQMMAESAPGALERTEWSEVVKLGDQVSRQATVAGMLWSGDLPDVETLKENIVAYFNILQGFLLVCHGSMVGAGPTLHKSIFGSAKDVVDSSFSLFKHAVSAYESRSSDRNTTIPQVTGTVWEACAALKKVPASNCIAIGRAMTRIGVCLKDVLREMNELPIGGSGDSTAEKSSNGVVDTTSCSDRDERSDLDLDDDDDDEFTEEEVAVAKLVINVVSDSLVVVKEAIRFITGLLRSSGNKDKDGANEDRVEPMEKLLSHCKEIADQVNDLGASVYPPQDSSEMELAIKRLYNGINGMRKEIGNLGGAPESTFAALEGFENCLGSLRARLADDVVNEMEGLNISH

SEQ ID NO: 60944 - protein, 50 aa, Zea Mays
MQIYIAAGEIYGGKHRMASLTSAYLNVSHSCCWTPWMNYLFFNKDGAHAD

SEQ ID NO: 60945 - protein, 234 aa, Zea Mays
MFLLVLNSSPVSRVICSRAIHTVFLGLVTAPHRFSYLTMAKSSGAVVHLEQGHATVVWRYGQPPRRPSDSRFLRPSSREHQSLEPRPPASCCPRRRSACSATHPAELEGIFIFSHSLQAMAFNYYRSTWCGSAAANKNNEEIEACAVLVATLRKKRRWGGSVVGHKMKNRDRIGGDIQLNNDYFIERSLFNPEQFRRRFRMQQSLFLEIEDKLAAANKFFRQKRNAAGVFGILQ

SEQ ID NO: 60946 - protein, 101 aa, Zea Mays
MEQTVSHCVPCPYIVLRLSVKVKHLEKKKSPFQPHLPAEQEQQRGGGAGGGVHKPGGVPDAGGAAAEQGRGRLPREHPVAEELLAARLTGPRGLPLLILIL

SEQ ID NO: 60947 - protein, 1053 aa, Zea Mays
MSENIDLVLEFLRKNRFAKAEAALRGELTGRADSNDMATQRRVAELKEGEEQQEGLVGSNVGPKGAAAARSADSSREFIVKEIDVGALPNGSDGKKGSGIGQPQDNVGDLYPWTFSIANSTAEQLAELLVSEEVPRHRRGAVLAEKRDRGVGTEQPGPVLEQKVSFGRGKGKVDAAGRTENSEQCHFRDKSLVPEKEEMLNGCTVKTVLPFPTENPSSSYNSTHHENERKEVKRSSNADGVGKGAKGHLDEGNRQYYFEKSLDTDLVSDRCFDLQLVGDSQREELPKLPPVRLKSEDKLVNMNWEEKINHHGSGAKQSSADHAFMIGSYLDVPIGQEITSSGGRRTIGSSWLSVSQGIAEDTSDLVSGFATLADDSLEYPIGEYWDSDEYDDDDDVGYTRQPIEDETWFLAHEIDYPSDNEKATGHTRGNDRHDRPTKDEDDDQSFVEEDSYISAWQGFVSQNSELGMLGNGKFLNDSERPHPDDLFVEDDQHGSVRSIGVGISSDAADIGSEVRESLIGGSSEGDIEYFNESSLSVSGKRHPHQDTEKKRVGAKGVKHDQIIYAADIQKGNLPPGAADVGFSFPPPLHSGKNHESDAKSLWSKKDEMYCINDPDDCQNGMVSDDMLATWRKKNSESSLRSSRDEMTSDVVRSRNSSASYDETEDTSNARHHKLDDAQEEDTGTNLDDEEAAALQEQVRQIKAQEEEFETFNLKIVHRKNRTGFEEDKNFHVVLNSVIAGRYHVSEYLGSAAFSKAIQAHDLHTGMDVCVKIIKNNKDFFDQSLDEIKLLKYVNKHDPADKYHLLRLYDYFYYREHLLIVCELLKANLYEFQKFNRESGGEVYFTMPRLQSIAIQCLEALQFLHGLGLIHCDLKPENILVKSYSRCEIKVIDLGSSCFETDHLCSYVQSRSYRAPEVILGLPYDKKIDVWSLGCILAELCTGNVLFQNDSPATLLARVMGIIGSIEQAMLAQGRDTYKYFTKNHMLYERNQESNRLEYLIPKKTSLRHRLPMADQGFIEFVAYLLEVNPKKRPSASEALKHPWLSFPYEPISS

SEQ ID NO: 60948 - protein, 323 aa, Zea Mays
MVIDLEFIRAIVTADEVLLLEPLAQEVIPFIDKLRRHFPLKSLEVDVGATQVGNVNGKHAKTAAECELPLPFEFQVLELALEAVCLSFHSSLSDLNRHTIFVMDELTKNVSTRNLERVRSLKRNLTSLLAGVQKVRDEVEHLLDHNENMAQLHLSRKQIKCPQDEILLASAALNSNLPSKTKLGTPNSVVNQAMGIAMTAPLADNVGDLEILLESYFMQLDGIRNRIMMVRGYIVDTEDYINIQLDNQRNELIQFHLVLIIVSFGIAMNTLIAGAFAMNMPHNGEMKKFVGPFWPFVGATSSFCLLVSVVLLGYARGNRLLGS

SEQ ID NO: 60949 - protein, 193 aa, Zea Mays
MGHVHSDQKAKKLAIICEQRVIIPNGHGEKLVGLLHRTSSKNLVILCHGFQATKDDSILVDLADAITKEGISAFRFDFSGNGESDGEFQYGSYRKEAADLRSVVLHFSEQKYDIIALIGHSKGGNAVLLYASKYHDVPAIVNISGRFALERGMEGRLGKNFMRRINEDGYIDVKNKKGLAFLYLINNTSFFSC

SEQ ID NO: 60950 - protein, 274 aa, Zea Mays
MLWIHGQITTLKIMQGLFIPSTVSLAVPLALMSLTSEANGSSEKSSSLLSSEQVAPRGQLVLGVGIGALMFVPVFKALTGLPPFMGMLLGLGILWILTDAIHYGDSERQRLKVPQALSRIDTQGILFFLGILLSVGSLESAGILRQLANYLDANIPNADLIASAIGVASAIIDNVPLVAATMGMYDLTSFPQDSDFWQLVAFCAGTGGSMLIIGSAAGVAFMGVEKVDFFWYFRKVSGFAFAGYAAGIISYLAVQNLHLSLPTSLVEIPFISGS

SEQ ID NO: 60951 - protein, 277 aa, Zea Mays
MDRGIPKIEPDSDLQKRVEIKTPELIERMRETCRIAREVLDAAARVIKPGITTDEIDRVVHEETIARGGYPSPLNYHFFPKSCCTSVNEVICHGIPDARKLEDGDIVNVDVTVYYKGVHGDLNETYFVGNVDEASKQLVRCTYECLEKAIAIVKPGVRFREVGEIINRHASMSGLSVVKSYCGHGIGELFHCAPNIPHYSRNKAVGIMKAGQTFTIEPMINAGVWNDRLWPDDWTAVTTDGKRSAQFEHTLLVTDTGCEVLTARLPSSPDVFPWLKP

SEQ ID NO: 60952 - protein, 280 aa, Zea Mays
MVFQKWSSSSEMESCGGGQVPEMPRVPKSARGKRSVRKKEAQSPAQMSAIDLLATVAGKLFDEGAGSLGNTSAGAPALAAFAKDALVKQEQCDEQMKLFKHEATDQDSCNESAILPHIVLQRVVNNARNEDPKAKSEVQDKESSMISYTKAELGCNFGVIADRWSPESVESGAFTGDAVARLMMTAPAGFHKNAPEMYSLLDSMDVDVKPPPLVSSDSTGEMPLHGDKIHRSTSLPRAPKGVGFFAVDRDDDDDKSSGCTHPSTATNKDFTSNCKAEYNR

SEQ ID NO: 60953 - protein, 280 aa, Zea Mays
MPRSSSRRHVLDGWLAHEPRARQYKATFIPAEPVTQFLAPSEVSWGDEEMSSSDQNPAATPASSGPAEPSPPGRPTAVSSRVLDMGAQLAQALKPVRQMKQHACSFALYAHDLHRQVEVHHFVARLNQDVLQCAVYDSDKPSARLIGVEYIVSDTIFEGLAPDEQRLWHSHAYEVKAGLWTDVGVPEALQSSEMASLARTYGKFWCTWQAAEPGRVRGELVRGRDERYGIDSSAGGLKAARVEMDEPEWINPNADYWRLHGKGFAVDVVPAEMKRHAPFP

SEQ ID NO: 60954 - protein, 272 aa, Zea Mays
MSTLPWNVLIVLSLSASTWEIRTLYTSGSSSPKCVVTLMLEIAPSFWGRWKRRHSNFDKSIPFALLSQVAGIREYFAANPALTSELPSTVVKSKASETLIIQSEHEDSELGDEFYDALTRGESFEDGDSDDDDDATTPKARKVKLKNVSWAIAGLALKTTKALVETSELVTNSSPVTVDPSHFHGTLHRAKTQNDQNSWSAPGGEKFMIRGKTYLTDYHKVVGGDPLLELLAVDWFKVNERFDSVALHPKSLVQSEAAKKLPFILVINLQIH

SEQ ID NO: 60955 - protein, 136 aa, Zea Mays
MWRATRRSPPFLRWLSSDAASSKAPRQRVAALWGNGDYGRLGLGSLESRWSPTVCPFFLARAADPPASLACGGAHTLFLTQNGRVFATGLNDFGQLGIGTSVTHMLEPVEISGFHERVVEVSAGNHHSCAVTGNRK

SEQ ID NO: 60956 - protein, 425 aa, Zea Mays
MAVGGTQPVLRKYLGALKDTTTVSLAKVNSDYKELDIAIVKATNHVERPSKEKYIREIFHSISAARPRADVAYCIHALARRLSKTRNWAVALKTLIVIHRALREVDPTFREELLNYGRSRSHMLNMAYFKDDSSAEAWDYSAWVRIYALYLEERLECFRVLKYDVETDPPRTKDLDTVDLLDHLPQLQQLLFRLLACQPQGASSYNVIIQHALSMVALESVKIYTAISDGTINLVDKFFEMQRNDAVRALDVYKRATNQAERLSEFHEVCKTIHIGRGEKFLKIEQPPASFLQTMEDYVRDAPTGQKQKTILAIEYKKEPEEEEKPASPPPAPEQEPEQEPEPEPEPVKEEAPEAEPDLLGLNEPSPAATAIEEQNALALAIVPIDDVPGAAPTFENGVTGWELALVTAPSSTETAVAPSKKLVL

SEQ ID NO: 60957 - protein, 269 aa, Zea Mays
MSIDPKLLLSNFPMISMILGLLIIGKTLLVTFVGRVFGVSTIAAIRVGLLLAPGGEFAFVAFGEAVNQTDDLHDHIIILGFGRVGQIVAQLLSERLIPFVALDVRSDRVAVGRALDLPVYFGDAGSREVLHKVGAERACAAAITLDTPGANYRAVWALNKYFPNVKTFVRAHDVDHGVNLEKAGATAVVPETLEPSLQLAAAVLAQAKLPMSEIQESINEFRNRHLSELTELCATSGNSLGYGFSRVMSKSKSISSDDESETVDGALAI

SEQ ID NO: 60958 - protein, 192 aa, Zea Mays
MSMGRFVNSMDPTSGLEVIRDWNGVAQVVLRSPKGASARVSLCGGQVVSWRNDRGEELLFTSSKATFKPPNAMRGGIQMCFPQFGYSGTLERHGFARNRIWSLDDEQPPLNHNDNGSKVSVDLILKPSEDDLKCWPHCFEFRLRASLSKDGDLSLISRIRNVNVRSGLKVWRHLIILTTLATKNGLRNKEMP

SEQ ID NO: 60959 - protein, 294 aa, Zea Mays
MDIEADGRFGNKRVHNRLGPGSGGAPPSTNGKVCNYWRAGRCNRFPCPFLHSELPEAAPPKRPTGPGGNVWRNPNTGGRGGGHHNRWGKGPGGGSGIASHKPPERPCKYFLAGTECSYGERCRYPHSYCISDSIAMLTLLKGHEQGVTGIALPAGSDKLYSGSKDGTVRMWDCQTGQCAGVITMGREVGCMIIEGPWLFVGIPDAVKVWNMQTAAEMSLTGPTGQVYALAVASELLFAATQAGRILAWRFSAATNCFEPAASLDGHKLAVVSLIVGGMRLYSASMDKTIRNSWS

SEQ ID NO: 60960 - protein, 265 aa, Zea Mays
MFVLRIQSVDFPDAAVAAVAADEVGTSSGGVTTSRPLSSHPPPSTTTSSILTLELPGANPVAPSRSPRILHTRGVIHLYHSSSSTSTSSSYASAVAATSSSSSGPATPQPASDSHLPLCRGTRLLVLAVPTRVSPEDFVRFCGPHLECAADIRFIRDDGVEDRYSVLVEFEDQSSAEWFYADLNGWRFSTSESEVCHVLFIAAVQYTPSSEVATTPPAGSTELPMCPVCIGELTVLYFFLYFGASAIQFIVICTCHHGVTFEFNL

SEQ ID NO: 60961 - protein, 291 aa, Zea Mays
MPGLRDYVKKHYPLGPVWGPAGGAVVSQPKAAAPTPKAPAVKAPPPPAPPAAPLFSTEKSPKSSKPKEGMSAVFQEISSKPVTAGLRKVTDDMKSKNRADRSGVVSSTAPAPAAAPEKTSRAGSFSFKSGPPKLELQMGRKWVVENQVGKKTLAIDDCDSRQSVYVYGCKDSVLQVNGKVNNITVDKCTKFGIVFKDVVAAFEIVNCNGVEVQCQGTSPTISIDNTSGCQLYLSKDSLGASITSAKSSEINVMVPSGGADGDWVEHALPQQYIHSFKDGQFTTSPVSHSGA

SEQ ID NO: 60962 - protein, 245 aa, Zea Mays
MDREPYAYWKGNPSVSGTRKELVKCNVSSTHDWNARIYAQDWFKESKAGYKDSDLSSQCAHRYKIYIEGSAWSISEKYILACDSMTLLVTPRYYDFFSRSLMPIQHYWPVRYDNKCASIKYAVDWGNSHKQLAQRIGKQASNFIQDELSMDHVYDYMLHLLTEYAKLLKFKPTKPPDAVEVCSESLACQAEGLEKKFLMESMVKFPRDACDLPPPFNPHELKLLKQKKENSIKQIHMWEQKDLGA

SEQ ID NO: 60963 - protein, 528 aa, Zea Mays
MPGGKRRRARNPTAGGPQRSAGAGRRRPVPELPSFVSPASVAAAFSPASGGRSRGRCARRCGAYSDGESSHAVPFSYPSLRSCSAYPERDQAQALEVTIDTAPCADPAASVPMYSYGPAVLGETGLVLSADEEEACDRGLHLGLGFRDGGHDEMELKLKELTEEDVSFKTPKRKQEQRAKANPGFLLIGGVRIYTEDISSSESDRMSSSDVDLEPNSGDGERFENDDGDSDEEDRQGEERDSISDSESLGSESDEDLSTGDSSSVDNEVVADYMEGIGGSDELLSSKWITSMNLGDADTIEQMYTNDNDGFVKKGKEKLEGYALMTASEQYGMKRRNSLEQRKGKGMVCDRDLSSMQVMDQEDMFMVNNVWMPNRSRKGMKTGSSSSQLSQSWPKDDRKSKNYQSRPGEKKQHRKELIAKKRQQRALSRGVDLGQINSKLRKMVVDQVDMLCFHPMHSRDCSQVQRLASIYQLKSGCQGSGKKRAQAIYCKAARIVVYRTSLHHLSCSNSSRVPEQLWLLQIILITHY

SEQ ID NO: 60964 - protein, 313 aa, Zea Mays
MLSKGNILIGHSLHRDLCALKIDYSQVIDTAYIFKYANLPTTASPSLNSLCKAILGYSVREEGEPHNCLKDAEAAMNLVLAKLKNEFNDPIEIAASSVTESDVVKLLAHRIPVYLPCQELCKIFSGNPNIDDKIDSRIRGEFYSTCISFNDVDEVDKAFEELDGQKTKDSGGRLQKHVLLKLDNGDVVSFYVRKMVYDSWPKQIEVPRKRPEPTEDPEPKKEHAKGVQQKKRNNFVRDTEDPEPKKRPEPIEDPEPKKEHAEGAQADLEASATAAIPETARLRRTATREAPPTRMGRPRTSVTFRRTQPSTHS

SEQ ID NO: 60965 - protein, 311 aa, Zea Mays
MGASLSLVPVLDYFARRECLRAGLHQNAVTLPYPDGGAGATCTVQYWAPQGEPELPPLLLVHGFGPRADWQWRCQVGPLSRHFHVIIPDLLGFGGSAYPSETAPPPTEATQAAVLAALLGALPGMERRRVAVAGTSYGGFVAYWLAREAGPARVGPVVIASSDLLKTAADDRAFLKRPAALRKLLELASCRPPPRLVTPDFLLRDFIQKLFTQNRERLVHLLKGITVGTEKFQVTPISQEVLIVWGDHDQLFPVEKAFAVQRALNGTARLEVIPKTGHAPQLEDPARFNKVMLDFLLASHKPDPSVSGSAQ

SEQ ID NO: 60966 - protein, 82 aa, Zea Mays
MCGREPNFVLSEEEKQELRRYTWEDFLAVTRNTITSKKQRKVGSLRRSKADLFMGQSDGDTEMANGGGSSNSDNGDAGTSAS

SEQ ID NO: 60967 - protein, 224 aa, Zea Mays
MAALISALLFAALLVAAQYMLRLLHSFLWVPLRLERRFRRQGIRWPPRSLVSGNVADYRDLLAAARSPPLSSFRHDGVVARATPQYALVISDPELVKAVMTDSTGAFDKAASGGNNPLARQLIGEGLVGLSGETRARHRRVISPTFNMERVKAWIPGIAAVTSSVLDKWEAEGGSRTEFEIDVHKAFHALSADVISCGHLEAATRRGNGFSSCRRNRCNLLFLQ

SEQ ID NO: 60968 - protein, 134 aa, Zea Mays
MPAATSVSLAVADAVWAEIRSAGRASDEHLSILETLFGKNMLRACKIVDERGVRRVTGAPSGRSVFLVMGESKRKEEYLCFPEHLCTCYSFFYDVVGRGEQLSCKHQLAARLAEAVGEHQEVEVKDEELANMLG

SEQ ID NO: 60969 - protein, 473 aa, Zea Mays
MEAGAPPRGWRCGVLWLVSVEIVLVLVCTRGAGADSGESKGSFLQDSEAGEKDVYLSHSCIHDEILHQRRRAGRKEYSVMPQVYHESREDAERVRGRHLLGMSSWRAPHENARKPIRIYLNYDAVGHSPDRDCKNVGDIVKLGEPPVSSAPGTPICDPHGDPPLVGDCWYNCTLEDIAGKDKRQRLRKALGQTVEWFRKALAVEPVKGNLRLSGYSACGQDGGVQLPHAYVEDGVANADLVLLVTTRPTTGNTLAWAVACERDQWGRAIAGFDPHAFTHFRDERKRRRGQVTAQSLDKKLGRMVTRVVLPRVVMHARHHYGAFSQNFTGLELEDGGGRGTSGSHWEKRLLMNEIMTGSVDTRSVVSRMTLALLEDSGWYQANYSMAEHLDWGQNQGTEFVISPCNSWKGAYHCNTTQLSGCTYNREAEGYCPIVNYSGDLPKWAQYFPQANKGMPKCSINYYVYDIKQDAELY

SEQ ID NO: 60970 - protein, 173 aa, Zea Mays
MYIARETSKVWRKVATEVSVELQLLREKWGLLLAGLIFQYIHGLAARGVHYLHRPGPLLQDLGFMALPELGQDKGYLSETIFSSIFISFVLWTFHPFIYHSKRFYTVLIWRRVLAFLVASQFLRIITFYSTQLPGPNYHCREGSKLATLPPPNSVLEVLLINCLLSSLLGSWL

SEQ ID NO: 60971 - protein, 580 aa, Zea Mays
MPNCYTPLEELMYTFGGPWSFSIILSLTVILLALVLSALRIKIGESDITYRATNAIHNDGCSFPFLLSLAEVPGASRAEETQSHVHRMYFMGPNTFREPWHLPYSPPDAIIGIVYEDAFNRFIDEINLVAAYEWWEGSIHSILSVLAYPCAWSWKQWRRRKKNHRLQEYVKSEYDHSCLRSCRSRALYKGLKVGSTPDLMVAYIDFFLGGDEKRLDVASTIQKRFPMCLIFGGDGSYMSPYYLHSDTLLSNLLGQYVSTAIWNRLVAGLNAQLRTVRQGSVRSTLGPVVSWINSHGNPQLERHGVRVELGWFQSTASAYYQLGIIVAVNENFYKNLRHHEHATEFCERSRKNVAVPLQDFNQANLDQPCTSYAVSRKRLTGGVNGGIINEGTLKSLHYKRDYLFPFSLLLRNSRPLGYAETLQLLICIVLLGDFSITLLMLVQYYWISVGAFLAILLIPPLALLSPFLAGLNALFSRGLKRSSVTRIFALWNITSVVNIIVAIIYGSLYFWLSSLAVSSVHQVYNTKSFKSREDNEWWILPTILFLIKSLQAGLVNWHVANLEIQDYSLFSPDPDRFWAM

SEQ ID NO: 60972 - protein, 99 aa, Zea Mays
MNNTFNILRMFAAIYGPLEAPNMLAKCIGEAEEKYESFSKKLDPSLSGSYWRRCEEATKEGGKTSGHAYGTWNIPRVISNEDAFRRERRSKHDACAVIT

SEQ ID NO: 60973 - protein, 461 aa, Zea Mays
MALQLRRLLPHGYAQRHRAVIHALSLLPPPPAMLQFEVFQRYSSSPWPFSPFRPCKMCGVAFRSNSTRKISSRNNFGVALQPKSSAFITPRLFGSYSSVCFRATASCGIALKANNIGNSRPFSTTYSKKIRFLVKNKISFSNLNMRRKDGSVAHSLLHRSEKCQSTLATCSTIVDEASTSTSNNSKSVTDAKTDTAKRKSSRGSKKEVDGDMKEKEVHTNKKRIFARTRKAATKTSDNISTNQENKKTDNCKLKRGADSFKEKKVNNRAKSKAEVSAASSVPEICMQSSIDGSVIEKKPLVPLYPPRAKSVVVVESATKAKVIQKYLGDMYEVLPSYGHVRDLAGRSKSVRPDDDFSMVWEVPAAAWTHLKSIKVALQRAENLILASDPDREGEAIAWHIKEMLEQQGVLGFDVTVARVVFHEISEDAIKKALMSPSCLVANQLDGSNLLLWPLCAIEKLK

SEQ ID NO: 60974 - protein, 1174 aa, Zea Mays
MGAQEEAVDEMLRAAAAEVSTSSVKRRLRIFHHTLPPLIAKAIESPSDTVLLVDLIFQTLPIYDDRASRKAVDDLVIQALGEPTFMKPFAAVLVQSMEKNLKVTNPLTSLKLLRWSHYLLKWSQFATLTKGAFTRLANAQAVLCQVLMDGSFRRRRTCKQLFIHLFSEHSGIYKMYIEELRDLRISMRDSPAFLNLILDFTITSPSLSTQYQSVFLDLYVKIILSSKDRPPKAATEAFKPLFLNIGHEDFKNTIIPSCIKMLKRNPEIVLQSIGYLLKTVHLDLSKYSMEFMPVVLHQARHSDEERRINALSIIGTLSEKSSDPDALPSMVNAIKAVLGGSEGKLSLLYQRIGMINALEQLSRSPPKQIGRLAPSVSTFLLTCYKDDGIEEVKLAILSAIGSWALVSAEAVQPDVVSFIAAGLKEKDTLRKGHLKFLRVICKNSESLTKVASLLDHLIQLSKTGFSKATQRLDGIYALFAVSRLAAVDTKADGAILKEKLWTLIAQNEPSLISLQLLPKLADDDCLAVLDLVQSLFVEQFFRVREYFSIHSLLQLLIYLLCHPSWEVRKVAYDVTKKIFSSSSGLAEDILFLFTDWLSLVGERLSILKQGDMDSPSDSQLPFFPSTEVLVKCLFLIAPYAVVHSLRSYSRIILCSHHPCLTSSSSPAGVYKRLQRRLRQEQIFFVDLITPNISVICKELLSQDGLFSSNNQVQSAALCSLSTLMTITPNDTFLEFEKHFIGLQERTLHDSFSESDIKIFYTPEGQLSTEQGVYIAEAVANKNTKLAKGRFRAYDDQMQETARSIVPAKNEKKESSGIGKRETGKSTKRTAPIDKAKTAKEEARELLLKEEASVRMKVGQVQKDLSLMLDALGKLAIANPIFTHGQLPSLVNYVEPLLSSPIVSDAAFCTMLRLARCTAPPLCNWALDIAAAIRVISVGDFEMVLDLTPVIMEDDSKKPSSGIFEQIVNGLTIACKAGPLPADSFTFVFPIMERILLSSKKTCLHDDVLHILSMHMDPILPLPRPRMLSVLYHVLSTVPAYQPSVGPMLNELCLGLRGHELAQALVGVYAKELHVRLACLTAIKCVPVHSVQRDLQVSTSLWIAAHDPEKVVAELAEELWDRFGFDAITDYSGIFNALSHKNYNVRAASAEALAAALDENQDKMQTFELDMDPLN

SEQ ID NO: 60975 - protein, 197 aa, Zea Mays
MESWRRRTLLKVIVLGDSGYVSKKFSQQYKATIGADFLTKEVLIGDRLVTLQIWDTAGQERFQSLGVAFYRGADCCVLVYDVNVKRSFNTLDTWHDEFLNQAGPSDPQRFPFILVGNKIDLDGGSKRMVPEKKAREWCASKGDIPYFETSAKEDHNVDTAFLCIARLALEHEHDQDIYFKTVAEQVPDTEQTSGCAC

SEQ ID NO: 60976 - protein, 323 aa, Zea Mays
MTTAHFSTEASDMDHPTEAVEEMYQKMLKSVEAETMPPNAWLWSMIDSCSNKEDIKLLFQILQKLRVFRLSNLRISANFNEHLCRKVTEACARVGAVDYGLKALWKHNVYGITPTIGSAHYLLQHAKEQNDNKLMENVIHVLSKNFLPLQPGTADIVFSICYNADRWDLLSKYAERFVKAGVKLHRAAFDIWMDFAAKVGDSQSIWHINSLRGRSVKHYTLATGFACAKGSLLDRKPENAADKIKLLYEHLPDQKKPFVKDELEKLIAGWPTEVVKRQKKDKRKELEEALMKDIPTMVDCLTKSGLDIPVELDKLATPQLQVA

SEQ ID NO: 60977 - protein, 195 aa, Zea Mays
MGMRSRHPKALGFRWYPAATHRSLTLVLWSLAALVVVVNFHLLIIHKEEGENMSTHEIRRSIMRELEVVEEEKFRLAPPRSRRNPRAVRRKGEKKSPTIVDEFLDESSAVHDMFFPELNTAVDPINGGNDSMYFYYPGRIWLDTDGKPIQAHGGGVLYDKRTNTYFWYGENKDGKTYKAHSKGADRVFLWQNQNV

SEQ ID NO: 60978 - protein, 441 aa, Zea Mays
MICFLADLQGDQFFSMVLALAFPRRMTTAISIEDVRREVKILKALSGHSNLVKFYDACEDALNVYIIMELCEGGELLDRILSRGGRYNEGDAKIIVEQILKVVAFCHLQGVVHRDLKPENFLFSTREEHSPMKIIDFGLSDFIRPDERLNDIVGSAYYVAPEVLHRSYSTEADMWSIGVITYILLCGSRPFWARTESGIFRSVLRADPNFDDSPWQSVSPEAKDFVKRLLNKDYRKRMTAAQALSHPWLRDEHRQIPLDMLVFKLVKAYLRSTPLKRAALKALSRAITEDELIYIRAQYNLLEPDSGDGRICIDNFRMALLQNCTDAMKESRTLEILNALEPLAYRRMDFEEFRAATISPYQLEAVPRWEEIASTAFEYFEQEGNRAITIEELAQEMNLSAAAYSIVRDWIRPLDGKLSFVGYTKFLHGLTMRSGNTRRHH

SEQ ID NO: 60979 - protein, 307 aa, Zea Mays
MSQQEAVDPPSATDERLGGLPRSGSTSRLNAQAPEFVPRAAAVPPPPPQQKVVRLFAPPPHAAFFVAAPRPPPPPFEYYAAVATGGGGRFGPPAAAAEQEAEAEQPPRDGSFDDPVPKIRKQVEYYFSDINLATTEHLMRFISKDPEGYVPISVVAGFKKIKALVQSNSMLASALRTSSKLVVSDDGARVKREQPFTESDLEELQARIVVAENLPDDHCYQNLMRLFSVVGSVRTIRTCYPQTPNGTGPATNRSAKLDMLFANKLHAFVEYDTIEDAARAIVELNDERNWRSGLRVRLLSTCMVTFH

SEQ ID NO: 60980 - protein, 1291 aa, Zea Mays
MRLEPRMRASLMGVFFGKGAMALANEMVEGSDSASRDNLGEPGSFVANESCECTRQSLFRKNCASSVDGANILSCSKKSVFYKELKRLKLVEEIVCLKSNITCCSGDAIFFTSLVSAATAAGDVLMKLQGLLMVVSTESINLELIGDEAPKKKDVEKTSGGSRKGKKKSNTLKKLTTSAKPSKDNGCSSSDNRNCSPLPNHCAPSVEGTAAGPPSEKTPYKEIVPTTKVEQTVSLDGCKNQCNKKKNKRKGKTKLSNPMRPESPRSTKLKTVVPHSAAEALHEAAKEADVSPHHPSYVHPSKNEISEAVSCSDPSILSNGTKVISTSKGTKLEDTLYSPRVHSSLATERFQSAHDDAFKVAVQASSYLSQSESLVQSSSCLPSRSNEVSSTNLYGSSVDSLVRSAQEKTECDGKHVDHKSEVTKDRILPSAIPTDMLQSAISKNGGVMKNGGGECYVYNRNLLGGTSYEWPSVTPSHFVSPQMQQRPAAADRLHLDVGYRWPTQFNQPFLPANHQVRNPPIDAGHNQMLPSLAVPLSFDWPPVFRGYGKNASVSYDPLYTPQMQSSAWSGFPAQLVQRGGICSDSDVADDTESYWFSEEESDSRAHSGRDINQYFGGGVMYWSPAEHAGTGFSRPPSLSSDDSAWAWHEADVIRVVDDVANGIPSTYTNGVSSPPSTPSCSQNESLDPAAHLITGNEINNEALTSPSSVQDSPEDKIMQVAKAVSCGSEVVKADTLPYAMLRPIVVPSISRRSSRSEIKGAHDHRRSPCVPSTRRDIPILRRPPSPVVLSVPRVPRPPPPSPAGESRKRGFPIVRSGSSSPRHWGMRGLFSEDKIFHRAQFCLDGPEVVWPSWGNKGTSGTLVQTIEDTVLQDHLVKISQLSCDQHPDVALPVQPLDMLNGSSHKASLSLMHNALHEEIDQFCKQVAAGNLVRRPYINWAVKRVTRCLQVLWPRSRTNLFGSNATGLALPTSDVDLVVSLPPVRNLEPIKEAGILEGRNGIKETCLQHAARCLTNQDWVRSDSLKTVENTAIPVIMLVADVPCDTNMSNEYSSVLDGSQDYSVNMLGEQGSPPRSDTSSSEGSNMLMCSKLNKDDCDIVQSIRLDISFKSPSHTGLQTTELVRELSQQFPAVIPLALILKKFLADRSLDHPYSGGLSSYCLVLLIVRFLQHEHHLGRPINKNLGSLLMDFLYFFGNIFDPRHMRISIQGSGIYLNRERGQSIDPIHIDDPHCPANNVGRNCFRIHQCIKAFADAFAVLENELLQFSSECSMPVSSFNILKKIIPSIDSDEL

SEQ ID NO: 60981 - protein, 69 aa, Zea Mays
MAIMAGSGGATLETSSTVPQRCRLSAELLRVLTRRWGSKDGVLAAPSTSKYRVPGRRVIRADGRRRIVR

SEQ ID NO: 60982 - protein, 414 aa, Zea Mays
MARAAARLLPIFLPWRRPPPPCLLRRGFLNPSSPRTSARVDTLVLPGDERLPFPSPPRLPNQLRPDYGSGGGGGAPSTIAAIVTSLGGGPAAVGIVRISGPDAVAVADRVFRPAGTRRASTPWQPRSHFVEYGLALDADGSVIDEVLVVPMLSPRSYTREDVVELQCHGNDLCLRRVLRACLEAGARLADPGEFTLRAFLNGRLDLAQAENVSRLISAKSAAAADSALAGIQGGFSTLVKSLRSRCIELLTEIEARLDFEDEMPPLDPVMLVSKINCMRKEVQDALDTSNYDKLLQSGLQIAIIGRPNVGKSSLLNAWSKSERAIVTEIAGTTRDVVEANVSINGVPVTLLDTAGIRETDDVVEKIGVKRSEAAAMGADLIVMAISAVDGWTDDDTKLMEHVSVNRVLQFRWFL

SEQ ID NO: 60983 - protein, 166 aa, Zea Mays
MLHLSQIFTDIFNNDLGGPYAFLEASPHGANHTGKADGKKQKSQEKAVPAASKSSPASKKSKDDDDSDEDETDDSNEDETDDSDEGEGLSPEEGDDDDSSDEDDTSDDEEEDTSTPKKHEAGKKRAAESFVLKTPLSDKKAKVATPSAQKTGVPLNGLTKLSSKIV

SEQ ID NO: 60984 - protein, 1229 aa, Zea Mays
MEDDEYEDGMDMGYGGHHQRGGGHAGYGAEEDDEMGYGEGGGDGDEMEEEADGDAEQQEDITQDDAWAVISAYFEEKGLVRQQLDSFDEFIQNTMQEIVDESADIEIRPESQHNPGRQAEFAETLHKISFGQIYLSKPMMTEADGETATLFPKSARLRNLTYSAPLYVDVSYRVMKKGHDCEEVTETAEYPKVFIGKVPIMLRSSYCTLYQQSEKDLTELGECPYDQGGYFIINGSEKVLIAQEKMSTNHVYVFKKRQPNKFAYVAEVRSMAENQNRPASSMFVRMLSRAGAKGGSSGQYIRATLPYIRADIPIIIVFRALGFVADKDILEHICYDFSDTQMMELLRPSLEEAFVIQNQQVALDYIGKRGATVGVTREKRIKYAKEILQKEMLPHVGVGEFCETKKAYYFGYIIHRLLMCALSRRAEDDRDHYGNKRLDLAGPLLGGLFRMLFRKLTRDVRSYVQKCVDNGKEVNLQFAIKAKTITSGLKYSLATGNWGQANQAGTRAGVSQVLNRLTYASTLSHLRRLNSPIGREGKLAKPRQLHNSHWGMMCPAETPEGQACGLVKNLALMVYITVGSAANPILEFLEEWGTENFEEISPAVIPQAAKIFVNGCWVGIHRNPDLLVKTLRRLRRQIDVNTEVGVVRDIRLKELRLYTDYGRCSRPLFIVEGQRLLIKKAHIRALQQRETPDEGWHELVSKGYIEYIDTEEEETTMISMTINDLQNARHNPEEAYSETYTHCEIHPSLILGVCASIIPFPDHNQSPRNTYQSAMGKQAMGIYVTNYQLRMDTLAYVLYYPQKPLVTTRAMEHLHFRQLPAGINAIVAIACYSGYNQEDSVIMNQSSIDRGFFRSLFFRSYRDEEKKMGTLIKEEFGRPNRENTMGMRHGSYDKLDDDGLAPPGTRVSGEDVIIGKTSPIPQDDAQGQASRYSKRDHSTALRHSESGMVDQVLLTTNADGLRFVKVRMRSVRIPQIGDKFSSRHGQKGTVGMTYTQEDMPWTIEGITPDIIVNPHAIPSRMTIGQLIECIMGKVAAQMGKEGDATPFTDVTVDNISKALHKCNYQMRGFETMYNGHTGRKLTAMIFLGPTYYQRLKHMVDDKIHSRGRGPVQILTRQPAEGRSRDGGLRFGEMERDCMIAHGAAFFLKERLFDQSDAYRVHVCEKCGLIAIANLKKNSFECRGCKNKTDIVQVHIPYACKLLFQELMAMAIAPRMLTHDMKTGKDQKKR

SEQ ID NO: 60985 - protein, 64 aa, Zea Mays
MDREAKKEAFRKYLESSGVLDTLTKALVALYEENDKPSSAVDRSWVARQSLTMKSSRQRSWTCN

SEQ ID NO: 60986 - protein, 347 aa, Zea Mays
MKDMRDALGSQMFFSGEHLHVRCSSHVLNIMVQAGLKVVPNAVGKVRDIIKVVISTPSRLQIFNSIVQTLGLRSKSGLILDVPHRWNATYDMLNEALKYKAALNRYAVEQHHECPTEEDWSKAEALHGFLQEFSDATKAFSADRHPTAHLFLKMLLVIRGVLLDENYNSNELLNEMANVMYTKFQKYWINPNIVLLIAAVLDPSMKTEFVKFYFYTVGDNVDMKMRELKRYLKKYYLEYEKIMRSHSLHVFITPDDQMRSEPSTSSPLCGKRRVEHAFAQFASQNANARPERTEMDTYLEDPRILIKPDECFNVLGWWKKNSDAYPILSLMARDFMAIPVSTVSSES

SEQ ID NO: 60987 - protein, 197 aa, Zea Mays
MDCSCCFPAAKVEAVNGHTLLLSGVDLVDGTPVLDIKPYLPYSDSVKGAAVPSWLEVDGALAVESVHFSEHFISALSTCWMHVQMSLYASADEFQDLIKQALSWDIRSISQRNRPHQVSVEADANGHCGEDTDDDHHHRDTGRYGVVYHLHLEGIDVSYRIDQGSNIFVEDATLLPDAVQKRHGYLAWRDKLGSSVL

SEQ ID NO: 60988 - protein, 722 aa, Zea Mays
MEGDDFTPEGGKLPEFKLDARQAQGFISFFKKLPQDPRAVRLFDRRDYYTAHGENATFIARTYYHTMSALRQLGSSSDGILSASVSKAMFETIARNILLERTDCTLELYEGSGSNWRLTKSGTPGNIGSFEDILFANNDMEDSPVIVALFPACRESQLYVGLSFLDMTNRKLGLAEFPEDSRFTNVESALVALGCKECLLPADCEKSIDLNPLQDVISNCNVLLTEKKKADFKSRDLAQDLGRIIRGSVEPVRDLLSQFDYALGPLGALLSYAELLADDTNYGNYTIEKYNLNCYMRLDSAAVRALNIAEGKTDVNKNFSLFGLMNRTCTVGMGKRLLNRWLKQPLLDVNEINNRLDMVQAFVEDPELRQGLRQQLKRISDIDRLTHSLRKKSANLQPVVKLYQSCSRIPYIKGILQQYNGQFSTLIRSKFLEPLEEWMAKNRFGRFSSLVETAIDLAQLENGEYRISPLYSSDLGVLKDELSVVENHINNLHVDTASDLDLSVDKQLKLEKGSLGHVFRMSKKEEQKVRKKLTGSYLIIETRKDGVKFTNSKLKNLSDQYQALFGEYTSCQKKVVGDVVRVSGTFSEVFENFAAVLSELDVLQSFADLATSCPVPYVRPDITASDEGDIVLLGSRHPCLEAQDGVNFIPNDCTLVRGKSWFQIITGPNMGGKSTFIRQVGVNVLMAQVGSFVPCDQASISVRDCIFARVGAGDCQELCVSI

SEQ ID NO: 60989 - protein, 273 aa, Zea Mays
MFDQLVAASKGKQIVVFLDYDGTLSPIVDDPDAAYMSDTMRRAVRSVAKHFPTAIVSGRCRDKVFEFVKLAELYYAGSHGMDIKGPAKGSRHTKAKGGGVLFQPASQFLPMIEQVHDSLVEKTKCIPGAKVENNKFCVSVHFRCVDEKSWITLADMVKSVLKDYPKLKLTQGRMVFEVRPTIKWDKGKALEFLLESLGYADCTDVLPVYIGDDRTDEDAFKVLRKRGQGVGILVSKHPKDTCASYSLQEPAEVMEFLLRLVEWERLSKARPKW

SEQ ID NO: 60990 - protein, 448 aa, Zea Mays
MWTASAHIITAVIGSGVLSLAWAIAQLGWVAGPTVMLLFSFVTYYTSALLADCYRSGDACTGKRNYTYMDAVNANLSGVKVWFCGFLQYANIVGVAIGYTIAASISMLAIQRANCFHVEGHGDPCNISSTPYMIIFGVVQIFFSQIPDFDQISWLSILAAVMSFTYSTIGLGLGIAQVVSNKGVQGSLTGISVGLVTPVDKMWRSLQAFGDIAFAYSYSLILIEIQDTIRAPPPSESKVMRRATVVSVAVTTFFYMLCGCMGYAAFGDNAPGNLLTGFGFYEPFWLLDVANAAIAVHLVGAYQVYCQPLFAFVEKWARQRWPKSRYITGEVDVPLPLGTAGGRCYKLSLFRLTWRTAFVVATTVVSMLLPFFNDVVGLLGALGFWPLTVYFPVEMYIVQKKVPRWSTRWVCLQLLSVACLVITVASAAGSVAGIVSDLKVYKPFVTTS

SEQ ID NO: 60991 - protein, 932 aa, Zea Mays
MPPGEEGSTHGNIADGDAPRRRQRRRRIFRRSTERKNPENLEFERQVAAFEARQEQQRQDQMTDAFIGSLSFKVYFPHLKILSDDVQDGDSTQPAGKGRLLKDSAKPPDDTDFLEGTFIKINSDKQKATRNKKSGKNNKKKKKGKSKGKGKGRKQSHASEMQTGSPTQQPSSTCANATGGETSASSSSRVAVRVPLLEYSSSSSSCRVTAKLVITSAVNSASSGNEKELSASSSSDDFKSFESTTSYTTAASRSSANDYYTGGNAWNCTMGDYAGSLSDARSEPSLSASDYSTDSRGFRRKTTSGEGNRPNVHHQSFSLLAVGPGCSQEALLCSGYSSNGGDFQEVVSRKAAQKMKRMQRSTPATTSSSTMAASGPIVARAHFPRAPFREVITIGHYINDDTFYARKPNQKKGKYQKARSFSNMSSKTGYTTDHGDNVSAGSNRMLLITTVHQAKPRSGHHVTLEAIEETSSPSCLPNPKAGELKAMAPVGDGIIKDTDSKTPSSSDKLSSLLGHLDNSSCVDSREGQKKAMAAPVDGDTEDARAPPSSDKTSSLDNLDNPSYVGKEEQEEVVAPVGVGTEADRDSTAPTSDKTSLLGYMVNSSCVDRDEEQQNKAKFSTDASSSELDKIIEAVNNAYGVQQAASDVYMISAGIHADIENFLHAATPVIGQTSCTKGNMSLQDLRLWNVWSWYEEPECCGIEVQMQGKTNSSWPELSTYFVPLLSAVQLFGQPAGKSQSHGSGLVFEYFESENPFSRPPIFTKIKQLRHGVNLSAGNPIFGDPKQLESVKLSDLHPASWFCVAWYPICQIPAAAGSCQASFLTYHSLGKLVPQICSTDNKADAYDRMICPIVGLLAYKDQGEKWFQLREQQLRIKPRPPSGTDHAELLNKRLRALRQCASIMSKAVVPRAPSGEAMNYHSDYEFFLSRSSLQ

SEQ ID NO: 60992 - protein, 379 aa, Zea Mays
MSTLPWNVLIVLSLSASTWEIRTLYTSGSSSPKCVVTLMLEIAPSFWGRWKRRHSNFDKSIPFALLSQVAGIREYFAANPALTSELPSTVVKSKASETLIIQSEHEDSELGDEFYDALTRGESFEDGDSDDDDDATTPKARKVKLKNVSWAIAGLALKTTKALVETSELVTNSSPVTVDPSHFHGTLHRAKTQNDQNSWSAPGGEKFMIRGKTYLTDYHKVVGGDPLLELLAVDWFKVPAKPNYNLVMYYAAERPVNKDSLLGRFIDGTDAYRDARFKLIPSIVEGYWMVKRAVGTKACLLGKAVTCNYLRQDNFLEIDVDIGSSSVARSIIGLVLGYVTSIVVDLAILIEAKEEKELPEYILGTVRLNRVNPDSAVSI

SEQ ID NO: 60993 - protein, 267 aa, Zea Mays
MSLISLNLQHHVLEICLCGVENADTIQTKVSKRKKEDQNVMAMHSSRTSAKRSELMYLSPPLGNTVTIILPLFSCLEATFKQAARFAPEEMPTSRPSSLASLLAFAMASSVLTVTVSSMTEVSRTSGRNPGPTPWILCLPGAPPEITGLSAGSTQMILTPGFCIFRYFPTPETVPPVPEPATNTSTLPAVSFQISGPVNLKWASEFALFVTWFRTCTFGSCFRSCSTLSNMPGKPRAGSVKYSSAPMNLSKICLSSEYLAGMTAMSL

SEQ ID NO: 60994 - protein, 336 aa, Zea Mays
MCFGHVYCNLLFGSIDLVLSSVDIIFFSNVHQGNLRGTLMRFLKAREWSVPKAYKMLMDCLNWRVQNEIDIVLAKPILPSDIYRVIRDTLLVGLTGYSKQGQPVYAFGVGLSTFDKASVNYYVQSHIQMNEYRDRVVLPAASKKFGRQINTCLKVMDMTGLKLSALSQIKMLTMITTVDDLNYPEKTETYYIVNAPYVFSACWKVVKPLLQERTKKKIQVLYGSGRDELLKVMDYESLPHFCKREGSGSSSDSLDGVDCYSYDHPFHQQLYNYMKQQQSLNQDSVGPRKQGSVHVDVPSPGLEEAKIAETIKAELQNLRGSGGLAHSFSSIQIEGP

SEQ ID NO: 60995 - protein, 121 aa, Zea Mays
MGARDLNIQTEHGHLGMPSNICCVVVEYLPGGALKSFLIKNRRRKLAFKVVVQIALDIARGLCYLHSEKIVHRDVKTENMLLDKTRTVKIADFGVARVEASNPSDMTGETGTLGYMAPEEV

SEQ ID NO: 60996 - protein, 565 aa, Zea Mays
MDEHHRGVHLAAQNAESCGYLLSKLAGDGGVSDGAYPTASAQVYYQELVMGEDQSENAAPQMDAQETISAEETQDNIYEADVCVPLEYKVVESQQQRGIRRRCLVFEAAGGFSNSAVKRGTIEDRSVSTCSKGKSPAESQPRGLRGIGLHLNALALTPKGKMACQDPPPTASALLPSSASEKDARGELLCAGENFAHSGGELLEFPLDGCSAGGGFPVNDHHVSGQSVSPQKKRRKTDNGDDGEACKRCSCKKSKCLKLYCECFAAGVYCSEPCSCQGCMNKPIHEETVLSTRKQIEFRNPLAFAPKVIRMSDAGLETGEDPNNTPASARHKRGCNCKKSSCLKKYCECYQGGVGCSSNCRCESCKNAFGRRDAETELPEEMKQEESDQTENPQQEKENDQQKANVQGEDHPLLDLVPITPPFDFCSSLLKLPNFSSAKPPRPTKARSVTSRSSASKATAAVQPCRSSKLAASASASGIDEETPDILHEPDSLSNCVKTTTSPNGKRVSPPHNALGSSPNRKGGRKLILKSIPLFPSLTGDTNSGSAMNSTDSAFCASPLTLGPS

SEQ ID NO: 60997 - protein, 161 aa, Zea Mays
MDSLRGVKLPGVPKGGSALVKVALLGGAGLYAVLNSFYNVEGGHRAIVFNRLEGIKDKVYPEGTHLMIPWIERPIIYDVRARPNLVESTSGSRDLQMGEAKSAELIGQAIANNPAFLALRQIEAAREISHTMAASSNKVFLDSRDLLLGLQQLNVGGKQKK

SEQ ID NO: 60998 - protein, 374 aa, Zea Mays
MGNAFACMPRKEQRGAAAVSRSKRMGSARSARGGPKLTPAEEELLHRQALAMAIHQHLDAGGSMSRRIDAGASLSRRMAPGSTSSRRRGDLPDSVTNAKPAPIVLENLETKKIVLVHGEGFGAWCWYKTISHLEEAGLDPVALDLTGSGIDHTDTNSIATLADYSKPLIDYLDRLPEDEKVILVGHSCGGASVSYALEQYPRKISKAVFLTATMLRSADVFLQESQFLVYGNGKDKPPTGLMFDKQQIKGLYFNQTPSKDMALAAVSMRPIPLAPIMEKLSLTPENYGSVRRYFIQALDDHMLSPDAQEKLVRENPPDGIFKIKGGDHCPFFSKPQSLNKILLEIAQIQAPAALLKASSPEETAAAMVTGPAKS

SEQ ID NO: 60999 - protein, 175 aa, Zea Mays
MSPMTVARIASEDARAICMREYGSSPNVDIYGDPGFTFPYVTPHLHLMIFELVKNSLRAVQERYMDSDKLAPPVRIIVADGAEDVTIKITDEGGGIPRSGLSRIFTYLYSTAENPPDLDVHNEGVTMAGYGYGIPISRLYARYFGGDLQIISMEGYGTDAYLHLSRLGDSEEPLT

SEQ ID NO: 61000 - protein, 150 aa, Zea Mays
MLENQRKMFGIFLRRSARPCVIFFDELDSLAPARGSSADSGGVMDRVVSQLLVEIDGLSDNSQDLFIIGATNRPDLLDSALLRLGRFDKLLYVGVNTEASYRERILKAQTRKYKLHKNVSLLSVAQEWFHAAKRSVSISADPLRHMLGSS

SEQ ID NO: 61001 - protein, 57 aa, Zea Mays
MGVKGGDKPKPNYRKGLWSLEEDQKLRDYILLHGHGCWSALPMKAGGVLLPGTDALR

SEQ ID NO: 61002 - protein, 760 aa, Zea Mays
MRRHCFPVYWNGENRRVLRGHWFARKGGVDWIPLREDVSEQLELAYNCQVWHRRKFQPSGLFAARVDLQGSTLDLHALFTGEDDTWEAWLVFDTGPKLGSNTIKLRRGFSPSESASTKPSQDELRQTKEEEMDDYCSQVPVGHLVFMVHGIGQRLEKANLVDDVVDFRRVTANLAERYLTSYQRSTQRVLFIPCQWRKGLKLSGESTVEKLTLDGVKGLRVALGATVHDVLYYMSPIYCQHIIDSVSNQLNKLYMKFLKRNPGYSGKVSLYGHSLGSVLSYDILCHQESLLAPFPTEYLNMETSDRSQGAKSANEVALHDSGAKDHDTYTLGHSCTGNENSAVDEGSTRTDMSHMDSIVPSCVLEDSLNNPETGVPRGAVVAEQNEKENRIENHQTVYTEEGTTSGVSTKDAEASHISRSAEDVHEEVLDKEKMIISLEEEVKRLKAKLDQLEQHKHLVTESTSGVEYHGGKNGNHALNFGELFTAQGSINQPYSPQIKYTKLNFKVDTFFAVGSPLGVFLSLRNVRIGIGKGRDYWKDKNIIEEMPCCRQMFNIFHPFDPVAYRVEPLVCEDYQKKRPVIVPYHRGGKRIHVGVQEFTEDISARSQAIACQLKSLKVKAVAALLALSRNDTEEDGESANEEGRSYGSIMMERLTGSPDGRIDHVLQEKTFQHSYLSALGAHTNYWRDHDTALFILKHLYRDIPEDPPSDVVERMHIKLFYERDPVEEETPVTFSDHAAIKEFCRKVRAYSTKMEDDANC

SEQ ID NO: 61003 - protein, 148 aa, Zea Mays
MKVDIPVDKYPTFNFVGRILGPRGNSLKRVEANTDCRVLIRGRGSIKDPAREEMMRGKPGYEHLNEPLHILVEAELPVEIIDARLMQAREILEDLLKPVDESQDYFKKQQLRELAMLNGTLREEGMQRSGSASPFHNSLGMKRAKTRG

SEQ ID NO: 61004 - protein, 207 aa, Zea Mays
MPFRFQFPWLKNPTTNGGTSNIDTNPSPRFPNPFLPIQAHVTSFLSSFPRALPPPPPWARITSPASTSGALPTSEIEERLAGVPVYALANAAQEFVLVSSTRVGGQGGESVSPTQALGLLCFRKEDADALLEQMDGDMRAGSGVVPVALNKVIQMKSDGVAFRFLPDSSQVANAIKLMQDEGLYAGEGFPGVPVFQKSLLALLFFVP

SEQ ID NO: 61005 - protein, 165 aa, Zea Mays
MLEPHQTITDIGRTDTRQFRGIRHFIQTIYKKNGIRGIYRGLPASLHGMVVHRGLYFGGFDTAKDVLVPLESPLWQRWVAAQAVTSMAGLISYPLDTVRRRMMMQSGMEVQMYSSTLDCWRKIYRLEGIRSFYRGALSNMFRSTGAAAILVLYDEVKKFMDRGRL

SEQ ID NO: 61006 - protein, 1359 aa, Zea Mays
MKERSSLCESAADGNWGLKYKRKRSKLTVSPSNENEATSPTSDSRMSHGSTKKKLKHDNNISPSAKKIRGHDGYFFECVECDLGGNLLCCDSCPRVYHLECLNPPLKRAPPGKWQCPRCRPKKVSLKLLGNADVDTSKREKSTRTYASTASDSPPSHTKVSFKTRNSTQDKTGLNEQGKESSGGTMNGGETSTKNNEVEKKKTLILHLKKRSTKELSENTKPSKSEFVELSEEKIVKHGSVLKLKKHPHRMDLSPSKSKTRRQSSQRESKRSGTKKIKYSMSDDDSVSSSEPSTSLDNSESPPKRKHSDGKAPSSSTKKGKKKVKFVEKKHSEEQGVVGDKMMTTQEDQQVDRILGCRLQMSQINPPSHASLEQFESANLQVDGMVLPHASAGIPNRPHDGTESSRNGTIEDICADESANHSGHNLEMRKDTDSKSHEKESHKREQVKKILSVCSGDETNIMKDDQVVRENVSASKKGEDETSDLPAEKDDTILPVTRACTMIRTNQDHTDESKQHGKIEQITNKDYNDAGYEFLIKWVGKSNIHNSWVSESEVKILAKRKLENYKAKYGMSLINICKEQWCQPQRVIGLRASVDEVEEVLIKWCGLPYDECTWERSDEPTLMKYSHLVTQFKNFECQALDKDVVKDYANARNRHELNVLVDQPKELQGGMLFPHQLEALNWLRKCWYKSKNVILADEMGLGKTVSACAFLSSLYCEFKINLPCLVLVPLSTMPNWMAEFSSWAPHLNVVEYHGSARSRSIIRQYEWHAGDASQIGKTKRSYKFNVLLTTYEMVLVDAAYLRSVSWEVLIVDEGHRLKNSSSKLFSLLNSFSFQHRVLLTGTPLQNNIGEMYNLLNFLQPTSFPSLSSFEEKFNDLTTAEKVEELKKLVAPHMLRRLKKDAMQNIPPKIERMVPVELTSIQAEYYRAMLTKNYQVLRNIGKGGAHQSLLNIVMQLRKVCNHPYLIPGTEPESGSPEFLHEMRIKASAKLTLLHLMLKILHKEGHRVLIFSQMTKLLDILEDYLTLEFGPKTFERVDGSVSVAERQAAIVRFNQDKTRFVFLLSTRSCGLGINLATADTVIIYDSDFNPHADIQAMNRAHRIGQSNRLLVYRLVVRASVEERILQLAKKKLMLDQLFVNKSESQKEVEDIIRWGTEELFGNSDSVDGKDNSEVPGPVADVEFKHRRKTGGLGDVYEDKCIGGSTKLVWDENAILKLLDRSNLPSSMAESTDGDLDNDMLGTVKSIDWNDELNDDPGTNEDTAPIDNDGSEQASESKQGATNRSEENEWDKLLRVRWEQYQIEEEACLGRGKRLRKAVSYRETFATLPNEALSEVFKMLMEAIALCLGRRFKGRCSIVVWG

SEQ ID NO: 61007 - protein, 259 aa, Zea Mays
MEQQMVPLCVKSVKRKRKRVDHSNIILALPAIYPFPQKKTVASAAGKKRAATKKNTTGRNKTRNKAARAPKQGLRKGKRKNAKAAHAPNDDALTEGRIGSVDISNGASNEHPVQEDQKDLIRQQHNFSNTGDDIIVDDRSGDANEPKIVSNEQYISDEEAGTVQLPNPAKQDILEADSAVEQPYVINNEQQIMEEQPGVENQQNVAVNQQHKPDEQAGIMQEQNIGNALEENVPEDPTGTMKVYAKASNFDVEKLHMRS

SEQ ID NO: 61008 - protein, 145 aa, Zea Mays
MKAADAGSSPIGGGRRGRLRRRSGRRKTAERRGVARPPRRRRVLPLSAAAATLLHTQSARSQLLKLLLKRTFASTSNRDDHSIHGSNRAAAGGIQLHPMRRRPFQCSLIQLLSGQSELGQGRTAKPAGISTTGWTGLDAGFGIPL

SEQ ID NO: 61009 - protein, 551 aa, Zea Mays
MPRKASSNSDARAKSRKRKRAAASASPSKQPDDHSDDSDTAAAANGDDETSRAASVNGGGGTLAGVGGDDDPVLDLRAAEVLSSSAEPVSAFPAAVRRAVSRPHPSVLAVIAAERAAASSDDAPVTPASVPVLENISHGQLQVISAMLPDHPSLSYDPDKPSTYVCTPPPLMEGCGVHKQFYDKLHIVPRHSDWFVPQTVHRLERQVVPQYFSGKSQGQTPEKYIMLRNKVIAKYLERPGKRLVFAECQGLVTSTPELYDLSRIVRFLESWGIINYLATGSVYRGPRTASSLIKEETTGELQLVSAPMKSIDGLILFDRPKCSIQANDISSLVSTSSAPFVVNHDGDSANLDEKIWERLSESSCSFCSQPLPSMHYESQKETDIALCSDCFHNAKFVTGHSSLDFQRVDAMKDGSDTDGDRWTDQETLLLLEGIEKFNDNWNHIAGHVGTKSKAQCIHHFIRLPVADGLLENIEVPEASLPSGMQSSGFLHSDSNGSTSGSQPGNQIPFINSANPVMSLVAFLAAEVGPRVAASCASAALSVLTREDSRRH

SEQ ID NO: 61010 - protein, 505 aa, Zea Mays
MSLFLLSALLPTVARRMRMNAARQLGFQDVSECPQLCRLANNYLSSSKTCMEDIYGFFAGAKDDAAECLLYVKLIEELDRCILGYFAFHWDHATYLITSALTADTGSKRKLRNMVLEATRKQRFERVTRDLKVTRVFSTLVEEMKAIGIIAAGGEASQCTDVMAPVAHSERSPVLLLMGGGMGAGKSTVLKELKQEAFWTNAEANAVVVEADAFKEADVIYRAISSMGHHNDMLQTAELVHQSSTDAASSLLVTALNEGRDVILDGTLSWEPFVEQTIAMARAVHRQRYRMGVGYKVADDGTVTENYWEPASDDATEQPPRRPYRIEVVGVVCDAYLAVARGIRRAIITRRAVRVRSQLQSHKRFAAAFQRYSRLVDGARLYSTNSMGSAKLIAWKDGIGNSLLVEPREFDCLEKVSGLNEHATSVHDLYPDGTTTCGSRSIWEDMIVSTARADTQRELREAIRSVESGGGQPDTPPTTPQRELLGFIRSLEAANAEPAAVDNGL

SEQ ID NO: 61011 - protein, 498 aa, Zea Mays
MLTGFASGSKKPRSQVSYSGSPRSEELGLKNKDHFRKIQSHVSVKTSDAKKLPDSSRSGHSSPELLTCIANVLVTVGDRGWREYDTQITMDSDVHSEQRICVKLAEGTKYAHKVCQVLQPGATNRYTHAMMWKGGAEWCLEFPDRSQWLIFKQMHDECYSHNIRAASVRNIPTPGVHLVGIHDDNDMVSFVRSEDYLVHIGTDVEIALDEARVLYNMDSDDEEWISSRQKFLVRDNNATLELAEDLFERVMDKLEKFAYSHDSNELSIVQMKELETDDLPLDIIEVIHAYWQAKRQKKGMPLIRHFQFAMWKVYEQQLHEWESKVCRMQGSSNGYQGKKMPPKPALFAFCLRPRGLDVPYKGPKQRSHKKLMSTGCHSFSRQHDGFYRQGSLQEQVLFGHLSPRKVLHQDFSGQILSKGVQPLLSLMITSRRLPSALRELNGAHLTIGTLSFMTGRTQSISFRARPLLILRSSNCGMLQAQHSTLLPWRSSRGKRLTA

SEQ ID NO: 61012 - protein, 524 aa, Zea Mays
MGTERKRKVSLFDVVDETSVSGKLGRAASNGAAATAAGTNPSVNRWNGRPYTARYFEILEKRRTLPVWQQKEEFLRRLRDNQTLILVGETGSGKTTQIPQFVLETEGLGNRSMVACTQPRRVAAMSVSRRVAEEMDVTIGEEVGYSIRFEDCSSHKTVLKYLTDGMLLREAMADPLLEKYKVIVLDEAHERTLATDVLFGLLKEVLKNRPDLKLVVMSATLEAEKFQGYFSDAPLMKVPGRLHPVEIFYTQEPERDYLEAAIRTVVQIHMCEPAGDILVFLTGEEEIEDACRKINKEINNMGDQVGPVKVVPLYSTLPPAMQQKIFEPAPAPLKERGPPGRKIVVSTNIAETSLTIDGIVYVIDPGFSKQKVYNPRIRVESLLVSPISKASAHQRAGRAGRTQPGKCFRLYTEKSFNEDLQPQTYPEILRSNLANTVLTLKKLGIDDLVHFDFMDPPAPETLMRALEVLNYLAALDDEGNLTQLGEMMSEFPLDPQMSKMLVISPKYNCSNEILSISAMLSATV

SEQ ID NO: 61013 - protein, 288 aa, Zea Mays
MQSMALTSPSLPEVGPVSGRRLQRIRATAVGVSSVWYEGNTCNMHLLRLAEAVRDGVREAGMVGFRFNTVGVSDAISMGTRGMCYSLQSRDLIADSIETVMGAQHYDANISIPGCDKNMPGTIMAMGRLNRPSIMIYGGTIKPGHFQGNSYDIVSAFQCYGEYVSGSITDEQRKNVLRNSCPGAGACGGMYTANTMASAIETLGMSLPYSSSTPAEDPLKLEECRLAGKYLLELLKMDLKPKDIITEKSLRNAMVIVMALGGSTNAVLHLIAIARPQAQWQICHGGST

SEQ ID NO: 61014 - protein, 319 aa, Zea Mays
MKFQSPLPGSPKRLHLCSVHRTAGTRVHWPVDTCRSPLTDVQHAAALLPAPPPQQRTTPPRSPGPPRTPATRRIKASRRSNGWQATALGQVVLQRLLSFTPLVGRLTSRRTAPAPAGDTWTVTTDEEVNNAAVSFNEIDTNSVEHAETVLRTNFYGAKMLTEALLPLFRQSSATSRILNISSQLGLLNKVGDPSLKALLLDEERLTEAGIEAMVSRFLAQVKDGTWGEQGWPKVWTDYSVSKLALNAYSRLLARRLEARGVSVNCFCPGFTRTDMTRGWGKRTAGEAADVGARLALLPPTELPTGTFFKWRTPQLYSKL

SEQ ID NO: 61015 - protein, 246 aa, Zea Mays
MLKEKLHIFGILGCVLCVVGSTTIVLHAPQERTIESVAEVWDLATEPAFLSYAAIVLAATFVLIYYFIPRYGQTHIMVYIGVCSLVGSLSVMSVKALGIALKLTFSGMNQLIYPQTWLFTIVVVACIVTQMNYLNKALDTFNTAVVSPIYYTMFTSLTILASVIMFKDWDRQNPTQIVTEMCGFVTILSGTFLLHKTKDMVDGLPPTLPVRIPKHEDDGAEGIPLRSAEGIPLRSPRATESFRSTL

SEQ ID NO: 61016 - protein, 287 aa, Zea Mays
MRKVLINAVLFPALAAAVALAIFCFVRCRRRRGRGRGRDRSVLPSHGGGARADRFQAGGASGGYAAGGGEEALMRFPGGEALTVAAILEAPGEVVAKSSHSTLYRAGLSAGEAVALLRFVRPACAAGADEARAAARALGAARHPNLVPIRALYIGPRGEKLLVHPFYAAGSLRRLLQEVGDNLQAVDRDRQRTGPPPHSVAQGKRSRQPQNKQRHAGRRFPAQDLRLRALPPAELRRGAGDARDVCGAGLQGPGADEDEGRHKGERRVQPGSDHGRDARSEGGRRRP

SEQ ID NO: 61017 - protein, 348 aa, Zea Mays
MASAAGAAFAAITLLILVPLTAASDSDHKYQAAEPVTLWVNKVGPYNNPQETYNYYSLPFCHASENHVHKWGGLGEVLGGNELIDSQIDIKFGKNVDKATICSLDLDLVKAKQLSDAIENSYWFEFFIGFVGEADRNNDNKYFLFTHKNIVIRYNGNQIIHVNLTQESPKLIDVNKALDMTYSVKWEPTNITFAHRFDVYLDYPFFEHQIHWFSIFNSFMMVIFLTGLVSMILMRTLRNDYAKYARDDDDIETLERDVNEESGWKLVHGDVFRPPCNLVLLSALVGIGTQLAALILLVILLAIIGMLYIGRGAIVTTFIVCYALTSFISGYVSGALYSRHGGMGLFIM

SEQ ID NO: 61018 - protein, 1813 aa, Zea Mays
MASPPEREVAALESCFRALSAADAVPAVVDCVLASSASSSPSQLFHALLRSFPPSQREQGLQAQSDRHAAICHAAALRHLLAQLDSPPKVREALRLLLWRVFLPLLQDIIEPTHPAHFDLVIEMMCNAVSDTGCWDLLGATIVSFCIRSSVVAMGLSAADANSILYQSIMEADFPAETLSCLLPLSNSSSVLASLLVDMLERRRTIPTSQEGAADLAALVQNLTWDLAKLVLKMFTHAQEYRSCATRVLLQPVLISLTDVSSVTVSFGAVQHKLSRFGFLECIWNSCISLFPLGPGERLDAYRILSVYFSTLKSGHQAAVLGVGIVQEFDLKNVSEFWDELRRGLVDKDSLVRKQAFYVLTISLSIFTSSSGNDSCQHFSSRSPAALPAQIKANAGETKRERWANKEAKSLGVGEMDQSGENCSNGQDRWKVFLLLYEMLQEYGTHLVEAAWTHHVVRLFECTLQNDYLNHTSCGAFHAQMESWERILYWMAVLWERGFSHENPQVRCLVMQSFLDIAWERYKVCTHIIPRGFVLGPLIRGLNDVVHHKDFGIGGAYSSKTIKDAQRFFRTYTHNLARCDRIHLVWSLASAAKQDSFGRAGLMTLASCVASCTRQSETNDVPCAISGKAVTKCDGCVPTEVRPTDLLDVLWILSERSKQHFNPKYRLKVCEQVIQVATSLINATEIPLNQLLHFIATIPREFTDYIGPLRVVVQKWFFQKEECSPGDTLLSKLIDFSATFVSQKRNEGSNVFDDEDVDAWEAEARRWARTLLLVTEEEEHLKRIFRFLEAYGYKLSEQCPSGDFIPIKFFIIVLSFIEELELRQRKLVCRSNTILRGSDTLNGLVLDDLNKMFTESLLLILENMVAFSKLSCSIFWLDVDNKDLPPSIKGKLGGPSQRRLATSITSSVLQGIWSMRCVSSVASWCNPYNSDDSVSSAFSVLWDFYLNVTHHSTIANEIGAELHLAAYEALAYVLAVLSTASSTQFLDFVEAKQTDQAHKFSLDILVTTFLDNINHLLTEGTLTRSRRAVLMTWKWLCMDSLLSISSCYSDNESQMKRLEPLFSDSTLRCIFLDIIESLENTGENSVLSILRCVRSVLRLLHLNEGNTIFSSLGISYEMMMQLAKSSWILHLNCNKRRVAPIAALLSAVLHPAIFCNLEMHQTNEKGPGPLKWFVENLLNEGSKSPRTIRLAALHLSGLWLMYPKTLRFYMEELKLLSLYGSVAFDEDFEAELSENHEARFEVSMLAQSPDREFTEVFINTELYARVSVAVLFHQLWKQIKEHSILETEEALECGKLFLLELLDSAVNSKDLSKELYKKYSSVHRRKVRVWQMICVLSHYVEDDIVGEVTSSIHICLYRNNLPAVRQYLETFAILLYLKFPTLAEEQLIPIFHDKGMRQQALSSYVFIAANVILHSRQSVQIYHLNQLLPPILPFLTSHHHSLRGFTQLLVHSVLSRLWPTLHPETSEDAVFERRCFQELKDYLAENSDCVRLRVSIEGFLDVFDPNASGTPPGIFSARPEVSDFECVPVSVMERVIEFLNDVREDLRQAIANDTVTIKNEDLAVGEHHKSDESVSEMVKTGQEVLDFQKKITPHRGDSEQALNLNTRGHSGVGDEYISRIISEMEEDDQVFDLALEARLHAAETIKQSRQELIVVASLVERIPNLAGLTRTCEVFRAAGLVVADKSVLQDKQFRLISVTAEKWLPVTEVPVDSVKAYLERKRGDGYSVIGLEQTANSMPLDRFGFPDRTVLVLGREKEGIPVDIIHILDACVEIPQLGRGEVAQCPCQRRHSRLGVHASTTQSALACCLFLLH

SEQ ID NO: 61019 - protein, 586 aa, Zea Mays
MFSWNRKQSSSSGSPSPSSSSGRRRGGADASMDSSSRGGGGSGSGSGSRGRSPRLDRRNAVKRVDYEAGAGASVSVAASWSSSSSADQQRSPGPGLQPSRSLDVAPGADLRISGSVEGEVDELCRSLGLSGPEDFAIPVAAWEARKSRSNSDLLPRSHPDPSTPADEPSPIARVVSAPDVQPTRFVPAPIPATVAAPEESPKAAPAVAVAAPVGGLPLPSPRRGGGESFAPREQGSEPGERLDTRCNSDTEEESEAEDGVAAVEGELKELRIGETFEGLTGTSSLSTTNDDDASSTTTEAMFIISPNGKFKRKIKSWMRGALLGSGSFGMVYEGISDEGAFFAVKEVSLLDQGSNAQQSIVALEQEIALLGQFEHENIVQYYGTDKEESKLYIFIELVTQGSLSSLYQKYKLRESQVSAYTRQILNGLVYLHERNVVHRDIKCANILVHANGSVKLADFGLAKEMSKINMLRSCKGSVYWMAPEVINPKKMYGPSADIWSLGCTVLEMLTRQIPFPNIEWTNAFFMIGRGEQPTIPCYLSKEAQDFIGQCVRVDPESRPSASQLLEHPFVNRPLRASFESSSPPAI

SEQ ID NO: 61020 - protein, 342 aa, Zea Mays
MMRYPRPSSDGLPLPNGIGSGGGGASKKPATPPPRSSKDDVAPAVATDSSRLAAFLASTSLESKARARAPPAQPAPTSAATAAVAATKSPVRDHDHGHGHSHGASSDHSDPASPSSTGTGELLLQWGQNKRMRCRRDSASPSPQHRQAGGKIQRRSSSPAVDKLMPPPSAAPYTRGSNLRSVSSLPPRSGSGSGSGSSAGALPHPLRSAEDRAAGKFSAARAEKQRAVSPGSVMGMGVPVPDPRRQQQQQHAGAAAAATSKPASKVEMPRIYTTLSRKEKEEDFMAMKGTKLPQRPKRRPKIVEKTVSAICPGMWLTDVTRGRYEVREKKCPKKRRGGGAAP

SEQ ID NO: 61021 - protein, 125 aa, Zea Mays
MAFVSPTLTPSTTIDLAQQPRRQFTQPRGFPPLRALGMLDVLQRQSRRYAVTLGEALCCPSRWIEPCSSSARAAAPTIYTAPSSTPKFFAPCRRRASRVVSRQKAKPACRHALHESARLFALEKL

SEQ ID NO: 61022 - protein, 379 aa, Zea Mays
MFQALERLVDNYMLTCEEESELLSSLQFGEEDGWLSSFYSCLITKHEKEYLVEAKFKKLEEEACNILSSSSGETMKNNIDVLVCKAEYYHQSGEYQKCFKLTSSLLERDPFHLKCTLVHLATAMELGHSNDLYLLACNLVKDYPEKALSWFAVGCYYYCIKKYDQARRYFGKATGLDGTFPPAWIGTGIAYAAQEEGDQAMAAFRTAARLFPGCHLPTLYMGMQYVRMHNFKLAEQFFTQAKSICPSDPLIYNELGVVAYNMKEYRKAVQLFELTLDHTSSSLNEMWEPTLVNLGHALRKLKEYQKAVSCYEKALTFPTKSLSAFAGLAYSYHLMDNFEAAINYYHKALWLKPDDQFCTEMLTYALESICQSTARRRPS

SEQ ID NO: 61023 - protein, 534 aa, Zea Mays
MEELSNKALAPSLLSLCLDAVADRLISDNAAAGGGVGRTGSSGGCSGGGGLAGFSEDDGGEADEDRLHPQELAEGLPWELLHRLASRLPPVVLESLHHAAHARYCSAETTSGLGVQDGERRGVKRSRCEDFNSTWQLLFKLRWPLGGNTGHNNLVTVDWQQKYWEKHLQECLNEAAEHAFLPFFCGSIGELSISAKIMNSIYQSMGTSQQHSRLAYQCSKFGCYVRSLRLQGVLCTAETYVLLQQCKLERLMFIRIISDLEIAGWLSELNKCSTNLLALKSDIFMNSLSVLNLRENNLQKDDVVDLHKILIKMPNLRDLDISGNPVMDEGIRSLIPFISWSIQKENPLLRLTVENCELSSIGVIILLECLTNAKQLLDVLSIADNHLGSSVAAALARFLGSHVRALNATDIGLGTVGFQILEETLPTEVALSHINISKNRGGIRAAYFVSRLICRAPDLVSVNAAGNLLPPESLEVICNSLKQGTCNLERVDLTGNMHLSSNIFPAFLEFKKHGKPILVVPPNLSTSAPYDDDP

SEQ ID NO: 61024 - protein, 235 aa, Zea Mays
MAASATDADAGAGLRSEFLQVLLSRRRDLLVPLTVEQGSPVKDPMYQNPPSTMEANPMESCPSKEVENLREKLVEENFYLITELGEQGRVPVLLLKLDDPVPRRKPAIVFLHSSYKCKEWLRPLLEAYASKGYVCVAIDSRYHGERASNETTYIDIDFYDARDEESQPNFVWTSTFLQVWDLVKLGDYLGEREDVDPCRVGITGESLGGMHAWFAAFVDTRYSVVVPIIGVQVGH

SEQ ID NO: 61025 - protein, 98 aa, Zea Mays
MIANGIRFNAKKKQVGNYYSTKVYTRAKSEQQSKIAARKVQQEPDYVHVYVWIELTADIILNLSTVTHKKCVICFFPDIRNVLCGLCWLLERHSKCRL

SEQ ID NO: 61026 - protein, 1179 aa, Zea Mays
MADEAEWNEAEAGIAAPGAGVAPPAPGGGEETKRKRGRPKGSLDTYKRRRRRRRTGDLVSAVPAASLGDMGHSCGCIPAPPLPPPCTVYTVRDGGVAITPQSMEDEAEGVEAESGNAGAASAARDGEETKRKRGSPEGSLNERNKDRTPKPKAKGRRRRRTDDQTLSVSAVSLGDLGLGVAAGTRSIRERRPAPNAFFDVGSDSDTEHDDDDDEEQTTIDQANHESAKTGDSVKKGGRPRKMEAGQLHTRTQISNGKSNGHTNGNPAGKKRGRGRPKKLTVEQAITRCQFSNGETNKSGAEAARSKQSRNRRISQNAKKRKRDEGKESMTKKLNKRSKMLTGENALMCHKCPYCRKNCNCKACLRMRGVEEPPKKEISKENEIRYAFHIVTMLLPWMRELRQEQLEEKEVEANIQGVSMNEIKVEQAEFDLDDRVYCDRCKTSIVDFHRSCKRCFYDLCLNCCKELRKGEIPGGEEVEYVPPEPKGRSYSFGKIHLLKDADRSKNSSNGESYNGMPAVGNSNNGLLLWKAKSNGSIPCPPKEVGGCGSTLLDLKCLFPEKMFAELEYRADKVLRSGTLAKAMVSRSDRCPCFNQSGKIRTESKSVREAASRKGSSDNFLYCPVAIGIQDDDIVHFQMHWAKGEPVVVSDVLQLTSGLSWEPMVMWRALRERSKGKAEDEQFAVWAIDCLDWCEVEINIHRFFSGYTTGRTHARTHWPQMLKLKDWPPSSSFDKRLPRHGAEFISALPFREYTDPRYGPLNLAAKLPAGVLKPDLGPKSYIAYGFYKELGRGDSVTKLHCDMSDAVNILTHTAEVTCQTDIGLIEKIQKDMREQDLQELYGGLNSRSELKLSPAPTECRDESVDEGLKTSYSREGNCVNRDNYNGLDINALPPDDDGDIAKDKESSPGSEWQSELGQSSDHNNGVNTTDEMYNGAHYISHNQKSTGRKVGIKPQEEKSEKADCSGTCAYLKGSSEDNPEMPIVESSEEQSTGGALWDIFRRQDSDKLQDYLRKHCSEFRHIYCNPVKKVFHPIHDQSFYLTEEHKRKLKEEYGIEPWTFEQKLGEAVFIPAGCPHQVRNLKSCIKVALDFVSPENVGECVKLTEEFRRLPSFHKAKEDKLEIKKMAVHALNEAVNFLDPRSSEELKIGVGENICEDESVDEKELPPRRGVEVSGVDEKPK

SEQ ID NO: 61027 - protein, 229 aa, Zea Mays
MRAILAGWIIEVHHKFELMPETLYLTMYIIDQYLSLQPVLRRELQLVGVSAMLIACKYEEIWAPEVNDFILISDSAYSREQILSMEKGILNSLEWNLTVPTVYMFLVRFLKAAALGNKVEKEMENMVFFFAELALMQYGLVTRLPSLVAASVVYAARLTLKRAPLWTDTLKHHTGFRESETELIECTKLLVSAHSSAADSKLRSVYKKYSSEQFGGVALRPPAAAVEIK

SEQ ID NO: 61028 - protein, 736 aa, Zea Mays
MTDMNSDEILEVPDTPDRLQQSKYHVSSSIVGRDGTMAAANPSPQRKFRIRFKNNSVQGSSSQNNGCSILPAALDTDHIFKQAEAAQILELSKDYKAKFSLQKPDSTRISVDSEKRAGKHGFDQSRSISNNISCSVTGGRNPTFQVKDGEVGQQDAGHQSANFLDIGPGFPTIQVGKPGYRLCTRTTDKLKGVTGADVCPGSSSGEVKGDLITNKVIAGPTSPLRVFPRRHVGQKRLVRNGCISPSNIAKTDAKVNEKQEMCSLSEHLDHPHQPDAFDGGDVIDLTENSPIMTRQRSEVNNKLMSGHNMDTRAAKKLRTDRFGRTLVRQSKCHANNSSCSEVSLSGLNNNGKGIDCDILDSDQTGEANLRGVDLSTAGTYLNKNFSDISTEQGWRTTHNHTSKLPISFMGNITSSSGWESGSSTTRSNQNHGSAGGKHSSVSGANIIVPDKIGNKTIMLGRERRKQTSTSSHIGESSSAADEPRGDLQSSKISAGPNHSSHQHNIPVINIDDVSPEARPSSSGFTNRTLDPTIEAQLESDELLARQLQEQLYNESARFAPTEEIDAIVAMSLQHEEDTHRTSRTLRRFQNHTRGARATRLSSYRNALRAELATANNMISRQRNTAPINLGLRAALARYPGALHIQPNIDLNDYDALLALDENNHQHTGASESQINNLPQSVVQSNSIEDPCSVCLENPSVGDTIRHLPCFHKFHKECIDEWLRRKKLCPVCKFGIN

SEQ ID NO: 61029 - protein, 367 aa, Zea Mays
MHSYRAMHPYTHHSYQHHTAAVAPTKHGHGHGHGHGHGDEEDDQSMLLLSLWPPGHHHGNAAASSACSSPPICASATTTSMAAAASSPASYPWLTHQSLYNNAGCGGGSSSSSHSSFLFQEHQQEPGVSISLSIAPPCSNNAASSCGGGGFAAPPAAPSTVTTTVTPGGGQVPRQYWIPSAAEILVGSTQFSCAVCNKTFNRFNNMQYRKGSESLRGAITVGTAPPASLMRLPCYCCAEGCRNNIEHPRARPLKDFRTLQTHYRRKHGARPYACRRCGKRFAVRGDWRTHEKNCGKLWFCVCGSDFKHKRSLKDHVRSFGGGHAPHLVESVAVEDEEEEDDDHDDDDLQTFDDNGGAGADPSDMVVI

SEQ ID NO: 61030 - protein, 832 aa, Zea Mays
MLRLSIAVLTSPLLPTSVPAVRPHPRRLLRLRLRSLAASSSLSPSARSLRLLEWGKVCDAVASFAGTAHGRDATTKQLWEVEDVSYEQSQMLLQETEAAVLLLDNAGGAMDFSGLDTVAIESAIHSVSGGAVIKGLEAMAVTSLMMFVESLQVNIKAAMKLDEGSCSRLTTLTETILDAVINKSLVKSIQDIVDDDGSVKDTASPELRRYREQVQRLENRLYQLMDKLMRNADDEASLSEVCIVNGRCCIRTTMDNSSFFDGLLLSRSDAGSMIEPIVAVPLNDELQESRALVAKAELDVLSKLTDKIRLDLDSIQNLLQETIKLDKIAARAKYSIAYDGTFPDLYLPNFENETVTSATGGSIKQISSAQLPKKAWKLYMPNAYHPLLLQRHQENIHRAKRDVASATAEIRRRRIYGQDIAEEDQLASDLDSMKLRVSQLEKDQPVPVDFMIAEETTVLVITGPNTGGKTISLKTVGLASLMAKIGLYILASEPVKIPWFNAVYADIGDEQSLTQSLSTFSGHLKQIGAIRAESTSESLVLLDEVGAGTNPLEGAALGMSLLESFAEAGSFLTLATTHHGELKTLKYSNNSFENACMEFDEENLKPTFKILWGIPGRSNAINITERLGLPLDIVESSRRLLGTAGAEINALIMDMERLKQEYQQHLQEAQYLLMQSKELHNNLELAQKSIVDHTSAQRKRKARVISEYAVMARSIIRKKFQQFQESAIAERVKEEENAVNDAKSDRVKDPMPANTSAIGNIQNIDTSLGMTANDDEDEVPEVGDSVYVPKLKNEATVVKIDSSKNEVQVQAGMMKLKLKLKDVKVQKRKVSR

SEQ ID NO: 61031 - protein, 265 aa, Zea Mays
MSRHRVETCDSWRPPRKNHAGAPPLLRAGPRLLAFASLSVRDGGDSAAAVAKAVEEAVVVRSDEVKEAVAGEERKKTKSTERRLPPAAQLVSHPLALLALVPNSAAIFAAGAAAGTVAKTVTAPLDRVKILMQTHSVRVAGESAKKGVGFLEAMADIGKKDGLKGYWKGNLPQVIRIIPYSAVQLFSYEVYKKIFRRKDGELSVFGRLAAGACAGMTSTLVTYPLDVLRLRLAVQSGHSTLSQRSTRIDQKHLWQPLFFQQHLQL

SEQ ID NO: 61032 - protein, 957 aa, Zea Mays
MVSQAPVAGASLAASLCKKSNRVARVLAYALLEWILIALLLANGVFSYLISRFAAFFGLAPPCALCSRLGVDSLFETRPPHHRGAEPLRRLLCDAHAAELSRLGYCSAHRRLADAGDMCEDCAAAAAPGKALLSWMGRSELGERDLACACCGVALESGFYSPPFLLTTSAPRGSDCGLKQEEEAAMPNGDVVVVSKEGPVIELFDDKPFVEDDSIGVLAAEVVANVERPVALESIDSLVVTMGTVSSQSGGEGKEAVDHGVVRQNNVDMENTVSSNEEKIMPSDDKVDVVDRLIDEQIVAVVLVPACIEATLDGGINADKTVDAFADHQSLEDDSGLEVKDQKISFEDEVFEGEQAEQVTQQQELCAMPTDPSDHEFVERLDRSTELEHFPLAESKHKMNSMPVEASKHVAVTQIEGKQVQQAEVNQELDSIPKRSREHADQELEVERTAQAGLEQECDSVPIDSEEHGCLFSYAHTDDEQDEVKQKVTSETADVLHYAADTFNVNTNSWKEDIEEDSTEAALTAIHQICYEPLTSIVKFSLDHSVSEEDREPDTPTHIEGICDSQELLDSKAVVSDAKSVDSSVATLSTDLESTELVSVDQLKSALASTRKSLNTLYSELENERNAAAIAADETMAMINRLQEQKAAMQMEAIQYQRLMEEQSEYDQEALQRLNELVVKREKEKQDLERELELYRHKVHLYEVKVRKLSRHKADDQNGSSSTSSSAEDSDDLSQSFYEGDESSHGINGSNGSIPTDVVLQETARHLVTLDGSLADFEEERLSILEQLKVLEDKLFDLDDEESDNMKHFSEENHLSGASNGFSDDDSCFKLHDKRKNVTYRGKKLLPLFDDATVEAGNVPQGNDAQHSTEVTLDLAREQHKLAIANEIDQVHERLHALEADREYIKQCVRTLKKGGKGFDLLQEILQHLRDLRRIEQRASARNSGELSPHYLHHHTD

SEQ ID NO: 61033 - protein, 76 aa, Zea Mays
MALGTHLLPLPVRRQKRPAGALLHRACSLVLPRRALPASSSLASTLWPSPSRALVSLLYPAPSSYVWLPARVSGHL

SEQ ID NO: 61034 - protein, 193 aa, Zea Mays
MSSSPLPTTSGGAHIFPSPPRPRHRRCSQVIVAAAAPPRSYGVGRRAVSLAGVAAWLATTVGRADAASPFDKYVKRKKLEPLETYVPAVLLTIDQFVDLEKSLEFEKPRYDESRSLLRSGPASSLRVNIRAVAQYASSNGQGKAASDAVDECLRALEDLDSLLLHASRNDPSASVETMRSKISVALAALDNTG

SEQ ID NO: 61035 - protein, 1206 aa, Zea Mays
MKERSSLCESAADGNWGLKYKRKRSKLTVSPSNENEATSPTSDSRMSHGSTKKKLKHDNNISPSAKKIRGHDGEQGVVGDKMMTTQEDQQVDRILGCRLQMSQINPPSHASLEQFESANLQVDGMVLPHASAGIPNRPHDGTESSRNGTIEDICADESANHSGHNLEMRKDTDSKSHEKESHKREQVKKILSVCSGDETNIMKDDQVVRENVSASKKGEDETSDLPAEKDDTILPVTRACTMIRTNQDHTDESKQHGKIEQITNKDYNDAGYEFLIKWVGKSNIHNSWVSESEVKILAKRKLENYKAKYGMSLINICKEQWCQPQRVIGLRASVDEVEEVLIKWCGLPYDECTWERSDEPTLMKYSHLVTQFKNFECQALDKDVVKDYANARNRHELNVLVDQPKELQGGMLFPHQLEALNWLRKCWYKSKNVILADEMGLGKTVSACAFLSSLYCEFKINLPCLVLVPLSTMPNWMAEFSSWAPHLNVVEYHGSARSRSIIRQYEWHAGDASQIGKTKRSYKFNVLLTTYEMVLVDAAYLRSVSWEVLIVDEGHRLKNSSSKLFSLLNSFSFQHRVLLTGTPLQNNIGEMYNLLNFLQPTSFPSLSSFEEKFNDLTTAEKVEELKKLVAPHMLRRLKKDAMQNIPPKIERMVPVELTSIQAEYYRAMLTKNYQVLRNIGKGGAHQSLLNIVMQLRKVCNHPYLIPGTEPESGSPEFLHEMRIKASAKLTLLHLMLKILHKEGHRVLIFSQMTKLLDILEDYLTLEFGPKTFERVDGSVSVAERQAAIVRFNQDKTRFVFLLSTRSCGLGINLATADTVIIYDSDFNPHADIQAMNRAHRIGQSNRLLVYRLVVRASVEERILQLAKKKLMLDQLFVNKSESQKEVEDIIRWGTEELFGNSDSVDGKDNSEVPGPVADVEFKHRRKTGGLGDVYEDKCIGGSTKLVWDENAILKLLDRSNLPSSMAESTDGDLDNDMLGTVKSIDWNDELNDDPGTNEDTAPIDNDGSEQASESKQGATNRSEENEWDKLLRVRYSAILWEQYQIEEEACLGRGKRLRKAVSYRETFATLPNEALSEDSDEGDEPKREYTAAGLALKEKYGKLRARQKERIAQRHIIKNYADDNLEEFMTPYDSIANEPAENPLVIVEDLNSSQLSGAKRFSDSTGEMRQSSKKSKRYSEIPQDLYAKIPGELIQKLNLCTKHKGA

SEQ ID NO: 61036 - protein, 57 aa, Zea Mays
MVLSLNALSGAENPKCTHKCVRLRAMIKDQVILQLLDSGSSNTFISDLAATRINCVI

SEQ ID NO: 61037 - protein, 204 aa, Zea Mays
MTPEAALDHVRSIRPRVLLAPSQWHAISSFGALTGGQLPVWSTNLACFLEAIEAGCTNTGNDTIVQQDNIDKENDSAMKLDVSSSMEKPSGQGPEESILESDCIGDVPIECDKHGDSEPLSMEGKIISGNVNVKNQISREDLKEAFKNFGTVRMRQQSETLGKHAMHFLAGYISMFSTQGPFQTGITRIILLGTMLLFFLTCYC

SEQ ID NO: 61038 - protein, 89 aa, Zea Mays
MRRKHAKSIKSKFNDLMSTHPPLNEAYSDVCVFSLQSSICYIDLPNPPAELKKLKHKKCLVQSPQLLHGCQVPTMLQHVQFACGIGISS

SEQ ID NO: 61039 - protein, 291 aa, Zea Mays
MEEVEAARRRVRGGGLLNTIVMNAVLEACVRCGDVDRALRLFEEMRGPMGCGVDDVSYGILLKGLGIARRIDEAFEILESIEKDSSIGGPRLSPHLICGFLNALIEAGDMRRANALVARFRMVLYEDHSVLLYNLLMKGYIKSNFPLGALTVKDEILRQGLKPDRLTYNTIISACVKSAENDKAIQFLEDMKEEANTESNPELLPDAVTYTTLLKGLGNSRDLYSVVKIVVEMKSSLISIDRTAYTAMVDALLACGSIDGKFYTIFLVTTVNFPKKQYNEFASWKTTLVFD

SEQ ID NO: 61040 - protein, 222 aa, Zea Mays
MPRLVEVVKGSTKEKVVRVAVLSFCNLLAKGAFAAQMIDLGLPQIVQNLKAQAWTDEDLLDALNQLEVGLKENLKKLSSFDKYKQQVLLGHLDWSPMHKDPSFWRENINNFEENDFQILRVLMTIIDTSSDTTALAVACYDLSQFLQYHPSGRIVVADLKAKDRVMKLMNHENTEVQKNALLCVQRLFLGDLDPENSWPFLKMAVKKTLKILVHYILLLFDF

SEQ ID NO: 61041 - protein, 1527 aa, Zea Mays
MEMIGSGSRSCLCHSSFLPGFFTGGEHAEKLSHKRTERSHPLPFLVKEEELSGDELEEFIKNRYSNRVKYAADRSYSREDDDIFPMDCALKEPTIWRVKCMVGRERQMAFCFMQKFVDLRKIGTKVPIITAFALDHIRGFVFVEAEKAGYVTEACKGFCSVYTSRITSVPATEVPSLLSSRTKPFEISRGTWIRMKNGNYKGDLAQVVNMDSGRKKVMIKIIPRVDLHAISKKFGGAVSLKEAAVPAPRFFRPHIEIKRDRQTGEVFEVLDGLMFKDGFLYKKVALSSLIYWGIQPTETELLKFSSSPSNRASADDLDWLSGMYGSKKRNLPAERDMKSSSSKIKSSKAPDLKGSTSTENYDDNDEFNLHDLVLYGRKDFGVIIAVEKDGFRILKGGPEGSAVTVRKQDIKKGCVDKMFTAVDHHKKTISINDTVNVVEGPFQGKQGLVKHLYLGILFIFNESESENCGFFCAQSGSCEKIRKGLGSSTTENSDFPTPMFSEPAYEQNEHRNTEGPYRSTREQLFSIGQMLRIRKGPLKGYLCRVVRIFRNDVTVKLDSLLKIVTVQADLLSVPANRGDNLSGAPASKFGSQDTPFFGSEAGKTSWDRGLPSFGSDSWQPFSSSTLPVQNAGAESEADPWCKKTSAEDDSDPWGKKTDGDSDPWGKEAVSAADGDCNPWGKETVPSAAGDSDPWGKKVFSADGDSDPWGKKAISSAVEVWNTSATQKEGSSGNAWDKQAGVGGSDAAGSSWDRAVVNKESEKSDNWGEACRVMDMGTGADTDPWGSKVKAVDMEGPNSWEKATMPPDNKLEDVSQGWNQHKGNSTEDQAKDNVSKDEDNNRAWSSSLPVTEDGTWGKSKDDNCDGAGGAGGWDASVANWNKSSVLADAQDEGWGKGNWSSAKSEETNNEIGNWNKAGASDQAGPKSFGGDGWNKGGDQNSSWNSPGNFGGGRGFGRGRGRVRGRESGDFNGRNDQGNWKNSWGGDNAEKSSWRSDNQVDNEAGDSGGYRGRGRGGRGQYGGRGRGRDNGWRNGDGPKWGGGDNWNATNPPSNQPWSSSGGTKSYGQNQPSTWNNPEDNKPSVGEQGDPWASKVSSTEGKGQQNDSWSSKMTSRGAEDTSGGWDSKEKGSSCNGGGEGLQNDPWANKIGSNEGKEQEADPWASKMSSAVGADDKNGTWDTTTKGTLSNEKADDPWNSKRGNDDDSKKTDAWGAGSSGGNQESSWSKPIFSLGDQEPTWNNPRFGDDDNVNNRGGFGRGNQGRGRGRSFGGGGGGSSWNESNKNGESGGGRSGEPWNRRGFDGGRGRGRFGRGDRNQGNNLGSGDGGSWGSGRGNGGGRGGYRNWNDNNERRPFGQGGGWSQSSDWNANKGSGEGNQAFSKSKPSWDAQNASGGDDQAGKKSDTDNSWSQNRSSPSILGQPSGDANNKSSAWDGAPNGGAGRGGSGSWGKSDEDGWNSSSGGSAREKPSWGGGAEAPPRKEDDGAWGKGGEGSRSLGGGGEGGSSSSWDKPADGAWSGNNKGGSGSGGW

SEQ ID NO: 61042 - protein, 328 aa, Zea Mays
MMCQEGKPQAAVDKTLDSKVFKRWVETDNPWTSDDETDNNEMTYVNLQLNPERYTGYTGDSARRIWDAIYKENCPKYPSEELCHEKKVLYKLISGLHSSISVHIAYDYLLDESTNSWGQNLSLLYDRVLKYPERVQNLYFTYLFVLRAVTKAADYLEQAEYNTGNPEDDLKTESLVKQLLYNSQLRSACPLPFDEAKLWQGENGPELKQEIQKQFRNISAIMDCVGCEKCRLWGKLQVLGLGTALKILFSVDGDSHLNQPLQLQRNEVIALFNLLNRLSESVKFVHEKGSSVEEVINEQSPSTVQKGASKTNLKGLFGYSQYTWIGWD

SEQ ID NO: 61043 - protein, 604 aa, Zea Mays
MGSTHKEEVGVLEEILDGRKEPRKLSLSVLKHITNDFSHERIIGYGGCGEVYKGILQNGSVAVKKIFSNLNVEDKEFDREIQSMMQVKHPNVVRFIGYCSNTEHELMRKEGKYIKVEVRERLLCFEHISNGSLRSHITGVIMLELVTGSKEEPDITNVLRRWSHRWKKSGQRTPSFQRHQVSKCIGLAKRCKEVEPTRRPSICDILAALGKMEDMNCSDQQVDEEVTYLEDMLGIEPLDLHFLVEPTKQISCSVHLTNATNDCFAFIVQTTNPKQYCIQPDRGVVPPRSECSVAIVLSQEPTHNKRCSMEDELSVQSTRVDEGVTAADVSEALFTGKEDRTVDHVSLMVGFDMSPSPPEEQTEDFTFAPLASLYDEEPQLSAAKLGRSGRFSKKKLVSILKSWRARLKVSSHKKLETPKHDCEIPEAVEHEEVAAPRCPKGPLPQRDLSPLGEACSRMNMTAIHEILVNRHYRDDDLDPNVPSLEEWTQQSRDMLDDRKRGDFTFRDKDFRAAIDWYTKCMDVGPKKASPTVLVRRSCCHLMCGNLDAALRDAMQAQRQYPDCPTSLYMQAVALSKLGMHSQAMGMLIEASEMEANQKKTRKAA

SEQ ID NO: 61044 - protein, 156 aa, Zea Mays
MVLQLLPVNSLSCKQIERRSCISLEAFIRDYFLCESPVILSGCIDHWPARKKWKDIKYLESVAGDRTIPVQIKELHEDIAVPEYCSAGGGKLQSLNAWFGPHGTITPLHHDPHHNLFAQVLGRKYVRLYPASTSVGLYPNTESMLSNTSEIFSWTP

SEQ ID NO: 61045 - protein, 697 aa, Zea Mays
MSVMARRLSSSCSRAVASSCPSKSSLRRRIYTLPSRPLLPKESSPPSTSVSPTQQQSRSTIEGGEMTVASSVRLAGGNLTVCGRTVLSGVPDAVVATSAATEGAVDGIFLGADFAEPAARHVVSLGDLRDVRFMACFRFKLWWMAQRMGEKGSDVPRETQFLLVESRGVGDEDAAYVVFLPLVEGAFRASIQGGAGDALELCVESGDDDTRAASFERSLFVGAAESDPFAAISGAVAAAKSALRTFRVRAEKKLPGIVDYFGWCTWDAFYQDVTQEGVEAGLRSLIAGGAPPKFVIIDDGWQSVATDTNESAGEDKPPLLSRLTGIKENSKFQNADDPAAGIKTVVRLAKEEYRLKYVYVWHAITGYWGGVRPGEEHYRSSMQFPKVSPGVMENEPGMKTDVLTVQGLGLVHPRAVYRFYDELHAYLAAAGVDGVKVDVQCILETLGAGHGGRVQLTRQYHQALDASVAKNFPENGIIACMSHNTDALYCSKQTAVVRASDDFYPRDPASHTIHIASVAYNSVFLGEFMLPDWDMFHSLHQAGDYHGSARAISGGPVYVSDAPGKHNFELLKKIVLPDGSILRARLPGRPTKDCLFTDPARDGPAQDLEHEQVHRRAGRVQLPGRGVELRGEEEHLPPDRHRGPDLRRQGRRRPPHLRGRDGHRMGRRLRHVPACRRRPRRPPARRGVARLPQGPGT

SEQ ID NO: 61046 - protein, 884 aa, Zea Mays
MEGALVQSAIVPAVYRSSSGRFRVRARARTNATMVRNTPTRTLTLGGFQGLRQTNFLDTRSVIKRDFGSIVARRLGHNFVGTEQILLGLIGEGTGIAAKVMKSMGINLKDARVEVEKIIGRGSGFVAVEIPFTPRAKRVLELSLEEARQLGHNYIGSEHLLLGLLREGEGVAARVLESLGADPNNIRTQVIRMVGESTEAVGAGVGGGSSGQKMPTLEEYGTNLTKLAEEGKLDPVVGRQDQIERVTQILGRRTKNNPCLIGEPGVGKTAIAEGLAQRISNGDVPETIEGKKVITLDMGLLVAGTKYRGEFEERLKKLMEEIKQNEDIILFIDEVHTLIGAGAAEGAIDAANILKPALARGELQCIGATTLDEYRKHIEKDPALERRFQPVKVPEPTVDETIQILRGLRERYELHHKLRYTDDALIAAAQLSYQYISDRFLPDKAIDLIDEAGSRVRLRHAQLPDEAKELDKELRQITKQKNEAVRGQDFEKAGELRDREMELKAQITAIIDKSKEMIKAETESGDVGPLVTEADIQHIVSSWTGIPVEKVSSDESDRLLKMEETLHTRIIGQDEAVKAISRAIRRARVGLKNPNRPIASFIFSGPTGVGKSELAKALAAYYFGSEEAMIRLDMSEFMERHTVSKLIGSPPGYVGYTEGGQLTEAVRRRPYTVVLFDEIEKAHPDVFNMMLQILEDGRLTDSKGRTVDFKNTLLIMTSNVGSSVIEKGGRKIGFDLDYDEKDTSYNRIKSLVTEELKQYFRPEFLNRLDEMIVFRQLTKLEVKEIADIMLKEVFDRLKAKEINLQVTEKFRDRVVDEGYNPSYGARPLRRAIMRLLEDSLAEKMLAGEVKEGDSAIVDVDSDGKVIVLNGGSGVAEPLEPALST

SEQ ID NO: 61047 - protein, 666 aa, Zea Mays
MKSILIFQKKAQSRDDSYTIALEEVFEKHMVAAKDLIDGEDLARFLSQLHSDVSNLRAMLRAIYIAGHATESFSDFVVGHGELWSAQMLSYAIKKSYFGANVLHPRTIIPVMKDNIPIVIRNMFNLSASGTMICKQPANENGDLDACVKSFATIDNLALVNVEGTGMAGVPGTASAIFSTVKDVGANVIMISQASSEHSVCFAVPEKEVAAVSARLHDRFHEALAAGRLSKVEVINGCSILAAVGLRMASTPGVSAILFDALAKANINVRAIAQGCSEYNITVVLKQEDCVRALRAAHSRFFLSKTTLAVGIIGPGLIGRTLLNQLKDQVAALKENMNIDLRVIGITGSSTMLLSDTGIDLTQWKQLLKKEAEPADIDSFVHHLSDNHVFPNKVLVDCTADTSVASHYYNWLKKGIHVITPNKKANSGPLDQYLKLRTLQRASYTHYFYEATVGAGLPIISTLRGLLETGDKILRIEGIFSGTLSYIFNNFEGTRAFSDVVAEAKEAGYTEPDPRDDLSGTDVARKVIILARESGLRLELSDIPVKSLVPETLAACSSADEFMQKLPSFDEDWARQRSDADAADEVLRYVGVVDTVNKRGQVELRRYKRDHPFAQLSGSDNIIAFTTSRYKEQPLIVRGPGAGAEVTAGGVFCDILRLASYLGAPS

SEQ ID NO: 61048 - protein, 88 aa, Zea Mays
MSVIPSANVTSGVKEDRMMMTGMHTVSDIFCVGCGSIVGWKYEAAHEKSQRYKEGKFILERYKVSGPDGSQYWIPQDPHLGGSDADDI

SEQ ID NO: 61049 - protein, 359 aa, Zea Mays
MSLRTQCACSCMLQPYSASSSSITLSMRATPTHQRRARPPPPSCLATRHLRRRRAPAGINRVPNLGSAVSTKKAGMSKDTFINLDVSHHRAVVRLLRIEKGKAFVDLLNEKANDSGDKEIGYVQRTLGFSTRYLEDRDIRLVTVIVAGTVRWKRYLDYLIMSLCSEEKVFREMEPLLLQILRIGFFEILKLDVPAYAAVDENVRLAKVALRPGAGNMVNAILRKLVLLKETDSLPLPKIEGDDRAQARALSIIYSHPVWMVRRWIRFHGKDEALRLMNWNNSDPHFSLRVNTSKGYTRADLVKRLESLQVHYEESIMDEFVRIREGMQQVLKAGLLKDGICAVQDESAGKTANYRPKWV

SEQ ID NO: 61050 - protein, 273 aa, Zea Mays
MDERTLAPVRPGAGIIVAVKKLKLDSFQGHREWLAEVNYLGQLSHPNLVKLIGYCLEDEQRLLVYEYMPRGSLEHHLFRRGSNFQPLPWNLRMKVALEAARGLAFLHGDQAKVIYRDFKTSNILLDSEYNAKLSDFGLAKDGPSGDKSHVSTRVMGTQGYAAPEYLATGHLTAKSDVYSYGVVLLELLSGQRALDKNRPPGQHNLVEWARPYITNKRRVIHVLDSRLGSQYSLPAAQKVATLALQCLSMDARCRPGMDQVVTALEQLQRPRAH

SEQ ID NO: 61051 - protein, 298 aa, Zea Mays
MMIPWGGVGCCLSAAALYLLGRSSGSDAEVLRSVARAGSMKDLAAILDTASKVLPLVVAISGRVGSDTPLICQQSGMRGVIVEETAEQHFLKHNDAGSWIQDSAVMLSVSKEVPWYLDDGTGRVYVVGARSAAGLILTVASEVFEESGRTLVRGTLDYLQGLKMLGVKRTERVLPTGTSLTVVGERPHKGPFYASSKSIDQLIVNLGKWAKLYRIASMGFATFGVFLLAKRALQHFLERRRRHELQKRVLNAAAQRQAREAEGSKGTSDAEPNSKKDQLVLDICVICLEQEYNAVFVP

SEQ ID NO: 61052 - protein, 327 aa, Zea Mays
MDPEQTFLRVHARLSGTLSQLLTPRIRLVLEYLYLAGAVALFCLLVVMHTNFVQQPGCSSEFSGIEFGEAQLVQIKIISGGLWSSRGASYIMDLQNLGRSAEKILEVNGDKFNILASKFWSTWVGPGARRSLPDLKAAGEGSVHHPLSAKESFKAAVTFLFRKWYLRAVSFWKNIKQLSENTLQLMVRSNWNDFLHIIKDLQLPSMDHLISTIVQWFERRSKAFEPTYLYGVEKGYFLLSEGAKTRHGVRTINITISARNPCFGNRWQQLLINSIVGYDTILTNSLVNSPGHGYLYNFQTKELYDLSYGHEPPEGPTRFGGCGLDCF

SEQ ID NO: 61053 - protein, 857 aa, Zea Mays
MGLGADQTSISRRSKHANLEGKQSKQAKTINSPFASRRHRRRRRLLLCHPAHPPPPQTHRYRFPHHLSSVRRGMENGGIEEADDALPEPAPPNGRRYRPVGSSDRAVIQMTSMEPGSSSATIDAVVTPQPPRNLKPDANLTIDPSMREGSPDDHVTSSGSQGDSKLELFGFDSLVNILGLKSMTGEQVQAPSSPRDGEDVAITIGRPKQSGPKFGTMMGVFVPCLQNILGIIYYIRFTCALVGLFFPAVTGIMAGSNRSASLKDTQRSIPIGTLYATLTTTAMYLFSVLLFGALATREELLTDRLLTATVAWPAPAVIYIGIILSTLGAALQSLTGAPRLLAAIANDDILPVLNYFKVSEGSEPHAATLFTAFICICCVVIGNLDLITPTITMFFLLCYAGVNLSCFLLDLLDAPSWRPRWKFHHWSLSLVGALFCVVIMFLISWSFTVVSLALASLIYYYVSIKGKAGDWGDGFKSAYFQLALRSLRSLGANQVHPKNWYPIPLIFCRPWGKLPENVPCHPKLADFANCMKKKGRGMSIFVSIIDGDYHELAEDAKTACRQLDAYIDYKRCEGVAEIIVAPTMSDGFRSIVQTMGLGNLKPNIVVMRYPEIWRRENLTQIPSTFVSIINDCIIANKAVVIVKGLDEWPNEYQRQYGTIDLYWIVRDGGLMLLLSQLLLTKESFESCKIQVFCISEEDTDAEELKADVKKFLYDLRMQAEVIVVTMKSWESHMESSSSGVQQDNSHEAYTSAQQRIETYLDEMKETAQRERQPLKENGRQVVVNEQKVDKFLYTMLKLNSTILRYSRMAAVVLVSLPPPPLNHPAYFYMEYMDLLVENVPRMLIVRGYTRDVVTFFT

SEQ ID NO: 61054 - protein, 335 aa, Zea Mays
MISARTAAASPASLWKRGGQSEGGGSCDGCRTYRNTLRRAAAAKVRALPSRAVEAVKMGSAAEVEQEEAEVAAAADGVVVEDHYGEDSATEELPIMPWAFSVASGYTLLRDPHHNKGLAFTEKERDAHHLRGLLPPAVVPQELQIKKIMHNLRQYQVPLQRYMAMMDLQERNERLFYKLLIDNVEELLPVVYTPTVGEACQKYGSIFRQPQGLYVSLRDKGKVLEVLRNWPHRNIQVICVTDGERILGLGDLGSQGMGIPVGKLALYTALGGVRPSACLPITIDVGTNNEKLLNDEFYIGLRQKRATGEEYHELMEEFMAAVKQIYGEKVLIQVS

SEQ ID NO: 61055 - protein, 105 aa, Zea Mays
MMFYCYDDDFVLDQLSYIKLVNFRGTRFELQLLAFLLKRTPALEQLVLVTVGEEGGAPGDERVIQGWVSAIQKASPEAQLTVCQSSEDRSQNPVHTRFYHELLEE

SEQ ID NO: 61056 - protein, 639 aa, Zea Mays
MHVSAVPTILRSMKGGEALKNSSEQHSAETKLNSTQVQENVQLPNNVNDTHSESISSVTTKAENTSQTHTQRRLLETADKSDDQTGSSETHESDSGAKAAATVENSEPLDEDADASFDLFRDPEDLPDEYNYDYDDYVDDRLWGDEDWKEQEHEKEEDYVSIDAHILSTPVIADIDKDGVQEMVIAVSYFFDHEYYRDSDHAKELEGIDMGKYVASSIVVFNLDTRQVKWAADLDLSTDAVNFRAHVFSSPTVVDLDGDGYLDILIGTAYGLFYVIDHRGKVRNKFPLEMAEIHAPVIAADINDDGKIEMVTTDSHGNVAAWTAEGEEIWEVHLKSLIPQRPTVGDVNGDGHTDVVVPTVSGNIYVLSGKDGSKIQPFPYRTHGRIMSPVLLLDMSKHGDNAKGLTLATTSFDGYLYLIEGSSGCADVVDIGETSYTMVLADNVDGGDDLDLIVTTMNGNVFCFSTQSPHHPLKEWRSSNQGRNNAAYQYNREGIYVKHGSRTFRDEEGKNFWIEFEIVDKYRVPYGKQAPYNVTVTLLVPGNYQGDRRIVVSGVYHQPGKQRMMLPTVPVRTTGTVVVEMIDKNGLYFSDEFSLTFHMHYYKLLKWLLLLPMLGMFGVLVILRPQEGAPLPSFSRNID

SEQ ID NO: 61057 - protein, 299 aa, Zea Mays
MLKYIQQVLGVILALLEDPNESVQLTAVQCLLNVLNLSEQDAVGPILINLLVRLRNLQVSMNTKMRSNAFAAYGALSAYGVGLQRTAFIEQIHATLPRLILHLHDDDLSVRLACRNTFQLLATLMEVEGLSVLLSKQYFASDRRSDYEDFIRDLTRQLCRLSPARVDSYLESAIQAFDAPWPVIRANAVCLVSCMLSFLDDQRFIAPYFSQVFATLVGRMSQSPDAIVRASASSALGILIKRSNMLRSLVSRYDRADSSRNSQSGDSNTKTPSEFQEQAEGNPNDGASGAAIKGTEADH

SEQ ID NO: 61058 - protein, 177 aa, Zea Mays
MDQSQGATSHIAGTYGYMAPEYAMHGQYSVKSDVFSFGVLILEMVTGRKNSNSDQSVDLLSLVWEHWSSGTIQELLDPFLMSHRAPPDQMAKLVNIGLLCVQDSPADRPLMSSVNVMLSSDTISLQAPSRPTFCIQETEDHSRPYSDAYKRALKLQSSTDRAAMSPNEVTLTELEPR

SEQ ID NO: 61059 - protein, 328 aa, Zea Mays
MFYVHKPGYGGFSYLVEPLWWIGMISMIVGEIANFAAYAFAPAILVTPLGALSIIISAALAHAILQEKLHTFGILGCVLCVVGSITIVLHAPQERDIDSVKEVWDLATEPAFLCYAAIVVAAALVLIYFVVPHHGQTNIMVYIGVCSLLGSLTVMSVRALGIALKLTLSGTNQLFYPQTWAFALIVATCVSTQINYLNKALDTFNTAVVSPIYYVMFTSLTIIASVIMFKDWDHQNPTQIVTEMCGFMTILSGTFLLHKTKDMTDSPGQSLLTRRPKHASQNAFAIEVMPLKCQDYIDDETLTLSLPKVENGYLKEEYLLRYKDSSIV

SEQ ID NO: 61060 - protein, 268 aa, Zea Mays
MGNCMDKAVPVDNTSYQSKAGSKSISSSNPSTVKTGSTRSTWTVASYKDSRELPTPRTEGEILSSPNLKAFSFGDLRTASRNFRSDSLLGEGGFGYVFKGWIDEQTLAPSKPGSGMVVAIKKLKPEGFQGHKEWLTEVDYLGQLHHQNLVKLIGYCTDGDHRLLVYEYMPKGSLENHLFRRGADPLSWGTRLKVAIGAAKGLSFLHDAENQVIYRDFKASNILLDSEFNAKLSDFGLAKAGPTGDRTHVSTQVMGTRGYAAPEYVATG

SEQ ID NO: 61061 - protein, 341 aa, Zea Mays
MVGEESGCGVEGGTGGGEVPAASAPNGDRSGNSRLAVPSSSADDRGFHRSSTMPGVIKNDEITNESTGPSNLERSRTERRRQNNPTIDPAKQLLDERIPIKKKLKMLNRIATVKDDGTVVVDVPSGLEPTIVGGTEDIYTEAVEEALDGTEILYRPPMQIVILIVGTRGDVQPFVAIGKCLQDYGHRVRLATHANFKEFVLTAGLEFFPLGGDPKILAEYMVKNKGFLPSGPSEIPIQRKQMKEIIFSLLPACKEPDPDTGIPFNVDAIIANPPAYGNHISIVRGKTSYLFHIHQSRLILLRPEGGSAFARMAKAQFRTYTCGRSTKSTNSYILYHAMDAY

SEQ ID NO: 61062 - protein, 246 aa, Zea Mays
MCPNTSCGNVNFAFRGVCNRCGAARPAGAGGTGGGGGGRGRGRGNSDARGSSRAGAGAATGGGPPGLFGPNDWPCPMGGRGGGYKELDEEELEEVKKRRKEAEEDDGEIYDEFGNLKKKFRSKALHTGSAQTLPGSGRAGWEVEHRGSSEREGRERSRDRGRDDYDEKETRSIDRGDHGRDQRRSQDREREKGRERRDHEYERSRERDRRHRWYENFAWTRLALQPSDFLCCHIQARAATKQALRK

SEQ ID NO: 61063 - protein, 510 aa, Zea Mays
MMLIPQNTSKLLMGGLPVITNFFTKVAISSNLEQKNSQKFEDSDQQSHGKGMKNFNLNETLSDCQEDGLVEQDGRCAASFQHGKDGGSVFGISWLKNKAVSADPTALEKAGKIFGHSFGTTMELKNAKDQNEPAVTIRNLSDSASTSLGCGIKKDGPSEDIATGTLLVCNKAQEDATCLPLSCQKHVPKDGQDADGVIKISGASIRNFIDLNDAVPNDDNSEESVVSHECQAEPSRNNHPKRAFVIDLEVPACEEDAAWDFDQECAQPKPDAHQEVDGRSDTSALAAAENIVALSRIIPTALEASDDMLQWFADLAVLNIKDLAEQAELQACTNDSSNDESDSFESLTLKLEETKIDEYWSRPLEPEITTDEQLISTAHLLTKPRRGQQRRRRQKRDFQKDILPGLSSLSRPEIIEDVQLLEGLVQASGGSWESSLTRRGRYGGRTRGRKPRKTVVTVIVEEEVEVSPPPKPVGTGDLEADGRGMVGWGRTTRRCRRARCPSGNNLAAAS

SEQ ID NO: 61064 - protein, 219 aa, Zea Mays
MSEDELVVLGGKIDDSVDNVNIDESEDNRSKQGVKRRRKRVKMKATTETERSKKAKSKVWDAFTKVTVPDTTEKGKMISKAKCNYCKKLYSYIQGSTTSHLSRHMRICAVYLKHVAKQQDQSLLNFAPSTADVRSELEKLYGDFEVQHRERKESQSKSNASSSLSVERSCSLPSASCQFPSFLSSTQSNPSKSELLIYLEETNEEDDEDNVVNIMFPKA

SEQ ID NO: 61065 - protein, 640 aa, Zea Mays
MAVSSAPEKKRKWLLSYRKLTSKCQEGVKPFGSLKLAVIDKYLREARRILAAAPEGGGGGDAAAALGLVDAALELSPRMEAALELRARALLALRRYREVAEMLRDYIPSCGKSCSGEDTSSSSSASLLSTGSGDLGTISRAKLLSPDRHRSDDAEPDARPVRFFRCFDVSELKRRVLAGLSKNPNTDTQWRYLVLGQACFHLGLIEDAMVLLQTGRRLASAAFRRESVCWSDDSFSSSSATAAAAPSVPSGKTSKSSSAFFIIPATESEAVSQLLAHVKLLLRRRAAAMAALDAGLPAEAVRHFTKILEARRGVLPHPFAAACLVGRAAAFQAGGRPADAIADCNRSLALDPAYIPALRARADLLQSVGAVADCLRDLDHLKLLYDAALRDGKLPGPRWRPQGGVRYCEIAGAHRKLTARIQGLRGRVAAGEACNIDYYLLLGVRHGCPRSELERAHLLLSLKLKPDRAVVFGERLELVDEHRDLEAVRDQARMSALLLYRMLQKGYSFVMSAVLDEEAAERQRAKDAAAAAAALAAKQEAATQEPPQPVPGKSKNTESGSGRPRSPPGRAQTAKPKPKSKAKAKSATAATMPKAPAAVNSTAPVYQGVFCRDMAVVGTLLSRGGAFDRALPVKCEAMSC

SEQ ID NO: 61066 - protein, 77 aa, Zea Mays
MEGHVGCVNAIAWNSSGSLLVSGSDDTRINIWNYNNRELVHDIDTGHSANIFCTKFVPETCDEVVVSGAGDAEWQKA

SEQ ID NO: 61067 - protein, 134 aa, Zea Mays
MPCSIFSTWPLGSLLRCVAGTWTCLHVFVLSFLYNDEPNWVCSTVPRVVLNAAVLCHLEAVILSVKKNWYLEPFCVGWRCRPVHACVLLPFTSHRVGRNITFCLLSNWYETIMIVGDLVAADEANLNGSFTRDL

SEQ ID NO: 61068 - protein, 710 aa, Zea Mays
MLQQMTDGVRAMLGSIGDGAINISAYDTAWVALVKSLEGGNGPQFPSSLRWIVENQLPDGSWGDEEFFLVYDRMINTLACVIALESWEIHADMCEKGLSFIRENLWRLEHSGSDDWMVVSFEITFPQLLEMARDLGLDVPCDEPSLRAIYARRDAKLARIPKELLHASPTTLLLSIEGMPGLDWERLLKLQCSDGSFMSSPAPTAYALMQTGDTKCLEFLNGIVSKFSGGVPFTYPVDLFEHLWVVDRIERLGIGRHFTGEIKECLEYVHRYWGDEGLPATRDGPVSDVDDTAMGFRLLRLHGYDVSPSVFKHFEQDGAFYCYPGQSNKSVTAMYNLYRASQVAFPGEDELRRAEAYSREFLCRRRASGELKDKWVIPKDLPGEVAYALDVPWKASLPRIETRMYLEQYGGADDVWIGKVLYRMSLVNNELLLRTAQADFRSFQRQCKLEWHGLRKWASRRNLQAYGVTSNSTLRSYFLAAASIFEPDRATERLGWARTAVLAEAVSSCLRDGRCSRADGMLRELTSGIHLRNDDNPAASLVHALHELIGLLAFDNASYNSLLDAWKQWLAMWTAQGHEGSVALLLVRTVEICSGRRRSASATDDGQAHSLSEYSQLEQLTSSVCSKLAAAGTGDGDDLSPASVEDAADRHRVDLEMQTLARCVLRSRSSIDAVTRQTFLHVARSFYYVAHCSARTVDAHISKVLFEDVV

SEQ ID NO: 61069 - protein, 328 aa, Zea Mays
MYRSLVAYVLPMTPCLLYGLYYGGFLIQFLIEKMGMMGSLPKPYGYFVPDVIVGAVVGLVVGWCFGPLSPVASRWLSKTSIIHGFLQITVVALAISSQLFPYSTGAPKRVVLQHTFVTDANNIVDSSYGFSVVDSNSLEFLFNNAPEAAKWLKDNSELSFEEKYRSDRSSWLALYPVPFLFSGSLKFQAQTEEIKKYYQHFPQLAVQEIWDNNGQRRVHLKLALGSLSEIWTSVLNITGPLSNWSFADNMLPAPQTVSGGPPSYICRLSGKSDVDWSFWLEANSSESLRVDVAVLDQYLVDSTKKLKSLFPSWADLTAFTTFFSTYHL

SEQ ID NO: 61070 - protein, 657 aa, Zea Mays
MSTSASPHTSILHLPHRPFVFRRPRLSRLRCFASLAPASSGASPANDDHLIQMLCAHGRLAQATALLQGLPAPTQRTYESLLLAAARARDTALAAAVHRRLEADPVFRSDPFLSTRLIEAYAALSALPAARQVFDEAPVKNIFVWNAMLKALALADHGEEALTCLADMGRLGVPVDSYSYAHGLKACIAASASHLPASARVREMHAHAIRRGYGLHTHVATTLIDCYAKLGIVSYAERVFTSMPDRNLVSWSAMIGCYAKNERPGDAIQIFQEMMASDADLVPNSITIVSVLHACAGVNALGQGKVLHAYILRRGFDLLVSVLNALMAMYMKCGCLETGRYIFNWIGRRRNVVSWNSLISGYGMHGFGRESLQVFEEMIEEGISPNIITFVSVLGACSHVGLVEQGKKLFESMVEYNVTPRAEHYACMVDLLGRAGRLDEAVELIQSMRIQPSPQVWGSLLGACRIHGHVEYAEMACSHLFDLEPRNAGNYVLLADIYARAKLQNQVDVLKELLEEHALEKVPGCSWIEVKKKLYSFVSVDNKNPQVEELQALIGEFVTQMKNEGYVPDTRSVLYDIEEEEKERILLGHSEKLAVAFGLIKTGSGEAIRITKNLRLCEDCHSVTKFISKFTDREIVVRDVNRFHHFRNGVCSCRDYW

SEQ ID NO: 61071 - protein, 76 aa, Zea Mays
MGQQSLIYAFVARGTVVLAEYTEFTGNFTTIASQCLMKLPASNNKFTYNCDGHTFNYLVEDGFNLPELAVTRLGRF

SEQ ID NO: 61072 - protein, 138 aa, Zea Mays
MEPRIGNKFRLGRKIGSGSFGEIYLGTNIQTNEEVAIKLENVKTKHPQLLYESKIYRILQGGTGIPNVRWFGVEGDYNVLVMDLLGPSLEDLFNFCSRKLSLKTVLMLADQMAHKSSSIIIYNVLYFCGGSHIEPSPS

SEQ ID NO: 61073 - protein, 213 aa, Zea Mays
MTRHVSSRCFKCYSMLNNRQKVEWNNRGFSTLHALVAAAVSFYLVMISDLFNEDAHNSIIIDRKSWLSDCMFGVSIGYFLTDLTMIMLYFPSLGGNEYLLHHGLSMYAIGLALLSGKAHMYILMVLFTEITTPFVNLRWYLDVAGQKTCNLYLYNGVALFVGWLVWVFEFSTPRGEIHLQLRVLQLGGSAVGGCGDERILVLEDTQGDGENPF

SEQ ID NO: 61074 - protein, 262 aa, Zea Mays
MYRQADTGAIVSLLGRIAVENSLSDKLDSVRQQLQLKLVRSLKEYRNLYVVQHRIGGRLIFPESLKFLPLYILAICKTLALRGGYADVSLDERCAAGFSMMILPVKRLLNFIYPSLYRVDEVLTMEPNKIDGWLKRLPLTFQCLDTGGLYLLDDGFTFLVWLGRMLPPELVNNILGVSLANFPDLSKILLRECDNELSRNFMKILRYLREKDPSYHQLSLVVRQGEQPRESYLLLSNLVEDQMAGTSSYVDWIQQIHRQTQS

SEQ ID NO: 61075 - protein, 263 aa, Zea Mays
MASAEARRLAVVPQLDIEQILKEAQHRWLRPAEICEILKNYRNFRIAPEPPNRPPSGSLFLFDRKVLRYFRKDGHNWRKKNDQKTVKEAHERLKSGSIDVLHCYYAHGEENINFQRRTYWMLEEDYMHIVLVHYLETKGGKSSRARGNNMIQEAAVDSPLSQLPSQTMEGESSLSGQASEYEEAESDIYSGGAGHDSFTWVQQHENGTGPMIASSVFSSYTPALSIGNYHGLHATQNTSFYPVNQLNSPVILNGSSAMLGTNG

SEQ ID NO: 61076 - protein, 448 aa, Zea Mays
MVKLPALRMKRMFHGDDCANEFKIRTMKSMKVSHFHVSELEQSAMSNLSDKTPQDASPCSAEPDPTIQLADQDIRVTEASGLHDLIGGKSMLEDLTSEVIDSPNSEGDSSANYDDNKSVLHAVNYVGKEFADDGVDSSFQNFCFSDHEANWGLNECCRLMDIYSPDDDFSYLLDSPPDLLPSYTGFCDEFVSIDALMNMSSRCGIFPLIESATEASVDNKPCSSEVDLCFNNSEVLEWLNPNLLEGDLPDLVDFAELNSNATPAKKEQWTRNVTLVLDLDETLVHSTMKHCDDADFTFSMFYDMKEHVVYVKKRPHVHMFLQRMVEMFEVVIFTASQSVYADQLLDMLDPEKKLFSKRFFRESCLITDSGYRKDLTVVGVDLAKVAIIDNTPQVFELQVNNGIPIESWYSNPLDEALPQLIPFLETLAVADDVRPIIAKKFGNIIDNR

SEQ ID NO: 61077 - protein, 211 aa, Zea Mays
MTPRPHQPAGHLLRGRETLTGARIPLYSMAEQDGDAGQMPPDSVPVVGVGDQNTNQHQPFFSMCQPLRTVSYSNSWDGTCVAAANENDHTGISGTLDREDDSCSRHSINKEVSLVQGVMKMEQSMVQSIQFVSFYLQNHLRNFMYIYLFRSLLQQQQQQQQQQQQSLLSQARWGRLEMKPRMKTSELNPQRKKGETKAKENRKRRNGGTHK

SEQ ID NO: 61078 - protein, 388 aa, Zea Mays
MWSLDPRTWEWNKVKKAGMPPGPRAGFSMCVHKKRAVLFGGVVDMEVEGDVIMSMFMNELYGFQLDNHRWYPLELRKDKPAKIKARNIKRKESTNDVEANIIDDEGDEVMVDVEEAIEGQPEVNGVSNQLIKTLNITKDGSSRSIDVLSDSTAQESFLEAVKPSGRINACLAVGKDMLYLYGGMMEVKDREITLDDLYSLNLSKLDEWKCIISASESEWLEISEEEDDDDDDETDDDENEEGDASQTDEDEEESDEDAAKNVSSAVSLLKGESKTMRRKEKRARIEQIRVILGLSDSQRTPVPGESLRDFYKRTNMYWQMAAYEHTQHTGKELRKDGFDLAETRFKELKPILDELAVLEAEQKAEEEASASTSSKRDTKKPKQKSARR

SEQ ID NO: 61079 - protein, 912 aa, Zea Mays
MAMAAAVLEEALRWGGGSVGDDNVAARRAEEAAIRRHEAASWLRKTVGIVCAKDLPEEPSEEEFQLGLRNGIVLCNALNKVQPGAIPKIVGVQSDTAVPADGSALCAYQYFENLRNFVVVIQDFGLPTFEVSDLEKGGKSVRIVDCVLALKSFSEKEATLNGFRGEQNLSLDCSPESYEITSDNLSTIIRTILLDKKPEEIPLIVESLLNKVIQEYELRFANQNLMDEEKQNNLTTKEEASFAVNGSNAAQKFHLKAEINFDLQHKQIKGLRGTVSSIKSGMEQLKLHYSEEFTKLGKHLYTISNAASGYHKVLEENRKLYNQIQDLKGNIRVYCRVRPFLPGQISSLSSVAGMEERTITIMTPTKYGKDGNKSFTFNKVFGPAATQDEVFSDMQPLIRSVLDGFNVCIFAYGQTGSGKTYTMSGPKVLTEESLGVNYKALNDLFNLQAQRKGTIDYDISVQMIEIYNEQVRDLLQDSGNRRLEIKNTSQKGLAVPDASIVPVTSTSDVVELMNQGQKNRAVGSTAINDRSSRSHSCLTVHVQGRDLTSGTVLRGCMHLVDLAGSERVDKSEVVGDRLKEAQYINKSLSALGDVIASLSQKNTHVPYRNSKLTQLLQDSLGGQAKTLMFVHISPELDAAGETISTLKFAERVASVELGAAKQNKEGSEIRELKEQIASLKAALAKKEGEPENILSTRSSPSIYRIRKGNATPATPKDRQPMEEVGSLEVQNVFTPAQKRSKMHLLGILTENNSSNSVQNCNVPQKEIGLGGWVDKMALGDNHFENSNSILELEPDTAQLPTSFYHQRYSPVQQSCRTESVPSLGLHGFDSATSCSNQEIVVSTMGLKASGVANRGASTVKKYEATSTRSTNLASKSPLLQKKLQTPTRNRNQLTSSTIGGRRTPNGKIGIAK

SEQ ID NO: 61080 - protein, 162 aa, Zea Mays
MSSPSKRREMDLMKLMMSDYKVDMVNDGMQEFFVEFRGPNESIYQGGIWRVRVELPDAYPYKSPSIGFINKIYHPNVDEMSGSVCLDVINQTWSPMFDLVNVFEVFLPQLLLYPNPSDPLNGDAAALMMRDRPAYEQKSTVKNTPNQRMLVSAQKTSPVTKS

SEQ ID NO: 61081 - protein, 126 aa, Zea Mays
MVLSMDLSPFHQQARTVPDNQVVQNRGFQYNNFGSYEQASSRNLRTPPMYPVSNNQPQVPPIRPSEKRQRVPSAYNRFIKEEIQRIKTSNPEISHREAFSAAAKNWAHLPRLHFGLSVADGGGGSN

SEQ ID NO: 61082 - protein, 188 aa, Zea Mays
MLDEIVDYVKFLQLQVKVLSMSRLGGAAAVAPLVADMSSEGRGGVAVAAGSDDGLAVTEQQVAKLMEEDMGTAMQYLQGKGLCLMPVSLASAISSATCHMRPPVGGPGLGVAAAAAHHMAAMRLPPHAMNGGAGAGADAVPASPSMSVLTAQSAMAPNGAGGGTDGEGSHSQQQQRHHPKDAASVSKP

SEQ ID NO: 61083 - protein, 323 aa, Zea Mays
MARALLLLRVAVARYPPLPASPALLQPQPLLRCHAPSQYKSQLRFLSSLSSSVPNSSDAPSDGGGDRDGEEDGAKSGSHVDYLGMSDEELMEQCDMGTFKASGPGGQHCNKRESAVRLKHLPIGIIAQAVEDRSQHKNRASALSRLRTLIALKVRRPINLEDYTPPVELLQILPLKSSVRGNDVGPQIGPNNSKFSPGMQALLDLLFAVEDSVSDAAKILGLSTGALSRLILSDDSLRTAANELRASKCFFDCRAPVLYYVLLTLQDSVHKVFYAVVEAAAVRADNSHLGGLARYPVSATLPQIGSRLFLTWGVFWSFPEVID

SEQ ID NO: 61084 - protein, 94 aa, Zea Mays
MTRILKVVRRSSHEAAHFYGWPGIGRSSLYGRHGRMAYPRAVHPGGSFRGRAPMKAGARSLQWKREPSGTDSSAGAKNDMSVPFSCEQVLPPAT

SEQ ID NO: 61085 - protein, 140 aa, Zea Mays
MLKPQTSWTASLPLLLIRRCSRTAASPSPAGDRPLSFVPVCKRRMSTLAHPRFAPLPTEQTESQTDGGAARYQFRLVSYNILAQVCLFFFLSFLARNLLFCHSLPVLALCYYAISVGGTIRVDHWRPTVPNSLLCAAGLC

SEQ ID NO: 61086 - protein, 571 aa, Zea Mays
MEQDPERACLRSFELHESESSLYVLGTNSDRTLWRLLKIDRSEPSELVIDECSTVYTESEHPDLLKGLDDEHRSTGGVKFVTKFYGIIGFIKFLGPYYMLIITEQKKIGEIFGHPVYQVTRTSMVELANSKTRSTFQNFKDENRYRKILNALDLRKDFFFSYSYHIMRSLQKNLADPQDGWTLYETIFVWNEYLTRRIRNCLRNTLWTVALVHGFFKQDKFSISGKDIMFTLIARRSRHYAGTRYLKRGVNEKGRVANDVETEQIVYEAVPGPTEVSSVVQNRGSIPLFWSQETSKLNLKPDIILHEMQNNYEATELHFENLRARYGNPIIILNLIKTRERRESILRREFDKAIKIINKSLSEENHLRFLHWDLHQNSQGKPTNVLDVLLKVAFRALNLTEFFYCQVAPNSETSAQCPTLLNGLDQYLCDDNNSDDTECTEIVGDVSQEDISGSSDSSGNATTEDKFENSGLPPPKPPKFQKGVLRTNCIDCLDRTNVAQYAHGLAALGHQLHALGFIESPELGLEAPLAHHLMHFYEMMGDTLAVQYSGSAAHNKANNLHQFKDQAKTNG

SEQ ID NO: 61087 - protein, 446 aa, Zea Mays
MERKRNPIVFLDVSVGDEPDERMIFELFADVAPLVTENFRALCTGELGIGHKTKKPLCYKGSSFHRVIEGFMAQGGDIAKGNGSGGENIYSGKSADETCVLPHDDRGLLTTADTGSKASGSQFCITFKPNSHLDRKHTVFGKLVVGSDVLKRIEQVDVQSPDSTPVVPVTIVNCGELTDRKDIGSMRIGIDKKRAAKSKLSKGISSDEESNEGQHKGRRNKSSKRRRKKRYFYSESDSSSESETESSDSESDSDTYSSDSSDVSSSSDDRRRRRKRHSKKNKRKRSRRKHDQRRERRRRKRDRKSKQKSKSRIKGDSEAESSSDSSSEDARSKRHRHGRKSKASSQVFEENIAAVSALKDATSPQQKSGIPNSPAQDVSPLQNGENYTNGVNESKIERNAAVMPVLTGNQSKSRFPILLHTSFFVLTASGSGVSSDIDKQEPEHEC

SEQ ID NO: 61088 - protein, 140 aa, Zea Mays
MAMQVVRNLDLERYAGRWYEIACFPSRFQPKTGTNTRATYTLNPDGTVKVVNETWADGRRGHIEGTAWRADPASDEAKLKILCRQPHMDESVYKELVERAKEEGYDVSKLRKTAHPDPPPESEQSPRDGGMWWVKSIFGK

SEQ ID NO: 61089 - protein, 68 aa, Zea Mays
MLVKRLIGLPGEKIQLPGSLNPTKIPEGHCWVEGDNSTRSWDSRAFGPILVFFSNHQFKCVHAVQLVN

SEQ ID NO: 61090 - protein, 91 aa, Zea Mays
MPDRLLSGSPPPSSLPRRSPQASREQQQQQLASTRHEDGHGDLHQARGFPHVPQTGDHLMRHMQGIYHLQILCKHLVLVWMILLVLPLEGP

SEQ ID NO: 61091 - protein, 304 aa, Zea Mays
MKDRHLALNQTQRVRLEAALQELQSVAPAAAVTVADTIPVNQEDNILKGHGTSDQDGEVVATLCGVVERVNKLVYVRTLRASCRFSMEMNGVLQAADAKYWVYKGEGAANLILSYTGSSPTMLGKVLRVKKLLNDKSQLPPSCMVFSSHEQLLWGHIPELVESVKQDCLAQAYAVHVMSQHLGANHVDGGVHVRVSRDFLELVEKNVLSSRPPWRVNASSIDITADAALLIADHSLFSGTPKGSSCIAVEIKAKCGFVPSSEYISKDNSIKKQVTRYKMHQHLKFHQGEVDFQYILEHISDIED

SEQ ID NO: 61092 - protein, 125 aa, Zea Mays
MFKLWKSAVDSSLALLLDDAEANNLTPDSLLTLVEEFSVTSQAVEHSFPALLVTNGDASTDSLSAEYMNDEPETSVAGNEEGQLEQSPDLRDDEHFDVDMFERLESSVPLGSLPIDSMIERLNSE

SEQ ID NO: 61093 - protein, 99 aa, Zea Mays
MPKTIYDHERNVGLGDLNYRINLPYEKTHELISKQDWNELFGKDQVIRNHPSVFEIYQRKLLEPGKISKKYIDKLNKKVSTVLNEYFENSKDYVPNKRD

SEQ ID NO: 61094 - protein, 184 aa, Zea Mays
MSSQVDRRSQSAGKRARTDGSRREDDWVCPSCKNVNFAFRTTCNMRSCNQSRPADHTAMQTPPHYPTSGGYMGPGTPPSMYLGGGAPPYGSSMFNGPAVTRYGIPQFPGGSAYSYGYGGPIPMGSPYGPMQIAGPTPYSGGTMMTAGGMYGIPMDRYGPIPAGPGPMVCALVIILLYTYYLMLI

SEQ ID NO: 61095 - protein, 961 aa, Zea Mays
MDSRPRETDAPGDPANGAAPPLAAAVTAATGDVEIIRPRNDKRGYRRVVLPNSLECLLISDPDTDKAAASMNVSVGYFCDPDGLEGLAHFLEHMLFYASEKYPEEDSYSKYIAEHGGSTNAFTSSEHTNFYFDVNSDSLHDALDRFAQFFIKPLMSPDATLREIKAVDSENQKNLLSDPWRMSQLQKHLCAENHPYHKFSTGNWNTLEVKAKEKGLDTRLELIKFYDSHYSANLMQLVVYGKDSLDNLQNLVENKFCDIRDVGRKPFSFPGHPCTPEHLQVLVKAVPIKQGHTLRILFPITPNIRCYKEGPCKYISHLIGHEGEGSLFYVLKKLGWAMSLEAGEGDWSHDFSFFCVVIQLTDVGQEHMEDTLGLLFRYIKLLQNSGTPKWIFDELQAICETGFHYRDKSPPINYVVNISSNMQIFPPKDWLIASSVPSKFSPDAIQNVLNELTPETVRIFWESKKFEGKTKLAEPWYGTSYSVEVVPPSIIQKWVGKAPEEDLHLPKRNIFIPSDLSLRSVEEKVSFPAMLRKTQFSRLWYKPDTMFFTPKAYIKMDFHCPLSQSSPESAVLTDVFTRLLMDYLNDYAYDAQVAGLYYVVKPNDTGFQVTMVGFNDKMRTLLETVIGKIAEFEVKADRFSVIKEAMTKEYENFKFRQPYQQVLYYCSLILEDQTWPWDEEFSALSHLEASDLGIFLPHLLSKTFIECYFAGNIEPNEANNIVQHVEDVLFNAPISACKPLSPSQHLAKRIVKLEKGLRYYYPAMCSNHQDENSALLHYIQTHQDNVKQNVLLQLLALVGKQPAFHQLRSVEQLGYIALLRQRNDSGVRGLQFIIQSTVKDPANLDARVENFLNMFESNVYNMSDAEFKSNVSALIDMKLEKYKNIREESAFFYGEISEGTLKFDRKEAEVAALRELKKEELVGFFNDHVKVNAPQKKILSIQVRSRPLYGSFRGGVGQMKL

SEQ ID NO: 61096 - protein, 641 aa, Zea Mays
MVLSTKILNLEKKWNEYCVRLHQGCNRINRDPCQLFPHHIGVRVDRERCANPNQSAQTIALQRDIIKPCALSSPYTNITAKSISAPDQINADLVLNLQVRQSRSNEPLQSGVVPFQHINSSNYNKPEESSAAPVTTDLVLATPRGSSFKDSSSALCKRVEDIEETIQLMPNKVDDLNLKPPHLSIQPYTCSKSSSSNWEQTSPSALHSTSLGGTSAFGQWQRPSPLATQSFDLSNYKLLMEHLFKVVGRQEEALSAICASIVRCRSMERRRGANKKNDIWFSFYGPDSIAKRRVGVALAELMHGSSGNLIYLDLSLNDWGNPSFRGKRATDCIFEELRKKRRSVIFLDNIDKADCLVQESLIHAMETGRYKDLHGGRVTDLNDSIVVLSTRMIQGCQDASLGVEEGNAFSEEKAVAARGHQLKIIVEPGTTNIGGGNVVVSSRHSLGSSEASSYSSKRKLHISDGQEKTEESASTSKRLHRTSSIPFDLNLPGDDEEAHDDGDDDKSSGSHENYLEGSVGNLLRWVDGSINFKPFDFGKLCEDILQEFSNTTSKILGTRGCRLEIDAGAMEQVVAAAWASDSHENEKRPVRTWVEQVFGRSLEQVKMRCENLSSCTLRLVSCEVKEDGFGALLPSRIILDW

SEQ ID NO: 61097 - protein, 91 aa, Zea Mays
MVARSGGRGGRRAGWPRRVPPRRRQWRPPPRHGRVAPLSWNGTSTRLPSCRAATASPSSSVRTQSWWRMINDGEKKRQRWLCVVTAARVCS

SEQ ID NO: 61098 - protein, 805 aa, Zea Mays
MDRATPRVCGRRGVSQAAVEAAPSSSRARRRDKAPAVVMDLGDDDCGGGGARKTVGGAAGRCEGSTKAPLPLLPPMMVPAGAVALRTRSRRRAMLAAAVVEEAPTKKKKKEGAIPDAAEAPRGHGSKAAATSMATSSHKRRAGTSRSTSRDKRRARSGRASEPARVGRARKRKRNELEAPARRERVKAPCVSESDDNSGRGDDASHDGDAEPRVGVAIGTDLVNGDHPAAKEVVEGAGDEDTGDGGNSGLASTADVFAEEMAPFEDDYDDEMLEEQLVGDVIRAYSNGRNFDSDGVDWEAEDEMEFNDDADNSDFMDDADDSDFMDDAYEGGNSKPIQNHAKLEIQDWVNQKVVLSGGRCEARGEGDLEEELDVGKEADEEDVEPKSEAAPGSDKRVLQLEILGSDEEIKVLENMSSAPSRKASVQSKLPTIPSCVAWRTRSSWGVNQDRLSYDTYFEELSDEPKEDDDDTEVELDEVEDDNNDDDSSDAYDKDDEEKEEEEEEAERRKLNNRICTSDEDMINITVPTSRYDMFKKKNSSRYDIEWVEDEDASVDMLQPVSFKKDSSWKPVAVGNDTFTEQQKRSRFTWELERRKKLKLEMKTNPLHERDLDSDPNSSGSDQIRKYGFKSDGSHKVDRKKKHTSPKSGKKPSSAIILKRQSLLKLLVDKMSGDKSLASFPFDQNPQLQFIFKEMHPLVFSFGDEDLVAADRPEQDVGLDMLWADFDFALESENIGTYYDDECQEGNQLDFSLAPVTPCSRGKHEFVIDDQIGIRCKYCSLVNLEIKFMFPSLCLPRNQHGQMTKA

SEQ ID NO: 61099 - protein, 253 aa, Zea Mays
MACIRHCLHKGRRSVVEDHLIVSHGRLACSSLAQYVASGFSRLCDHQNIMGSKVGLLRNARRWCMHDEAVVHYIDMIDQTTLGHRMIKKQFNKTPRAGWQIDPFGHSAVQAYLLGAEDDILMFDYNVEERVNDFVVVAIEQDGQVHALYSTPSIYTDAKHLSNVSWPVKYDEYFPYADSKNSYWTGYYTSRPTFKRYVRVLSGYYLAARQIEFLVGRRSSLGLFTTSLEDPMAIAQHHDAVSGTTNNTRQMTT

SEQ ID NO: 61100 - protein, 294 aa, Zea Mays
MVSDLREYARSVVETKAREEAGNVLMRMKERFFTVLSHDKDSMPRSWMRDEDIRTITREARLGALRLMSVMAAIRLDDNPDKIERALTTALLDGGPLSHKRSIEFASDPLASSTWEEVSPKDTLITPVQCKSIWRQFKAETEYSVAQAMSMQEAQRRSKNWLPPAWTILLLAILGYNEFMFLLRNPLYLLGLFVAFVLSYAIWMQYDITAYFRHGTLSALLTILSRLLPTIIDIMMQIINMKHKHKSPHPSRHPQHIHAQSFMNQTWGRAQVRYQSPDSPSSSSSVGSNSGDDS

SEQ ID NO: 61101 - protein, 750 aa, Zea Mays
MQGFPGGAPDPQQLQATMLAIEQACSLIQLHMNPSEAEKVITSLHSSLMPYQVCRFILETSQKPNARFQAAGAIGDAAVREWGVLTDDNKRSLIIYCLNYVMEHASSPDGYVQSKVSAVAARLLKRGWVEFSDQEKAAIFFEVEQSIRGIHGPNRQFAAINFLETLVSEFSPSTASAMSLPKEFHEQCEYSLEVQFLKDFYCWAQAAVFNTADKILNSTVTIPDERACSAALRLMFQILSWNFKHTVEHESSDAKINFGLRIDTINLKKFERSLVKPGSMWREILISSGHPTWVLNFYTTLRQKYSYDTLWGDSPIAVSCRQLIVQLCSLAGSVFPNDNGDAQIKHLMLILSAVVLWIEPPDVITASIRNGGSESEFIDGCHALLSIASLTTGSLFDNLLKSIRPYGTVNLLSALTSEAVKSVLNNQSEEETWGIDSLDILLETWNVLLGDVDADKNPISTDGALASSSLFKMIVESHLKGINLFIFPFKCNLSLEECYRWCKRFSMLFTFCILITLIFFDIAAADSAFEDTDDTEYFHVSVSKRDEQLALYALIARASANTTIPFLAQLFSERFARLNQRNGESDPTQTLEELYWLLLVTSHVLTDSGEGETLLIPEALQAGFPNVIEAAHHPVVTLSWSIINFSRQCLDPGIRAKYFSPRLMEAVIWFLARWVATYLVPLDVSRGKVSREIDNVGTNGSQHSRKLLNSFAWENNQGELVLDFVVLISMLALTTYQGENELQVSFIFTF

SEQ ID NO: 61102 - protein, 304 aa, Zea Mays
MPLLFPATPPLPLCRAARVSRRATASVASAARSSSSSSASFDAAAFEAERLRLDAAARAGMESTAAAAEAGPRAWKWAIRKRVWDALEAEGIARDPRPVHHRIPNFDGAPAAADALGRLDIFQKSHCVKVNPDTPQKQVRFLTLSAKYGRPIGLDESLKVDLIVIGSVAVDPSSGARLGKGEGFAELEYGMLRYMGAIDDSTMIVTTVHDKQLVDDIPVEKLLVHDVPVDIICTPTQVIFTKTTIPKPQGIYWEKLSPEKLGQIRILRELKQRIEQETGTMLPCGPSEKLPPTAQRKQRWQRRR

SEQ ID NO: 61103 - protein, 335 aa, Zea Mays
MGVLESHSLRTTDGSFSESLYGLRRRPVKVAVKRKSPGTESNDKVYGSALRKRQKILSVVFLVVLPYFKSKLQSIYNKEREARLQATLWGQDDVRFDEVDFVLDQEQTSQAQTEPTTGEMSNLTRFKKNFASLIGVCYPWIHATNEGLSFAYQLLYLLDATAFYSPALHVLGIHVCRATGQELMDSSSRISRIRSRELERLRGPPWFKAVQRVFLSCVYTTLDYAQTGLIAAVFFFKMMEWWYQSAEERMSAPTVYPPPPPPPTPKVAKDGIPLPPDRTLCPLCCQKRANPSVLSVSGFVFCYSCIFKSVSQHKRCPVTLMPAGVEQIRRLFHDL

SEQ ID NO: 61104 - protein, 279 aa, Zea Mays
MITHHPSLIRPSVLTLRADVLRRRPTLHAVASAPPPRLWSLRATTGGTSPVSGDGGKRAVPLPTRGPALLGFVRSNFLPLALIGGIILGLLDPTLGCLAHKYSLSKYSTFGIFVISGLTLRTRELGAALEAWPAGLYGLGSILLFTPFLAQFIMQVQFFPPEFITGLAMFCCMPTTLSSGVTLTQLVGGNSALALAMTVASNLLGIIIVPLSLAKYISNGVGVSLPTEQLFKSLVTSLLIPLIIGKVCGYSYLCTPCHTLLFHFNTIILHPLCSDLLSV

SEQ ID NO: 61105 - protein, 454 aa, Zea Mays
MASKVRFTVGSQVWVEDAEVAWIDGLVEEVQGDELIINCTSGKKVTANVSSVYPKDAEAKRCGVEDMTRLAYLNEPGVLQNLKSRYGMNEIYTYTGNILIAVNPFQRLPHLYNNHMMGIYKGAEFGELSPHPFAIADHAYRLMMNCGKSQAILVSGESGAGKTESTKSLMQYLAFMGGKAQSGGRSVQQQVLESNPVLEAFGNAKTVRNNNSSRFGKFVEIQFDKNGKISGAAIRTYLLERSRVCQISDPERNYHCFYMLCNAPAEDRERYKLGDAASFHYLNQSSCIKLDAMDDASEYIITRRAMDIVGISSDEQDAIFRVVAAILHLGNVEFSEGSEADSSVPKDDKSQFHLRTAAELFMCDEKALEESLCKRVMVTRGESIVKNLDARAAALSRDALARIVYSRLFDWLVTKINTSIGQDLSSKLLIGVLDIYGFESFKTNRSKRVSENPV

SEQ ID NO: 61106 - protein, 273 aa, Zea Mays
MVSASAPPPQAQSDAAGSGEEVSKKVRKPYTITKSRESWTEQEHDKFLEALQLFDRDWKKIEAFVGSKTVIQIRSHAQKYLLKVQKNGTSEHVPPPRPKRKAAHPYPQKASKNDSSSIHRNSGMNVPVSSWAHSSIPQAVASSMVKDLGAGTPGSNNFCSSSTEGLPRTWQPGETNDPINQIPSLRLMPDFAGVYSFLGSVFDPSTSGHLQKLKEMNPIDVETALLLMRNLSINLTSPDFEDQRKLLSLYSASDGPGLGSSRSSALATSAPFM

SEQ ID NO: 61107 - protein, 82 aa, Zea Mays
MRYILENVHAKSGNISRSHATMPYAKSGNRPIDHSCDAPAAIPTEVPTPVFSSAEVGLLMSTPRKIRRAVNKLTPKKKMHGM

SEQ ID NO: 61108 - protein, 77 aa, Zea Mays
MTKEDLIKNLGTIAKSGTSGTAFSSFQLITALIIFVYECRNRSCSSLLSKLIRLSVFHQELPGQCSLWFETFVRYIV

SEQ ID NO: 61109 - protein, 655 aa, Zea Mays
MWRLKIGERPSNPLLRSPNGFLGREVWEFDPAAGTPEERAEVDRLRQEYTRNRFTRRQCSDLLMRMQYAKQNLHNTNLPAIKIDQDSDVTEETILITLRRALNQYSSLQGPAGHWPGDYGGISFILPLMIFALHVTRSMDEVLSIEHIREICRYIYNMQNEDGGWGTHTLGPSSMFGTCVNYATLRILGEVLDGENDALSKGRSWILSHGSATAAPQWAKIYLSMIGVYDWAGNNAIIPELWMLPHFLPIHPGRFWCFCRMVYMPMAYIYGKKFVGPITTTILEIRNELYNIPYNKINWNKACNSCAKVYVGCHSWETALIVQAFCSTGLTEEFCSTLQKAHQFLKNAQVIKNIPDYKSYYRERTKGSWTLSNGENFWPIADTTAEALKAILLLSNIPSELVGDPIKQERLYDAVDCLLSFVNKDGTLSSAECKRTTSWVEFINPSESFRNIIVDYPYPECTSSLIQALVLFRGKHPIYRRDEIDKIIKSGASFIEKVQRKDGSWYGSWAVCFTYATFFAIKGLVAAGRTYRNSLAIRKACNFLLSKQLGTGGWGENYLGCQIEEYVDSGSPHGVNTAQAMLALLYAGQVEQDPAPLYRAAKELINMQMENGEFPQQEIVGNFNSSLFFNYPNYRNLFPIWALGEFRRRLVAKKG

SEQ ID NO: 61110 - protein, 231 aa, Zea Mays
MMAELHARGKTPEDIRDCLRSAPLDTHVVSAVKTAAALGCDLKVVSDANTFFIETVLAHHGVLGCFSEIVTNPASVDADGRLRISPFHDPASAPHGCSLCPDNMCKGKILGRIQATGSDKKRRRRFIYIGDGKGDYCPSLKLGEGDHVMARENYPLWHLICDNKQLLKAEVHPWNSGEELEKTLLKLAGEVISPPAQASQFDYSKCEMSNPASCPPSCAALITDQLLVRKY

SEQ ID NO: 61111 - protein, 148 aa, Zea Mays
MSCIKKQAMMEPLVDTVDANQIVTNCQLLKTMDISKMTPGDASFTVPFKLVAERNDYIHALVAYFDVSFTKCHKLMGFSTGPRSKATHWKQTVLYLEDVITICQGESLSGSMTVTPNKSNPRDIDIKLKYSINGHRCQVSRTQFYKMR

SEQ ID NO: 61112 - protein, 58 aa, Zea Mays
MAGRTNIPTNNSALIAIIADEDTVTGFLMAGVGNVDLRKKTNYLLVDNKHLRVSPQHN

SEQ ID NO: 61113 - protein, 441 aa, Zea Mays
MAEDHFSSAPSAPSAAATAAAAAAAAVGSSVIPIVNKLQDIFAQLGSSSTIDLPQVAVVGSQSSGKSSVLEALVGRDFLPRGSDICTRRPLVLQLVHQPRRPADAEADEWGEFLHLSGRRFYDFREIRREIQAETDREAGGNKGVSDRQIRLKIFSPNVLNITLVDLPGITKVPVGDQPTDIEARIRTMIMSYIKHKTCIILAVSPANADLANSDALQMARVADPDGSRTIGVITKLDIMDRGTDARNFLLGNVIPLKLGYVGVVNRSQQDINSDLSIKDALAREEKFFRTQPAYHGLAQYCGIPQLAKKLNQILVQHIKTVLPGLKSRISSQLTAVAKELAVYGDPVDSKAGQGAKLLNILAKYCEAFSSMVEGKNEDISTTELSGGARIHYIFQSIFVKSLEEVDPCEDVTDVDIRMAIQNATGPRSALFVPEADQQIA

SEQ ID NO: 61114 - protein, 192 aa, Zea Mays
MATGEKIYRERNKRERERGNRSTARPETPKIHLPGPATGKVTTKVDVYAYGVILMEMITGRKVLDDSLPDGETHLVTSFRKNMLDKEKFRKFLDPTLELSAESWNSLLEVADLARHCTAREPYQRPDMGHCVNRLSSLVDQWKPTNIVDDDDEEGGTSEMGLHQHLEIWRCDDFTISDSDSFSAHNTSRKYH

SEQ ID NO: 61115 - protein, 268 aa, Zea Mays
MELHLATIAHRPPLPVPARGHHLRRRLHHLPAPLSFQNTYSPSLSSPHHHRLSPTLRRHLRLPLLASQAPNSNPEPEPEPEPTGAKLLPLVISIAIGLAVRFLAPRPVEVSPQAWQLLSIFLSTIAGLVLGPLPVGAWAFLGLTAAVATRTLPFTAAFSAFTNEVIWLIVISFFFARGFVKTGLGDRIATYFVKWLGSSTLGLSYGLTLSEACIAPAMPSTTARAGGVFLPIIKSLSLSAESKPNHPSSRKLGSYLVMTQFQHKTCCA

SEQ ID NO: 61116 - protein, 373 aa, Zea Mays
MYSRHLHTSIGITIRAHHLTPFHPFQCLPNLRFLDPTHKATSPFFPLNNFSILTIMLGLILLHQEVNIDFEKEPIGISKDGKEVYFRDVWPSTEEIAEVVKSSVLPDMFKSTYESITKGNPMWNELPVSTSTLYPWDPSSTYIHEPPYFKDMKMSPPGPRPVKDAYCLLNFGDSITTDHISPAGNIHPDSPAAKYLKERGVERKDFNSYGSRRGNDEIMARGTFANIRLVNKFLKGEVGPKTIHVPSGEKLAVFDAAMKYKNEGHDTIILAGAEYGSGSSRDWAAKGPMLQGVKAVIAKSFERIHRSNLAGMGIIPLCYKAGEDADTLGLTGHERYTVHLPTNVSEIKPGQDVTVTTDNGKSFTCTLRFDTEV

SEQ ID NO: 61117 - protein, 631 aa, Zea Mays
MKGHQHQQQSSSPLLPMPPPSKRRCSALAAAVPALVVCSTLLPLVYLLALHRPAGYGSDDRAAVVISTDVSKKVSGSDGVSAERSTRSRFSQDHAAKSKAKLKGAFSLLGLNNDTFKGKGPRTSKRFQLKDLSWRSKDTTVNGKENHDQETVHEENTKSCEHEYGSYCLWSTEHREVMKDAIVKKLKDQLFMARAHYPSIAKLKQHEAFTRELKQNIQEHERMLSDTITDADLPPFFAKKLEKMEHTIVRAKSSEVGCSNVERKLRQLLDITEDEAYFHTRQSAFLYHLGVQTMPKTHHCLNMRLTVEYFKSGSNHVDQLNDQKLESPALHHYVMFSRNVLAASTTINSTVMNSQDSDHIVFHVFTDAQNFYAMKYWFDKNSYLESTVRVTNIEDNQKLSKDVDSLEMQQLWPTEEYRVTIRNHSEPFQRQMKTKYISIFGLSHFLLPDLLPGLNRVVVLDDDLIVQKDLSPLWNLDMGGKVIGAVQFCGVRLGQLKPYIADHNVDDDSCVWLSGLNVIELDKWRDTGITSLHDQSVQKLRKDSLKSQRLQALPAGLLAFQDLIYPLEDSWVESGLGHDYGISHVDIEKAATLHYNGVMKPWLDLGILDYKNYWRKYMTSGEKFMTECNIH

SEQ ID NO: 61118 - protein, 248 aa, Zea Mays
MKQNLDTCIYVCIIFYRYLLDYGMLHPTEKYYPLRPEFAESTFYLYQATKDPWYLEVGETIVRSLNYYTKVDGGFASIRDVSTMKLEDHQHSFFLSETCKYLFLLYDDSFLRNQNYIFTTEGHPLPIRSTWHEKFPAAYVPSNWTSVKDEIQPIRASALSSQVCPETIFGRSVGTPWESACHVPDAHASHRCRTDDDCGIEAITCKKRTCSMAGYCGLFFYNGNKSSGFSMIMRTANTSRLLQLRTAA

SEQ ID NO: 61119 - protein, 824 aa, Zea Mays
MGGIAECGVSIDTKASPRRAAIEKAQEELRQEYDVREERRRELEFLEKGGNPLDFKLGHVASLSVQSTSVTEQIAEQNVISEAKGSSAFATSSHGDSVESNDKPGNSLCREGNTADNLTLLDGDASNLGVDKIVKHGTKRTNSAQAEQFLHCDGQNNAKEEDSGLFRLGPKSQAYARRRSKPIRENAYSLSVMYPPIPPLSSQQKDVTGLIPETKTEDNGVSSIGDSKPTSPNSKNMVTNASLLNDKVEMETENVQAIPEGNQAPKNELSNSNNGSPAMEISPNSVPDNSRLTVSDQMATAFVSVESPDAISKVAASRIVCSLPYISNEILKEAQTLEKAGNNPSMVSVVDVHAYGMDNNGAAPYSAVKSASLNENEVDPIHAYAAKAVTEHPDQNENLVPVNADEMADEGLNEILPDDKDDKKDCQLEVSSGPVILNDSSTPVYPEFSNFFYAKDGTEVSNNAVDSKNNAEQHASSNQGKGNMEECKDSDGNNASESSVAQKLVSVIVLPASDTGDVSNFVENDVEKSSRDQEKVAKKEYEDSVVAKKDHEDAILRRARYIEANIKRAGEWSLCNISLEKKQKSHWDFVLEEMVWMANDFTQERLWKNTVAAQMSHWISSRGRAAFEEASIQRKQKSVARVLANGIMNFWCSVHTLRASGGIPKPMQIQQPNELEENKLGGVKTRKADEECLEQEKSRQSPIQSFALRLLEYNINASEFLPLAEAPSTPDRLNDFGILKVPDQLSEANLFYGVAPGAMQAYRESMERLLIYNNKMPAGHSGPGSPWSSFEDQALVVLVHDMGENWELVSDALNSIIQLKGFGS

SEQ ID NO: 61120 - protein, 644 aa, Zea Mays
MSVVGFDVGNDTLVAAAARQRGIDVLLNAESKRESPAAIAFSRNARLIGCHAASASSAHAPFSSVKRLLMGATGRHPDSSLLRDLSRLPFPAAVGGGAVVHADHIGRRIALSPTHLLSMLLAYLKQLAEADLGGAPVADCVISVPCYFTQAQRRAYLDAAAIAGLRPLRLMHDLAATALGYGLYRSDLGGSGGPTCVAFVDVGQCDTQVAVVSFDMSGMKVLSHGFDADLGGRDFDEVLFEHFAEEFKDRYMIDVTGNVKASMRLRAACEKAKKVLSANAEAVVNIECLIEEKDVRGVIRREDFEKLCARLLERVVEPCNRAVTDSRIGLERLHSVELVGSGSRVPAIAKVLKEFFRKEPSRTLNSSECVARGCALQCAMLSPTFRVREYEVHDAIPASIGFYTSDGPVSTLSSDALFRRGLPFPSVKIITLQKNDSFSFDAYYVDANELPPGTSTDIGSFQIGPFQAHMEASKVKVKIRLNLHGLVSVESAALIDDYQRNATSADHMEVDTSGDDMGHKSRSERSIQRQELPITEYICCAMSKQELLEAQEQEHQLAYQDKLMERTKDRKNALESYVYDTRNKLSERYRSFATDSEREQISFNLQQTEDWLYEEGDDETEVVYSSKLEELKKIQLKIVVMMTK

SEQ ID NO: 61121 - protein, 347 aa, Zea Mays
MVDVEETGNKLQSQMRLHAEPEDDAADLPLPALFDRASRLHALASSSALDQDGIRTGVDLLRRCDDMVSKLGLFSPNETKEDVSTANLKYLLVPYYLAEMTEKIAQEDRIPVLKTSQDHLKEFIALCEVLELIPEDELELSRQKQPDTMTNRRAQKVARFKRQKAAETKLQEIRERKERRGRSLRAAALSAPIEAGEEDDLENDGEEEREAWLATISLALCKAFDLLDMLKKEEEMLQAVKERKAKDGNAFAREMLDERTKKAETWHHNAANRVAYSKPADPITCATFAQDVIEGRASVSQAHEHKHQPLIFGPASIVGGGLTSERERMTAQVFQPSYSHKTATSFK

SEQ ID NO: 61122 - protein, 542 aa, Zea Mays
MTKNNSSIGKEVFLQDTAAHPTDELSRSDSRLADESIGVSHSEPDAMDPVEPAVVSTGGDTDGKATCGNVMEETKTAPHDLTNKPLLARCTRSRFVHHPSSFSYKRMLPFLMEDEIYAQESGRVKIRKVAEERQFAANKHDASANGQQCLAVSDDSSQEGNRAQFKIVEEEKPLKADVNHILDDRQLKPPVIEASPDCSATEVQNVMQQEALASSQVPLTSFDGELTSDGDNVQSIGQHQLVVSEESQEECKRDEVNRSIHDEAVQSDGGYALDSREFQPAASEVSCSENSMAGVQGAAQEEPLPLDGVQENSDMGDDVSTEQAQLCVTSESLSAQLQNNAEFAEVLPCQDLDSGCHDIGFGSPTKRVVPSLHRHCAQQPQDSVVSHDDQLLDDDIQMVGRLSDPCAADRSSSMEEMSGRILFTQSASSKAAISWPSGAHSMEKRARSPKELSPKKGILKRSTRGCKGICMCLDCCTFRLHADRAFEFSRKQMREADDIISNLLKEVDSLRSLLEKHAGQPEDRPAGCRRWPGTAASRCLRI

SEQ ID NO: 61123 - protein, 107 aa, Zea Mays
MLPGEIVLASLDGFGKICDAVEVAGKNVLSTSSTVTTGLVSHRYGDKAAAATNEGLDAAGHAIGTAWAVFKIRQALNPKSVLKPTALATSTIRANVAELRAMHGSSK

SEQ ID NO: 61124 - protein, 232 aa, Zea Mays
MAGAATPPPSSSSSASCGTDAAYLLFRGETLLPDGVHASLYAVALAYCFVGLSAVTARFFKSMEQIMRHSREVVVGVDPRTGAPVVRRDKVWNYTVADIALLAFGTSFPQISLATIDAIRNLGQLTAGGLGPGTLVGSAAFDLFPIHAVCVLMPRAGSKKKISDLGVWLVELFWSFWAYIWLYVILEVWTPRVITLWEASLTVLQYGLLLLHAYAQDKRCPFVSIPLYDPDS

SEQ ID NO: 61125 - protein, 86 aa, Zea Mays
MLIILAQKITMMFTTVGCNGEQVLSCLVWCWSNPRCLDILGRSEISRLCPIAPRHIGASRAQLLWMVCVPIPAFSGKPERIGGCYR

SEQ ID NO: 61126 - protein, 234 aa, Zea Mays
MASTSSVWSVWIALSLTLTLASASPADGQGGGGAHCPPVLCGGVEIAFPFGIVQEQATATNCGGIGFQVRCVNGTPYLGYSRYDHWLQILSVSYTNASLLVADTHKLEKLGASDGGGDSAVCRIPGNNSSTKVALPFSISPLNQDLILYNCTKAPAPAPDEEGLVEMTRCGNRTFARIGGRYGEPDDDGGYSLDGCGATVVPVLVKDDGKANASDYEQLISGGFLLTWQWQTSK

SEQ ID NO: 61127 - protein, 486 aa, Zea Mays
MLVLRRLRLRLPLPRPLLVSSFSSTSPSSSPSTSSSSSCWSSTGESRRAMASSPSPDSAAVVAEGSAARRFWIAASTREAAFAAYTPFLLSLAAGNLRLNVFRHYIAQDAHFLHAFARAYEMAEDCADDDDDMATIAALRKAILQELNLHSSVLKEWGVDPTKEIPPSAATTKYTDFLLATAAGKVDGTKGSDKMVTPFEKTKIAAYTVGAMTPCMRLYAYLGKELMVFLKQDENHPYKKWINTYASSDFEDTTLQIEELLDKLSVSLTGEELEIIGKLYQQAMKLEVEFFSSQLIDQPVVAPLSRYCDPKYKLLIFSDFDLTCTIVDSSAILAEIAILSFQKANQSGIDNNLDRAKSGDLRSSWNMLSKQYMEEYEKCMERLLPPEESKSLDYDKLYKGLEVLAEFEKLANSRVVDSGVLRGMNLEDIRKAGERLILQGGCKNFFQKIVKTRENLNLDVHILSYCWCAELIRSAFSSVNWQFLSF

SEQ ID NO: 61128 - protein, 290 aa, Zea Mays
MENVLKLILVLDTLIGDVLSGTTSGDVHHRGILEGWFGAHLWNSRAIVLLATALLVFAPLVSFKRLDSLRYTSALSVALAVVFVVITAGIAIIKLFNGTVAMPKLFPELDGLNSIWNLFTAVPVLVTAYICHYNVHSIDNELEDRTQIKPIVRTSLFLCSSVYIATSFFAYLLFGEGTLDDVLANFDANLGIPFSSVFDDIVRVSYAAHVMLVFPIVFFALRLNLDGLLFPTSRHISRDNKRFAIITVSLLAVIYLAAILIPSIWDAFQFTGATAAVLIGFIFPAMVILR

SEQ ID NO: 61129 - protein, 79 aa, Zea Mays
MRRNRGRDDRRSSSGVIKPPAAARLLHETPETDDVRRHAIAATWLGSGGQTIPERESFFPGCEGFRHEVYLGEQAALRR

SEQ ID NO: 61130 - protein, 90 aa, Zea Mays
MAAAISNVVEFVGGSLNNGSLESEYYLKAIADLAMILDIGFLDVQFFLFSRNHSAIINLIGLHYSIASLHVLLKSVKHSKLTVYQKGWFV

SEQ ID NO: 61131 - protein, 512 aa, Zea Mays
MSDFVGSRYTKQEDFHVLLSKKDPGEPPEHKHVLWMAHWTKASSNNGSSNPLEGTTKGTTTKDSETLPYEFTESTVAKRLMVGVSHGSASMQHDRQFNSSVWGMARHISNELGPKNSEHVDGSFEKFVKKDAVNLRARAVVSETYSVHKLSELPLDFQHLGNSDDPSPDWSHFPMFEINRKIDSILNRKRRSAPLNLNASASHVLALSSQEYMMHSHQIADENLDMCRPAEGFASHLEDPAGLNSDPSGPKLKGQLLDTVSCSCSKDDTNSADCLIDEQHTSHYFANSKHELPSVSNEKKFKFAGNNHNRILASASHKHESVAEAMFCAPVLGSELQNEPITISNIGKKDGENFHEMYNCNSKAVPCSLLAHEHHRHLKTQRTESAGNLKVCTLPDQQTANELADKSNGDLLTYGPKPKKGSCNRRSLYLFEKLTIPSKSQSAYPKNSASSGKSSGFGVCMYGTNIGSQLFGAQNQSSSKTETLHSDALIGSKSSAGIASLSAQKVSVFHNP

SEQ ID NO: 61132 - protein, 665 aa, Zea Mays
MPPPTRGRGRGRGRGRGRGRGRGRGRPSKDTVAEDSAHATEESGEENLQEKVQEGGKVNLTEKVQEGGEENLTEKVQEGGEENLTEKENEGIVEVSKPPQRRRKDPVADPSSLESSGFMRFRERRNASAVQEQGPKKRRITEDSNMCHQCQRNDSGRVVRCQGCVVRKRKYRYCVKCIKRWYPHLSEDDFANNCPVCQNNCNCKACLRGDITRANSRKKKKLLQINSGGYSVSEQDKIKFSMRIVHFLLPWLKQFHQEQMQEKSAEAATKGIDADKLEVPLTICGKKERIYCNNCRTSIVDFHRTCNKCNYDLCLQCCQELRRGLVSGNDAKVDGGGKQDFLSGVSHDKIISKGPSDGQNDMLIDSVVPGENNTSSLRQWSVNKDGTIPCPPNAFGGCGSSLLELKCLFKEKFIAELLEKANSALNNEMEVKIEGSKCPCFTESGDMDDGISRKSSCRENSCDNYIYCPTATDVQNGSLDHFQEHWLKGEPVIVRDTLALTSGLSWEPMVMWRALREKKEKVERLSVLALECLGWCEVDVNIHMFFAGYSSGLVGPDDLPLLLKLKDWPPHSSFEERLPRHGAEFMSALPFREYTDPKWGPLNLAVKLPDNVNKPDLGPKTYIAYGVSKELGIGDSVTKLHCDMSDAVNIQFCVCFLALICNSQQ

SEQ ID NO: 61133 - protein, 194 aa, Zea Mays
MFCYALPIPFHNRHFLICLYGALILGFILAGEIKERKIIYILTVYYGIDNSFSGLFPHVAQWLLAVHNTQILLSVFLAILALLLGGFCAYHAHLCLTNTTTNETFKWQDYIMWMKKENEAKADAATLRSSIGSANSDAQKAPPSKWRTFFMRSRTPSMEPVVRNNIYDRGMITNLCEVVVPLSERKAFSRMKSD

SEQ ID NO: 61134 - protein, 71 aa, Zea Mays
MGRAQIFISPSRHIVRIDSLVNSRPDRGSTCTRCATRDGLPLLNVGEPPDGWRRGTAISSNARSQRSSWVS

SEQ ID NO: 61135 - protein, 134 aa, Zea Mays
MSSAADEDALSSDKGKKREEDGTDGRSQRQEGVEVADGKVDLGDLYGAAAGWVEARTSCPHIGTMPPAGADDLARVPSPDSPCSRCNHPAENWLCFICKDVLCSRFINKHMLCHHQETGHCLALSFRKRADPML

SEQ ID NO: 61136 - protein, 586 aa, Zea Mays
MESSLVEERRQNLLVRATEPEDLARYTGDGSVDFRGFPILKHNTGNWRACSLILGTEVCERLAYYGISKSLVTYLSTRLHEGNVSAARNFTTWQGTCYLTPLIGATLADSYWGKYRTIAVFSTIYFLGMSALTLSASVPSFQPPQCVGSICPQPTLSQYLLYFVGLYMIALGAGGIKPCVSSFGADQFDDTDPVEKAKKGAFFNWFYFCINIGSLISGTVLIWVQENCGYSIGFGIPTFFIALAIGSFFIGSDIYRFQIPGGSPLTRACQVVVAATHKRKTDLPVDSSLLYELDGKTSAIEGSRKLEHSSEFSFLDKAAVILWNECDGPRNSWRLCTVTQVEELKILLRMFPIWATGIVFFTVCAQNSSMFIEQGMTLDNQIGPFKIPAATLSSLDVISVVVWVPIYERLVVPIARRFSGKERGFSELQRMGIGLFVSTVAVAVAALVEINRLQVAVAEDLVHQKVPVPMSILWQAPQYLLVGVGEVFTSIGQAEFFYNQSPDAMRSLCSAFALVTVSLGSYLSSFILSLVSYFTTRNGQLGWIPDNLNEGHLDRFFWLIAGLSSLNFLVFIYYAQQYKCKIASVA

SEQ ID NO: 61137 - protein, 363 aa, Zea Mays
MADEFSAELADGVAFVSGHDDDGRPVVVFRIKQEYPKFRSPKSFVRLLVLTLEVAVACMSRSVDQLVLLFDASFFRSASAFLNLLMGTLKIVADYYPGRLHRAFVIDAPSLFSVLWKGVRPFVELAPATAVVCSLDFEDSLEDASFTAYPRTASLRFEPPPAAVTGKAGVGSASSRFSVTPTDNPVKPWYLCTIPASVGSRSVVPTSSSSPSLVGASPLSARSFSFASPAALRSTPFPRGGGAPPTPSSAVTGHKIPPPPQFPRTPRPSFLQSPSTLFAFRKDGQQTSRVERERGSFLPYLRFYRRPYDEISYRAMMRPPLGGLIPIVEKFKHKPVQQTLRRHAGLHQHQQQQHHHYQQQQRI

SEQ ID NO: 61138 - protein, 613 aa, Zea Mays
MSQGSAEMDCSDDDVNTVSRIPTTNKPHDESLGNVPISKDGINTNNNLSIELKKEHDSDMHQDCSSMTNKVTIDAIDGDKCIKTKVGVFSHAGQQGFRNEVSASENSKDKRSLNSEKNTPVNNTDHSMQDAKTAAGSSTTDLQKSSALPKSASPKMQPTKQPPKTLDSRLGKTRSPDIKSEMSQNGMQAGSCSENHAKLAALKTEHQNESEEVGRHSDLHPRDSVLGEDSELDGASSSQQHSEYSKKTASEKSERDKSKPDSCNISVQNEKDGQLGANLRELGYAYVNRNERWERFMESEREKSNGECHGGRHASDVMNKRMTNHRGGWRGAGSRGHLRNFRGPRMRNEFADESIGGNRHSFEDEPGHTRGPHGCLMRDTDIDEFYGREIPEYRLPARGQIEDLPDSMMDDRFFMPYSHRHRGQGDHGFIHRDRDRSHSPAAQRRVGHVHFHRGRSPEAMRRSPPPVMRTDRTYMPHRHHNGSHDERGAMQRNDRRCAMEGDASGFEPPLHPSHLAEFHTVEELVGRRKYRERRPYLHSTVSDEDEMLPYRTEDDMEFAEGGAGPREHNGGFRNRMGHDRARGEQEDGYRHRRGGHQGWRDSDTNDRPKRRRY

SEQ ID NO: 61139 - protein, 1166 aa, Zea Mays
MPPSPSPRTSRSPAQETYQKRTNSFRNVLPAKSKDDELALFSDMQKVETDNFLLEPSVDFDDSMKKLRYFPEVKLGVNIPAHGESHELLNTDGDKNDYEWLLTPPETPLFRSLDDEENQSITQVSRGRAQSKPIQISRSSMVDNNQRASRSSASSSRLSPSPCSMGRTRSSSSASRSSPPLAETQTPSRRLSTPPIAKTLTPPRRSPSPVSRRMSTGSSGPTLNGTRGASPVKSNHRSSSPKLHGWQSNVPGFSFDAPLNLRTSLTDRPVCRSRGGSPSSFSGLEKGSRGRRLSMSPTPPRRASSSHSIERDRMSSYSKASATSSGEDDLESMQSVPISYSSSPVVKKSLVVMKTRTIASSKNLSKKLTPSSVPKRSFDSALWLMDHRKAPQDRFRPLLSGAPANTFGAGNGNDVHKPMFSHNSSLTTSSTASSYHGATFGSYMHGSQEQHDFAGEWEADDISQGHEDIFMFDKLDELNEDIHYKSMESTDNSLVIVKHLVSGRQDLEGSRRPNQSLCHSTDISHVSFKATCSRCGKFFDAMDVDEEGVYCDACATKDGNILTSPIVQTIGEENQQYGKTANLKPCIASDSPVPTDCEIYSKEVSLDHQLVNNESYADCLDQAPPIHSMGHTPQEMLLGQEENIDAEHRNKHVGDSLGNTNDNSFHRSSVDECEQTEPTSVGQDLFIIDQMNNHNRGLSQCNENVSESVTCDNSHQLGSTTYQNPKLETTEDTGISVLLVPKPNSNKWPNMLCSEPYYARDGVSMMKRSFGLGSSSAASSSDLGSSRQSIICFERLRSGKKGDFEKSQISSTISCQSIASVSDMSICSSSASLCPQSDAVGDSCFPIDTLESGTSGTLISSQENDDAFCKDTLPSAMECPSSSQFIADDDSPGDMKIQSYLSEVGYTTVENHSACRMTDMDCTSTNMYSLDTEMPSDTLESSGPVESSMPETEEDAYTISQCNKGSAPEHSSDENNFDNIQMQSEIVQGSAEENRLDDCCMSAISEEDVLISGQEDDIRNLPNDEELCAEVEGPRKQIQRCFTLEEAADTILFCSSIVHDLAYKAATIALENKKEPKFVDSIRPTVAIVRGSFAKEESLPKLPHRRTPNRKVKRKRLEGETTTTETTEKDVVANDSPPVCSASGITRNSDNMKPPKLESKCNCIIM

SEQ ID NO: 61140 - protein, 434 aa, Zea Mays
MLRIANIKTPKMDKLSGSARLMIVSDLDHTMVDHHDEENLSLLRFGALWESVYCEDSLLVFSTGRSPTLYKELRKEKPMLTPDITIMSVGTEITYGEAMVPDDGWEEYLNNKWDRNIVVAETVSFSELKLQPETEQRPHKVSFFVDKKNAQEVIKSVAERLDKCGLDAKIIYSGGQDLDILPQGAGKGQALAYLLKKLSSCGKPPNNTLVCGDSGNDAELFSIPGVHGVMVSNAQEELLQWYTENAKDNPKIIHSNERCAAGIIQAIGHFKLGPNISPRDLQFPYAKEASFKPTDAVVKFYVLYEKWRRAEVPKSDSVIKYFKNITHANGVTIHPAGLELSLHASIDALGSCYGDKQGRKYRAWVDRLFITQTGSDSWVGRFDLWESEGDVRACSLSSLALILKAESPEGFVLTHIQKTWLNGYSSGVEQAFKL

SEQ ID NO: 61141 - protein, 152 aa, Zea Mays
MAAAAVAISTSVCTSSRRSTGCPNVRPQARPLLGMPSLRRRLQTALAATGKTPGEAEEQVPAWAKPGADEPPPWEREGGAARGQEARQIGSIFEYTNQRPVFGIVGPDSALYAPLLGFFVFTGIPTSAFLWFKAVQTANREAEEQDRRDGFL

SEQ ID NO: 61142 - protein, 602 aa, Zea Mays
MRTLTHMPQHKQYAIAVETLQVFAPLAKLLGMYRIKSELEYLSFMYVNPTGFAELRKRVEDLYKSHEQELEEANRILRQKIAEDEFLDLVSVETEVRSVYKELYSIYKTTLKSKSSINEVNQVAQLRIIIKPKSCNGVGPLCTAQQICYHVLGLVHGIWTPIPQAVEDYIATPKPNGYQSLHTTVIPFLNESMFHLEVQIRTEDMDLIAERGIAAHYSGRRVASGPVGLGISSGRNAKGKVICLNNTDFALRIGWLNAIREWQEEFVGNMSSREFVDTITRDLLGSRVFVFTPKGEIKNLPKGATVVDYAYLIHTEIGNKMIAAKVNGNLVSPIHVLANAEVVEIITYDKLSSKYAFQRHQQWLQHAKTRSARHKIMRFLREQAALSAAEITADAVNSFVADLEDESDSELSLPSTKKEDSKFNWEKILSSDKLFFVNKSSDGFLPVNNVYPKVNGKQNKTVKDLGIKINGHSTIRGDSFSELMHPSNSTCKEVFPGLDDWKSGKISGWHNTEGNSVQWLCIACVDRKGMMAEVTSALTACGITVCSCVAEVSKRRGMGAMLFHFEGSYENVVSACLSVDMIFGVLGWSVGCSWCPLGALEC

SEQ ID NO: 61143 - protein, 284 aa, Zea Mays
MGVLARDDMHMIATNGGREKLDFVFGCAYDQQGQLLSSPAKTDGILGLSSAAISFPSQLASHGIIANVFGHCITREQGGGGYMFLGDDYVPRWGVTWTSIRSGPDNLYHTQAHHVKYGDQQLRRPEQAGSTVQVIFDSGSSYTYLPNEIYENLVAAIKYASPGFVQDTSDRTLPLCWKADFPVRYLEDVKQFFEPLNLHFGKKWLFMSKTFTISPEDYLIISDKGNVCLGLLNGTEINHGSTIIVGDVSLRGKLVVYDNQRKQIGWADSDCTKPQSQKGFPFFL

SEQ ID NO: 61144 - protein, 1455 aa, Zea Mays
MGKPCFSGLVAIELCSMGGIAECGVSIDTKASPRRAAIEKAQDELRQEYDVREERRRELEFLEKGGNPLDFKLGHVASLSVQSTSVTEQIAEQNVISEAKGSSAFATSPHGDSVESNDKPGNSLCREGNTADNITLLDGDASSMGVDKIVKRGTKRTNSAQAEQFLHCDGQNNAKEEDSGLYRLGPKSQAYARRRSKPIRENAYSVSVRYPPIPPLSSQQKDVTGLIPETKTEDNGVSSIGDSKPTSPNSKNLVTNASLLNDKVEMETENVQAIPEGNQAPKNELSNSNNGSPAIEISPNSVPDNSRLTVSDQMVTAFVSVESPDAISKVAASRIVCSLPYISNEILKEAQTLEKAGNNPSMVSVVDVHAYGMDNNGAAPYSAVKSASLNENEVDPIHEYAAKAVTEHPDQNENLVPVNADEMADEGLNKILPDDKDDKKDCQLEVSSGPVILNDSSTPVYPEFSNSFYARDGTEVSNNAVDSKNNAEQLASSNQGKGNMEECKDSDGNNASELSVAQKLVSVIVPPASDAGDVSNFVENDVDKSSRDQEKVAKKEYEDSVVAKKDHEDAILRRARYIEANIKRAGEWSLCNISLEKKQKSHWDFVLEEMVWMANDFTQERLWKNTVAAQMSHWISSRGRAVFEEASIQRKQKSVARVLANGIMNFWCSVHTLRASGGIPKPIKIEQPNELEENKLGGFKSGKADEECLEQEKSRQSPIQSFALRFLEYNINASEFLPLAEAPSTPDRLNDFGILKANLFYGVAPGAMQAYRESMDRLLIYNNKKIGDTVLKDDYEPSTYASVTDVPMENAYGDDESEAHTYLLPGAYNGGLASKNSHKKKHHLPQRMNGARSYEIGVDSPYEPLYLESKSGNQQLLSNGKQTDFLSIPIKRIRTAARQRVVSPFPAGASGTPQFTNKTDASSGDTNSCQDDQSSLHGGSFSRKNADIESTVDFDRQLLYDGSEVSTKSKKKKKTKHPGYKALPNVSESCSLRAPGKGNYDHRSQIDMIAQYEQKDYIKKRQETNGNFGVIDLSTVVNGLHAAKKPKLLNQAPDISLEALKPIGPMASLAASQMSNMANPTRVIKISTRGRKSKGLKMRAGHSGPGSPWSSFEDQALVVLVHDMGENWELVSDALNSIIQLKCIYRRPNECKERHKLLTDRSCGDGADSADDSGSSQHYPSALPGIPKGSARQLFQRLQGPFEEGTLKTHFEKIILLGQKLHQTRRKDEIHELRQKNPLHTSHGFALSQACPGNLSGVILTPLDLCDGPSNSDALTGSNTSGLGLSNNNCSVGPTLPTSNMNLRLPGSPGMVLGSNSPLPLNAPSRDVQRYGVPRPTSIQGDEQSRIHYNQMVNGRNLQQPGVPVPGVLPSGVDRGARMMPPAHGVGIMAGLNRGTPITRPGFPRLGSLGNMSPTDGQGLKNTVNVHPGAILGPGSTMLRPRDPMQMFRPMFGRK

SEQ ID NO: 61145 - protein, 57 aa, Zea Mays
MAHRAQVLVEAEGLGAELGLLAGSRETERVKTEETGPATASAGCAQISGGTETAGPG

SEQ ID NO: 61146 - protein, 787 aa, Zea Mays
MLPRCCRRRSGASCLAVLLLLLLHAGAASAQGALARQDVAALHGLRASLGVRASDWPDRADPCTFWSGVVCRAGRVAELRLSGLRRTRAGARSAAFAVDQLPRLAALQAFNASGFPLPGRIPSWFGRGLPPSLAVVDLRSARVNGELPVDLGMSGNLTTLVLSGNNLSGPIPLSLLSIAGLRVLDLSANNLTGPLPNVSFSGSGGAGVLFNASGNALYGAVGDATGSLRKRFWVVDVSDNYFDQVLGTGFQNGTDGVVDLRMNCLSGAASQRTRGDCEAFYTRNGVRLALDPKPPSPLPEPQPPQVLMPSTKKRGGKWKFVLTGVLGGAAILVTLGLSVLVFCLLRRKGRKPRGRGVEQTEEGIRSGRRSSSVNPVTMSPMASPRASGSPKGVPIITDEFTYEQLHHAAGGFGDDNLVKHGHSGDMYYGVLESGFQVVIKKIDLKTRKKCQGELSFLTKHTHGRIVPLLGHLAKDEEELLVYKYMAKGDLTTALHKKSVEVEQGLRSLDWITRLKIAIGVAEALCFLHDECNPPLVHRDIQASSVLLEDKFEVCLGSLSEICTQQSAGSQSFFSRILRSSKSLDKNIPASCSYDIYCFGKVLLELITGNFGASGSTNADSEEWLARTLDYINANDKEGVSGIVDPTLVVDDDHLEEVWAVSIVAKTCLNPKPSRRPLARYILKALENPLRVVREQEEFQSSPSHLRSTPSQGSWRFAFHGNKYHSWEAMPTSGQALARKNTAKSQGTEGSDEDEENSFSFKRASRDDFPDPIEFEGGVVVKEYPQTS

SEQ ID NO: 61147 - protein, 362 aa, Zea Mays
MAAAMDAPNPGAAAGPGMPSDALYQELWHACAGPLVTVPRQGERVYYFPQGHMEQLEASAHHQQLDQYLPMFDLPPKILCRVVNVELRAEADSDEVYAQIMLQPEADQNELTSLDAEPQEREKCTAHSFCKTLTASDTSTHGGFSVLRRHAEECLPQLDMSQNPPCQELVAKDLHGTEWHFRHIFRGQPKRHLLTTGWSVFVSSKRLVSGDAFIFMRGENGELRVGVRRLMRQVNSMPSSVISSHSMHLGVLATASHAISTGTLFSVFYKPRTSRSDFIVSVNKYLEAKKQKISVGMRFKMRFEGDDAPERRFSGTIIGIGSLPAMSKSLWADSDWRSLKIESHHGKWSHWMQLIHNPLNLH

SEQ ID NO: 61148 - protein, 157 aa, Zea Mays
MRTICDVCESAPAVLFCAADEAALCRPCDEKVHMCNKLASRHVRVGLADPNKLVRCDICENSPAFFYCEIDGTSLCLSCDMTVHVGGKRTHGRYLLLRQRVEEINRAIWMTCLWKSKILKTRETRKSHPRSKRQTTITAMIRPLMATVMTRVTLIQK

SEQ ID NO: 61149 - protein, 245 aa, Zea Mays
MDMSSIAANLGLSGSRPVIRKAGELRRLCDVNFDSSVLGIGEVCKAIICLEIAASKLQVIFDRAEAVRMSGMSEKAYIRSFNSLQNGLGVKTTLDVRELGIQFGCVRLIPFVQKGLSLYKERFLAALPPSRRASTDFGRPVFTAAAFYLCARRHKLKVDKLKLIDLCGTSSAEFTTVSTSMTDLCFDVFGIAKEKKDPKSIKGNRELLDVLPSKRKHEDGERSIQGLEVVRSLLEQENQTRPCQA

SEQ ID NO: 61150 - protein, 743 aa, Zea Mays
MEDDPPTDCSSTSGQGSGTEEDVKDGGHEIGDNSLAVPQKKASLQQDPKHPKTKKSAASKSGFDMYTEQEHSPTSLRAERQIEEVKIEEESCHLEGFVLEPNLEVVCALEVPKNFKSNKLLRNAESKENEHVGVGSPTGRIAVEAASDVVLNMSAEEESREFKKSKIMTKQSLTTGSEKRDNKIVHGKPDKQLTGKSSAGFSLNQKSLTGSGQHKMDSSADTRPAKKARLMDRAGETDKTVAKSETKLNINYENHNAVKHEQSTAVETCKNTILKTGIGDDRARKSGGAVSPISKLHSEIMEPASGSSVTQSTVADSLKKGSSRKEDVSRVDRKLVKPKRRACRFDDDEDEGQQTPLHRTSAKSLSTHIVPTEKPGSRGNFASHVGNASGKKPGPAREEKSRSVRMSPVKHEPVFSSPSQDKVHARHQLMGRNLITGSVETPVIGNKMSLVDGKSSAQVKMPACSEVKKLHSTSKPLQVTSGKSHSRNYPASEKIALVPKSEETKAKSKPATSVEHKVATTLSTERTGKRDHLKEERSSSVDKAAYSEPNPDSAKSIKHLIAAAQARRNLMASALAKFDGSSTDNSAITSTSYGLPRLSPSPVFRIPSPPRIAFPESPGQRILKSPMELDNGHGKSPKSRQASGSPSGGSDAAIARDALEGMIETLSRTKDSIGRATRHAIECSKYGIAGEVLSLTYAICITVSLLFHYPYCFSSRLSSFSYRNWRTSIICIAELTSFFLWIP

SEQ ID NO: 61151 - protein, 774 aa, Zea Mays
MQPSSQHYVKSELLPCIGATNRAIRSTVGTVISVLFQIVRVAGWIELFQALHKCLESNDLDHMEGAMDAIYKICEDVPEELDVDVPGLSERPINVFMPKILQFFQSPHASLRKLSLGCINQYIVVMPSALYMSMDQYIQGLFNLAKDPSADVRKLVCSAWVQLIEVRPSILESHLKNVTELILQANKDPDDEVALEACEFWSAYCDVSMPPEGLREFLPRLIPTLLSNMVYADDDESLDDAEEDESFPDRDQDLKPRFHASRLHGSQTGDDDDDDDAVNVWNLRKCSAAGLDVLSNVFGDSILPTLMPLIEQNLARTDDNSWKERETAVLCLGAIAEGCIGGLYPHLPQIVAFLIPLLDDKFPLIRSITCWTLSRYSKFIVQSLDHPNGREQFDKILMGLLRRILDTNKRVQEAACSAFATLEEEASEELVPHLEVILQHLMCAYGKYQRRNLRILYDALGTLADAVGAELNQAKYLDIFMPPLITKWQQLSNSDKDLFPLLECFTSIAQALGPGFAQFAEPVFQRCINLIQSQQLAKIDPTAAGAVYDREFIVCSLDLLSGLAEGLGAGIESLVCPIHLHPRLQEFLTVAAKQLNPQSVKDAVSVANNACWAIGELAIKIGKEIAPVVITVVSCLITILKSPEGLNKSLVENSAITLGRLSWVCPDIVAPHMEHFMQAWCSALCTIRDDFEKEDAFHGLCAMVAANPTGAAGSLAYICQACASWTEIKSEGLHNEVCQILNGYKQLLGNNGGWEQCMAALKPDVVQKLARYGV

SEQ ID NO: 61152 - protein, 510 aa, Zea Mays
MDGHGAVSPWSVLGGAAAVLFLWLASQVLEWAWWAPRRVNRALRAQGLRGTRYRLLCGDLIEEQRLRAAALARPVPVDRPHDFLPRVAPFLHRVLQEHGKLSFTWFGPTPRVLITDPELAREVLSNKCGDFVKSLLSPLSTLLVAGLVVLDGEKWVKHRRILNPAFHAEKLKGMLPAFLACCNELVDRWEKQISASAEPTELDVWPEFQNLSGDVISRAAFGVSYEEGRRIFLLQAEQAERLVQSFKTNYIPGFSEVKTILRGIIEKRQKAAKNGEATKDDDLLGLLLESNMNYSDSDGKSSKGITVEEVIGECKVFYFAGMETTAVLLTWTVAVLSMHPEWQDRAREEVLQVFGENKPDFNGVARLKVVTMVLYEVLRLYPPVAAINRRTRQPTKLGGVTYPAGVMLTTPVMFIHRDPALWGSDADEFNPGRFADGVSKACRDPGAFAPFSWGPRVCIGQNFALLEAKLAVSMILQRFAFEVSPAYVHAPYTVLTLHPQHGAPVRLRRL

SEQ ID NO: 61153 - protein, 524 aa, Zea Mays
MQSATRLTLLLCAAWAAALLYGEMGAYWVSYLACSWPSSSSSPPNNHVKVAVVADPQLMDSTSLGLPSSSVALQAAEFYTDLNMRRSFQSTILPFKPDVVLFLGDHFDGGPYMPDEEWQESLFRFKHIFGLNDQRTKQQIPIYYLPGNHDIGYSAFHSVHPEVLSRYEKEFGSRNYQFSAGKVDFVVVDAQTLDGAKQSKERSSSWEFIKTLSPGNTSNPKVLLTHIPLYRPDNSPCGPHRSSPVINQRVSYAALDQGITYQNYLTKETSDLLLSLLKPILVLSGHDHDQCTVVHSTPFGPVTEHTLGTISWQQGNLYPSFMLLSAGPKLSQNSTDLEHEVAMNLCFLPKQTHIYIWYICQFVVTILLLVFWPTNGLGSLPCMNTFMSFMRSVGAELLSRTKEKDDEDDGDYDMVFDAEGSMHLVKKAVAKTPSASSDSRPTGRGSVVARATAGRHRLEPDSSIRVDMGSEMTSEDGGKLARAGKSGARKVLQRLFRVIQSVLVIAALNAPLYMMLLFKDWIDR

SEQ ID NO: 61154 - protein, 607 aa, Zea Mays
MCFCGPGTKYPDRPVAEACGFKTILPAKPDGPKLTDWKTPDLENILTTNSSKLGWCNVVPEDAYSSKVKFKEECDCKYDGLWGQFCETRAECSCINQCSGHGHCRGGFCKCDSGYFGIDCSIPSAYSLAYDWPSWLQTPVNLPDLKTLNSTTIGVKAVVQKKRPLIYVYDLPAEFDSHLLEGRHYRFQCVNRIYDDMNRTIWTQQLYGAQIALHESILASPHRTLNGDEADYFYVPVLDSCLITRSDDAPHLLLPRDLRRRSYHALEYYRMAHGHIAQQYPYWNRTSGRDHIWFFSWDEGACYAPKEIWKSMMLVHWGNTNTKHKNSTTAYWADNWDDIPLDKRGNHPCFDPRKDLVLPAWKEPNPGAIWLKLWARPRNNRTTLFYFNGNLGSAYEGGRPEDTYSMGIRQKLAAEFGSTPNKQGRLGRQHAADVTVTYLRTEKYYEELASSVFCGVLPGDGWSGRMEDSMLQGCIPVIIQDGIFLPYENVLNYNSFAVRIQEDDIPGLISTLRGINDTQVEFMLGNVRQMWQRFFYRDSILLEAQRQKKLFSEEAPWSVEVSKLPDDDDVFATFIQVLHYKLYNDPWRQDFLQTKDTRLPNICSRTS

SEQ ID NO: 61155 - protein, 345 aa, Zea Mays
MMLKRRGGRDKESISHSEWLNTVQAEPDVTSMSFIPITSLLNGVPGSGFLIHAINLYLRHKPPIEELHQFLEFQLPRQWAPVYSDLALGPQRKRQGSTSLPVNLIGPKLYVCTNMVDVGKRPVTGLRLFLEGRKSNKLAVHLQHLCSLPQIIQLEDDPYNHQTPEYDRKYYEPIGPWKHFSHVCTAPVESDDLCIVTGAQLDVVHQGLKKILFLRLHFSKACNAVVRNSEWENSPNIAQKSGLISTLISTHFSSVAQTPPPRPADVNINSAVYPGGPPVPVQTPKLLKFVDPTEMMRGPQDSPGYWVVSGAKLNLERSKISLRVKYSLLTAMMPDDEFPLDDDEF

SEQ ID NO: 61156 - protein, 364 aa, Zea Mays
MSDVKHILQIRDLRTGNFIHQLPLEIGSVSEISCRREDKEVFIGFTSFLSPGIIFRCNLASTIPEMKMFREISVPGFDRTSFQVKQVFVPSKDGTKIPMFIMSKKDIDLNGSHPTLLYGYGGFNISITPSFSVGRVVLCKNMGFVVCVANIRGGGEYGEEWHKAGALAMKQNCFDDFAACAEFLISNGYTSSRRLCIEGGSNGGLLVAASINQRPDLFGCALAHVGVMDMLRFHKFTIGHAWTTDYGCSDKEEEFQWLIKYSPLHNVRRPWEQSSGNNCQYPATMLLTADHDDRVVPLHSLKLLATLQHVLCTSTEDSPQTNPIIGRIDRKSGHGAGRPTQKMIDEAADRYSFMAKMLGASWTE

SEQ ID NO: 61157 - protein, 614 aa, Zea Mays
MRSLQKNITQKNTGQAVYEPMCVWNEFLTRAIRNHLKNTCWTVALVHGFFKQSKLSVSGKDFWLTLIARRSRHFAGTRFLKRGVNEKGRVANDVETEQIVFEDTSDGIPTQMASAVQHRGSIPLVWFQETSRLNIRPDIILKPDVDYKATRLHFENLALRYGNPVIILNLIKTREKKPRESLLRAEFAKAIHYINKSLPDDKRLKFLHMDLSKLSRRKGTNVLALLTKVASDVLDLTEFLHCEISTSTKPDDTSSGERTAAKPHDDRSSSDQTECAAKLAPLLLQKGVLRTNCIDCLDRTNVAQFAYGLAALGRQLHALGLTEAQKIELHDPLADDLMDFYEWMGDTLAIQYGGSAAHNKIFCEQRGQWKAATQSQEFLRTIQRYYNNAYTDHDKQDAINMFLGHFQPQQGKPALWKLDSDQHYNIGRQGTLKEEIGRSFIKRSLSDGNILLENNLPVTSCNNETNNTELLPMQQLDDIREPTDSAPEISICEPNPCSSVNYGRVPGRHSISEERQSYLKRLGYPELHSSNFLDLDLLSSSGNSCDEEVFERSSLINSPMDVVSVESSTSYSEQGHTDEGRDDMDLSRSSSQVSDVRDYSDRFAHWVADGGMLW

SEQ ID NO: 61158 - protein, 342 aa, Zea Mays
MMPPPRPPPLTSRRRTLARARTRAKRSKPSDVEAPAPRASFQSAGPRPSRGIYHRSRSPAARTEVEHQTSSHSATPSSCHPPEAVQAYGAPCQPAPRRGAARRRRCRGGAADVRAHRVPGVRGGGQRQRVRDPAVHGRHVDHHGAHRGHLLRRRHAHRLPTAVRLHPGQERVQPDDRDDGAGADAGVAQRRALLRLRLRRELLRAGQEPGGPAAGRGPARGPLGRGQVRGRAPLRGLRGGRRRRGAGGAARGQPPGHPVGRRRQRRAQGRPGLALHRRAVQLALRVHRQGQRDLDALRRGRRRQYVMRFQACSRGTEAFREGRACTCAVQLCYHEVFRALVR

SEQ ID NO: 61159 - protein, 256 aa, Zea Mays
MKAQVLTTQRQLMRDPEVLPLEEAATGKSMNVNGACRRGKRLGFPEQAAAKMVVAVDVDEVLGSFLAALNKFIADRYSWNHSVSEYHVYEFFKIWNCSRERANFLVHEFFTTHYFQDGIHPIPGARDALQTLSSFCSLSVVTSRQDVIKNHTLEWIEKYYPGLFEQIHFGNHFALEGQSRPKSEICRSFGAQVLIDDNPRYALECANDGMRVLLFDYESSYPWCKTGADELHPLVTKVHNWEEVEEKLLSWVVPDS

SEQ ID NO: 61160 - protein, 823 aa, Zea Mays
MQIPKLKQSEGSNAAADSLKDIFVWGDALGRMSDHGHVSASNISLPRLLKSSEILDVQSIACGEKHAAIVTKQGQVFSWGEENGGRLGHKTSDSVSDPKIIDSLSSTPVKTIAFGAKFTCAVSVSGELYEWGEGIDSLGFGTNQCQRSPWFPHKLIRTSDGISVAKIACGQWHTAIVSSTGKLFTYGHGAFGVLGHGDTRSFVQPKEVESLRGLRVKSVACGPWHTAAIVETSGTLKSNAPGGKLFTWGDAGGEKLGHTDKKSKLVPTRVESLVDCDFTQVSCGISLTAVLTITGVVFTIGSKDHGQLGNPRSDTDSACICMVEGPLKTEFVKDISCGSSHVAVLAMNGKVFTWGKGTEGQLGLGDYVDRSSPTLVEALEDKQVDSIVCSSNSTAAICVHGEISSKDQSVCSSCRLAFRFTRKKHNCYNCGSMVCNSCSSNKVHRAALAPDKSKRCRVCDACFNELNKTAEHGKMSCGSKIQKEPSYLAETRTYTPKLSRMLKEANFIMEKMGSSAQSPGQRNQEPATPNQMQKERWGQVECPDRFKCARDNIPHRLTPKKQTIDDYPMRRMADPVSQKTAAPLTQTTSDRRKEQDLIEKILLEEVKQLQAQVTTLAEECRHRSLKVRLYKRKLEETWLIVRDEATKCEAAEEIIKVLTNQRNALSNKLLDGLELDGSSIVPNPPDKALATCKTPPLNSIRDQHNAEAEEVLDTRSTASSNTVAVDDSAAHQNGRSRASSSSRGYYDDGGTDSTAAPTDSNGVIEQIERGVYITVVTSPSGKKGIKRIRFSRKHFGEAEAQKWWERNESRVFAKYDSVEYLAA

SEQ ID NO: 61161 - protein, 433 aa, Zea Mays
MELMLLSFVGPLVRQQWNVSAQHESLLSSVVFTGMLLGACSWGYISDKYGRRTALLFSVTLTAGAGLTSALSPNYISLLALRFLVGVGVGGTHVFSSWFLEFVPTKNRGAWMLVFSAFWTIGTIFEASLAWVVLSRLSWRWLLAFTSLPCFALLVFFVVAPESPRYLCAQNRISDATLVLERMSRTNKAALPPGALAYHHTETQLGLGESTTDDASKSGSGGMAALRRLFSRKLLRSTLLIWFVWFANSFAYYGLVLLTSQLSDANRRCASSSAHKSQAHEGNPNLYKDVFITSLAEFPGLVISAIIVDWLGRKATMWILLFGCCGFLGPLAVHQKESVTTALLFGARACGMGSSTVLCLYAPEVYPTSARSTGVGIATAIGKIGGIVCPLIAVGMLRSCHQMQAVLVFELVLGLAGVACILFPVETKGREMK

SEQ ID NO: 61162 - protein, 183 aa, Zea Mays
MRKGGGPALEELALEGDPNAVKFRVPMRQHKDCNFSYAGLKTQVRLAIESKNLCTEDIPVSAASEEDRQSRANIAASFQRVAVLHLEERCERAVEWALNMEPSIKYFVVSGGVASNKYVTTRLNHVAGNNGLQLVSPPPSLCTDNGVMIAWTGIEHFVAGRFEDPPAADESDDMQGIGHKWAN

SEQ ID NO: 61163 - protein, 278 aa, Zea Mays
MPGLPLPQSLNQNIGCEYAYPGSTGQAFRQQLRTALSPDEKLTAEKDLALYCKPVELYNIIQRRAMKNPLFIQRCLLYNIHARRKKRIQITISLSGSTNTELQTHYVFPLYVLLARPTSNLSLEGHSPIYRFSRVCLLTSFSEHGNKDNSEATFIIPDVKSLSTSRACNHDIIFISCGQVGQSNGEDNCSGNHVEDSSLQMLEGKCSWGKIPTNLLASSLESCVNLSLGHIVELASKVTMRPSFLEPKFLEQDSCLTFCSHKVDAVVRSPLFLHSCLI

SEQ ID NO: 61164 - protein, 629 aa, Zea Mays
MDLSRLASVAGPSRAAPRAGLQIGAAGNGFRVCSLRHRGAGNGRLTSAAALLRGSSGLFYLAPARGGPPRLRARGRPRCQGSDSLAYVDGPLEAAKGSGEVYDDDATSSGPDDDDNDKGPADVDGLREMLQRCRNELEVARLNSTMFEEKAQRISESAIALKDRAEGAQRDVSAAVATVQEVIVKEADAKEAVQKATMALSMAEARLQLASEALDAKRGSVGPMEVSIEGVEEEALVSAQEEIKDCRAALLRCEEELERIQEQKMNLQKEVDRLTELAEKAQLDASKAEEDVTNIMVLAEQAVALEMKATQRVNDAEAVLLKAEKVISSVDTVVELTSLAEEQKSAEEDSVSEGYEYSSNGTDDVPVRDEVSSIERLMVGDLTVEGIEQLEPSREIYDEASSDKMSVEPQKEAEPDSDKLKQGKKQEMERKEFTKEPLSAQKSLKKRSSRFFPASFFSSKADGEFTPTSVFRGLMKSVQKQAPKLVVGILLLGAGAFFLNRAEKSQLFQQQEIATSIGKVTSTTKPIVREIRQIPQRVKKLIELLPHQEVNEEEASLFDILYLLLASVIFVPLFQKIPGVLFLDILLLVSSLVHMGSPSSVMCMGQRQLRNSESCSYCLTLDLSFLWKG

SEQ ID NO: 61165 - protein, 119 aa, Zea Mays
MRRPWRRPRTTPAWLLRSRSSTRRACMGLRNGRVAIFRDRESERKDPDYDRSYDRSIELSLFIPSHYCIEISSLIIFSWVSGKEKTRFMLSILDLQRSTEIHQHTSTFHTEQSRRDDME

SEQ ID NO: 61166 - protein, 861 aa, Zea Mays
MSRPLDFAVLNYKNQRLAEQLEVHKFEFRALESRFNDLKEKQRTHNETLILVENYWERVFVVLCSFRNYIYDDKRFTCISPELAVYQLMIVKGQALCRMLPHKWDGICFRLGAGFLNGLLEAGASATESSGFSNCQLGNDVSSEESTTIDILQKMFLPSSGPWHANNELAGNYQKQRDSSAWNRAEQKRLKEELTSVVAKLEESKQKLAVLKAQGDNKQATPILVPMLGKKTAEKVGDKQTELQDLEATHKELMESISKRLEEIRRLHTERIGILNNLATFQNILTDFKSIHSSKAFQLVNDQLQKSQAELDGHQTLLEKLQVDMDTFVWRERQFNQKVDLAEISQKVSAYYVSRIADLEKDVQKLCNEKNMLVLKLEGALREPGRNQVISEFKALVSSLPREMGAVQTELSKHKDASLQLHSLRAEVHSLSSIRTRKEQEIEETSRSAHAGSDISQLQSLVHELRENTQELKLFVELYKHDSADSRQLMESRDRELAELAGVHVLRYSLNESKLEQRVIAANEAEAISQQRLATAEAEVAELGQKLETSRRNLVKQSDILKSKHEECEAYMVEIESIGHAYEDIMSQNQQLLQQIIERDDHNTKVWRHGVEIFSGLLKLFMEGVKAKQSHDALHLEVCSLQRNLQHASTLMDLCNQKLIHLEDKLRGWSERLRRLSEDGMQQSISLGISQTKLTGMHGEAPKLGQALNVLQAKVGSNRLEVAELLIELETERWFIHTFAFYSGNWFLNTWSNKFSFSSRFSKKRLDDDLDLMSSKASSLREKADNSQVLQKLLHEAKEYRGILKCGICHDRQKEVVIAKCYHLFCNQCIQKSLGSRQKRRLAPVSHTPELPGALLIPGIW

SEQ ID NO: 61167 - protein, 215 aa, Zea Mays
MYEAMWHDITDQSGENIVSVTIPVMFGRSIEIPQSCNGVARFDFEYLCGRPVGAADYIAIARNYHTIFISEIPAMSMKIRDKARRFITLIDELYNHHCRLICLAASSIDDLFQGTEEGPLFDLESFQFETESEGTKLRRDVLAEGNAGSGPSTTGLVAILSGQEEMFAFRRAISRLIEMQTPLYLERVLAVHPSFRRPGLARNNRPAVPQPAPAV

SEQ ID NO: 61168 - protein, 306 aa, Zea Mays
MAKARKQKGDGSGTGGGATVLHQKLCLSIDMENQLIYGYTEIKALLAENDTFALHADNMTIRSILVDGETVEFDYSPHWKNETDQPNWSSISCLNTVADAACSTYTSSLNREATPNLIVSSERSIKSMIEQQLDENSEKYEENSGRLEKHGGKTIQTSYDQIVNGCNGSAVEEGIENSAVEEGKKKEKEKEKEEKNGNEKSKENGNETENEKVKNIKLVHIDYILEKAETGIHFVGNVMHSSNQIRRAHCWFPCVDTATQRCPFDLEFTVSTDFIAVSNGDLLYQLVHSGYPWLLVHLKFSLTEMT

SEQ ID NO: 61169 - protein, 310 aa, Zea Mays
MVDAGRLPPLGPAAMFMQGTKRMPGTAVTKSVVATEPGGKKREEIFVDIIERISVTFSSSGYILTSEIDGTIQMKSYLTGNPEIRLALNEDLSIGRTGSSSYDYRSSSGGGTVILDDCNFHESVHLDSFDIDRTLTLIPPDGEFPVMNYRMTQEFKPPFRVTALIEEAGPARAEVLLKIRADFSASATANTIVVQMPVPAYTMRASFELEAGAVGQTTDFKEGSRRLEWNLKKIVGGSEHTLRAKLTFSQESHGNITKEAGPVNMNFTIPMYNASKLQVRYLQIAKKSKAYNPYRWVRYVTQANSYVARL

SEQ ID NO: 61170 - protein, 321 aa, Zea Mays
MGQQEGHSNPHPDEAALPTTTAAPSPSPSPSPSPSSSRLYTAWLVASCTPRPAPAAAPPRAPTASSLASRSSAPSSARPSSPGTSRSATSPSPSTRPSAPPRLSSPRSSPTPSPPAARPAPPTPRSSPSSPASPSPPGASRASTSSDSSCAWPPRWGARSRPCCRASCYRPRRRRWTPWTSSATWRRWPCCCWYRRRWPWSGTRSAWWRASRGRTPASSGSCSATPASPTSSTSPTSSSQSTPARSLSRSSGTPKAPSPSSSPSSSSGTPSRSWACWATGSRSLASSCTARPRRGASEATDRLLYLYICCPALECNAGGDS

SEQ ID NO: 61171 - protein, 303 aa, Zea Mays
MSSSAENDPTVTVTERGGKDKHEDGGDKEQGGGGFIDKVKDFIHDIGEKIEEVVGFGKPTADVCGIHIPHISLHRADLVVDVLIKNPNPVPIPLVDIDYLIDSDGRKLVSGLIPDAGTIHAHGQETVKIPVSLVFDDIKSTYKDIQPGSIIPYLVRVVLLVDIPIPYKPDVDVEKIKFHHFSFEETTATLHLKLENKNDFDLGLNLLEYEMWLGDDSIASAELTQTAKIEKQGITRMQVPFSFRPKDFGSAVWDMIRGRGTGYTIKGKIDVDTPFGNMKLPISKEGGTTRLKKEEEEDDDDDN

SEQ ID NO: 61172 - protein, 477 aa, Zea Mays
MEDDDTEGVGESTCPPAADRGGSSSAGGGGGDSHSYTDIEKEVFDRLMEKRIPEVVADPVAFREELRRHFERLPLSYAVDVNVDKAEDVLLHRRILNECAHPENRPIFHVGFLNCIPPSVDPQYNTQSISTSENGNCGGSQDSTLRKFEPCEGIEDLSLTGQKVVVDSVASSSRGDEEILHVHEIIFSTIDKPKLLAQLSALLSEVGLNIREAHVFSTTDGFCLDVFVVDGWDTKETDTLLQILKETAARNHASLSNPTNSAASERVLELQEKIGDSNIDRNFLQIGEKIASGSSGDLHRGTYQGMDVAVKFLRTEHVNDSSKVEFLQEIIILKSVNHDNVVRFYGACTKQRKYVIVTEYMPGGNLYDFLHTLKNTLDLPTVLRIAIGISKGMDYLHQNNIIHRDLKTANLLMGSDYVVKIADFGVSRNPSQGGDMTAETGTYRWMAPEVINHKPYDHRADIFSFAVVLWELVTSKV

SEQ ID NO: 61173 - protein, 410 aa, Zea Mays
MERLGGPRPHHPLALLLLLGYYYAAAAQADASIQPHCCQSATTIYCRPLITATGPASKRQPGEGSRGLGQEAMSGDRSSTAERRRGIRRLLLHPRGEASSPPPPPPAPAPEEGRRKGFASAALRGLGCTSAAASKAYAPGAAAAAALRSSADWHGRRRRRGKDRRKERGGGGAGAGGGLVTGGIGADVWCAPGIPFAAEASSVDCVVARHQTVGRGGRGAEGERSHRERPCMSRRATVQEQISSPFMDSPPPHLDAPFFGADLIPSGRLRRMRGYRYSPGGLEEEIMMFQTRVLLGGMNMYDRYQDWRLDVDNMTYEELVELGDRIGYVNTGLREDEIARSLRKAKHPSFGSLRFAAEVERKCTICQEEFQSNEEMGRLVCGHSYHVLCIKQWLSQKNTCPVCKTAVSKN

SEQ ID NO: 61174 - protein, 131 aa, Zea Mays
MVNIFDVEKQSSLPCPPKGHNSEVNFVSWDENGEYLASVSQDTVKVWSVSSGVCIHELRSNGNQYQSCTFHPRYPKVLIVGGYQTLELWSLSDNQRIPIQAHEGLIAALAHSPFTGMIASASHDRCVKLWK

SEQ ID NO: 61175 - protein, 731 aa, Zea Mays
MRKWALSSALLLLFLLTTLPDPAKKLQVNAEESSDDLANPPKVEEKLGAVPHGLSTDSEVAQREAESISRKTLRSSAEKFEFQAEVSRLMDIIINSLYSNKDIFLRELISNASDALDKIRFLSLTDKEVLGEGDTAKLEIQIKLDKEKKILSIRDRGIGMTKEDLINNLGTIAKSGTSAFVEKMQSGGDLNLIGQFGVGFYSVYLVADYVEVVSKHNDDKQYVWESKADGSFAISEDTWNEPLGRGTEIRLHLRDEAKEYLEEDKLKDLVKKYSEFINFPIYLWSTKEVDVEVPADEDETSEEEDSSPETTEEETEEDEEKEKKPKTKTIKETTSEWELLNDMKAVWLRSPKEVTDEEYSKFYHSLAKDFGDDKPMGWSHFTAEGDVEFKALLFIPPKAPHDLYESYYNSNKSNLKLYVRRVFISDEFDDLLPKYLSFLRGIVDSDTLPLNVSREMLQQHSSLKTIKKKLIRKALDMIRKLAEEDPDEYSNKDKTDEEKNEMEEKKGQYAKFWNEFGKSIKLGIIEDATNRNRLAKLLRFESTKSDGKLASLDEYISRMKPGQKDIFYLTGSSKDQLEKSPFLERLTKKNYEVIFFTDPMDEYLMQYLMDYEDRKFQNVSKEGLKLGKDSRLKDLKESFKELTEWWKKALESESVDSVKVSSRLHDTPCVVVTSKYGWSANMEKIMQAQTLSDSSKQAYMRGKRVLEINPRHPIIKELRDKVAQDNEKKKK

SEQ ID NO: 61176 - protein, 290 aa, Zea Mays
MELRLCLRLHARLPPATTPPPFQATAVLPASRRLRTGGSYGVALRRHTRRSSPAICASITDGEQGVAVKERSVSVILLSGGQGKRMGANMPKQYLPLLGLPIAFLKTFCQLKEVKEVVVVCDPDYSDVFEGSIDNLQIPLKFARPGKERQDSVFNGLQEIDGDSELVCVHDSARPLVSSEDVLEDAAVHGAAVLGVPVKATIKEANTNSFVVKTLDRKTLWEMQTPQAMKPNLLRDGFELVKRDGLEVTDDVSIVEYLKHPVYITEGSYTNIKVTTPDDLLLAERLMNEE

SEQ ID NO: 61177 - protein, 1654 aa, Zea Mays
MVSIILSLLHMDDCAKLSQSVPSECYVSHECHDINIESEGKNVVVYFVGLLLDILRHNLESKGSDTDHLSSTGLSPAGRQALEWRLKHAKHSIEDLDWRLSVLKRLPPLSERQWSWKEALVLLRAAPSKLLNLCMQRENYDIGEEAVQRFSLPAEDKASLELAEWVAGAYKRALVEDAVNRVTDNTNAAHELDILSLRTQLGSLTTILLCVDVAATSAKSVHMCRFLLDEATSMLSEIFPGRSPKVGPTYWDQIQELATISVIKRILQRLHDILDLDTLPSLQVFFTEMSISSSTECSRVGQKQRPLGLLHQMIDDAFKGKRQFLSGKLHNVARAIVDEDFDTVYSKEGVNLEKKDILSSEKGILLGHGLRILKQASRSDLASSNVVDSGPEHKGSANRYLGPLSTKPSTYLSNFIIYTATIGDIVDGTDTTHDFNYFSLVYEWPKDLLTRLVFERGSTDAAAKVADTMSVDFVHEIISACVPPVLPPRTGQGWACIPVIPTICNISSENRLCTKSSPAQGWSAHDSSLSSRQEPLYPLQLNLVKHLAQLSSVRAVLACVFGSSILSGDNESSFTHVKDSTQAPETERSFFEFALEQSERYPTLNRWIQMQSNLHRVSESSITDKSEVSLHQSKGKFCMKRTRESDSDGESELEENVISGNTSSSSLESTKHEDARLEPTTFISFDWENEAPYEKAVERLISEGKLSDALAVSDRCLRNGASDNLLQLLIEQKEEKGPGTGQIHPYGSHSLGNDTSQYCLRLRDKKVAAQLALKYLHSWDLDAATNVLTMCMCHLPENDPMRSEVLHMKQSLQRYGHIMSADEHYTRWQEVEADCEDDPEGLALRLAAKGAVSAALEVAESASLSIDLRRELQGRQLVKLLITDPLNGGGPAAASRFLSTLRDSNDALPVAIGAMNLLPDLRSKQLLVHFFLKRTVGNLSDAEIARLNLWALGLRVLSLLPLPSQQRCSSLHEHPQLIVEVLLMMKQLQSASLILKEFSSLRDDKLIIAYAKKAISINVSSAPRERRSNISASRAKQKKATTPAKTNFVQSFGNFQREARKAFSWVPRDSGTKTPPKDILRKRKSSGSGGDRSSWEAMPGLQEERTPVYPSEAQERLPFVSAPDEWVLTGDPDKDDATRSSHKYETSPDITLFKALISLCTNESVAAKGALELCMTQMKVVLSSQQLPLDASMDNIARAYHATETYVQALSYAKNLFKKLVGSSDLSSGSERSKEVDDVSVDTGSSSTGSQYLDELSDFLTQADMWLGRAELLQSLLGSGIIASLDDIADKESSSRLRDRLVNDERYSMAVYTCRKCKIDAVPVWVAWGHALVRMEHYAQARVKFKQALQQYKGDATSVVTEIINTIEGGPPVDVSSVRSMYEHLAKSAATIFDDSLSADAYLNVLYMPSTFPRSERSRQSRGHVDSQFRTASSYLEDGPRSNLDSVRYAECIHYLQDYARPQMLAFMFRHGHYTEACSLFFPFSQPTTEGETSLSSAPWSDPLTTDYGTIDDLCDLCLGYGAMAVLENTIRTITQSPTYHEAHMIQYMNTIITRICNYCETHRHFNYLYNFLVLKDDHVASGLCCIQLFMNSMSQEEALRHLGHAKTHFEEALSVRDRTIEATKLVLRSARNKGAPGKMTRETIMKYSTRVSY

SEQ ID NO: 61178 - protein, 86 aa, Zea Mays
MIGRADIEGSKSNVAMNAWLPQASYPCGNFSDTSSFQLQRSKGSIGHAFPVGIWYMKIRIKRAFTLLFHHEISVLVELILGHCVIF

SEQ ID NO: 61179 - protein, 66 aa, Zea Mays
MIHGCVAKAAFILGPGSNPDPMEDVRMKLWAHLLFGGLGIFLRCQPPSVDPRHDESKHLYGIIDGT

SEQ ID NO: 61180 - protein, 733 aa, Zea Mays
MDPYYESPEEQEQEIERSSFNKSRSSFLRKDGSLVSPGKGDGRNAAQRDPKTNWESNRNTRAESSSHMESPLSRRSTYSSQGESVGYTNKPEGLNIDAQTVRLEGTTRSAPQGSPGASSGSLATNIGSGAKTASQSAINESEKIWLYMDPSNKIQGPFSIIQLRKWNSNGYFPPSLKIWKASEKQDDSILLTDALAGKFEKDLPPWEPPHVSLSQINKTPLEQSTIADEQTPKSVIAKSFSSSDQRHDYSSTNLGTTMIHSGSQGYYGMQNSHAAYTSQQSLTGSWNATSSQFGVAISPLTPTQPAMQSLSGQNIVAAENMGHLTTGMAPATANAEMVNSDLTSQNQMLSSLPQTDDRLADGIESKSGEDVSHGRVRSSAEAIGPQDAQLGPVQLNAQQLENTRNHMSSIDLSKSMMPSQMMSAPSAASVQPSLTTTARSDNQSSGWAVPAQMANTPGQSQITGNLTWGNTPQGDASLGWGMVGQSNMNMPWVASAQGASGYNMGVAMPTQPNAVPNMGWLPNPGNTSMNMIWAATQGQGTPNAAPMMGGQMQGVPMAPWGGVAAGSANSYPAWGNQQAGNMNQNVGWSAPVQGNPGQANNNMNWNAPNGNPNWNNQQRENGGRHSGHRGAFSGGDSGGRSWKSRSGGDGGSRGHSRFSHSTNTEGYPSRTDRHYDRQNSGNERRYENHNERNGRQFDRQPSDNERNHDRPDGRHGGRDDDRQADRSESRELR

SEQ ID NO: 61181 - protein, 133 aa, Zea Mays
MSSPQAVNKYGLASEEEEEGEASQPASQDVQRAAAAAAGHVLLRALPEEARGEGLPLCLHLHGAVLLLLLRDLRVLPRLPLLLLRLARLQLRGRSRRRWRSPPPLLPYPSDDDDDDDDSVSVACLLLVWLWQT

SEQ ID NO: 61182 - protein, 400 aa, Zea Mays
MTDGIRHIFGMEYRPIKDLTVLAPAGLKIIVRNVHTRRGLLMLVPEAVEILGGVVDELEAARARLVSEVNKPPRGKSKQGGLSLSSRATRAAWPCSTDITNGVAQGISMQRAVNSSYPTGSGNAFQVGGATETVVEELVSPLVANRVQEINMQGSYASLTRETTETSMHTTHEYDPTHITEKSTGTVMEERPDPPILANSVHEQMQRVQPANGAQSSNVGKINQMEQSFILSGENEKPFTYIYSMLIDWGRQQDTKAYIQGKIKGLITSVKKFQYKQRTKYELYVYIDDGSFISEAFIDSDIVNNMLGLSPGEVTAALAGELEFASPSEVKETLKGFQKFLVKFEGMMLIELNKNSPVPVVRELNEGCSSSTAWLLLGRLKTISSQKKTIQTQDIMDTTP

SEQ ID NO: 61183 - protein, 875 aa, Zea Mays
MEKGGRSTDVSNKRHTNQITSQVKKGKKSKVGSVGMPTVDATGEKDHMYSENAAKQDTVSTKKEIAHEPSVQQMSNIVYQGDSNVVENPSGDGKKKKKRRRHSESLKGMNPSQDLTSSSGFVTNKNSIQCTDAAPIDAKQTTQGIIEGETVNEHMKLSRSLDVAATNIVDGVLADLRPKDSLSKDLDEDLLPGQTHLGSNQNGLEVPESIAVKVGSVTAALPPKCPAAVHFASPVSSPRQKKSKGKKSKVLSTMTDSSHQSSGVSEEDANRELTESDSLRFADKTSDPEDIVTGNVVAQADDKRKTTKRQRKKGSVKQVCDTLALKETNDAEENLVQGGYVVDTPLSTVGEVEQKGKSSQIPTPKIRKTNCSTHGLDSHTTKDNQGVYVTDIIETHDNENAAGTPTLHEVQKYAMVLKSANTNSQKQRKTSSNSELQSQDCALEHGFTADLVNGRTEREVSTTSSASAVKPDYHTVFHRANDGINFLDHFSCSNMNDDPSIAAESKQNNEDEPLREMKNKKKKWKQGTSSIEPNDILESFPSEKASLTGHFGTSKAIVSSVAKESMNIENENVNDGKEKKRKGKANMEVPTAEKDNSNCDNQGIDISTQESLISFVQNERTGQDNGKESNSKVTQNASIMQHGREDPTWNHTPEKNLHQSVDDDQNKLLTEKDHAHISKEVGKFTSQPKPHAKIRKPDEFTIKGKVAPNPKPVSNLMKDFSTSPGASSDSTEGMPQSANRYKVSVQKVPSKMYQETSGNSKKASRKIVSGAISNDSIREGCGDELDTTTVMEGSSDSSSTSADSGISSTAYDESEASDDDGAISLSQKSLKGGLHISSILRGSRSYKKARKKLEELLDDDDTIVPDSQPTDGLRG

SEQ ID NO: 61184 - protein, 423 aa, Zea Mays
MQHGSGDYASSAPSGHYYQHQYAAPGSNPYPIATDATAPGAVSGGYAPAPSYSLGGGYPDQPPSAPVYSQAPSAPAYSQAPSAPAYTQPPPQPQHAPGYSPYNTNLNTYPTEAYYTYTPPSTQTAAPPPAEANSPALPYDAPYYGGGYQPPAAGYDNDDYLNEGAYAYSAGGGSEPYGARGTAPARSGSALFDDYGRSISAPSDDYGRSISAPSGWEEQQPWGSGGGGGGSGSYGVIAKALPKAETREDASGGAQKFRVKLLPEGAGNSTDVLCQIGLDGIRMLDPSTSRTLRIYPLDSLTRWEVLDATIFAFWAKTSVDIEPKRIRLKSSSYTSNTMLDTVTAATVQFKEIGADARSRGAIETGKPLVQSNEKKKGFDWMFTKPVDEVKDHWVPDEVAKKCHSCAVDFSPFNRRPGKDCSDG

SEQ ID NO: 61185 - protein, 114 aa, Zea Mays
MLLLQGVILMSTVEGLVWIMQEAPQVPHQEDQANWLEGSYQKCSGGLLISLESGNSLTFQLDKRGYKSPEDYPGTWNLMSQASCALDHLCYPIMFFIIIYSCIGLILMGPNRSP

SEQ ID NO: 61186 - protein, 426 aa, Zea Mays
MEIQTSGKPIDVLMEKVLSMNILSSDYFKELYRLKTYHEVIDEIYNTVKHVEPWMTGNCRGPSTAFCLLYKFFTMKLTVKQMHGLLKHPDSPHIRAIGFLYLRYVADPKVLWMWYEPYLRDDEEFSPGSNGRKTTMGVYVRDLILGQYYFDSLLPRIPLPVTRQITANLEKMKLPTKLSGATGDSSRQGSEDTARRPPSVKASLSVSFGQRAPHRASTRDSSPVRRTVTRDGHRSSYSPSRRSGSREGPDHDRSDRELDHSSRDRERARDRSNRDRYHSSRDLDRDKDARDYHRHERDSRDREYYRSRHSEERRDDRRDHESSRHRRSSSRHRSRSRSRSRSRSRSRRSRSRSTSRRSLNEQRSSPFRDANKEKAATVSSNLAKLKDLYGDITAKKEDSDAEKLHRDSCAEEVIRLGGPRWSQHGN

SEQ ID NO: 61187 - protein, 251 aa, Zea Mays
MEASVAAAGGGGGSAATRSSPAAVQATNDDAAASKLSCVNKGYMKDDYVRFFVRRPTRRAPIINRGYYARWSVLRTLLHQFLNAGKNSNNDKPKQILSLGAGFDTTFFQLQDEGMAPHCYVELDFKEVTSKKAAIINHYSEMKEKLGSEASISIEKGEVISTHYKLFSADIRDIPKLDSVIRMAEMDPSLPTFIIAECVLIYLDPTATGAIVSWASQKFSTAVFFLYEQIHPDDAFGEQMIRNLEVHLKTW

SEQ ID NO: 61188 - protein, 836 aa, Zea Mays
MLCDQCPEMSATYNWVHTETQLEHLARLLGEERAFAVDTEQHSIRSFLGYTALMQISTQNEDYLIDTIALHDVMGILRPVFANSSICKIFHGADNDILWLQRDFHIYVVNMFDTAKACEILLKPQKSLAYLLEVYCEVTTDKTMQREDWRLRPLTPEMIEYARTDAHYLLYIANCLASELHAKACDTSSDKINFFFEASHRSNMVCMQLYSKEIESPPGASSATSILSRNLQTHGFDSKKSSEVKDLVWKFCAWRDLMARMHDESLRYVLPDQAIAALAVSLPKGPTEVFAVIAETDLSISSMYPSLSSPSPLVVAHVKELCYLLDDITTSMDSIFKSLLEKYKDPSGLCRLSVYNYNLITHLSLKQTSMFSVAPSGKKLTALPNKKVSRDLFIKKFSCKSPVYHNCRIYASDGRLLCYCDRKKLEWYIQRNLAKLIENSPPAIMLLFEPKGRPEDEDNEFYIQSKKNICVGCGEKSHYIRYRIIPSCYRMHFPEHLKSHRSHDIVLLCVDCHEIAHSAAEKYKRRIAEEFGIPLFVQKIMNSGDISLITNTSVSEDKLNGTGVSPLQLRTAAMALLRHGSTMPLKRCEELMQIVKSYYGGRDVTPEDLEMALLVGMSPHERRRLEKKKGYSFRAQAQTIIRKSSSNTISEDSGHGSENCHALSARFPEVGTGSNGQQEFDETGNQNQLENLTLSQGSSSLPVSMEDTTSDHDTVTLETDTEQQARGACTPGNSHDDKEQSICDNSSQVISKNAEKISLLGHGHHGKQVVELLFSNGGEEFVNQFCQRWRQIFVEAVHPRYLPSGWNINHSGRRDFGDFSVYKPPRKDPQSATARD

SEQ ID NO: 61189 - protein, 227 aa, Zea Mays
MAELVKLYRHSHLDGRLPAYDGRKSLYTAGALPFASKTFEITLQDEEDSLGGGQRRQRVFRVTIKFAARADLHHLAMFLAGRQPDAPQEALQVLDIVLREMPTAKYCPVGRSFYSPKLGRPQQLGEGLETWRGFYQSIRPTQMGLSLNIDMSSTAFFEALPVIDFVSQLLNRDISVRPLSDSDRVKIKKALRGVKVEVTHRGNMRRKYRISGLTPQATRELSYVHVS

SEQ ID NO: 61190 - protein, 526 aa, Zea Mays
MRRPIARGEPKVQTLALAPPSAAAPTKMGAHRRQPSSHRRVAGALTLLAASALALLLLASRRVPPTYGVIIDAGSTGSRVHVLAYRSTAGLPQLDWARMASMKATPGLSSFAADPRGAGLSLAPLLEFARRRVPRESWGETEVRLMATAGLRLLDSAVAESILQSCREVLRGSGFQFQDEWATVISGAEEGIYAWVAANYALGTLGGDPNDTTGIIELGGASIQVTLVTGEPVPPKFSHMLKFGDVSYNLYSHSFLHLGLNVAYESLHDLLSSPGLRSMATHLISQAKYKDPCTPRGFTRIAGSAKLPVGVLEPKVEYRPFAHSAGNFSECRSAALTLLQKGNEGCTYHECRLGAAFVPELEGKFLATENFYHTSKFFGLSSKPFLSDLMVAGEKFCHGDWSKIKNKYSSFDDGQLLLFCFSSAYIIALLHDTLKMPLDHKRIDVVNQIHGVPVDWALGAFIVQTTMNRTDIVHSKVEKTSSEDDLRYGERQVHHNKGQPMSRAHQRWEWVDFLQRSTIDHVCRFS

SEQ ID NO: 61191 - protein, 234 aa, Zea Mays
MLTEIYDTCSCLLMMPVWCQGYLLETGWGWKRLVPYRPGYVEWHVFKKYLGDYFDHNREAFLCAEQKPDPFGWIIAKKSALIAAAKLCLKMEKALLRYCASFLTPDDKRLILRIKDQAKQMIQSEGDQSLVVTICLEVCLLQTTPNCCQTSARDSSPPRVSLSMSLSACNTWRTGPENFLRMSSEPCSPPVRCSVPAAHLPLLLPTSPPPSLNSKPSTSRSYCRGRSRGRDDER

SEQ ID NO: 61192 - protein, 523 aa, Zea Mays
MAVAPPLSTHVSRTLTSNLHLWPRTHGGVAHARTRALIPTPAAACAFRFSFRVRATASGSKLPPYPLPDVFPYITAEWEAVAKGWACAAVAVYCLSRAVPAAGRLPRALAGGGGGGGAAVVVAARGGVALAAFASARAAATYAQQAFLWEAALQAAGRLRERAFERLLERDLEFFEGRGGVAAGDIAHRITDEADDVADALFSVLNVIPCMCFAIVNLGKRLRQISKEAHLSLAMLASYLNDVLPSMLTVKANNGELKEIMRFQKLARADLKNNLSKKKMKALIPQAVRATYIGGLLVLCAGSIVVSGSSFDAEEFLSFLTALALVVEPIQDAGKAYNEYKQGQPALERIFDLMRFNPKVTDKPRAIHLQSINGDIKFHDVTFRYVDDMPPVADGVNLHIRPGEIIALVGPSGGGKTTLAKLLLRLYHPQKGYILLDNHDIQDIQSQCLRTHIAFVSQDTMLFSGTIAENIAYRDPVGDIDMNRVEYAAKIANAEEFIKMLPEGYNSNVGQRGSSLSGGQKQR

SEQ ID NO: 61193 - protein, 389 aa, Zea Mays
MAAMALPPLSIRGDLGIISTAVGRYTPSLLKSFIQMGPQGALGATKLLRPFKEIVDSLELKNPFVRNWIDLLCFLLAGVKSDGALSAEMVYMFAEWYKPGCLLEYPLGGTGAIIDALVSGIEKFGGRLALRSHVEKILIENGRAVGVKLQSGQVIRAKKAVVSNASMWDTLDLLPPDAVPKSYEDRVKATPQCESFMHLHLGFDAENAREDLGIHHIVVDDWNKGVDGEQNVVLISVPSVLSKDLAPPGKHILHAYTPGTEPFSLWEGLDRKSAEYRRLKEERSEVMWKAVELALGPKFSREKCDVKLVGTPLTHRRFLRRNRGTYGPAIKAGEATFPGQATPIPQLFCCGDSTFPGIGVPAVAASGAIVANTLVPVSQHSELLDAVGI

SEQ ID NO: 61194 - protein, 130 aa, Zea Mays
MGQPTNVQRQSPLFPHFSAHTCAAAAEHLPDPNSIRAQAPSAGDGSRIARRPPHVPEATTGTTRPRGATRHLRRNAPSSGARRHRGSGTRCRHRGTLARSSGRSEANGHGFAWCGWIQVEWEVIGWCHYY

SEQ ID NO: 61195 - protein, 322 aa, Zea Mays
MDPAAAALGAVPAAGAPPPGAAAGDQQAAPRVERLSAGVQQQLNLEGMRARAVGLYKAISRILEDFDVIIRTNPSASPKWQDVLGQFSMVSMELFNIVEDIKNVSKVFVVYPRNVNAENATILPVMLSSKLLPEMEVEETTKREQLLSGITNLPVPTQIEKLKVRIDMIGSACETAEKVIAECRKSYGLGSRQGTNLGPTLDKAQAAKIQEQEGLLRAAVNYGEGLRVPGDQRHPQSLPIHLIEVLPLGDGAQNFGDSSVIPKICQHLHLIVSTAREIRFRHPEDSYLEGLRHHLEPQEPLISRMCPLLQCHMLTLLGQAPI

SEQ ID NO: 61196 - protein, 991 aa, Zea Mays
MPAPDRATAGGGAGGHFRGHAHLTNCIHLRHHHAHAHAGAGGASSSGRRRSPASASLMRDLLALQRSRSLRDPSTRRSVESSRVAADPDDGTDDDDDDDADLPAKSRRSAGALKTLLDQLAENPHPKPGRRPPRRFKRRAGRRAAAASKPPDRAAALSVNSSSQEAVCGNKYLFHGGGGGDDDGDGVVELQQHLPQDSRNVCGIPWNWSRLHHRGKSILDMAGRSLSCGLSDSKSAAGRKSEAPAASGVRPLFPVKSERLASSTSSDSDALPLLVEEAATSGARKRIGVISSGSYSGELGIFSNQTSEMDSDLLSESQSGHKSLASRSQHGRGRHRSLTQKFAPKTFKDVVGQSLVVQALSNAILRRKIGLVYVFYGPHGTGKTSCARVFAKALNCLSSEHPRPCDSCTSCIAHNLGKSRSLMEIGPVGNIDMEGIVDVLDNVMLSPAPSHYRVFIFDDCDTLPADTWSAISKVVDRAPRRVVFILVSPNLELPHIILSRCQKFFFPKLRESDIVNTLQWICTSESLDVDKDAMKLIASRSDGSLRDAEMTLDQLSLLGQRISLSLVQELVGLVSDDKLVDLLDLALSADMVNTVKTLRDITETGVEPLALMSQLATIITDILAGSYAFTRERPRRKFFKRPTLSKEDMEKLRQALKTLSEAEKQLRVSSDKTTWLTAALLQLAPDKQYLLPSSSTSTSLNHGVLVGPFPDRGVGRAPAVENKGNLAGTSYGEKRTVEHTENGHVLSTSSVRANEGTKLRKAENEMVWQAVLESIQSDTLRKMMAKEARLNSISLGTEPTVQLIISSHISHTPSMFPYPENDSTLRRSFTKHSPLSSGEGEIIEVGPSRMHWHAQTNNDVLDVNERRKENTWEEETSSSPNQESVTNPKGRNGNRQNRQNSIVRGKVSLAHVIGRAEACSQRGGWSRRKAISIAEKLEQENLRMEPKSSLLCWRTSRTRRKLSSIKVRNRRSRTISRLILCGRCISTKSPR

SEQ ID NO: 61197 - protein, 54 aa, Zea Mays
MDRRSLPPPQLKVHRSLRGSATSSSAAVNRRIPEMQFPRPWSSRQYQLPKQPLQ

SEQ ID NO: 61198 - protein, 324 aa, Zea Mays
MMVEVFLNDDHLIRHVVKFNLLKPIIDVFVDNGERYNMLHSGVLELLEYIRKENIKTLIIYAIESFWDELAIFEHFGSIQAFKLKYQQYLESAEPRLNASVPDMRKKAEQRGLEKEEEDYFNEDSDEEDSGSGRRAKHAQNQNNKPKSKVPNGSEADDTDGASRPKSAGLVDYDDDDDEDFNPPPKEPSRPAEDDVPLNISPLKRKPVNAVDGKHSDGEGRRRQKIETRISCAKIAAVTSTAIKHTDLQNKYASHLLTSATPSTEANGIFSEHGTNYEEQQHPMENTETSRQTGGDCIKDVGSMSPEKAVNTTNTSDSEPYSVR

SEQ ID NO: 61199 - protein, 244 aa, Zea Mays
MASSRVIPSSSPSHTASDLARLAQAASRPGGGGSGPGSMNVEELLRGIYSDMPTPAPPASEPGRPMPPAPAPVSATRKTAEEVWKEITGGGGSGEAVAPVAAQAVAPDGGAGTGGPEVTLEDFLARESAVKEDEVKISVPPAPVMGLPGGAEGVSVPGGGGGRERKRQLVSTVDRARSAIQREKRMIKNRESAARSRERKQAYIAELEYMVTRLAEEKAELLRQQEEQFQTRLEEFLQKWKENI

SEQ ID NO: 61200 - protein, 320 aa, Zea Mays
MYILCNEEPLWMSKCLSIGGPLEYKVSWKKTALCRLGLCSENKEIWQKPRQFDGFNSLYLYRRWYRCFTTLNSFSFDDGHVERKDDFLLDQFRSQYDGKCPVLVTKLAETWPARTKWTLQQLTKDFGEVPFRISQRSPQKITMKLKDYVSYMELQHDEDPLYIFDDKFGESAPTLLEDYSVPHLFQEDFFDILDYDQRPAFRWLIIGPERSGASWHVDPGLTSAWNTLLCGRKRWALYPPGRVPGGVTVHVNDEDGDVDIETPTSLQVFKRVWRIKISHMILIFCHNSLRKKGTIILLSGVQLIQLGREKQENGCEGFGF

SEQ ID NO: 61201 - protein, 882 aa, Zea Mays
MHNSIPAMAVSSPPPPRLHLSLHLRKPIQNSPPSGKKARPAPTAETLRRRFLRRGVSPTPKILHTLRKKEALKALRRARKDTAAAATASRNPCDEEETRFRAAAAEYHALAGRPWDAGTRGMAPPRGLDGEEGGLEGLREMLAARRGDGFRWLLDDDIEAEAAERKQQRRPGAGWDVGTEDEERRIQLLVSRTSIQLVLESNDPTLPQPEDRISGVEKGLAGLQPNCGPPWNKKRLNGDYLSFRDWRLTRVMKRADIIYSEDNLLRILDGLEARGNWRQALSIIEWVYNENSYRHRKSRFVYTKLLSILGKSLRATEALHIFTIMRGDAQIYPDMPAYHCIAVTLGRAGLLKELIKIIEYMRQKPSKLVMKMRRKDWDPSLEPDVLVYNSVLNACVLSQQWKGVFWVFQQMRIGGLPPTGATYGLAMEVMLKAKKYDFVQKFYEKMQKNGVPPRAITYKVLVRSFWEQDKINEAVEAVNDMEQRGVVGAASVYYELACCLCNNGRWRDAMLQVEKLKQLPLTKPLEYAFTGMILASFNGGYIYDCISIFELMKDHCMPNIGTVNVMLKVYGHCDMFGKAKDLFETTKACFLNSQTYIHEHSSFKADTYTYNSMLEASASAQQWEYFEYVYREMALSHHCLDQSKYSWLLIKACRAGKPYLLEHALDSILERGEIPDVQLITESICQSIAHRDYGRTLQLLNIMTQASIKIKEVEWDYLLQQNMHQFSIDALEGLIKYLSTNGTTNADPAVDLVRALQSQCRDDTSTQQFELSFHGSGNKYSCSSLAELDQLTCKNLCTDIILDVPGSDREMPQLGVSALMCRDISLNGQRVENKHELSDLGQRGPQVSAIDKVLDSMNSYGDNSYGEMPSASKILELWEHER

SEQ ID NO: 61202 - protein, 388 aa, Zea Mays
MPSRSPRQSARPPLPTAAEPPPGLFPAREDLVRLLAVIFIAAAAAAACSVLNRRPEPFCDSPQWPDDYADDSCQPCPPNGRCVDGELECVQGFKRHGKACIEDGLLIQRANKISQLLQLRICDQHARALCGHSAEILFQEHEVSNAIDELLSKIPAGLTEDGLQLVKTRVLESAGGFFDTTFTSSKVKVYKCPELVAELHMPMGCRVRQWIFRNTTSVAIFCILFAALLWILWIIYKRRTLSNRAEQIYEQVCEILEDNAVNAEIDNSNSEVWVVTSWLRDHLLVPQERKNAFLWKKVEELIREDSRIDQYPKVIKGESKVVYEWQASGSLSAKIKKVQGARAKSRTGVGVIKFGEEMSASSLGEVREQGSCDLTREERSKDKVTCSD

SEQ ID NO: 61203 - protein, 359 aa, Zea Mays
MDRGERLGRALDAFGGNLWALVDAALDAAARDRPDELRARRDSIVERLYAAAAGCSNCAGRPPSVAALAAAGLEEEDGEEAAPASPWAEADAQAGGAEAQTEVLGAGEPDLESKIVAIRDFLEDPNQPENELVSLLQNLADMDVTYNALQETDIGRQVNGLRKHPSAEVRRLVKQLIRKWKEIVDDWVRLDNSGGDGSASVMTDGDSPHKIQGRSHQSPRVSGFQYSPSPQRFNGSTSEMANNGFESTMDAKRRASPVPAHHNSRQMNNNHHSTTITTSTSSAPAFSVQKVTREQKQSLVDLDRLDSARKRLQENYQEAQNAKKQRTIQVMDINDIPKPKSRNAFIRKSGSGGLPARHR

SEQ ID NO: 61204 - protein, 1091 aa, Zea Mays
MDPRRLPILLSLLLAFFSAVVASDEIHGCGGVVEASSGLAKSRKASDSKLDYSDITVELCTVDGLVKESTQCAPNGYYFIPVYDKGSFMVRVKGPKGWSWKPETVPVIIDHNGCNGNADINFQFTGFMISGKVVGAVGGKSCSKRGGPAGVKIELMTDSDELIASALTSSSGEYSFTNIIPGRYILRASHPDYEIELRGSPEIDLRFGNAVADDVFFVSGYDIYGTVVAQGNPIVGVHLYLYSNDVTKVPCPQGFSDAPKEGALCHAISGADGKFTFRSLPCGSYELLPYYKGENTVFDISPSSLSVSVEHSHLTIPQKFQVTSKKYTITAEKDHYKFNRLEDFMILPNLASIDDIRSVRYDVCGIVRTVTLNSKAMVTLTHGPENVKPQRKLVGENGHFCFEVPAGEYQLSALPVDSERSSSLMFSPGSISVNVNSPLLDLEFSQSQVNVHGKVSCKQQCSQNILVSLVRLAGGVEQEKKTTTLEQDNVNFVFKKVFPGKYRVEVKNSLPEGLAKDDWCWDQSILNIDVGTDDVRDIVFVQKGYWIELVSTHDTNAYIQQPDSSRLDLLIKKGSQRICVETSGQHEIHLTNPCISFGTSSVLFDTANLMPIHINAKKYLVKGEIHVDMSSIQENIDSKDIVVDILKSDGSFIEKISTSLVLGKDNQNDFTAFEYSIWADLGEDFIFVPHDSSIGRNKVLFYPARQQYSVSMNGCQDTVPLITARTGLYLEGSVLPATSDVDIKILAAGKSNYAHLNKGDVATEAKTDSEGSFFAGPLYDDIVYKVEASKDGYHLKQTGPYTFSCQKLGQILVRIYGENSELLPSVLLSLSGEKGYRNNSISSSGGTFTFDNLFPGSFYLRPLLKEYKFNPSAVAIDLNSGESREAEFRATRVAYSAMGSVTLLTGQPKEGVFVEARSESTGFYEEATTDSFGRFRLRGLVPGSTYSIRVAAKDNLQFAAVERASPEYLSVNVGHEDMTGIDFVVFERPEVTILSGHVEGDGIDTLHPHLSVEIRSATDSSRVEAVLPLPLSYYFEVRDLPKGKHLVQLRSGLPSHTHRFESELVEVDLEKDPQIHVGPLKYKTEERHQKN

SEQ ID NO: 61205 - protein, 289 aa, Zea Mays
MDTDLHHIIRSNQELSEEHSQYFMYQILRGLKYIHSANVIHRDLKPSNLLVNANCDLKICDFGLARPSSESDMMTEYVVTRWYRAPELLLNSTDYSAAIDVWSVGCIFMELINRQPLFPGRDHMHQMRLITEARARRTHHILPIIQFLLLLLLLMNIAGTRQVIGTPTDDELGFIRNEDARKYMRHLPQFPRRPFVSLFPRMQPVALDLIERMLTFNPLQRITGQSARAYYSLACSFSSLASSLHVQLATGWLLNPELRRTCSLVGVGSHCGTSMWGHALAMQCIVRSM

SEQ ID NO: 61206 - protein, 957 aa, Zea Mays
MASTGEHLRSIEDSELARKWLERMRSSGHGVDHIVIGQAYQTRQRRTPPHELVLLKQVTSNSAVRAGEENAASLYVLSVIDSLKKRITADRLTYIKNRIGENKTNISSYTQRTYNLSKNRQISTSKGTDSASNLLTKRQDDALCTLHSLDIIPVDKDGGTFQDESPFSSSNVMFGGNLGPKNAIIRPIKLPEVPKLPPYTTWIFLDRNQRMTEDQSVLGRRRIYYDTSCGEALICSDSEDEAIEDEEEKKEFKHSEDHIIRMTVQECGMSDAVLQTLARHMERAADDIKARYEILHGEKTKDSCKKGTEHNVKVEDLYCDKDLDAALDSFDNLFCRRCLVFDCKLHGCSQDLVFPTEKQPAWSGVDDSVPCGIHCHKLASEPDAAAGADHMLFDVEEPTHSSDNVMNQPGSNRKKNGSSGRKTKSQQSESSSTARVISESSDSEVHPISNKSPQHSPSPSKVKIGPKGGIRKITNRRIAERILMSVKKGQREMASSDSNFVSGYLLARDMKLRSDTRNGNKELIVSSQQSSPSTRSSKKKSTPQIGNSSAFAEAHNDSTEEANNRHSATDGYDSSRKEEFVNENLCKQEVYLRSWKAIEQGLLVKGLEIFGRNSCLIARNLLGGMKTCKDVFQYMNYIENNSASGALSGVDSLVKGYIKGTELRTRSRYFRRRGKVRRLKYTWKSAGYNFKRITERKDQPCRQYNPCGCQSTCGKQCPCLSNGTCCEKYCGCPKICKNRFRGCHCAKSQCRSRQCPCFAADRECDPDVCRNCWVGCGDGTLGVPNQRGDNYECRNMKLLLKQQQRVLLGRSDVSGWGAFLKNSVSKHEYLGEYTGELISHKEADKRGKIYDRENSSFLFNLNNEYVLDAYRMGDKLKFANHAPDPNCYAKVIMVTGDHRVGIFAKERILAGEELFYDYRYEPDRAPAWARKPEASGAKDDGQPFNGRAKKLAQNNRG

SEQ ID NO: 61207 - protein, 809 aa, Zea Mays
MGADTLLRSGGEPGSIERRRRGEYLGFLGTRAPAHRHRARGHCSLPFSSVAATAEASTTRDQLAAAPAGADGLHALAEQVVQLVLADGSGASSPRVAFADGVFVDSSLKLKPAFEEVAVGKYRADTQSVDFQKKVDLIPFPPSSRTLVSCYRSSYSYDSGHINQNLSRKCEALVVSGLAEYGDEIDGIAPADIMKIQPILQEDLKLDFSKSRTNKTGNAEITKRRRMVVIDEVLSQDETPFLYSLVFGEGVVNDTTSVVLFNAIQNFDPGNISGAKLLNFISSFLYLFGSSTILGVASGLLSAYTIKKLYFGRHSTYREVSIMMLMAYLSYMLAELLDLSGILTVFFCGVVMSHYTWHNVTESSRVTTKHAFATLSFISETFLFLYVGMDALDIEKWKIVGQTYSPVKSIALSSTILALVLVSRAAFVFPLSFLSNLTKKTPNGKISFRQQVIVWWAGLMRGVVSIALAYNKAAVPHKFVWCRCCLIFGGACRVFDNVSEVLWQCEAFWEGHHHAQLEVVRDHNSERGEAKNEDSRTLQFNYGSFKHKALDKFLTKKVVAVCECGLDYDRLQFCPTDMQKKYFEKQFELAEAVKLPIFLHMCAAGEDFYEIMTQNLHRFPGGVTHSFTDSTEDQDRLLSFEKMFIGVNGSSLKTNRNLEVLRGIPVERLMMETYSPYCDIINTHAGSQYVKSVWPSKKKEKYEPDSTVKGRNEPCLVRFKRDSGETPFSVGQAINSPKLVYFEKQFELAEAVKLPMFLHMRAVGEDLCEIMTQNLHRFPGGVTHSFTDSAEDRDRLLSFEKMFIGKFLR

SEQ ID NO: 61208 - protein, 394 aa, Zea Mays
MLEKQSLSDFIDHINSDKAVIVSVSPQSRASLAAFFGLSQSQVLRKLTALFKSIGVKAVFDTSSSRDLSLIEACNEFVSRYQKNHSCSGQEAGANLPMISSACPGWICYAEKTLGSYILPYISSVKSPQQAIGAAIKHHVVDKLGLKPYDVYHVTVMPCYDKKLEAVRDDFTFSVDGKEVKEVDSVLTTGEVLDLIQSKSIDFKTVEESSLDRLLTNVDEEGHLYGVSGGSGGYAETVFRYGANVIYKREIEGPLDFRILRNSDFREITLEVEGKPVLKFALCYGFRNLQNIVRKIKMGKCEYHFIEVMACPSGCLNGGGQLKPVQGQSAKELIQQLESVYTQDISISDPFSNPIAKKLYDEWLGQPGSENAKKYLHTEYHPVVKSVASQLQNW

SEQ ID NO: 61209 - protein, 160 aa, Zea Mays
MASLASTLEKLTRGNKRAEKIRRYIVVESIYQNSGQIAPLDEIVRLKEKYRFRVILEESHSFGVLGKSGRGLAEHYGVPVSVWPQLFLMFHHNAPPVVSDRGALLPSSQTRPNCLVKCLGQSGHQEWSHGTSAGHYKKLINEPFLAGDISPSRLSTSRRR

SEQ ID NO: 61210 - protein, 272 aa, Zea Mays
MKVYVIDFGLAKRYRDSATNRHIPYRENKNLTGTARYASRNTHLGIEQSRRDDLESIGYVLLYFLRGSLPWQGLKAATKKQKYDKISEKKLSTPIEALCKSHPVEFASYFHYCHSLTFDQRPDYSFLRHVFRELFEREGYQFDYVYDWTLLKCKQSQKAKVQQGCSHDAGVSSRPVATNVDKHQVGVARPINASGLLEAEQRPAIRMQLNSRSNNLHPERLGVSASHNNVLLQSTSLDNADAPMDHATHSKAQGSIDPHTRGSYSPGPSNRT

SEQ ID NO: 61211 - protein, 483 aa, Zea Mays
MRYDDRYTPLLERAGLDVVSFQVRRGLPTINIAAITALVDRWRPETHTFHLPCGEMTVTLRDSQKQLGLSIRGRPVTGQAAPGGWRQRVEAFLGREVPTDTPGSHTSGVSLAWLRQSFGECPAAADDQTVSYYCRAWVLHLFGSVLFPDATGDSASWMFLPCLTDWDMAGGYSWASAVLSFLYRQLCEACRRTAKNASLGGCVYLLQLWMWSHLPVGRPIEFAPRPWFDVVGLRLRPTAAYRWDQVQAPFARHQRAYVEYSNELDALTPSMVSWQPYDEPPLPHIQLSSACTTDEDIYLLRCPLICFYAVEYHLPHRVARQFGLRQEFPVEPFSTSVELHKFDRQKQKKITDFEAHHQVYIDEWDQMHDLLYQSDQSHTNYNFREYISWYVGVTRCKLKGQWTSADYAELESSDDEDTSYDLVTRHGTHVEAAPILDRVGNSMMQSVVDIEHFSKTTSDDRTLAFLSAITSPTLCCCSLWLQD

SEQ ID NO: 61212 - protein, 1674 aa, Zea Mays
MDRGTGPGAEVLSPGEAEWPPELRLPPPPPPVPEPPGPHPPAPDSASMRMPAPHLHLQLPPAAAARKDPSPPRHGEGFDDQLFLGSLMGAAAPLQHQHHHQQQPAAAAPVKRKRGRPPKNRDGAAPVPAPVKPVSKKDEEVVCFICFDGGNLVVCDRRGCPKVYHPACIKRDESFFRCRVKWDCGWHICSSCEKAVQYMCYTCTYSVCKGCVKQGKFFGVRGSKGFCDTCYGTILLIESKDDGAKVGVDFDDKNSWEYLFKLYWLDLKGKHLLTIEELKSAKNYWTVPTTAGRREKEESSDELYDASNDQDATFDISSKKQRQNNSSGKRGQKRKKDGGITSRKRGISINSAGSLPNGSTGEGMSLAGDTKWASSELLEFIGHMRNGDSSYISQFDVQVLLLEYIKQNNLSDPRRKSQIICDARLSNLFRKPRVGHFEMLKLLEMHYLVKQVPTLNADSERAFDSYSAQVNHGGYNELSDKLGSDKRRKAHMKIERESTINPEDYAAIDMHNINLIYLRRSVMEDLIDEVAVFSDKIAGAFVRIRISGLGNKQDMYRLVKVLGTHKVAERYTVGKKTTDYALEISNLEKKEIITMDTISNQDFTEEECKRLRQSMKFGLTARLKVRDVYDKAKIFQSLQFKDWLENEKQRLSRLRDRASETGRRKELRECVEKLQLLNTPEETERMINEAPEVHVDPQMDPSYESAEEPDYKKAVDWTMHRNGPDLLFPGRKGTKLNSVENHTQNSLDASGHISSLPTEDVDHRLGAGSNINLNNMAPEPASLGVLSNDTEPEKVWHYKDPNGNVQGPFTLLQLSNWASFFPRDLRIWLTFESEENSLLLTEVLPKQQKDFIQPSTVTTSDKSIWAGSGQDRINSNANNSSSPSLSAECYDPTKYLKPLGGTSPSRSLKDSHALHEVQNQVNDSSTILSSAGSYVPTSSHDERVSRDRVDEWNSSQDNGGIWNPTMNHSRKSNAQQHPDGFTGKDQMLTESKCSSHMVSVLTPQQSERDPATSLSTTSRPECKTMCRQEGSSWSSATNAGVHDLQLTIALTKPETCSPTNPVEDRDSSSASAVSCQSGAPACIPQPDPTSTCNSSKIEATMDLHKTCQPDTSNESFGRLPEPQSGSLFSLKTLNLESEHPSSTPKLEGKETSMNQSGSTSVAHENLATKTRVRPPTSKIDSLQPLKERSCPTERDSITQLEHLFEENVVKRNNEVVNPVSDAEGIAVSDVLESLTEQDCEKYSTHGADCEKYSTHGAAPLQNLVPASAEEEQPQCSSPIALSPWGEPSYYQGEAVDSALWGVQDGNDMWSMPSPTPGLQPSSEEARADHGDGAFVETLPRQGDEKTEHANSSVSGSGVPEQVKPKASTASGPSLDGSTKALGWQLLGSSLEGSAKASGWKPPALSIEGIANASGSQALYPTQGSTKSSGCQRSSSSPDGSRKASGWQQSSTSPVGSGKAHGWQRSGSFTQGGTKAAGWQPSGSSTDRSAKVDGWQRTSSSPEGNRKASGWHSSGRESSKITYGASENRKSFSSHQATTPTGRHSLARRQGSSDKGAAGWEESLGNTWEASKRQQRNSDKNAGCGEALGSNRTWHPSSGNPSRSSQGNHQHDRHSHGSDSRRGSSNYPRRSDHRHDHGSGGSSRPSSRGQPQRGVCKYYENGHCWKGSKCQYLHR

SEQ ID NO: 61213 - protein, 352 aa, Zea Mays
MARLDVSQWPVVEPLPSYGRGMDLPGSRHRSLINGQNLVDVVITGNNGTIDGQGSTWWNWFRSNKLNYSRPHLVEFVDSEQIVISNITFLNSPAWSIHPVYCSNVVVHSVTIQTSLDAPLNHGIVPDSCSNMCIEDSSISVSHDAISLKSGWDKQGIAFGRPTSDIHISRLDLQSSLGAALAFGSEMSGGISDIHADRLLIHSSSRGVFFKTAPGRGGYIRDTVISDVQMEDVDVAIAFTGDWPSHPDDQFDPAALPVVSHITLKNMTGTRISVAGVLSGIAGDPFTDICLSNINFSLADSASPTSHWSCSNVSGYSELVFPEPCLDLQTQSSDASVCSTLPSFHAAAIAAA

SEQ ID NO: 61214 - protein, 91 aa, Zea Mays
MRQQIHLFWGNMLFERSQVEFKLSVGDWKTNLDASVERFKLAGASESDILTVLKNHFSNVASECEEKKVMTSGTEISQTNDNVEDKCVVET

SEQ ID NO: 61215 - protein, 499 aa, Zea Mays
MESEDDMHDANDSAEDDFYSGGEAGLAASDDGDADYDFADHDSDDSAELISHRQQQNYSILSEVDIQRRQEDDINRVSTVLSISKPEACVLLRNYNWSVSKVHDEWFADEERVRKVVGLPEKHNEMPNDREVTCGICFESCPRGSMSAAACGHPFCSTCWRGYISTAISDGPGCLMLRCPDPSCAAAVGQDMINSLAADDDKEKYGRYLRRSYIEDNRKTKWCPAPGCEYAVEFVMGSGSYDVNCNCSYGFCWNCTEEAHRPVDCATVSKWILKNSAESENMNWILANSKPCPKCKRPIEKNQGCMHITCTPPCKFEFCWLCLGPWSEHGERTGGFYACNRYESARQEGAYDESERRREMAKNSLERYTHYYERWAANQSSRQKALGDLQSLQNDKLERLSDIQSQPESQLKFIVEAWLQIVECRRVLKWTYAYGFYLPEHEHAKRQFFEYLQGEAESGLERLHQCAEKELQIYLDAESPSKDFNDFRTKLAGLTRPFH

SEQ ID NO: 61216 - protein, 141 aa, Zea Mays
MPCPIKCSAARCAPSLTEHNDSRNNGIHASSVYGHDLMKSMSDLQEVVFSSFSKACLLSSCIIYGLPPSCIAEPWASLQRQGKYKEAINYHSMVLNISKVTGEDAGVTEAYGAIADCYTELGELEKAGKFYDKYIARLENE

SEQ ID NO: 61217 - protein, 381 aa, Zea Mays
MWPLSYLPPAPAQQLRAHPGPGSGRGPRPQPCGLPFPDALRTAAAAAAVSLSLIYGNGVGAAFAASAAQPTEVCRNGGAEMVEEVRAEAVTNEQLVEEAWEVVNESFLPDAASRPWSPEMWMQRKQDVLQGTIKSRARAHDIIRKMLASLGDPYTRFLSPSEFSKMSKYDMTGIGLNLREIPDENGSFKLMVLGLLLDGPAYSAGVRQGDELLSVNGIDVKGKSAFDASSMLQGPKETFVTIKVKHGDCGPVESMKVQRQLVTRTPVFYRLEKRENNDSSVGYIHITEFNAVAKKDLVSALKRLQKSGASYFVLDLRDNLGGLVQAGIETAKLFLNKGDTVIYTAGRDRLVQKAIVAESGPMIATPLMLLVNNRTARASEI

SEQ ID NO: 61218 - protein, 50 aa, Zea Mays
MLRCVRERSRSSSLSQLWVAGSLSPCDVIIYLFCTELLLYSKVVTFVSVS

SEQ ID NO: 61219 - protein, 791 aa, Zea Mays
MGRFGHAPSLCLCVPSRRTWWRMPRLGYLNDEEFRSEILDNQGPYCGSSRHIPTELVVVLCHLVRFAKNARSRCDLVTSYPAGRIDAFRAEIPIQILFLPLQLEIKRKLAQRSERVKSVDLHPTEPWIMSSLYSGSVCIWNYQTQTMVKSFEVSELPVRSAKFIAQKQWVVAGADDMFIRVYNYNTMDKVKLFEAHTDYIRCVAVHPTLPYVLSSSDDMLIKLWDWDKGWMCTQIFEGHSHYVMQVTFNPKDTNTFASASLDRTVKIWSLGSPDPNFTLDGHSKGVNCVDYFTGGDRPYLITGSDDQTAKVWDYQTKSCVQTLEGHAHNVSAVCFHPELPIIMTGSEDGTVRLWHSTTYRLENTLNYGLERVWALGYMKGSRRVVIGYDEGTIMIKIGREAPVASMDSSGKIIWAKHNEVQTVNIKAVGADAEIADGERLPLAVKELGSCDLYPQSLRHNPNGRFVAVCGDGEYIIYTALAWRNRSFGSALEIVWSTEGEYAARESTSKIKIYSKNFQERKSIRPAFSGERIYGGVLLAICTNDFICFYDWAECRLIRRIDVNVKNVYWADSGDLVTIASDSSFYILKYNRDLVSSHLDGGASVGEEGVEDAFELLHEINERVRTGLWVGDCFIYNNSSWRLNYCVGGEVTTMFHLDRPMYLLGYLANQSRVYLIDKEFNVVGYTLLLSLIEYKTLVMRGDLEHANIILPSIPKEQHNSVAHFLESRGMLEEALDIATDPNYRFDLAVQLGSLEVAKEIAIEAHSESKWKQLGELAMSTGKDHSAFPTGHK

SEQ ID NO: 61220 - protein, 186 aa, Zea Mays
MPVGTQGTIKGLTTDQLEEIGCQIILGNTYHLELRPGSQLIDDLGGLHKFMNWKRALLTDSGGFQMVSLLHLADITEEGVTFQSPVDGKPMLLTPEESIHIQNNIGADIIMALDDVVKTTITGPRIKEAMYRTIRWIDRCIADMQLVVLLVAKTRIHFGVLLPNALLDCLKINHDMSWVLAIHLIL

SEQ ID NO: 61221 - protein, 374 aa, Zea Mays
MNSMDEINLLRQAQRQHQHHLMVRGIGEEIDLEIGPVDDPSFSGASLVAVTSTHDTVVHADDHKSLLIPCSQPGAADGLAPQQHLSQGEEHDGMLRSPSGHTKKKKKVVKKWREEWADTYKWAYVAVHDTTTRIFCSVCKEYGRKHRRNPYGNEGSRNMQMSALEEHNNSLLHKEALRLQMASKEKLQPPEIEGPVYVKALSKTAASILECVLRRDPHEAEYIQSIQEVVHSLEPVLVKNAQVPWIDDRGEAHVNRGFRVQFSQALGPCRGGLRFHPSMSLSVAKFLAFEHTLKNALSLYKLGGAAGGSDFDPKGKSDNEIMRFCQSFMDELYRYLGPDQDFPAEDIGVGPREMGYLFGQYRRLSGHFQVDWWF

SEQ ID NO: 61222 - protein, 823 aa, Zea Mays
MEPDPVAAGASSSPPPSPAPATSPPWQTRDDDEPGAVDCADPGGDLNPAPPPSLQQVENAAVGSEVEQEEPKKEAMAGVGETLRSFMEEFGDQGEDSIILSPRLKDISTPDRPAALGFLGEKYNNLMERYKKYKKQVVKCSEECEPRYNGLKKKYTDECAERRRLYNELIELRGNIRVFCRCRPLSSDEVNRGCLSVVEIDPSQESELQFVPSEKERKPFKFDHVFGPEDDQEAVFSETVHVVRSVMDGFNVCIFAYGQTGTGKTFTMEGVPENRGVNYRALEELFRTSEKRSASVAYTFSVSILEVYNEKIRDLLDESNDQSKRLDIKQNADGTQEVHGLVEAPVYNIDDVWEKLKFGAQNRSVGSTNSNELSSRSHSLVRVTVRSEHLVTYQRSRSHMWLVDLAGSERIAKTGVEGDRLKESQFINKSLSALGDVISALASKNSHIPYRNSKLTHLLQSSLGGDCKTLMFVQISPSSMDSGETLSSLNFASRVRTVEHGPARKQVDPAESLKFKQMTEKLRHEEKENAQLNQSLQLMQLKYASRENVFRTLNEKVKDAEQACRNYQQRIRELESELGNEKRVSRDSARSSRPPLVPTRQKQPHGRNAPPSGPSRWRLKAPTIHNKENIPVMMNKSNPGDDPNKAVGRARRVSLTPVIRQIPIQPKRRSSIAILPSVREHLSVLNEKRAASRLSQVNMPRRSVATFGLNLGPGTPLAGHGGPVDATPDGAKFRRFDLGSSSSKFTSPPPNVTPQRKMGMAPAGGPPNAAKLCFSIQKRVTPAHVRAKPGMGIFDPALRENMVVGRTGNALRVLNGKRRQSVV

SEQ ID NO: 61223 - protein, 67 aa, Zea Mays
MARAPSMPAATAVGIVVVMLLAAGFRGAEAGRPDGAGNSLRRVGGPWHPAPGTLRWALPECYCKDVG

SEQ ID NO: 61224 - protein, 114 aa, Zea Mays
MSTVCFNPKEMVSEEHLKSTVGVDAVVKPAVAADRGEAEGRTGTARPFLLQILTPNSTSTMQRQRRRNEALAFSSTNLFTQDLICCFVGTNIENNWKPTLLLCPPWSWVCSVVF

SEQ ID NO: 61225 - protein, 888 aa, Zea Mays
MGRRGHGGSASQDDDGVGCAWGLMRMLYFRRDPKLLLDAKQLSGRHAFREVSERGHSAKRSKDFDEIEEDGKPTVKNLMEDELGKVKLLKKNPNDEIQRRLVDLGNDVSLGRSSEHTNKSIDRSYHQAGISTPSIPPMDSGVLNYAEEYDLESVLMNFLGEIYSCHDECPHSDCKNKNELCPSLKSLIHKKVNELNNLPRNIGCAQSQEGNDAKLSDQNNLSNTMAARSKQFKDALEILGSNNELFMKLLQKPNQHIVDSIQKHENSKVAAGLEPNKIHGQTNFLVGRGGSRQHPLATKEQAKERKYMFFWRKGKSNRRQMLEATDTDQTVTKIVILKPNPERGFNQKAATARTLHQQPCTSHAPECGGIDNSKFSIKEVKTRFRFVNSESRRESNLAPAEDLQGYPRKFKDSFVAINKDFRHFPEGSLANKSGSDIKNAIKPFISSKQNGSISGNSGHIVAPKGASIFYEEARRHLSEMLKDNDCSVNYPAVQISKSLEGILSLPHGNVSTPRSSLWGKDYLGPSPGETDVFVACEVQREECTQERSQSQEDFGSIARCTSAAVDDQVTVRDGYYTNEAQEGSRHAQNEPGLLYTEGIHKFICGKNICDEQSVPAEQSRHDVCQEILEEIKQGKEHIKMSPTSAEGIVETLGQQEPETPEPRASTELISDGSPEQSDEKQERPSPVSVLESFFEDIDNPDCINKKECELHGLQRTLYFPDNEPDVSLLGEDRSVRVDYIKLVLELSELCAEQNLEVWYLEDELISPCLFEELQSQGDQTDDLKLLFDCICEALTEIQERYFRLSWLTFLKQDIRTPPIGENLITEVDRYVYGYIQHSLPITLEQIIKRDLEVQTWMNIRSKTEGIIMEMWEFVLDELIDETVFDLWI

SEQ ID NO: 61226 - protein, 211 aa, Zea Mays
MYHDMSTAGGLVAVALAHALALAVAVAVAVNISGGHVNPAVTFGALVGGRVSLVRAVLYWVAQLLGAVAATLLLRLATGGMRPPGFALASGVGDWHAVLLEAVMTFGLMYAYYATVIDPKRGHVGTIAPLAVGFLLGANVLAGGPFDGAGMNPARVFGPALVGWRWRHHWVYWLGPFLGAGLAGLVYEYLVIPSADAAVPHAHQPLAPEDY

SEQ ID NO: 61227 - protein, 271 aa, Zea Mays
MDGEHKNSKRCLEQAAKLEPNHMPARYAIAVHRIRDAVRSQCSDDQLLWAANEMATVLKEGDPSAVDAPIAWAGLAMAHRAQHEIAAIYDTENINLNDAEERAQYTLKQAIQEDPDDAVQWHQLGLYNICMTRFSRSVNFLKAALARSPDCSYAWSNLGIALQLSDDPSSETVYKRALVLSSTQQLHAIFSNLGILYRQHRNYEFARKMLLRSLELCPGFAPASNNLGLVFVAEGRWEDAKSWFEKALQSDPLLDAAKSNLLKVLTLSTKQ

SEQ ID NO: 61228 - protein, 114 aa, Zea Mays
MVADETGRGRVYGMDIQDSAIENTSSFLKMAVDDEHQRGLVKLFPICHSRMEEIVPKDAPVRLVAFNLGYLPGGDKTVITVPRTTELALRAASRILSSGGLISVLVYIGHPGGR

SEQ ID NO: 61229 - protein, 1221 aa, Zea Mays
MAAGGVGPAQHQAANGASGSVSNGGAATPLHGSAADGYDSDGYSFAPPTPSTLSMSIPPELAGAIPLIDRFQVEGFLKAMQKQIHSAGKRGFFSKKSVGPQAREKFTLEDMLCFQKDPIPTSLLKISSDLVSRSIKLFHVILKYMGVDSPAIITLDERIELVAKLYKHTLKRSELRDELFAQISKQTRNNPDRGWSIRAWELMYLCASSMPPSKDIGAYLSEYVHFVAHGATTDSDVRVLALNTLNALKRSVKAGPRVTIPAREEIEALLTSRKLTTIVFFLDETFEEITYDMATTVADAVEELASIIKLSVYSSFSLFECRKVVNGSKSSEVGNEEYIGLDDNKYIGDLLSEFRSAKDRNKGEILHCKLVFKKRLFRESDEAVTDPMFVQLSYVQLQHDYILGNYPVGRDDASQLSALQILVEIGFIDNPESCVEWISLLERFLPRQVAITRAKRDWELDIISRFQLMEHLSKDDARQQFLRILRTLPYGNSVFFSVRKIDDPIGLLPGKIILGINKRGVHFFRPVPKEYLHSAELRDIMQFGSSNTAVFFKMRVAGVLHIFQFETKQGEEICVALQTHINDVMLRRYSKARSANSVTSQNDVNHAYKPPNIEMYEKHVQELTKTVEESQKQADQLREDLQLKTKQETEMQEELEGLKDTLQSERQSSKEVKNELDKLKSLCDEKESALQAALMEKSRLETRLTSSQGRERDTLTTVGSVNSDIEMLTKLKEDLKSYQKELDASKQVSKKLMSEKNLLDQKVQRLERMKNEEKSTMEKVYADECRKLKSQIAELEQKLEDATQSLNVAESNLAVRNAEVDSLQNSLKDLDELREFKADVDRKNQQTAEILKRQGAQLVELENLYKQEQVLRKRYYNTIEDMKGKIRVFCRLRPLSDKELSFEEKNIVCSPDEFTIAHPWKDEKSKQHIYDRVFDANTSQEEIFEDTKYLVQSAVDGYNVCIFAYGQTGSGKTFTIYGSDNNPGLTPRATSELFRVIKRDGNKYSFSLKTYMVELYQDNLVDLLLPRNVKPLKLEIKKDSKGVVTVENATVVSISSIEELRAIISRGSERRHTAGTNMNDESSRSHLILSVIIESTNLQTQSYARGKLSFVDLAGSERVKKSGSAGKQLKEAQSINKSLSALADVIGALSSDGQHIPYRNHKLTMLMSDSLGGNAKTLMFVNVSPAESNLEETYNSLMYASRVRCIVNDTSKHASGVMRTS

SEQ ID NO: 61230 - protein, 1893 aa, Zea Mays
MDPSLDVSLGIWLCIMCMKKRIQFGVYSVSEGIESLWDVKEGVVNSKQYFVKYKNLAHVHNQWVSESDIVDSTPQGSDLISKVSKKIHKEKTIRWKQEWAEPHRLLKRRLLMPQKEAEVFFNSLGDKFVYCNVEWLVKWKDLGYEHATWELESSSFLCTPEAEELKRSYEDRFKTARKASDPSKVDKAKGGIFQQLERLPDGCPPGLDDDHLRSLNQLREFWHNSCGAIFIDDQERVIKTILFVASILPHICQPLLIVSTTTTLSLWETKFNRLAASINVVVYNGEKDVRKSIQDLEFYQDGSVMLQVLLSHPDAILEDIEVIERINWEAVIVDDCQNSRVSKWLEQLRRLPTNFRMVLLSSSLKESIAEHISLLSFLNPEENGTLSVSNGVSFDTAGTLVVLKEKLARYVAFERKTDSSKLLEYWVPARLSPVQLEMYCYILLSNSPALRSHSKTDSVGALRNILISLRKCCDHPYLVDQSLQSTLTKDHPVTDILDIGVRSCGKLLLLDRMLQQIRIQGLRVLILSQSGGESGKPMGDILDDFVRQRFGYESYERVERGLLLQKKQTAMNMFNDKTKGRFIFLIDSRACGPSIKLSSVDAIIIYCSDWNPMNDLRALQRVSMESQSEPVPIFRLYSSFTVEEKALILAKHDHILDSNIVNITPSLSHCLLSWGASFLFNRLEELQQHSYSNVSGDELFMDNVDLEFLTKLLSKVELRTESGNTAISQAYLCGSFYSRAIVVAGEREGIPSVDGDLPKFWAYWLSLLNGRSPQWQYISEPVQRSRRKINNMEQQLKNTDKQLKITTEETDEARVKRRRIGEIMDSSAIDSPGKNKDTILPGNNTPPSSHQISVEDTWQELERSNLHATQKGLHVQLKPEISKLYKLLQLPEKVKSLCEEFLEYILKNHQISQEPKGILHAFNLALCWRAASLSKHKINHTESLALAVKNLNYECKEELVDFVYGKLKILKKKFARRAGEVSKQNYMVSVSDISTCEQVTSVRLRNDELVPSQVTLTDGNFENGSHHEATGDFWTEEMVSGEKELLPDPVTHEGEHLLRDELLSKIMDKRIKLVDKVFSLRGRSIYDKHSNQVSFLDMHRQKVVDKLRRACSLVVEHLRSSQNHIAQEDRDGKIKLIIEWFTMLLYAFLEHMKCQRNRLDMQQSASRIKESQLKEETLQAARCGQLDQNFDQHIPSPDFEFAMEEFRHFREVVGSCYVDPAALVPESLDDNSAMEIMLVQSATDAEVIEEVLNRPTEVLVQGPASEVVGPSVDVICNCSDGINSQRDASLAVHSLEPSSDDLRSTDHVEENTVGSQIQGGTSKHLGDAAMEVETGNRNTALADSPHFDKPALTAPSRQATLLVSRETEMLSNLVDQCAQQSLVSAQPLQDESEQADLSSAASTQPLQSERQQLISVSNNLLERAQLDQSQPNYQTDAAPGCAQSTELFPVTSMMFNHAPIDSEPLKNELHKLRLHMDTLNKVHEMKKTQLQTACSQELEKVKRKYDLLIKEHDSTHLQQKKALGDFYEKVQRNQSLAEDFRAKFISLSAAQGAAKGHTPPVRHTPQATQVVSSTSSIALSSACRPPVPRPRVQAPQVDQPLLSLSQFSRPSLQVVQPPNLELGNLFRATSTTLSHMPPQRGSYGVQSELAPRSPAPHLQFRSPRAHSMAPGNQQQSPAISVDAMSSRTQPVLAASTSPSDIHVGPLAASALSSLHSVLPSTSLPSSLHPSHLAQRVPPTPNPTLQAGAPKGSNATMPSIPTGMQLPDSGSLSLDAWLTANLGLNDASTAPAKDTASLGLSSDAPRAAPDTNTASLGLSSDVPRGTAPATNTASLGLSSDVPRGTTPATTTTSLGLISDSPRVIAPASSNSPGAIASATNGGSEIDVVCLSDDE

SEQ ID NO: 61231 - protein, 300 aa, Zea Mays
MEAQATATVKEALAALYHHPDDAIRTAADRWLQEFQHTLDAWQVADSLLHDESSNLETLIFCSQTLRSKVQRDFEELPSEAFRSLQDSLYVLLKKFNKGPQKVRTQICIAIAALAVHVPVEDWGAGGIVNWLSDEMKTHPEFIPGFLELLIVLPQETSSYKIAARPERRRQFEIDLCSSANVAIDLLTACMAIDQLKEQVLEGFSSWLRFCHGISASELASHPLVHLALSSLNSGQFLEAAVNVTSELIHATVSHGAGTMAEQVPLIQILVPHIMGLKEQLKDPSKVSFRVEYPEDYHTF

SEQ ID NO: 61232 - protein, 144 aa, Zea Mays
MGAAPAARRCALLLALVVLVAAAGERGGSGAGGEAGAEQVLRLWSSADSARGGEAVDEEDRFFRWEWEEEEEDDDNNDEEEGEEEDDHAVVVQRKGACRNVVNVDSFGAAGDGVADDTQTASMWLVDADDAGNATQLRNVWPWR

SEQ ID NO: 61233 - protein, 72 aa, Zea Mays
MRFYLYKLSIICNPMGPKDDWANIMSFLFSTYHSKGGSSPSLGGELSNHPLALGEHLYGHFSRSLVSSMLTK

SEQ ID NO: 61234 - protein, 82 aa, Zea Mays
MTCTSHHPSCILKLCRDLMVRPYRYIFSIVRCPRRGTMRLHILRGMKAEVILAFADICTHEEYMKCDITMLLLMFLPARCGN

SEQ ID NO: 61235 - protein, 478 aa, Zea Mays
MEEAPTREPKRLRQDAAVTSAAAAAEEPQYVYLPIADAMKVPGVRVCLFAVVSEIGITDRSRGTDFTLRLRIVDQSCMDGISVTVFADKTTLLPCVKSSGDVISLHNVMITMHGEFFVSFNKEVSSFALFESKVAECSPYQTSVKYHGSKHDKELLTQMRTWLAYNPLGLKDFELQLRSLKSDSTFDLVCKVVHVHEDNDKLIFYVWDGTDTPAVEFQATLDPKAVESPPLFEGPPLPREVLCTMPIIGTVLRIFSDMPIKEVSHMQNRVYWARFCNITCKEEFGIWKGILLASSKVRLLSHEDGSVVDRRKMYAIRKANQVLCQPMASFPSNVTDVEYEEEWHSTLMQSLTHKEVTHKLKTLARVVGAYPCQASGLRLLSTGNIHLRLTLEDPTARIHAYVHKNYLVQFFGGFLTEEAITKKMNKLLGIPEPEDSEEGAPLTRNPPWIWCCLTSFYMDKNNPWDSRKYRIFATEMRD

SEQ ID NO: 61236 - protein, 802 aa, Zea Mays
MSAYYLEHADVSHIQKHFDNFEEEARSLLSLGLPIPAYDQVLKASHAFNILDSRGFVGVTERARYFGRMRSLARQCAQLWVETRENLGHPLGAYEEDNLIYPHVSKKTHREEVLVQPRAFVLEIGTEELPPRDVVEATEQLEKSLVNTLEKRRLTHGKVHTYGTPRRLAIVVENLSMKQTEVEVELRGPPVAKAFDEEGNPTKAAEGFCRKNNVSVDHLYRRIDGKTEYIYARVRESARFADEVLTEDLPTIVSGISFPKSMRWNSNIVFSRPIRWILALHGDFVVPFYFAGISSGNQSCGLRNSSLANFKVETAESYLGTVEKAGILINMQERKEKVLHASTVLAQGVGGDFIAPDSLLQEVVNLVEAPVPILGRYDDSFLELPKDVLITVMQKHQKYFAVISKSTGDLLPYFIAVANGAISKEVVRKGNEAVLRARYEDAKFFYKMDTQKKFSEFRGQLSGILFHEKLGTMLDKMTRVENTVAELALILGINERTVPIIKDAAALAMSDLATSIVTEFTSLAGIMARHYALRDSIPEEIAEALFEITLPRSSGDVFPRTDAGIVLAVADRLDSLVGLFGAGCQPSSTNDPFGLRRVSYGLVQILVENKKSFDLRRALTLLAGVQPIAIESDVIDEAVQFVTRRLEQLLVDEGINCEIVRSVLMERANCPYLAAQTATEMEAFSRTETFQKIVEAYSRPTRIIRGKEIESALEVDPHVFEKDEEKVLWSAYLEVADKIHPGVDIKTFVDASLILIQPLEDFFNSVFVMAEDERVRNNRLTLLRKIESLPKGIADLSVLPGF

SEQ ID NO: 61237 - protein, 55 aa, Zea Mays
MINIKRTKSYFPGTTKLTERRLLDYVVLLVGRLLLNHMFFSCGVCETARVSSHTF

SEQ ID NO: 61238 - protein, 74 aa, Zea Mays
MQRCASARCGESADQGNRPRPPQGSRSPHGDGRARANVERLVGRCCQLFCAYKISRMLHLTNDYSQACKLHITT

SEQ ID NO: 61239 - protein, 177 aa, Zea Mays
MMHQLFGEVMSALEKMTRGVAWGDLDILVVDMPPGTGDAQLSMSQRLRLSGALIVSTPQDIALIDARRGANMFRKVQVPILGLVENMSCFKCPKCGEKSYIFGEGGAQRTAEEMDMKLLGDVPLEISIRTGSDEGSPIVISSPNSASAQAYVNVAEKVTQRLNELAEERRMGPEILL

SEQ ID NO: 61240 - protein, 616 aa, Zea Mays
MSSDPSPHLPSPVAPPGAAEADPHHLPQPAEPHEVMHRTRAVDFLGRRTPIVYQNDNGPCPLLAICNVLLLKNVISLNPDAGEVSQQKLLSLVAERLIDPNIAGQDKDEEYVCNREQNIADAIDLLPRLATGIDVNVMFRKIDDFEFTRERAIFDLLDIPLYHGWIVDPQDTETATAIGSKSYNALASGLAEFKSGKPTEENKYVEEETVDFAAATTAALKIPSPSVSRGRSFDEHTLSNSSTVPHKRRGDLEEEEELMRVLNLSKAKSGDVEVSFDTSHSHSSSNIETPQNESFQSEALELVVATKKEEYGNHATSDHVSMLSVTNVAINGSEVVPEESQENLISKEPEDNGIKNLDIPIQFSETTPYPSHESFASSDHQPAIPTLVEGDKETCKEQFDVQIHGQSNDTEVACDSSVTTCEAVPDHATTELDVKSDSLDNSQSLPSSIQECEPIYQGEEHILGTTNMVYENQEPVYEGEVVLAEQADKIGESSSSGDDKATEHQWELIDNFLLTTANQLTVYGLFCLQEGLNESELCVFFRNNHFNTMFKYNGSLYLLATDQGFISQTDLVWQRLDEVNGDGVFLTSNFTPFNAETPRNDSWNEQQAMTRLSCSI

SEQ ID NO: 61241 - protein, 1037 aa, Zea Mays
MVMDRAGWLWRRKSSDKSPGGSDSSLSVSSHSEQCSDDQGQYQSPEAFSRSKYDYSQETGVARSLNGKLAAGVNMNNFNPEHGQSFEQHISSNVGDEEIKETLESLNYKLSAALSTIRAKEDLVKQHAKVTEEAVAGWEQAEAEVTTLKGLLEASCRKNASLQDQVSHMDEALKECVRQLRLAREEQEDKVREVVSNSLVPQSENPELQNHIAELKKRLEMTRLEASSSMILQHDLHERLRAIERENLDLKAKHQAIEKENIDLKAKLLVQSKDLKILMLERDLSNQVAETASKQHLESVKKIARVEAECRRLQHLTRKTTLINNSRSTQNNCCMESLTDSQSDHGEHMVGVDNDLQNSDSWALALIAELDQFKNGKDGSRNIVNNPVEIDIMDDFLEMERLAALPESDGTSSNFEMETDSDKAVTRNSSLKVKNEELQNKVANLQEKFEAIACEKRELELALVEVRDQLEISCDALVVAKNRLVEMQMQLDSANDSKLSALDDVERLDSERKALELQLESKSVEVEELLIAVASLEENAEQKELESQLELMSAQATELRLTVASLEERIQAERDLSVQQKQNAEAMLNAKEELEAQLCSANTEMGKLRDIIKALENEVKKERALCEELTAQLQIKVEAAVNAVKESLEAQLCSANTEAGKLRDVVKALQDEVEKEKALREELAANLEVKTRAARTAEVVKESLEAQLSSAHAEMHKLEEITKQLQNEVEKEKEFSAQLEMKIEVERARSIESAKESLEEQLLLVNSEAAKLHDMVSALEHDVEKEKFFSAELQMQLEALEVVKKVLESEAESAHQDAKILKQKVESLEAKLEEQMSSADEFTETLQSERMVIEHKLKTADGEILKLTNKVSLLHREIEQERLLSEEYEQKCQKLEAQMSRDSRDAKLWRLANSNGDLKVKKELANAAGKLAECQKTIASLDRQIKSLTDLDSVVLEPERLESSRDMPLPLDFRNGDAEFAMFADDLYDFDLPNNDTSFFSPPPSSIQPSSPPSEMSVFAGGLSTLSSYRSKRAIRR

SEQ ID NO: 61242 - protein, 93 aa, Zea Mays
MGLEAHRPRNKARTYSSAVGKEGKREQRTLARVWRVVRRRGCSCSSRRRISAPPARSLVSSPERRDNGWERRADQPGEGADVWDGGEGDGVQG

SEQ ID NO: 61243 - protein, 1174 aa, Zea Mays
MATIVEGCVGPSELHLKKELIALRKARFLRDPETCSSWRSPLSSKSFLSTSGVINHNEVGSSLSEKRTEPAAAPVKSEKKRKNVYLYNWRHHSNKSSESGVKLDVDDRQASVDCSLESPCISNGMDSRSDTCLEVPVSIYSVQGSNSCTPVKRTVRRVRRSSFSKKGAMRNSTVSKLLDLHVNSAEQSEDTENYNSETHEHLQKVGYFSHSTSPLFAASGCFSSTNPSKLLRVPRREGSSFSCTPVSTSSYYRYKGRNPSTVGSWDGTTAASLDDDGLNQPELLTNQRCGIPCYWSKRSKHKGSERSCSPSLSDTLRRKGTSLLCGSQTMHGRKKSSGSNKYGYLKKSSQGVPLLGDSSHFAYSSFDSASDEVSTIFGELDLEALSRLDGRRWSSCKSQDGIALSVSGADHVVSDHRSLSQKYRPRSFLEIVGQNFVVQSLSNAIARERIAPAYLFHGPRGTGKTSSARILSAALSCTATGETKPCGVCTECSDFFTGNGTNLIEVDATNRKGINRVRHLIENIPASATSSRYKVFVVDECHMVSSKVWSAFMKFLDEPLPRVVFIFITIDPENLPRSVVSRCQKYMFSKIKDIDIVCRLRKIAMKENLDVELAALDLIALNSDGSLRDAETMLDQLCLLGKKITPSLVNDLVGVVSEEKLLDLLEIAMSSNTAETVKRSRELMDSGVDPMALMSQLAGLIMDIIAGTYRLADPTCGGDGIGGRNITDAELERLQQALRILSDAEKQIRLSSERSTWFTAALLQLGSGHNSEITQSRSSSKQSAKATSETMMEAMRESSASRSTAHHLSTFPDSKKIVDLKTTSGHSSPHASLSSRMRHNENMIYAEHMSVDRALLDSAQTSISSEQKGMHSGISDNLTRIWMKCIENCHSKTLRQLLYDHGKLTSVKECEGTIVAFIAFEDNDIKFRAQRFISSIRNSMETVLKCNVEVRICLMQEFLAGGLKHETYPDETAESDVLSCSTNSERRKGVLNLSGAGGVQPNNVPMIISEETSGMHRTRGQDVSIEQLKVSAFDEQRLESAWLQAAEKPMPGMLNQGRPERNQILPQNGGQHHGRSSMATVVPSRHVDKDLSNELKALKISDSHGPHNGQDVQMESGYAISPSLLHRNNHLANCDNESVVSESGAPGCHGLFPCWKTEKTKRRKGKGQTRLRSS

SEQ ID NO: 61244 - protein, 150 aa, Zea Mays
MVEAGASFMDKVEAAADDVVIDGAGVGVGDAGEEEEEEMAPVEPLPEPLDDCGPVAWPMPDFCPLTIDGALKESFLETLRKDAAEVERPAREGAEEGEEALSPDSRPSSSKRHRAGTASPSSRSSPYRNILHVFQQCRQDAVGETPTKNY

SEQ ID NO: 61245 - protein, 89 aa, Zea Mays
MFLMLSILVVLYHIVWIYNNNLTLTYLGISCCSGVGRSTAAKANTMTVGWSLGCPWTCNAWCTSCLIGFMSSWGFPVDFEPKCPIVLPV

SEQ ID NO: 61246 - protein, 189 aa, Zea Mays
MLSADQRSAQHQQPAARRPSSANQQPEAALHAFGNICGVGRQEDQMKLDSEAEENLKRLVYTTAANSPKLTPSALLLSVLQQDPDVRIAGYRVITGLVIREWCLREVCLNSEIIRFVTDPTMETTKLGMETRYGCCVAINKALSSSHLLHEASLSELVGKLNDAVKRGPYLSDRKRVEARPVVDTAERF

SEQ ID NO: 61247 - protein, 325 aa, Zea Mays
MVLWVFGYGSLIWNPGFDFDDKILGFIKGYNRTFNLACIDHRGTPEHPARTCTLETDDEVRKVLNRTKETKITERLCSPEYKSLRVYCSWRCRVRELFYYLKGEQVDYGEEHSKACGHNRFGRIYHTGHYPVCYEHNPVHFVGHSVGTQVVRVLHQMLADKLIALDMGALIAGAKYHGEFEDRPKAVLKEVTYSDGQTILFIDEIHKLQMPWLQKAKLLLRELKTVKADLSFAKERYAQLEEENKMLRESYDMGDNPEANDQVMFLKFEPRQCMLILASRFLTATFRPLAVRLRAPLLPKVHTNVTKGITLCALSGLESSIILQT

SEQ ID NO: 61248 - protein, 1239 aa, Zea Mays
MLSAMMGIEGIAATVTEDPEPSIPPGFGPFAASASWGIQNDVKPADDHSSSVLALQSIDDDVEILEYLSSSVDHQSDTGCCISGSNTCRKSLRNRPPIDYSRFDQIADEDSDAEVADKGVNAVKHRQQFPKGVLRGCPECANCQKVIARWNPSGARRPVLDEAPVYYPTEEEFQDTLKYIEIIRPTAEPYGICRIVPPASWKPPCLLKEKNIWECSKFSTRVQKVDKLQNRKSPKKSRRGGMMKKRRKISETEENNHHQIGMQQNQERFGFEPGPEFTLQMFQKYADDFSDQYFMKDKCRDSPPSVEDIEGEYWRIVERPTEEIEVIYGADLETGTFGSGFPKLCPEMKSDVEDKYAQSGWNLNNLPRLQGSVLSFEGGDISGVLVPWLYVGMCFSSFCWHVEDHHLYSLNYMHWGAPKMWYGVPGKDAVNLEAAMRKHLPELFEEQPDLLHNLVTQFSPSLLKSEGVPVYRCVQHEGEFVLTFPRAYHAGFNCGFNCAEAVNVAPIDWLPVGQNAVDLYREQARKITISHDKLLLGAAREAIRAQWDILFLKRNSSVNLRWKSICGPDSTICKSLKARIEMELVQRQNISSPCQSRKMDSEFDSTDRECALCYYDLHLSASGCPCSPEKYACLVHAKQLCSCDWDKRFFLFRYDVNELNILADALGGKLSAIHRWGVSDLGLSLSSCVKREKVQDSKTVRRLTDGPRRSYMSQASTVSLIPSSVSTEQKKNEDKTLDLGCPGMNLPKISPEANNLRPSTEQIKSENLSQLKEPCVKNELSCPTSNGTSQEHKGGIGGHKLAAASMMVLSGQSFPANAGESVRNAHVLAVFKEGRDCTSSLTLREYHNRPVSMIDNGANMKLDLENIDNSHMLMSSPDFNATVCHSYKDQTFLTLETNTSVMTEKDSSQARNASQQFVSTALRTQNVSQEPLCTAIAPKQLIDPQVQKKSYGVFGSGSAHLGHLTVGNQQLNERWHQRQSDSLSSVEVRARGHSAMIVQPALENHSRNGVAQKGPRIANVVHRFKCSVEPIEIGAVLSGKLWSSSQAIFPKGFKSRVKYFSVVDPVQMTYYISEILDAGQQGPLFMVTVENCPGEIFINISPTKCWNMVRERLNMEIRRQLNMGRANLPTLQPPGSVDGHEMFGLLTPAIVQAIEARDRDYICTEYWRSRPHATIENRDNQNMSPQDPPLVALRGLFQRANCDELRALRSLLMSNRILGDNSRQQACQILDEEIAKQWH

SEQ ID NO: 61249 - protein, 87 aa, Zea Mays
MYVNPTGFAELRKRVEDLYKAHEQELEEANRILRQKIADDQFLDLVSVETKVRSVYKELYSIYKTTLKSKSSINEVNQVAQLRIIIK

SEQ ID NO: 61250 - protein, 1648 aa, Zea Mays
MPEQSRSGAPMEWTTVQHLDLRHSGGRRGASARPMQPHAAAFRSSQAIVAVAIGTHVVEFDALSGSKIASIDLGARVVRMAYSPTTSHVVIAILEDATIRSCDFATEQTLVLHSPEKKTDHVSIDTEVHLALTPLEPIVFFGFHKRMSVTGTVDGGRPPTKIKTDLKKPIVNLACHPRLPVLYVAYAEGLIRAYNIQTYAVHYTLQLAVDSTIKLIGAGAFGFHPTLEWIFVGDRGGTLLAWDVSTERPSMIGITQAGSHPITSVSWLPTLRLLVTISKDGALQVWKTRVIINPNRQPMETHFFERAAVETMDITKILTLQGGEAVYPLPRIKNLAVHPKFNLAAVIFADMSGTEAAKNKAAYTREGRRQLFALLQGARGSTAAVLKEKLLALGSSGILAEHQLQAQLQEQHLKGQSQLTISDVARKAFLHSHFMEGHAQSGPIPRLPLVTISDSSNLLRDVPVCQPFHLELNFFNKETRVVQYPVRAFYLDGFNLMAHNLSSGADNLYKKLYSTIPSNVECHPTNMSYSPKQHLFLVVFELSGTNGVVHEVVLYWEQTDLQTVNSKGSSIRGRDAAFLGPDDNQYAILEEDRTGLNLFSLKAVATKEALENNAAVLEENTFADNAASATSTERQGPLQFTFESEVDRIFSSPLESTLLYVISGKHIGLAKLLQGYRLSADNGLSITTKTDGKKFIKLKPNETVLQAHWQTTLRGPVVGILTNQRVLIASADLDILSSSSTKFDRGLPSYRSMLWVGPALIFSSATAISMLGWDNKVRSILSTSFPRSVLLGALNDRLLLVNPTDINPRQKKGVEIRACLVGLLEPLLIGFATMQQHFEQKLDLSEVLYQITSRFDSLRITPRSLDILTKGPPVCGDLAVSLSQAGPQFTQIMRCNYAIKALRFSTALSILKDEFLRSRDYPQCPPTSHLFQRFRELGYACIKYGQFDSAKETFEVITDHESMLDLFICHLNPSALRRLAQKLEESATDSELRRYLERILRVRSTGWTQGVFANFAAESMVPKGPEWAGGNWEIKTPTNIKNIPQWELAGEVMPYMKTTDAGIPSVVADHIGVYLGVMKGRGNVVEVSEKSLVKAIAAASSENTQPVSSASAEKSKAIPRGDSVGDTLARQLGVQIASSDEQAKAAEDFKKTLYGVVDDGSSDEDESTSKTKKIHIRIRDKPAAPTVDVNKLKEATKQLGLGPPLSRTRSLSGTPQDFNQAPTQPGGPAAAVSPAMPNSAIDLFGTNTLVQPQAPSSSTGPVIAGMGVTAGPIPEDFFQNTIPSHQLAAQLPPPGIVLSRMAQPAPGIEQGRPVPNQMMANVGLPDDGVPPQAPPQQSQFPPQQSQFPQQPGIPMDSIGLPDGGVPPQSQPLPSQGQFLPSQAQGFQLGIPAPSQPIDLSALEGPGAAKQAARPPAPTAVRPGQVPRGAPAAECYKMALAHLEQNQLTDALSCLDEAFLALAKDQSREADIKAQATICAQYKIAVALLQEIARLQRVQGAGALSAKEEMARLSRHLASLPIQAKHRINCIRTAIKRNMEVQNYAYAKQMLDLLYSKAPPTKQDELKSLIDMCVQRGLTNKSIDPFEDPSQFCSVTLSRLSTIGHDVCDLCGAKFSALSAPGCVICGMGSIKRSDALAGGPGPVPSPFG

SEQ ID NO: 61251 - protein, 322 aa, Zea Mays
MERVLKDDAVEEKGDRARMASFVGAMAISDLAKTTLGPKGMDKILQSTGRGRNVTVTNDGATILKSLHIDNPAAKVLVDISKVQDDEVGDGTTSVVVLAGELLKEAEKLINMKIHPMTIIAGYRMALECARNALLQNTMDNKENTDKFRADLMNIAMTTLSSKILSQDKEYFAELAVDAVLRLKGSTNLESIQILKKPGGSLKDSFLDEGFILDKKIGIGQPKRIENAKILVANTAMDTDKVKIYGAQVRVDSMSKVADIEAAEKQKMREKVQKIIAHGINCFINRQLIYNFPEELFADAGILAIEHADFEGIERLALVTGG

SEQ ID NO: 61252 - protein, 1345 aa, Zea Mays
MRQALPDLFDAQPDLLFHLVTMLNPSILQANSVPVYSVMQEPGNFIITFPRSFHGGFNLGLNCAEAVNFAPADWLPHGGIGANLYRLYRKAPVLSHEELLYVVAKNGVDAESLTHLKGEIKRLFINERRRRVELWINGTVKSSLMLPRINPNFIGSEEDPTCIICRQYLYLSAVSCNCRLSSYVCLEHWKHLCECSPKKHCLLYRHTLAELGDLVCEVSLVSPQRDNVMQNPHLLNDVYVPSKKVKDHYILYRQLAEDWVSNSEHILQMPFVERSYATALEEAEQFLWGDHAMDSVRNITVRLTKAMKWALGVRKCLSKIQDFLKDGCSEKVNYVEIEELVATKCAPCCEPSLTKLQAYAEEAKLLINEVNNALSSFLTVDKLETLYSRVSEFPVKLTESSTLFWELSSAKSWLKKASDCLEQNKLGIIDIDVLNKLKSEIIQLRVLLPEIDLISKLWKDVESWQTRCQLYLQDFPDLKELEGFLLAADGANFSIPELNILKQHYSNCCSWVSRAKNILRKLYATSDYHNAVEELTGILKEAELLGVKVDELPIVEKELKRSLCRKQASEALATVMPMEVVEEILKEASILHIEEEQPFDDLSRMLKEATSWEEKARLILERSASLSEFEDHMRCSEGIRVILPSKLHMKAEVDIAKLWIDKCQAYLRPGCNKLAFGDFLKVDDIKDLINQPANLKVILDTSELNSVLNNIEKWEHSSLSLLNNFRALLHLNSIGSTVDTLQRKLEELQGKMNTEIEVGLSLGFEFKVLWELKDSSLMLRWILNALSLCCMIPLLQDVDRLIEEAVHLPASLADCSLVTLLMRALSCLRKSLILLPGSGTSAKSKLEDVENILAEFKEVDVPYPIMTAKLEDAVNNHNSWIEQCNTFFMLSDGQSWAMLQNLRDNGQSVAFDCPEMDKVVDEVKNVEEWLNQCHCTLLLDGNNSSLLSILVKIRGLLDDVCTLYAEDCMKLRLCAVCSCDIGDRLASRCVTCQDWYHGSCVENLSATTQTTIEWMCSFCSLLQSEDQLKNQLSVKMSKGNCPALAALDELISSAKGLYTGIEEINLLKEIVDKARNLNAYLMQILDDSDCYHGEDLTVIFKSLLVALKATSASGLYDDNVSCRIESVLSRYLWKKQIHKLLYGGKKSSIQEVLCLDEEGSHLEICDQDFFKLEISKIKETSLQWLAKAEEVACDSGELALDLVYGLIAEGENLSVDFEKELKLLRDRSVLYCICCKPDDNRAMIACDQCDEWYHFDCINLLGPPPESFFCPACHPNNGEESVSLARSEDDEDRSSTGAGAHTPPDRVVERDLIKLLSCHSGSSWSESRRAPHRTARRRSSFVGLL

SEQ ID NO: 61253 - protein, 124 aa, Zea Mays
MAVVGVLALQGSYNEHMAALRRIGVKGVEVRKPEQLLGIDSLIIPGGESTTMAKLANYHNLFPALREFVGGGKPVWGTCAGLIFLANKAVGQKTGGQELVGGLDCTVHRNFFGSQTVSLAASKL

SEQ ID NO: 61254 - protein, 1262 aa, Zea Mays
MEQSVRGGRGGGLGMVSQFPPATVKMKLPFSIKPWTGSEDNIGKLLMVWKFLITFTDVLGLCPVTLDEFVQSLHDYDSRLLGELHVALLKSIIKDIEDVARTPSIALGVNPGGGHPQIVEGAYSWGFDIRSWQRHLNLLTWPEILRQFALSAGSGPQLKKRTVEDSHYHYDNEGHDGENVILALRNGTAAVNAVAKMKERGYTNRRRSRHRLTPGTVKFAAFHVLSLEGSNGLTILDVAEKIQKSGLRDLTTSKTPEASIAAALSRDAKLFERTAPSTYCLKSPYRKDPADSEAVLSAAREKIRAFQNVLSDSEAEKEADEAERDDDSDCDDADDDPDGDDVNIEVEEDKDPLLAVKAQDEVPSTTTVIGIKTKLDSVGNALNSSSSFTKSAKGAPLPYLGRSSAADTSNDSPLGGPSANHEVTPGDSENTQIDESNQIEPWVCALAEGDYCDLSVEERLNALVALVGVATEGNSIRGVLEERLELANALKKQMWAEVQLDKRRFKEEFASRVQYNSGMSFKPDIYQENNMTEITSTRACDAYKENDGHVGTINNCEMLDQHSQGNAGGITYDRNVVGQEIHATPDTSYVQQYAYADKTRSQLKSYIGHRAEQLYVYRSLPLGQDRRRNRYWQFTTSASPNDPGSGRIFFESEDGCWRVIDSEDSFDSLVAALDTRGTREAQLRSMLQMIETTFKEAIKRRSASIELSATVYPKNGATDMIRANYHREVGSSSSTPFNDTSDSVTAYSDSFKVELGRNDFEKAAISKRADIFLKWMWRECYNQEETCAMRYGKKRCSELLHSCNCCYQIYLAEERHCSSCHKTFKSIYNFSDHTTQCEEKWRTDPYWKMQIADYSVPIGMVLLKLQLVLIEAYIPSEALQPFWTDVYRKSWSVKLYATKSIAETFQLLTVLEGAIIPDRLSSDFETTSECLNSQVIAPQNPVLPAGFASVLPWVPDTTSAVMLRVLDLDSAILYVQNQKMERDDGGFMKFPSRYTVVKSKQETIPLEPTGMDLYDGRWLPGSGRRGRGRGSRGGSRGGRGRSRGGRIPRGVSSSSRIEFKDGIAASGRAPRKNARRGRGRGRGRGRRTVRPRQPSVGRGRSIPKENLMGSFSMLTSSKAADIEESPRSSGADEWGLETRMTYTERDENSSGSRYEDNEENGQPMDEDYEEQVPDYSIDYSSGSRHHEMMSMMDHETDEEDEDAEGDENVEEDDADHAVDDADVEMDEGDDEIGDDGEDGGVGGEMTPDEDPDATSYSSDYSE

SEQ ID NO: 61255 - protein, 567 aa, Zea Mays
MATGAINVVRGTRSSDEELFQIYTHSESIALVVDSPQFFNRLAESFMSRINTRFIVLLWGDKSCIDSQAIKDIPLYGYKDIIELGRESRNALFLSDEQGQQDVFESISPEDVATLIYTSGTSGTPKGVMLTHRNLLHQINNLWEIVPAEPGDRFLSMLPTWHAYERACEYFIFSYGIQQVYTTVKYLKEDLQRYQPQYIISVPLVYETLYISIHRQISSSSAARKIIALSLIKISFLYMEAKKIYEGTVLSNNLVKPSVIAYMMKWLWARLVAAFLWPLHNLAKILVYKKIHSAIGISKAGISGGGSLPMHVDKFFEAIGIKVQNGYGLTETSPVVAARRPFCNVLGTVGHPIKHTEIKIFDIETGEVLPDGSKGIVKIKGPQVMKGYYKNPSATNEAFDQEGWFSTGDVGWIVPHHAMGPSRQCGGMIVLEGRAKDTIVLSTGENVEPAEIEEAASRSTLINQIVVIGQDQRRLGAIIVPNNDEVLAEAKRKSILGEDGELAKDKVMNMLYDELRTWTAHCSFRVGPILVVDEPFTIDNGLMTPTMKIRRDKVTDKYRREIEALFK

SEQ ID NO: 61256 - protein, 570 aa, Zea Mays
MLCSSIVMFLSDMSGRSPLYKKAYVFFSSPVHKELVAQIKKDSSVLPRIAALSEMNLEYFAIDSQGFITDHERALEELFSENAEGSHKYNACLNTMATRISTVFASMREFPRVHYRIAKTIDASTMTTLRDLVPTKLAASVWNCLAKYKTTIPEFPQTETCELLIVDRSIDQIAPIIHEWTYDAMCHDLLCMDGNKYVHEVPTKNGSATEKKEVLLEDHDPVWLELRHAHIADASERLHDKMTNFISKNKAAQLHQARTDGELSTRDLQKMVQALPQYSDQIDKLSLHVEIAGKLNNIIREQCLRDVGQLEQDLVFGDAGTKELINFLRTQLVVSRENKLRLLMIYAALNPEKFESDKGAKLMQLAGLSADDMIAVNNMRCLCGPDTKKSSVGGFTLKFDVHKKKHTNRKERTGEESTWALSRFYPILEQLIENLSKGELPKDEYNCMNDPSPTVHGLPTSSSARTSPAHSMRSRRTGGTWARPRGSDDGYSSDSVLKHASSDFRKLGQRIFVFVIGGATRSELRAAHKLSSKLKRDIILGSSSLDDPPQFITKLKLMSVEELTLDDLQL

SEQ ID NO: 61257 - protein, 1125 aa, Zea Mays
MASRGAVAPAVDPSSPSSRAWGGEDETPGAGKVKLMCSYGGRIAPRPGDGALRYVGGQTRLISVPRAASFGELLRKVEAVDEASASSGGVLLRYQLPGEDLDSLISVSGPEDYDNMMEEYEKLAAAAPDGSAKLRVFLFPASGSDAAGSGSGSHLVAAVDESGQRYIDTINCVSAEAMAVAMRPKDSVASAGSSAHNSEASEYSGLVEEPSTLPPHQVAPAYATPHQPPQVTTYVQQQPQVTHYVQHQHPQSAAYVQQVPQSYIEPQQVQYINTQQFGGHGVPQSVNYVPVHMNQFMPSIPVTGSLATTAAQGSTFRPASAGAEPVLETTQFTRPVQAQVDHSYRVVQTPLSQLPPLSSVHQQANDAQRQRFGVQQAMISAVSMPVVTSSGTIPVVVSSATVPSLRYDDCTMCQKALPHAHSDNIIREQGNSRATGNLEAAPMFYSPHQDSGSNKSSLGASSGTPTNYVAEPRAGNTAVMTQFNSTLPARKPAVQATASPDTGVPVQPTVIPLPVSSAPAPDGVFVGHSPQAGAEDPVRYQQQLFSYSMQPAQVLVNGPQGIDASAYKDSNHPAAEPLREYAHNLLHDYARAIDVHTQAVHLGPIAPPESTVHGKPSTYGIIDHAKVGKLPLNIDGSSIYKSQAGGYHIGITNAFAAPAFNQEENISRHSEKPRYAFDIGTQNVHPDIIQQPPNLAVQSNLIAPIEPPGSNEKVTVLPSNSGAQVPSGSPVQRPKEMANHLVSIPPNGSNKFPLQSTVGIDRVEGTQEPAYADSLFSNQDPWKAVGNASLVPPRPNKLTKESVVSGGQYIDGHMPDMNMHAAIPSEEDSCFKDMHTVKLNKGPGEDSIKRQLQAVAEGVAASVLQPPFPEKTVVFSGDHIDSHGAEVDVKFQDEGNNQSDKISQGVQVLDDNDNLQIIKNSDLEELRELGSGTFGTVYHGKWRGSDVAIKRINDRCFAGKASEQERMRTDFWNEADKLASLHHPNVVAFYGVVVDGPGGSVATVTEYMANGSLRQALQRHEKIFDRRRRLLIAMDVAFGMEYLHGKNIVHFDLKSDNLLVNLRDPQRPICKVGDLGLSKVKCQTLISGGVRGTLPWMAPELLNGSSSLVSEKVKSLTPSCTMGPL

SEQ ID NO: 61258 - protein, 131 aa, Zea Mays
MMKGIKGSFADAASSAKIFAVLAGVQSLVACSLRKLRGKDDGVAGCCTGLALSFPGAPQTLIQSCLTFGTFSYIIEKLNKQQPALALLPATGVMDPKAGQSVLPSFTLPPLDTMDEFSKFQNFLSSKFRGN

SEQ ID NO: 61259 - protein, 129 aa, Zea Mays
MQDQTTTSSLLSSSERSSSSAPETGETREEAMESDEEIRRVPEVGLELLTSPSTSGREATAAAAAAGTSSASQAASASRRGRSPADKEHRRLKSHKAHREQIKEAPHSSSGCFGTGCRRSRHGKGRRRT

SEQ ID NO: 61260 - protein, 184 aa, Zea Mays
MKGREPLFVPCTPKGCMELLSRSGVTVKGKRAVVVGRSNIVGLPVSLLLLKADATVSVVHSRTPDPESIVREADIVIAAAGQAMMIKGDWIKPGAAVIDVGTNSVDDPTRKSGYRLVGDVDFAAASKVAGYLTPVPGGVGPMTVAMLLKNTVDGAKRGRRMRKKKSNPSARAQMNTAISSKKWK

SEQ ID NO: 61261 - protein, 222 aa, Zea Mays
MEAMTGGKFLQKFRLYETRSKFYLIGRDKSRIHWRVLKIDRLESTELGVDEDPTIYTESECQELLWRIHEGNMLTGGLKFVTKCYGIVGFVKFLGPYYMVIITSRRKIGTICGHEIYSVGKSEMIAISSVTVWPNVAYSRDENRYKRLLCSVDLSKDFFFSYSYNIMRSLQKNITQKNTGQAVYEPMCVWNEFLTRAIRNHLKNTCWTVALVHGFFKQAWCS

SEQ ID NO: 61262 - protein, 835 aa, Zea Mays
MVLIFVRLIAFTLFVIWRISHRNPDALWLWVTSIAGEFWFGFSWLLDQLPKLNPINRVPDLGALRQRFDRADGTSRLPGLDIFVTTADPFKEPILSTANSILSILAADYPVERNTCYLSDDSGMLLTYEAMAEAAKFATVWVPFCRKHGIEPRGPESYFELKSHPYMGRSQEDFVNDRRRVRRDYDEFKARINGLENDIRQRSDAYNAARGLKDGEPRATWMADGTQWEGTWVEPSENHRKGDHAGIVLVLLNHPSHSRQLGPPASADNPLDLSMVDVRLPMLVYVSREKRPGHNHQKKAGAMNALTRCSAVLSNSPFILNLDCDHYINNSQALRAGICFMLGRDSDTVAFVQFPQRFEGVDPTDLYANHNRIFFDGTLRALDGMQGPIYVGTGCLFRRITLYGFDPPRINVGGPCFPSLGGMFAKTKYEKPGLELTTKAAVAKGKHGFLPMPKKSYGKSDAFADTIPMASHPSPFAAAAAVVAEEATIAEAVAVCAAAYEKKTGWGSDIGWVYGTVTEDVVTGYRMHIKGWRSRYCSIYPHAFIGTAPINLTERLFQVLRWSTGSLEIFFSRNNPLFGSTFLHPLQRVAYINITTYPFTAIFLIFYTTVPALSFVTGHFIVQRPTTMFYVYLAIVLGTLLILAVLEVKWAGVTVFEWFRNGQFWMTASCSAYLAAVCQVLVKVVFRRDISFKLTSKQPAGDEKKDPYADLYVVRWTWLMVTPIIIILVNIIGSAVAFAKVLDGEWTHWLKVAGGVFFNFWVLFHLYPFAKGILGRHGKTPVVVLVWWAFTFVITAVLYINIPHIHGPGGKHGGAIGKHGAAHHGKKFDGYYLWP

SEQ ID NO: 61263 - protein, 68 aa, Zea Mays
MERWIRRAGARRGPMETMSGERTAAACCWENGAHRKAPRRATMVSWSWAHGAGGWSRDAELGRRRGKA

SEQ ID NO: 61264 - protein, 479 aa, Zea Mays
MRRPWRHSGPGSAVAARHGAADLCLREVGDLLPRRFARRAAGSEDLVMRLQIHRKLDRHTGCVNTVGFNEVGDTLISGSDDQKARFMPCSDDRTIVTCAADGEVRLAKIQDAGDVSTTLLGEHEGRAHNLAIEPGSPYIFYSCGEEGFVQHFDLRTNTASKLFLCRNSTKSVYSSLVHLNALAIDPRNPNLFVVGGSDAYARVYDIRKCKWDGSSDFSHASDCYCPPHLVDNKSVGITGIAFSHLSELLVSYNEENIYLFSKDGGLGPDPKKSVRIGAIEGCKSTMLASGHDVSQPAPQTYVGHVNRETVKRVSFIGPNDEYVASGSDCGRIFIWRKGDGKFLRAMEGDECIVNCIEPHPHAMAIASCGIDNDVKVWTPSAIERAPMIHVDELQLRPRKRRAKLWRFGIRDLLIQQILVSENRQQSAEEGSSEDHEDNIELLDLVLQAAVEGVSSSSDEEEEDDDDGDNEEAAASDGSE

SEQ ID NO: 61265 - protein, 763 aa, Zea Mays
MLTFQLSDQTLHPFDHASFQGTARLSAVRCPPRALRSRAALPAARPRAHWTSFRPAPIDPAAMSSAAVSSSSSTFFLALASASPGGRRRARVGSSPFHTGASLSFAFWAPPSPPRAPRDAALVRAEAEAGGKDAPPERSGDAARLPRARRNAVSKRRDPLQPVGRYGSATGNTARTGAASCQNAALADVEIKSIVAAPPTSIVKFPAPGYRMILPSGDIAPETVLPAPKPLHESPAVNSVPPVSIPNPDTDGIAALAEKKYAQVDGDSNGIAPPTVEPLVQEATWDFKKYIGFDEPDEAKDDSRVGADDAGSFEHYGDNDSGPLAGENVMNVIVVAAECSPWCKTGGLGDVVGALPKALARRGHRVMVVVPRYGDYVEAFDMGIRKYYKAAGQDLEVNYFHAFIDGVDFVFIDAPLFRHRQDDIYGGSRQEIMKRMILFCKVAVEGRGPVDEFPYMDLPEHYLQHFELYDPVGGEHANIFAAGLKMADRVVTVSRGYLWELKTVEGGWGLHDIIRSNDWKINGIVNGIDHQEWNPKVDVHLRSDGYTNYSLETLDAGKRQCKAALQRELGLEVRDDVPLLGFIGRLDGQKGVDIIGDAMPWIAGQDVQLVMLGTGRADLERMLQHLEREHPNKVRGWVGFSVPMAHRITAGADVLVMPSRFEPCGLNQLYAMAYGTVPVVHAVGGLRDTVAPFDPFSDAGLGWTFDRAEANKLIEALRHCLDTYRNYEESWKSLQARGMSQDLSWDHAAELYEDVLVKAKYQW

SEQ ID NO: 61266 - protein, 1187 aa, Zea Mays
MNFVYLAIGAGLASTFQVSCWIITGERQAARIRALYLKAILRQDIAFFDMEMSTGQVVERMAGDTFLIQDAIGEKVGKSIQLLSTFIGGFIIAFVKGWLLALVMLSSIPPIAIAGAIVSRLMTRLSTRMQAKYGDAGNVVEQMLGAIRTVVSFNGEKQAIRTYNKFIRKAYESALQEGAVNGLGLGSVMAVLFCSYGLAVWYGSRLIVERGYNGGMVISVIMAVMIGAMSLGQATPSVTAFAEGQGAAYRMFKTIERKPDIDIYDTTGVILEDIKGDIELKDVYFSYPTRSEHLVFDGFSLQVPNGTTMALVGESGSGKSTVISLVERFYDPRAGQVLIDGVDIRRMHLGWIRGKIGLVSQEPVLFSTTIRENIAYGMENSTLEEIKRATELANAAKFIDKLPNGLDTLVGERGTQLSGGQKQRIAIARAIVKNPRILLLDEATSALDMESERVVQEALNRVMLERTTIIVAHRLSTVKNADVISVLQHGKVVEQGSHVELMKKIPEGAYSQLIHLQETRQGAEFSSVDPDIVLTNGIGSRSINSKPRSQSISRRSTSKGSSSFGHSGRHSFPAPLGLPDPMELNGSPDVEETVDKTSRAPKKAPLGRLLYLNKPEALVLALGSITAAMHGVIFPIYGTLISTAIKVFYEPPAELLKDSRFWASMFVALGACAFVLIPVEYFLFGLAGGKLVERVRSLTFQSLMRQEISWFDEPEHSSGSIGARLSTDAMNVKRLVGDNLALNVQTLSTVISGFTIATVANWKLALIITVVVPFVGFQGYAQMKFLKGLNRNAKLKYEEASQVATDAVGGIRTVASFSGEKKAVDAYERKCESPIKQGIREGVVGGLGFGFSFLAFYLTYALCFYVGAKFVEQGTATFPQVFRVFFVLVLATSGISRTSAVGADSTKANDAAASVLEILDRKSKIDYSCEEGITIAGVSVRGEIDFQNVCFKYPLRPNVQIFKDLSLSIPSGKTVALVGESGSGKSTAIALLERFYDPDSGKVLFDGVELRALRVSWLRQQVGLVSQEPVLFNDTIRANIAYGKQGEASEEEIVAAAGAANAHQFVSALPDGYSTLVGERGIQLSGGQKQRVAIARAVVKDPKVLLLDEATSALDAESERVVQEALDQAVVGRTTVVVAHRLSTVRGADVIAVLKNGAVAEKGRHEDLMRVKGGTYASLVELSSTSS

SEQ ID NO: 61267 - protein, 681 aa, Zea Mays
MLTFESLSETAEFARKWVPFCKKHNIEPRAPEFYFAQKIDYLKDKIQPSFVKERRAMKREYEEFKVRINALVAKAQKVPEEGWTMADGTAWPGNNPRDHPGMIQVFLGHSGGLDTDGNELPRLVYVSREKRPGFQHHKKAGAMNALIRVSAVLTNGAYLLNVDCDHYFNSSKALREAMCFMMDPALGRKTCYVQFPQRFDGIDLHDRYANRNIVFFDINMKGLDGIQGPVYVGTGCCFNRQALYGYDPVLTEADLEPNIVIKSCCGRRKKKNKSYMDSQSRIMKRTESSAPIFNMEDIEEGIEGYEDERSVLMSQRKLEKRFGQSPIFIASTFMTQGGIPPSTNPASLLKEAIHVISCGYEDKTEWGKEIGWIYGSVTEDILTGFKMHARGWQSIYCMPPRPCFKGSAPINLSDRLNQVLRWALGSVEILLSRHCPIWYGYNGRLKLLERLAYINTIVYPITSIPLIAYCVLPAICLLTNKFIIPEISNYAGMFFILLFASIFATGILELRWSGVGIEDWWRNEQFWVIGGTSAHLFAVFQGLLKVLAGIDTNFTVTSKASDEDGDFAELYVFKWTSLLIPPTTVLVINLVGMVAGISYAINSGYQSWGPLFGKLFFSIWVILHLYPFLKGLMGRQNRTPTIVIVWSILLASIFSLLWVKIDPFISPTQKAAALGQCGVNC

SEQ ID NO: 61268 - protein, 169 aa, Zea Mays
MRLAHYVTIGSECTTSLANKRSEIGWDARVALSVYGSFSSRAYLNAQRLRNRQMYFHKQIFKAADVIVSPMTGVTAYPLQDDALSTGELDYINGAALVRYSIAGNFLGLPAITVTVGYDRGGLPIGLQFIGRPWAEATLLHVAFATQQACAKGYKKPPVFYDLLGKQQD

SEQ ID NO: 61269 - protein, 1076 aa, Zea Mays
MKERGYTNRRRSRHRLTPGTVKFAAFHVLSLEGSKGLTILEVAEKIQKSGLRDLTTSKTPEASISAALSRDTKLFERTAPSTYCVKTPYRKDPDDSEAVLAAAREKIRAFQNALPECEEVEKDVDEAERDDDSECDDADDDADGDDVNIEDKDAKSPLVGAQYGAQITVVGDIKKESNIVMNTSVPPSIQIKSSASVPFHTLDSKASSSTDPEVGDDAKDIEIDESNQGESWVQGLAEGDYCDLSVDERLNALVALIAVANEGNSIRAILEERLEAASALKKQLWAEAQLDKRRIRDDFTSKMQYDSYVSMKVDTDQENNAAEITLTPVHDPIKNNNGNANLMNNGLLVDKQNQLTTGDVYHQRNGASRESSTNAESLSVQQYASSEKTRSQLKSFIGHKAEQLYVYRSLPLGQDRRRNRYWQFSASSSSYDPGSGRIFFESRDGYWRVIDTSEAFEALVASLDTRGIRESHLHSILQSIEPTFKEAVERKRCANLEHPTGRTSENGSNESPNCNNEFGSPCSTLSGVASDNLMAHSDIFKIEVGRNEAEKNSISKRASVFLKWIWRECYSHQSTYAMRYGKKRCPELIHSCDYCYQIYLAEERHCSCHKTFKHIHNFLEHSSQCEEKQRTDPNWKMQTVDLSVPVGLRLLRLLLATIEALVPAEALLPFWTDGYRKSWGAKLYSASSAEEVLQMLSVLESAIKRDYLSSNFETTTELLNSSTQDFATQNSAGGSGSATALPWVPDTTAAVALRLLDLDASISYTLHPKLGSNKEQESGDFMKLPPRYPSMNKGKQEIEQFRPIGFDQQDGTLLPNSNGRRGRGRGGRGGSRGGRSRGHGGRVPRGIGSSSRIQFRDDNSMLYGRAPRKNARGGRGRGRGRGRGLRTVRPRQPSELSARSIPKANLLGSFSMLSKTNHTGTTHSPESSGAEEWAFERREYVKDDENNLVSQSDESEENVEPMNEEYGEHISGYPRDNSDSRPVQMMGDGSDDNDEDAEGDEGEEDGEDYEAEDPGDEDDDVEMDGDDDVEVDEDDDIEMDGDDDIEDDDDDDGGDGAANGDEDGGGTSSYSSEYSE

SEQ ID NO: 61270 - protein, 74 aa, Zea Mays
MSFTVTGPCKCCNEVNWIRSMLLNPIAVAVLLLDWCLQPAAWCLLPTAAASGTAHRQARGPYVAGAITAFGLCC

SEQ ID NO: 61271 - protein, 464 aa, Zea Mays
MIKDKMLIPQFDACASWWTQGPDSNLQIELARDMGYAAARYGHVMFPENVHEPALHSAEVLLGGVGKGWASRVYYSDNGSTAIEIALKMAFRKFSLDHGIMASSENSTRNERNIQLKVLALNGSYHGDTLGAMEAQAPSAYTSFLQQPWYSGRGLFLDPPTVYIKSEVYNISLPQSMQHDPQTYGDTCFFSQAEVFCKTRDKTFAADLYSSYIKQKLSEFSLSSSSEHLAALIIEPVIQGAGGMLMIDPLFQRVLVSECRSRKIPVIFDEVFTGFWRLGVESASELLGCLPDIACYAKLMTGGIIPLAATLATEEVFESFESDSKLTALLHGHSYTAHAMGCTAALKAMQWYRGPSTNSNLDTDHMKLKELWDGTLVKQLSSLPNVKRVVSLGTLCAIELKAEGADAGYASLYASSLVQQLRKEDDIYIRPLGNVIYLMCGPCTPRDSCTRQLLKVHRRLCALN

SEQ ID NO: 61272 - protein, 188 aa, Zea Mays
MDLLERNIKTETEETRKEQERKEEEAEAEAEAGERKTQEPPQQGQGLSLSLANGSGRSGMLPMSNVSANPSQLTIFYGGSVCVYDSVPPEKAQAIMLIAAAAAAAAATKSSAAPTSTSVATGQPQVVAEPSSICKLQADLPIARRHSLQRFLEKRRDRVVSKAPYSTAKSSDGMESPRIEVTAEGKAQ

SEQ ID NO: 61273 - protein, 851 aa, Zea Mays
MGASRKLQGEIDRVLKKVQEGVDVFDSIWNKVYDTENANQKEKFEADLKKEIKKLQRYRDQIKTWIQSSEIKDKKALMDARKQIEREMERFKVCEKETKTKAFSKEGLGQQPKTDPKEKAKAETRDWLNNVVSDLESQIDNFEAEIEGLSIKKGKQRPPRLVHLETSITRHKAHIKKLESILRLLDNDELSPEQVNDVKDFLDDYVERNQEDFDEFSDVEDLYSTLPMEKVEALEDMVSLAPSSLVKGVAPVSTTAVLSTKSSVATSPTQPTVSTASSQSTSQDQTEETASQESNPEPTPQTPPPKGGNPGPSVPAVPIVVSTGSAAVSVPAETISSPVRLTVPATAATVLSSAIPRSAPENTLAVTSIPANLSTTLKDDESMSVPPRRPSPATEIGIGRGITRGTTSQALGTAPITIGPVSGNGSVSALPAINDLSKINILNTDEKINSDGLSQQLVMPLGSKVQPQQVPRTNDAIGSDSANTNENPILGGRVFSPPVVSGVQWRPQAAAAFQNQIETNQYRGRPEISADHREKYIQRLQQVQQQGGSLLNVSHITGINQKQFPTPQPNPLLQQSSSISSQVNLGLGVQGSDAGHIKSEDQQILAEDVGVESSATTGANKQTSEDDTKIPYSNPSAPAAENTQLPRDTDLSPGQPLQPGMPSSGVGVIGRRSVSDLGTIGDNLTGTSGSSGHDQNYYLQMLEAAFHKLPQPKDSERAKTYIPRHPAVTPASYPQVQASIVSNPTFWERIGSDTLATDMLFFAFYYQQNTYQQYLAARELKKQSWRFHRRYNTWFQRHVEPQVTTDEYERGSYVYFDFHVTEDGSGWCQRIKNDFTFEYNYLEDELSVQTN

SEQ ID NO: 61274 - protein, 279 aa, Zea Mays
MHFFSGSGGARSGALLPTTSKPKAHHHLRSKSSLSAPASSRRRGSLHSASTPYSRRALCLATTAFAVLFILAFLRLGFPSSRSAALSAPVRSRARLSRRPAFRLRDSAAAEAAAAAVANRIGREAPVDITTRDLYDRIEFSDVDGGAWKQGWEVKYRGDEWDTEKLKVFVAPHSHNDPGWIRTVEEYYQRQSRHILDTIVESLSKDSRRKFIWEEMSYLERWWRDAPPKKQEALAKLVRDRQLEIVSGGWVMNDEANSHYFAIIEQEENTSFCHNGGES

SEQ ID NO: 61275 - protein, 127 aa, Zea Mays
MGSKLSEIIESKEDACALFDLYKNEQYLLMDYKGKFCIVLKEGSSPEDMLKSLFHVNYLYWLERYMGFKPSNVASECRPGGRLEVSLDYAQREFSHVKHDGSDGGWVMDGLIARPLPVRIRIGDGTS

SEQ ID NO: 61276 - protein, 88 aa, Zea Mays
MGKRWIPLEANPDVLNQFIWGLGVHEEDVQFCDVYGLDDELLAMVPQPVLAVLFLYPLTSLDEEKEESSVSAATSTSAGKMPEIGKKV

SEQ ID NO: 61277 - protein, 1490 aa, Zea Mays
MAWGEDEAIGPDVASAGLHVSERIGRDAAAQPDLEEALEASRYASHPYSSHPKEWPPLVEVAEIRQLPPMLIERYNTAAGEGTALCGIFSDIHRAWATVDNSFFVWHFDKWDGQCQEHNVDEQAICAVGLARAKSGIFIEAIQYLLVLATPVELILVGACCSASADGTDPYAELSLQPLPEYMIATDGVTMTCITCTEKGQIFLAGRDGHIYELQYTTGSGWRKRCRKVCLTTGIGSLLSRWVVPNTFKFSTVDPIVDMVMDEERNTIYTRTEGMKMQLFDLGANGDGPLTKITEEKNIVDPLDAPYGGRRTNAPPPRTARSPKPSIVCISPLSAMESKWLHAVVVLSDGKRLFLTTSGGIGSSVGLNSGLRRPTCLKIVATRPSPPLGVGGGLTFGAVSAAGRVHPEDLALKVESAFYSAGALIMSDSSATAMSSLLAVQKGSAAQLSLPSTFGTASRASRALRETVSALPVEGRMLCASDVLPLPDAAYMLQSLYADVECFTGFRKPFEKACIKLWAKGDLPTQHILPRRRVVVFNTMGLMEVIFNRPVDILRKLFDGNTLRSQIEEFFNRFGAGEAAAMCLMIAAKLLYAEDSLISNSVSEKAAEAFEDPGLVGMPQIAGTTALSNTRTQAGGFSMGQVVQEAEPLFSGAYEGLCLCSSRLLYPIWEFPIMVIRRPAGTNKCEDGVIVCRLSAGAMEILESKIHSLETFLRSRRNKRRGLYGYVAGLGDSGSILYKTGPIIGPGGHSNGRSPYNSQIQDMDPADKSASNKKPRLLYTSAELAAMEVRAMECLRRLLRRSGEALFLLQLICQHNVARLAQTLGNDLHKKLVQLTFHQLVCSEDGDQLAMCLISALMEYYIGPEGRGTVEEISTKLKEGCPSYFNESDYKYYLAVECLERAASMANNPDERDILARDAFNLLTKIPESADLSAICKRFENLRFYEAVVRLPLQKAQALDSNADITNGQIDPRHHDTIMLQREQCYEIVMNALRTLKGVGHSRMQSADKSSGVATAVDPASRTKYIKQILQLSVQWPDTVFHEHLYKTLIELGLENELLEYGGSDLASFLQSAGRKHQEEVRAVSSVTSGAAKLHDLSAPILTSQTKYLELLARYYVRKGERIAAARMFLILAERQCSNSEEVPTLDKRYEYLRDAVLQAKSAGIEADSSRKPIDSSTVDLLEGKLTVLRFQMQIKQELELMTARVENISSSSESPSGLFPRDNILADAEAAKAAKDKAKELSLNLKSITQLYNDYAVPFELWEVCLEMLSFANYSGDADSKILREIWARLLDEALTKGGVAEACSVVKRVGSKLDPADGACLPLDIICLHLEKAALDRLSSGEELVGDDDVARALLGACKGLPEPVLAVYDQLLLNGAIIPSLNLKLRLLRSVLAILREWGISVIAHRLGTTSTGASIFLDGTFSLNQTGTANQGARDKIISLANRTKRRMSTVVSVNLRRNYYLLIRQFSVVLQDCKRRVEGSGFTAA

SEQ ID NO: 61278 - protein, 263 aa, Zea Mays
MVAETAAIGGETPGQSLNGTVKSTTRAGTFVTLPDGSEGFLPREEEALALFTLIGQSAMEIGKQIRVKVLNVAHVQATLIMKGVEDDEDDLKTLNMELKRDWSRGTNAFELASVGTKRSLHSCIRGKGPKCRLILQFLLRKLKAIRRKLLQKMRKVGIQDSTSVANVVEDQTVGSESSPTISVELSSNGTPDRSIVSPVSETADKPTEPKESSAVEEVLVTASSEAGKEPAADTEAVPALSEKTGAEVVATAGVAQASTTTCL

SEQ ID NO: 61279 - protein, 546 aa, Zea Mays
MTSGNCNSEALLAFKKAVTNSDGVFLNWREQDADPCNWKGVRCDSHSKRVINLILAYHRLVGPIPPEIGRLNQLQTLSLQGNSLYGSLPPELGNCTKLQQLYLQGNYLSGYIPSEFGELVELVALDLSSNTLSGSVPHSLDKLSKLTSFNVSMNFLTGAIPSSGSLVNFNETTMRLVENQNDDMINKRNGKNSTRLVISAVATVGALLLVALMCFWGCFLYKNFGKKDMRGFRVELCGGSSVVMFHGDLPYSSKDILKKLETMDEENIIGAGGFGTVYKLAMDDGNVFALKRIVKTNEGLDRFFDRELEILGSVKHRYLVNLRGYCNSPSSKLLIYDYLQGGSLDEVLHEKSEQLDWDARINIILGAAKGLSYLHHDCSPRIIHRDIKSSNILLDGSFEARVSDFGLAKLLEDEESHITTIVAGTFGYLAPEYMQFGRATEKTDVYSFGVLVLEILSGKRPTDASFIEKGLNIVGWLNFLAGENREREIVDLNCEGVHTETLDALLSLAKQCVSSLPEERPTMHRVVQMLESDVVTPCPSDFYDSE

SEQ ID NO: 61280 - protein, 189 aa, Zea Mays
MCRLQTSSSSPPPPFLGGHPRRCVAFQHRHHRVPAPPSPVCVPGPLSSRRPEDRARPPEDCSLPQGAGGDAAASGDLGPTSHLIPLQFSAALELLSSAFRRRVYSCCSPLPSVSVVCPWNAFILLATRSVVLCMPAFEATTTVHTLSGSGCFKDRAKQARPRPSMMATGARLRAGLPRDGSQIRPLSPP

SEQ ID NO: 61281 - protein, 75 aa, Zea Mays
MILFPLPTTEKPVQANIKQARPSFSSPLTLDASPPLLPHPSIAPPSGLRSHSLTPAPPPIRVALCWKERWSRPSS

SEQ ID NO: 61282 - protein, 703 aa, Zea Mays
MPSSYAAAAAGSSSRKPNRTSSAAAPTLRPPAPSPSPAPAPLAVNPSVISDSDPSSYSSSSADEADFAASDSATASVVSAYLSVAGEGADLSKVGIFLSSAARRRSPPCLICFDPIRPSDPVWSCSSSCFAILHLPCIQSWAHQSASGPAVPCPTWGCPKCRFAYPKSEIPSSYVCFCSKTIDPAPDPWILPHSCGDVCGRRLDANLDSGCEHTCLLLCHPGPCPPCPAVVPKATCFCGVHREPRRCAHQRYSCGGKCNKRLSCGLHHCPVDCHDGPCPPCAVLGSHKCECGEILEEKLCSERIFQCKRECGGMLDCGKHKCERGCHGGKCGECPLRGRRTCPCGKKNYPRLECDAEAATCGSTCEKVLGCGRHRCPERCHRGPCDGTCRLVVTKACRCGGLKKEVPCYQELTCERKCQRLRNCGRHACKRRCCAGDCPPCSELRCGNHKCLSPCHRGACSPCPLMKTISCACGKTCFEVPCGTEKNQKPPKCSKKCNIPRLCRHKLECRPHKCHYGACPPCKLICGEEFPCGHTCKERCHGPISPPNSEFTLKPTKKKMGKHIECTPGTPCPPCKEVVLVSCFGQHLGQERTMPCCKWRPFPCENLCGNPLLCGNHYCTKSCHVLEVPLNHPEGDRTTSISKVNALAMPCEQCNLPCQRVRYSLFVFKNSSLVCFTKLNMKKLLWFHMLLSLVQDIDIFISG

SEQ ID NO: 61283 - protein, 163 aa, Zea Mays
MNFSRNKICFKCEEPHPKRQLNPGEWECPSCDFVNFRRNAICKKCNQDRPEDDTRDSQRGLRKTRGAGKFRRFDYIDQKSDDDDDNAWFQKRGASMRSKPDQRTTTAKSRGSDGLDDILVTTKRRSTKQDEDDEVLPYEGARKHVVSRRATPSQRRFTAARNQ

SEQ ID NO: 61284 - protein, 335 aa, Zea Mays
MLCEKQVSEGLDFADRAGRAVIVTGMPFATPTDAKVRLKREYLDKQGTPSNKNTKMLTGEEWYVQQAARAVNQAVGRVIRHRHDYGAIIYCDERFVWPNYQSQMSYWLRPHIKCYSKYGEVVQGLTRFFRDKASSDPLTLEPTDCNNCIAPPANKHMLKEKLSDLAASAQDECPQITLSGNSTMRRSNFMKLAQITPANRSTLTTKHNFVSTSTKHNLPEDQLSQDTNVDITVDLAIQGHLKEHTFKSLGLKKAKTMDRSKDAVVLDDVSSKLPQNIGSRALARYQCGGPTPESKKSTIATACGKNDGACEKTEGQESNSGPAFLKLVQEKLSPA

SEQ ID NO: 61285 - protein, 186 aa, Zea Mays
MGAAAAAKHALQVVAAGGDAGQSSFSANSPPTTGAGFVALDVGELSSLAGDAGPPGTPIAPPRTPRVVRSLSRKGDRKPADADANATAGGGRERPQLFVHVAAGDLGDAPGSARLVVHTPLAGTPGSKSRRFGRRAAPWLDPRRVVFLFATLSSVGTLILLYFTLSMSRADSSSGGGGGSGGSDAR

SEQ ID NO: 61286 - protein, 532 aa, Zea Mays
MSVAVGKRVLDTGWLAARSTEVALTGVQLTTTHPPAADPAPAAPWMSAAVPGTVLGTLLKNKLIPDPFYGLNNQAIIDIADAGREYYTFWFFTTFQCALSGNQHATLNFRGINYSAEMYLNGHKEVLPKGMFRRHNIDITDILHPDGNNLLAVLVHPPDHPGKIPPQGGQGGDHEIGKDVATQYVEGWDWMCPIRDRNTGIWDEVSISISGPVNITDPHLVSTFHDDFKRSYLHCTLQLENKSSWIADCTLKIQVSTELEGNICLVEHLQSYAITVPPQSDIEYTIPSLFFYKPNLWWPNGMGKQSLYNIEISVDVKGFGESDSWSHYFGFRKIESTIDDSTGGRIFKVNGEPIFIRGGNWILSDGLLRLTKKRYMTDIKFHADMNFNMLRCWGGGLAERPDFYHFCDVYGLMVWQEFWITGDVDGRGIPVSNPNGPLDHDLFLLCARDTVKLLRNHASLALWVGGNEQVPPVDINKALKNDLKLHPMFDQCGMVLRMVKGTSLMVHMRFSIQRVFSRTASTNMGSTLKLGL

SEQ ID NO: 61287 - protein, 140 aa, Zea Mays
MPNCFSKTKQARMMIMYLLENKLSKTYLLLHFSKTIDHTQEVQIRKQAVATPVRFSDGSRQGLTMEKSTVVVSVPVVVMAETAETDYSSSFSMQSPRKMLGRVINQGIRELLRSLQYIRSIVLRWQTLFNSGGQLLQLPV

SEQ ID NO: 61288 - protein, 177 aa, Zea Mays
MAEKEETKGRCPACHTRYDKDMIVKMAATCDRTVADKNAEKKQKAQRVKPKAAPTATTTSTVESKKHLATIRVIQRNLVYIIGLPAHLCNESVLERREYFGHYGKVLKVLVSRPTGPPSQQASANSSISGDIRGASELYVHLQEQLQQFSIRLMFIHLRYKCGGDGASSMMSRLILI

SEQ ID NO: 61289 - protein, 140 aa, Zea Mays
MDKGTILKTMPLEPSSQNPSMQIAVIRHVVSGILLHNTIYDVVPLSSKGLALVPFWDDRQGTITGMLTASDFVLILRKLQRNIQVIGNEEPISAWKEAKLQFYGGPDGAVMQRTPLIHFVQTGNIDLRAKKEAQLGMLPV

SEQ ID NO: 61290 - protein, 140 aa, Zea Mays
MSVSPRVAAQDMKESQEVKEALRAQMEVQRRLHEQVEVQKRVQIRMEALEKYIDSILESACKMVTEQFASSGFSISNPDLPEISPGGVMCGSTDTLGSSVLNQLSVSSIDSHSPGGKPSPSGMEGPTLLQKSPELKRRSS

SEQ ID NO: 61291 - protein, 446 aa, Zea Mays
MGNREAISKMNKISAAVLTSVLTLIDEYDLYGQVAYPKHHKHSEVPDIYRLAARTKAAMHGLPVIATKNGAPVEIHQVLENGLLVDPHDQHAIADALYKMLSEKQFWSRCRENGLKNIHQFSWPEHCKNYLSRILTLGPRHPAFACKEDHKVPVKCRKHIFVIAVDSVNKEDLIQIIRNSVEATRSGTMSDLTGFVLSTSLTIAELQSVIVRTGMLPTDFDAFICNSGSDIYYPSQSSDVPSNSRVTFASDHNYRSHIEYRWGGEGLRKYLVKWASSVVERRGRTEKQVIFEDSEHSSTYCLAFKVINPSHLPPLKELQKLMRIQSLRCHALYNHGATRLSVIPIHASRSQALRYLSICWGIELPDAVVIVGETGDSDYEELFGGLHKTVILKGGFNTPANRIHTVRRYPLQDVVALDSSNIIAIEGFSTGDIRSAMQQKLGIPTR

SEQ ID NO: 61292 - protein, 381 aa, Zea Mays
MMKFKKGGCCGKASKDENTRKDNMILLGKREAKQATPAADAQVSTMRGSMFCGGDLRWWMLAIFFLCTLIAAAEERVVTHLPGFQGPLPFQLRTGYVEVDEDNGVRLFYYFTLSEGSSADDPVMLWLSGGPGCTSFTGLVYQIGPLSFDLDSYMGGLPKLVYRPESWTKVSNIIFLDSPVGAGFSYSVKEQGYNSSDTKAVSHILVFLKKWFDEHPEFLSNPLYIGGDSYAGMIVPTVTSEIAKGLKIVGSKPTMNLKGCLVGNPFTDQSNFDGPSKIPFAHRMALISDQMYKSYKKSCRGGDNRHQSIQCRNSLDAIDECVKDISEFHVLEPRCAYASPHQYNVLKLKTSLGVQKMQQLPDFTAEGLHLSEISTECRVCA

SEQ ID NO: 61293 - protein, 97 aa, Zea Mays
MSPGTLALMCDEEAFEKMCDEQDTMFTTSQNAAPQQTVIVNHNQSALYAEQENVVLTEFRDCLRKFVRYGRMKGASGIGSVTLSSLSLYCIIWIHLN

SEQ ID NO: 61294 - protein, 438 aa, Zea Mays
MIPSWSEAGARLLVTRFLGQYVSVGNLVLLEEGGTMFSFGEVGKKCHVKSVLRVHDPMFYWKVATEADLGLADAYINGYFSFVDKREGLLNLFLILIANRDANKSSSSAAGKRGWWTPLLLTAGVASAKYFLRHIARRNSVSQTRQNISQHYDLSNEFFSLFLDPSMTYSCAIFKTEDQSLEAAQLQKVCLLIDKAKVERDHHVLEIGCGWGSLAIQLVKQTGCKYTGITLSVEQLKYAQRKVKEAGLEDHISFMLCDYRQIPTQRKYDRIISCEMIEGVGHEYMDDFFGCCESLLAQDGIFVLQFISIPEERYEEYRRSSDFIKEYIFPGGCLPSLARITSAMSAASRLCIEHLENIGYHYYPTLIQWRDNFMANKDAILALGFDEKFIRIWEYYFIYCAAGFKSRTLGNYQIVFSRPGNDKLGDSGIHSLSKLSGS

SEQ ID NO: 61295 - protein, 1174 aa, Zea Mays
MVDVSRRIDDYRQHPHFSVLASSLVSSRVSECLKSSKLYSKKADGETSTDTYGMKWLKDVVLSKRSDNVFRSIMVGDPKIKLWEIGIPEDLSSSLVVSEHVSSYNFQSTNLKCNLHLLAKQELFIRRNGKLMFLRKADQLEIGDIAYRPLQDGDIILINRPPSVHQHSLIALSAKILPIHSVVSINPLCCTPFAGDFDGDCLHGYIPQSIRSRVELEELVSLHNQLLNMQDGRNLVSLTHDSLAAAHLLTSTDVFLKKSELQQLQMLCLSVSTPAPAVIKSMNFQGSLWTGKQLFSMLLPSGMNFSCDTELHIMDSEVLTCSLGSSWLQNNTSGLFSVMFKQYGCKALDFLSSAQEVLCEFLTMRGLSVSLSDLYMFSDHYSRRKLAEGVKLALYEAEEAFRVKKILLDPINIPVLKCHDETEDVTYRQSDCIQSNPSVIRSSIMAFKDVFRDLLKMVQQHVSNDNSMMVMINAGSKGSMLKYAQQTACIGLQLPASKFPFRIPSQLSCISWNGQKSLNYEAESTSERVGGQNLYAVIKNSFIEGLNPLECLLHAISGRANFFSENADVPGTLTRKLMYHLRDIHVAYDGTVRSSYGQQIVQFSYDSVDDLVDKLGAPVGCRAACSISEAAYGALEHPVNGLEDSPLMNLQEVFKCHKATNSGDHIGLLFLSRHLKKYRYGLEYASLEVKNHLERVNFSDLVETIMIIYDGHDKIRNEGMWTTHFHINKAMMKKKRLGLRFVVDELAKEYDTTRDQLNNAIPSIRISRRKCLVGDEGVKSSSCCIAVVAHAERNSISQLDTIKTRVIPSILDTLLKGFLEFKDVEIQCPHDGELLVKVCMSEHCKGGRFWPTLQNACIPVMELIDWELSQPSNVSDIFCSYGIDSAWKYFVESLKSATTDTGRNIRREHLLVIADSLSVTGQFHALSSQGLKQQRTRLSISSPFSEACFSRPAQSFINAAKQCSVDNLCGSLDAVAWGKEPFNGTSGPFEIMHSGKPHEPEQNESIYDFLCSSKVRNFEKNHLDTRRQSTENASICRLACKSSKGSTTVNGVAITIDQDFLHAKVSIWDNIIDMRTSLQNMLREYPLNGYVAEPDKSQLIEALKFHSRGAEKIGVGVREIKIGLNPSHPGTRCFILLRNDDTTEDFSYHKCVQGAADSISPQLGSYLKKLYYRA

SEQ ID NO: 61296 - protein, 174 aa, Zea Mays
MTFAGSITENYLWKFCAFQGNKRVGGVEKGTELHVRGISVGVIFSICVLFFGWEFQFILGPRGGKLKLQLCGVLFKFPLFLQILYFRKCALSIYLSESLLCFSLFLACSSSSHLLLCSPCFVFVVFCTKHFDPSLSCSNSVTFIPKFARIRFFFILLPVEHLLIYLFVVFGKDY

SEQ ID NO: 61297 - protein, 1006 aa, Zea Mays
MRSVNGEVEGTHDHEANRRGQLIEWMNALLPEFSLPPDSSDEELRELLSDGVVLCRVANTLIPGVLEGSWDGYAPSDQRLGNLNKFLSVIADMGLPGFSVKDLDEGSMSPVVECLLVLRDSVDPRLGDDIPPDVTRTPLRKQWGVPEMDKPQVHGAALGKRSPAEDKRNGVADPKAHQKTSVFSGQKFCDVFQLKHGSYSGPAAAKISEMMHSNSLDNAPTQSLISVVNGILDESIERKKGEIPHRVVYLLRKVVQEIERRLYIQAEHIRSQNVIMKRREQKYCSKIKVLEMLVNGTNEENQMAINRLQIVKNEKSKIEERRKLSEQDVHRLMREKEHSENIIANLKKDIEAMNRLHEQQLEQTERKAKEMEEQLTTKVKEVEYLLLQSKKKVEEVETASRLKSQLWDKKEDNFQSHMDNQQLIIKDIRILSRSCENDMYALQMQWRNEISNLGSGLKCLVDAAENYHKVLAENQKLFNEVQELKGNIRVYCRVRPFLSGQDKKSTTIDYMGENGELLISNPFKQGKDGHRLFKFNKVFSPFASQAEVFSDIQPLIRSVLDGFNVCIFAYGQTGSGKTYTMSGPSTSKQDWGVNYRALNDLFDISLSRRNAFSYEVGVQMVEIYNEQVRDLLSNDIAQRRLGIWSTSQPNGLVVPDASLHSVKSTSDVLDLMEIGQANRAVGSTALNERSSRSHSILTVHVRGLDLKNGSTSRGCLHLIDLAGSERVEKSEVTGDRLKEAQYINKSLSALGDVIFALSQKSIHVPYRNSKLTQVLQSSLGGQAKTLMFVQINPDVESYSETISTLKFAERVSGVELGAARSNKEGKDIKELLEQVASLKDTISRKDMEIEQLQVIKDKAKSPNLLLDRNGPGLTKITVNQPSQLLSGERMLKSSDRVLSDPPDNRDSNHNLTDTAPVSLDEAEYDGNASDDGLSGEAENYNSAAEMTAERLHGIPSRISRFTLTKNGQPSMSRSKSKDAKTPSNAKAPSSQLTGGSSARGSKRWQK

SEQ ID NO: 61298 - protein, 592 aa, Zea Mays
MGGVAHPTHHQSVSQQPQPRTITKAAHESTTAPRLFFFTCVACPAPMETLLAGNPANGVAKPTCNGVGALPVANSHAIIATPPAAATLAPAGATLGRHLARRLVQIGASDVFAVPGDFNLTLLDYLIAEPGLTLVGCCNELNAGYAADGYARSRGVGACAVTFTVGGLSVLNAIAGAYSENLPVVCIVGGPNSNDYGTNRILHHTIGLPDFSQELRCFQTITCYQAIINNLDDAHEQIDTAIATALRESKPVYISVSCNLAGLSHPTFSRDPVPMFISPRLSNKANLEYAVEAAADFLNKAVKPVMVGGPKIRVAKAREAFAAVADASGYPFAVMPAAKGLVPEHHPRFIGTYWGAVSTTFCAEIVESADAYLFAGPIFNDYSSVGYSLLLKREKAVIVQPDRMVVGDGPAFGCILMPEFLRALAKRLRRNTTAYDNYRRIFVPDREPPNGKPNEPLRVNVLFKHIKGMLSGDSAVVAETGDSWFNCQKLRLPEGCGYEFQMQYGSIGWSVGATLGYAQAAKDKRVIACIGDGSFQVRTEEQLKEAIATATGAKKDCLCFIEVIVHKDDTSKELLEWGSRVSAANSRPPNPQ

SEQ ID NO: 61299 - protein, 307 aa, Zea Mays
MPLREGAKRVSSARHYAPAAPTPAPAGAPVPPHRPPRSVSAAGSISTASARKPPEPLRRAVADCLSPPAPHTHGPAAAAASATAEASRTLRDYIANPSTMDMAYNVLIDHALAESDRSPAVVPRCVSLLKRYLIRYIPRVQTLRQIDLFCANTIAKCEPMANNRAASFAKNNVSAAAAINSSSLAPPISNFASASLVKSLNYVRSLVARHTPKLSFQSIVAAKQSLPSLSSFLNRSLLSQLTPEVISNREHLESKECHSSPDFISSASEKVDVGEPVDDSKYISFDILSWRWHVYGERQSSLSAKER

SEQ ID NO: 61300 - protein, 277 aa, Zea Mays
MYGFGSKKQLLEDFASTTLTNFTVVVINGYLPAVNLKQVIATIAEMFWDQTKAKRRKRAGTRSQLSQQFPSQSTEGIISFLMRQTSDDVDDHVCLLIHNIDGPALRDTESQQCLAQISCCPQIRVVASIDHVNAPLLWDKKMVHKQFKWSWYHVPTFAPYKVEGVFYPLILASGGHAQTTKTALVVLQSLTPNAQSVFRVLAEYQLANEKEEGMPVSSLYTKCRERFLVSSQVTLNAHLTEFKDHDLVKTRKHSDGQDCLRIPLVSDALEKLLQELA

SEQ ID NO: 61301 - protein, 256 aa, Zea Mays
MYPPIHQCQNGHTLCSTCKTRVHNRCPTCRQELGDIRCLALEKVAESLELPCRYYSLGCPEVFPYYSKLSHESQCSFRPYNCPYAGSECSVVGDIPFLVAHLRDDHKVDMHSGCTFNHRYVKSNPREVENATWMLTVFHCFGQYFCLHFEAFQLGLAPVYMAFLRFMGDENDSRNYSYSLEVGANGRKMIWEGTPRSIRDSHRKVRDSHDGLIIQRNMALFFSGGDRKELKLRVTGRIWKEQQNPDSGACIPNLFS

SEQ ID NO: 61302 - protein, 162 aa, Zea Mays
MAADGGGGVDWESLAEATSGAIGSLVSTTVLYPLDTCKTKFQAELQTHQGAQKYRNLSDVFWEAIRKKQFLSLYQGLNTKNIQSFVSSFFYFYGYSYFKRLYLEKSGAKSIGTTANLLVAAAAGACTVIVTQPLDTAASRMQTSVFGKSKGLRETLAEVHRV

SEQ ID NO: 61303 - protein, 972 aa, Zea Mays
MFLLLLYLQVFIAQEQRCLRRLWISDRPCWTISFMSEIKRRRIYIKLVESTRSEDFSESKIITISFLYATMPVWLLFFALGISSDKEVFDMIDMQDCDASVINTISATIKESDKLCEDFRKSDKARQYVDELVKSSRFPPAESFDDYIARFLFPDISGNRNKALFLGYMVKCLLMAFTGKRKCDNKDDFRNKRLDLPGELLGRELRAQLRLAEKRMVKAIQRDLNSDRELQDLERYIDASIVTNGLNRAFSTGSWCHPYKRAERCSGIVATLRRTNPLQMMSDLRKTRQRVAYAGKAGDARYPNPSYWGKLCFMSTPDGENCGLVKNLAVTAIVSSRVMQPLIESFISCGMSKLNDIPTEHIQRMDKIFLNGNWVGSCENSASFVFRLRCMRRSSLIDPQVEIKRDKHHNEVRVFTDAGRILRPLLVVENLNKIRKPKGRSFSFHELMQQEIIEFIGVEEEEDIQCAWGIRHLFESEGAISSYTHCELDPSFLLGLSCGIIPFANHNFARRVLYQSEKHSQQAIGYSTTNPHIRVDTLSHQLYYPQRPLFKTVIADCLGRSDYASFGRKNDFARPEYFNGQNAIVAVNVHQGFNQEDSLVMNRASLERGMFRTEHLRSYKADVENKDGTKRLKLKEKIDFGKTESKRGRVDNLDDDGLPYVGASLQTNDIVIGKVSESGEDHSIKLKHTEKGMVQKVLLSANDEGKNFAVVTLRQVRTPCLGDKFSSMHGQKGVVGFLESQENFPFTHEGIVPDIVINPHAFPTRQTPGQLLEAALGKGIACKGTMRYATPFTTASVDVIAEQLHRAGYSRWGSENVLNGRTGERVQSLVFMGPTFYQRLIHMSEDKVKFRNTGPVHPLTRQPVADRKRFGGVKFGEMERDCLLAHGSAANLHERLFLLSDFSQMHICQTCERVANVVMRSVPGGKKIRGPYCGFCKSSENIVRINVPYGAKLLYQELFSMGICLKFETQVC

SEQ ID NO: 61304 - protein, 324 aa, Zea Mays
MLSFFCFRLKQCMSVFFQHYPALSDKHKSCICNAFVPVMKAMWPGLYGNAGGSTHVISKRRKLAVQASRFMVQMVQTQLFSTESMDQASKSSESASGLADASNNFDISEEGLAIRIALEVASCPDKKTAAGKAYALALCKVVVLLRFRQSEQKAIKCMRGLVNHLAASVASDKELGKELAQMAARLRSLDACPDEELAQDDADAIFKKLGFDDGFKLDTNQAVPPTPAPRSVRPPAPARRRARQAPSSSDDSDEEAGEADVPATSASRVPATPSMTAAARSQRASKTAALSKMSAKPATASDDSELDGQSDVTSEEDASDEESL

SEQ ID NO: 61305 - protein, 113 aa, Zea Mays
MKQSKFSALAGFECWRGSKEQHHVYTSCCVGALGALLCCVLASSRTTASAPYNQYLGLPYSVKISSLPSNSSQSSLFECAVLVYCWYNPLCILGLPVPEPFSPWTRYAHFPMD

SEQ ID NO: 61306 - protein, 92 aa, Zea Mays
MSSAYEVGTANWYMVHKLNISLFVLTPLQDENTSYYIEDCMEAPGAFVLHLLKCVLVSGGVAAFLALVHLSPITTASCVIWIQWKHLRPSLE

SEQ ID NO: 61307 - protein, 211 aa, Zea Mays
MFPPKGPNHYGQQLPYGVQQPYGQIPSSTGFAAPAAAGGTDGGRFGARAGQGAAAQYGGPYASVYGTQQVGGLGGKGPASSSLPSFPTRPTSLPESSNFSSAPVGSGLARPNDDYMAVRGYAQKLDQYSTDYPLERRMYGEHSANLGRRDGLSDLDRRYTDQTATGHQVHDHMEQSSSMRHQQLLKGQLQPGSDTRFFHFASWMMRGIICA

SEQ ID NO: 61308 - protein, 130 aa, Zea Mays
MVAAAAEVSTAATASSSPPAEEGERRDESESDGEMAGLAAVLDFDMLCASVALSAERRKAGAALAGAAGDCGGGGGGVQRMWEGDVVLDCLDDRRIALETSCCPCYRFGKNMRRANLGSCFLQVCCVSFK

SEQ ID NO: 61309 - protein, 102 aa, Zea Mays
MEKALLRYCASFLTPDDKRLILRIKDQAKQMIQSEGDQSLIVTICLECIAKEAELMYNYLPCDFDTTEEVAVCNKVRRSALNLMLYKGSESAVAAGAMMVCS

SEQ ID NO: 61310 - protein, 577 aa, Zea Mays
MPMRPWKSSEVLPTTLESWQPVYQRRKFELSYPKLPGHLKDCLRYFSMFPKGYEISAERLVWAWIAQGFVKETQGQNDLEKVGKKYLIDLISRKMIEAVEVHADGMALSCRAYDLLHGLIVSLSTEEKFVEILNDSQSQERASNPNTEVHRLSIQIQRNNMLHPLPKAWMKQVQSLVVSSDTVPDLSDFQGLHAMDLGGCDSLQVDHLKGISKTTSLIYLAIGGKYIADVPKEVSWLKKLRTLDLTASGLSELPRCILTLTNLERLFVNSHMKIPGKISKMSGLQELGDINIVKPELLKRLRKLSKLRVLRIAMWSWDEGSKSSVKLWWETLHSLIGSCKKIESLCILTFCSLDFMDGSGDDNKWPPQTLKNLEISHSAFLDKLPSWFDSLSTISSLTIEVNKLSKNITDTLAKLSALRSLSLTSIEKPEPEVRFVIGSAGRFENLESLKFVCNEMVNLLERPESNATQQLTGLTIVFHASRTERSRNKDFRFGLDKLLSLQHVRVEINCSNATQRTVKNAEAAIGEEISKIRRDDGSQPILEIRRLQEESMIAGKDQTQDANKTPSSSVSSQAPRK

SEQ ID NO: 61311 - protein, 523 aa, Zea Mays
MALAAAPASGDSQSGPQRNYQVVVAATRDMGIGKGGVMPWKLLGDLKFFKELTLTTTDPAKKNAVIMGRKTWESIPVKSRPLPGRLNVILTRSGSFDFATVENVVICGSMKSALELLASTPYCLSIEKVFVIGGGQVLREYLNGPACEAIHLTDIQSSIECDTFIPPVDFSVFQPWYSSFPVVESNIRHSFVTFVRVRKSVAETHESNGKESTEIDTKNDKFEIENFSFLPKIVYDRHEEYQYLNLVEDIIRFGAQKNDRTGTGTLSKFGCQMRFNLRKNFPLLTTKRVFWRGVVEELLWFISGSTNAKVLQEKGIHIWDGNASREYLDRIGLAHREEGDLGPVYGFQWRHFGAEYTDMHADYTGKGFDQLMDVIDKIKNNPDDRRIILSAWNPSDLKKMALPPCHMFAQFYVENGELSCQMYQRSADMGLGVPFNIASYSLLTYMIAQVCDLSPGDFVHVIGDAHVYRNHVRALEEQIQKMPKPFPILKINPSKKDIDSFMASDFKLVGYDPHQKLEMKMAV

SEQ ID NO: 61312 - protein, 270 aa, Zea Mays
MKHSGHKVCDRDSSSESDRSHQEASAASESSPNEHTSTQSDNDEDHGKDNQDTMKPVLSLGKEGSAFLAPKLHYSPSFACIPYTSDAYYSAVGVLTGYPPHAIVHPQQNDTTNTPGMLPVEPAEEPIYVNAKQYHAILRRRQTRAKLEAQNKMVKNRKPYLHESRHRHAMKRARGSGGRFLNTKQLQEQNQQYQASSGSLCSKIIANSIISQSGPTCTPSSGTAGASTAGQDRSCLPSVGFRPTTNFSDQGRGGLKLAVIGMQQRVSTIR

SEQ ID NO: 61313 - protein, 86 aa, Zea Mays
MLLVKVCQLAELISKLVSNFSVFCLTFSPDVWLGLCSVVLSDPNLQSSSAMIICLLLCDIVWVCLSSFCVRKGTDGATQAHVHNGT

SEQ ID NO: 61314 - protein, 774 aa, Zea Mays
MASSYASTVTSMLATDRENRRARGTRWIWEEEQENCSCSLRFSRSVANIWYQIQSSWIHLLFCRGYPDLPRWSTKTPPSASCSMKCDSWRRVCPSASADAATTSSTTWTSTVKSPVTRRLASTRVPSSTRSPVSTATSLIRIRTLPATGSICSRSSVQWPRAPGICFLHRASLPCRAATSQAGIRRPQEDRELVQPPRRVESATCVESSVPRASSTELDREFIAASAFVTASVASSTSALEAGAHVDVAGEPEFPPRVTLDGHPDDELLHVEGAVVRPLLEEREQQHGTAQRVIVARGQSVLHRQYQLDSSPLDSCNIFAPERPADREMVEASAVMVVWAYDAACDRVGVQEVKHACEVGCSGGEMCLFTDLLGDLLCRIHRSPDSLMLVVETTIGTNSTEIAGIVRGCAKTAVSVGTTQQAKDDPIYTKVGSILGLRVSPSHWRKGMGKKLADREEDEVVQASYTYNIYNNWAPLEDALRLFDRMCMEHDSPRTSAVNLGSFNVMVDAYCHAGRGQYAIKVFGKMPRRGLCQMYSSNNLIDWLGKNKLVGKSEGWYMEEAARAVLELLGVQASVHQMTVKVTIGQTISCSHLLRSGKIATICHDASIAHSEHQYVATGMPTEVVLEVLVENMGLPGGYTPSFDSSDLRRSCQWWNNLAKRVATLEFDRTRKSMGVIVKANSGKNSLLVKGAVENLLERCTYIQLLDGSVVLLDDGAKALILFTLHDMSASALSCLGFAYKYELSAPREEVHKSIDTCYGCNKRQQRNNRGHLP

SEQ ID NO: 61315 - protein, 82 aa, Zea Mays
MAFAGNADDSAEDYSAEATVVRFDPPLPLLRAPVPSPASSGEGPVLAFRDAASWRAAWEAAEASLVSQCELAEVPRGSHARQ

SEQ ID NO: 61316 - protein, 154 aa, Zea Mays
MVLTNGIEVKLQRNALSVIEPPTGNEDDDKFDCENLRWNSSDLVSDDAQSPKPQRSRSRQHRGFHRKSFSRSMSCDSQSKTSVSSSSRAHTKVDLSKLELTALLRYWRHFNLDACPNPSREQLVDAVQRHFTAQVDKTNLTSDSSNLHHYGVRS

SEQ ID NO: 61317 - protein, 214 aa, Zea Mays
MDALIKREETKREAMECQVNLQRVQMKYKHEAQLVEDGTTLSGFQQTSSRFESSDDDVDSDDTATEQTYIRPAVFHPRFSANKLSVIPPLRIKRERELKRRPQQNGCVFKRVSSHHQILLLRMVPHHHHFGVEVGLDEAAASSLIDGILFSGHQLTRRLIMCHTVTGPPHLKVEAVFHMHIVLNGTGTAMEFVKPLSNCFSIGAKLALGESIVS

SEQ ID NO: 61318 - protein, 1408 aa, Zea Mays
MLIERYNTAAGEGTALCGIFSDIHRAWATVDNSFFIWRFDKWDGHCQEHNVDEQAICAVGLARAKPGIFIEAIQYLLVLATPVELILVGVCCSASADGTDPYAELSLQPLPEYMIATDGVTMTCITCTDKGQIFVAGRDGHIYELQYTTGSGWRKRCRKVCLTTGIGSLLSRWVLPNAFKFSTVDPIVDMVMDEERNTIYARTEGMKLQLFDLGVNGDGPLTKITEEKNIVDPRDGPYGGRRSNAPRAARSPRPSIVCISPVSSVESKWLHAVAVLSDGKRLFLTTSGGSGSSVGLNSGLQRPTCLKIVATRPSPPLGVGGGLTFGAVSVAGRALPEDLALKVESAFYSAGALVMSDSSATAMSSLLAVQKDSAAQLSLPSTFGTASRTSRALRETVSALPVEGRMLCASDVLPLPDAAYMMQSLYADVECFTCFRKPSEKACIKLWAKGDLPTQHILPRRRVVVFNTMGLMELIFNRPVDILRKLFDGNTLRSQIEEFFNRFGAGEAAAMCLMLAAKLLYAEDSLISNAVSEKAAEAFEDPGLVGMPQINGTTALSNTRTQAGGFSMGQVVQEAEPLFSGAYEGLCLCSSRLLYPIWELPIMSIRGPSGNNKREDGVIVCRLSAGAMKILESKIHSLETFLRSRRNKRRGLYGYVAGLGDSGSILYKTGPIIGPGGHSNGRSPYNSQIRDMNPVDKSASNKKPRLLYTSAELAAMEVRAMECLRRLLRRSGEALFLLQLICQHNVARLAQTLGNDLCKKFVQLTFHQLVCSEDGDQLAMRLISALMEYYIGPEGRGTVEEISTKLREGCPSYFNESDYKYYLAVECLERASMTNNADERDILARDAFNLLTKIPDSADLSAICKRFENLRFYEAVVRLPLQKAQALDSNADIINGQIDPRHHDTIMLQREQCYRIVMDALCTLKGVGHSRMQSADKSSALATAADPASRSKYIKQIIQLSVQWPDTVFHEHLYRTLIELGLENELLEYGGSDLVSFLQSAGRKHQEEVRAVSSVTPGAAKMHDLGAPISTSQTKYLELLARYYVRKGEHIAAARMLLILAERQCSNSEEAPALDKRYEYLRDAVLQAKSAGIAADLSKNPVDSSTVDLLEGKLVVLRFQIQIKEELELMVARLENIPSSSELPNVPFPRDNILANAETAKAAKDKAKELSLNLKSITQLYNDYAVPFDLWEVCLEMLSFANYSGDADSKIVREVWARLLDQALTKGGVAEACSVVKRVGSKLDPADGACLPLDIICLHLEKAAVDRLSSGEELVGDDDVARALLGACKGLPGPVLSVYDHLLSNGAIIPSLNLKLRLLRSVLAILREWGISVIAHRLGTTSAGASFFLDGTFSLNQTGTANQGARDKIISLANRYMTEVRRLNLPQNQTENVYRGFRELEEKLLSSY

SEQ ID NO: 61319 - protein, 179 aa, Zea Mays
MEAEKKPPAVSDVGAWAMNVVSSVSLIMANKQLMSSSGYAFAFATTLTGFHFTVTALVGWISNATGYSVSKHVPLWELVWFSLVANTSITGMNLSLMLNSVGFYQISKLSMIPVVCLMEWVLNSKHYTTKVISAVIVVAAGVGICTVTDVEVNAKGFICACVAVFCTSLQQIVHYTLKG

SEQ ID NO: 61320 - protein, 75 aa, Zea Mays
MFLSFVCISAHLEGSGLPGVAGPHHWQFKYQFLSNQAMGSGVRCCLRASLALHRGDEFRFICHARPGWILVFFRR

SEQ ID NO: 61321 - protein, 136 aa, Zea Mays
MFALSMELIAVWWLEIEGWVPFEFLSTDTSYDIFLVYKLADEHDGLRWGESYVAVDGVHTTDGVVSFVDEDAVRVDRVAYPVTRSEGWMELWLGEFYNKYVDREVKVSVWEKTDTYAKIGLIIEGMEIRKKSGSIS

SEQ ID NO: 61322 - protein, 163 aa, Zea Mays
MINFRRVSCINGTVPLSPSLMSAEELCSMCKFVEDGKERLVVGSLDLNQCLWLPDELTGKRPGVNEDIQTRAYLSNVCVAKELQKKGLGYTLVDKSKKLALEWGITDLYVHVAINNVAGQKLYKKCGFVYEGEEPAWKGRFLGRPRRLLLWLDMSKVLVRSCM

SEQ ID NO: 61323 - protein, 292 aa, Zea Mays
MSKDSGFNLNHVWKLMLMLLKPILSFCGMHIDPMRELRETCQYNGFDLGLPEPTKYNGEFHVKVEVNINGKMISCTAANRNSKDARKVAAQETLSKLKNYGYKHKRKSLEEILRSTTKKESELIGYDEEPINVEDDIDMQMNNLLINGERTSIQSTAGDNKVDKNDANSGRNNKSNVVMQNGCLPRGATDKINQKEYHGDMVRKTARSFLYELCAANYWKPPEFELCNDEGPSHLRKFTCKVLIEITGTSVSLLECYSDPKLQKRAAQEHAAEGALWYLKHLGYLPRDENRF

SEQ ID NO: 61324 - protein, 246 aa, Zea Mays
MGSKAPFCLTLLLLLAAACGPAAHAHDAVELPHHGLALKEQISSTKIPARLKSGSGLCSACENFTSEAVTYLGKEQTQDRIMEFLHDACSQSFSFEQKCVELMDSYATLLFAKITEIRPEAFCKRYGLCRDTALLSGVGSDSTCVFCHHLLDEIMSKLKDPDAEFEIIQILVKECNKIEGHVQQVEQIVVERSEGWHCGYFCYHAWIPRQCEDEPEGRVLGGDPLSEKDSPMARCFTSWRTTRERW

SEQ ID NO: 61325 - protein, 1390 aa, Zea Mays
MALIQSLLNHTTLETDTVLFKLVTAVPEQQKQPVQSYDTDIFSRHDQKLLKASAFLPTIESPFVPNSFTGKRKSTVGNSPVVQPHVGSRAVHEYQFLPEQPSDTYERASPHYYDTPVEASNSRIPSLTSGSQLLHGSEEAAPSYAFQGHTSGSSLLPPSSRPQVFPVAPTDYEMTQFNSNLSSVPVEGQFDTSQVAAFEDPPVSSERRAYHDEDTSRVERKRKHNEEAKIAKEVEAHERRIRKELEKQDFLNRKREEQRHKEMERLERERRKEEERLLRERQREEERFQREQRRENERMEKFLQKQSRREEKQRQKEQLRKEKEAARQKAANERAAARRIARDYMELVEDERLELMELAAQNKGLPSMLYLDSDTLQQLDSFRGMVSQFPPATVKMKLPFSIKPWTGSEDNIGKLLMVWKFLITFTDVLGLCPVTLDEFVQSLHDYDSRLLGELHVALLKSIIKDIEDVARTPSIALGVNPGGGHPQIVEGAYSWGFDIRSWQRHLNLLTWPEILRQFALSAGSGPQLKKRTVEDSHYHYDNEGHDGENVILALRNGTAAVNAVAKMKERGYTNRRRSRHRLTPGTVKFAAFHVLSLEGSNGLTILDVAEKIQKSGLRDLTTSKTPEASIAAALSRDAKLFERTAPSTYCLKSPYRKDPADSEAVLSAAREKIRAFQNVLSDSEAEKEADEAERDDDSDCDDADDDPDGDDVNIEVEEDKDPLLAVKAQDEVPSTTTVIGIKTKLDSVGNALNSSSSFTKSAKGAPLPYLGRSSAADTSNDSPLGGPSANHEVTPGDSENTQIDESNQIEPWVCALAEGDYCDLSVEERLNALVALVGVATEGNSIRGVLEERLELANALKKQMWAEVQLDKRRFKEEFASRVQYNSGMSFKPDIYQENNMTEITSTRACDAYKENDGHVGTINNCEMLDQHSQGNAGGITYDRNVVGQEIHATPDTSYVQQYAYADKTRSQLKSYIGHRAEQLYVYRSLPLGQDRRRNRYWQFTTSASPNDPGSGRIFFESEDGCWRVIDSEDLLTVLEGAIIPDRLSSDFETTSECLNSQVIAPQNPVLPAGFASVLPWVPDTTSAVMLRVLDLDSAILYVQNQKMERDDGGFMKFPSRYTVVKSKQETIPLEPTGMDLYDGRWLPGSGRRGRGRGSRGGSRGGRGRSRGGRIPRGVSSSSRIEFKDGIAASGRAPRKNARRGRGRGRGRGRRTVRPRQPSVGRGRSIPKENLMGSFSMLTSSKAADIEESPRSSGADEWGLETRMTYTERDENSSGSRYEDNEENGQPMDEDYEEQVPDYSIDYSSGSRHHEMMSMMDHETDEEDEDAEGDENVEEDDADHAVDDADVEMDEGDDEIGDDGEDGGVGGEMTPDEDPDATSYSSDYSE

SEQ ID NO: 61326 - protein, 617 aa, Zea Mays
MLVIKKVLANGHYELKEYTIDAIEGEGEHSTMLARKPHPIYPSKAGLKPSLLGLSISRALKILSPDVDPVPPDVLVEFNLPNLFDAYMGIHKPKDRSEADFARRRLIFDDFFYLQLGRLFQMLEAVGTRVEKEELLYKCKSHELNTVGVDDWSPLTKKLLRALPYWLTPSQLDAVQEIIWDLRRPVPMNRLLQGDVGCGKTIVAFLACMEVVNSGFQAAFMVPTEVLAVQHYEHLTSLLEKFDGDEKPNIALLTGSTSTRESRIIRDGLKTGEIGMVIGTHCLIADKTEFSALRISVIDEQQRFGVVQRGRFNSKLYTSSSKLSGENTSSDEASDSETFMAPHVLAMSATPIPRTLALALYGDMSLTQITDLPPGRQPIKTLALEGNDVGFEAVFQMMRDELIDGGKVYLVYPIIDESEHLPQLRAATAGFDSIKQKFEGYPCGLLHGRMRSDEKEETLNSFRSGETRILLSTQVIEIGVDVPDASMMVVMNAERFGISQLHQLRGRVGRGERKSRCIFLASTSSTLPRLKVLEKSSDGFYLANADLLLRGPGNLLGKKQSGHLPEFPIARLEVDGGILQEAHLAALKVLVASNDLALYPRLKVELSMRQPLCILGD

SEQ ID NO: 61327 - protein, 273 aa, Zea Mays
MACIANVVKNVAAVTSTSTRTPIYKAYAKGENIGDVTAKGESVGNIADLLGTGMSILISKSNPSLVTSFAFLSCGYLLSSYHEVRSVVLNTLNRARFTVAVDSFIRTGYVPSLKDGNSQETIFNPPWRHEPVAIGSRFGDAFQEPASFLAIKPLFEDERYIVTYNPTKDKVYALLKDQAKPDDILKAAFHAHVLLHFINASHANLNARKRMNSNRSYQYDPLNMDFVPHIEESCKIVMSSYGVFKKKAREQGWIMSESLLNPGRARLCGAVPQ

SEQ ID NO: 61328 - protein, 1714 aa, Zea Mays
MQFMPAFDLAQCFGMRQNFTSMDQDLIADGNVPQRSAHLRRRRDLPQTSTLPKVAVNHELGSAGTSMDPSFFNNTIKQSPSENRSSLKPPIFLMENSNHQPHHHTVALPVQYSDFFITSLGEIDNRTSYHNSYQIWPVGFTSYWHDRVTGSLFECEVHDGGNFGPLFKMRRLPCSAFQLPDASTTVCLNVVRNADTIETKEGSDLIEDTANDANDNISMLLSDFSETNQDFLSCLGNDLEGKESLGCSNVETKDMTVPDVLSDPGSFSWAPTNDANMYDKIGDFSYEGTSPSSVWRMISCAMMEACEKMYKEHGHLVLFCTHSSEKSPFDYESGPQRTDGPFNLLAKFCSSNGPKVPQFIEKENDVQSTCALLKEWLYPDRIGFDLEFVQEFVESLPKSGACSHYQFLCNRTGINSSLTIASGTLVAVNKNSPMHARHGSVVSGPQDHAQPSSSSIRELPPGNPISRKLAPELAGDVFQILEFLGRFAEIIGLKELPSIEQVEDELIDPWPMHPNKNDIHNYMDHNPPMNSPANVSSSYSNGESGDGGILCGALPGVVGMEKDASLLAEAETLICNSSANEGNTVFMMDYKDTDIVDSPEEPASDTTLPDWVKSLEPVRKLPTNVGTRIRKCVYEALERKPPEWARKILEHSISKEVYKGNASGPTKKAVLSVLTEACRTKVPQNTEKPRKERNIISISEAVLKKCRIALRRAISSDESKQFANLLGTTLTNSNENEDEGILGFPGMVSRPLDFRTIDIRLAKGAYRGSWEAFLDDVQEVICNLQTAFADRPEVLIMVVALSESFESLYKTEVQDLVEKFDRYLSNENDSSEIHQELQDALTAANNKLPKAPWEDGVCKVCGIDRDDESVLLCDNCDSEYHTYCLNPPLARIPLGNWYCPSCTAQTHVAVQEQKKCLGEEAHVFIEKLNKLAVAMDEKEYWELTVAERIYLLKFLCDELHNTALIREHLDQCSDKSNDLQQKLRHLNYELKELRYRVEIKNPYATQSRWMKNDQVSNSSGLVENQQRAMPTASEHLEEAEQVNVGVNLNNPAEGVPAALLDVGKPCSTDNGISSTSVIEGNKSLGLSEQPSKIITDQTDRDSIAEGSNSCEKSLVGKSGTCDPNVGETHAATVINAPNGDLPDENAMTLSQDNIETSTSKLVDHDADMNESNNLLERISQLHGSISTVESQLSMASLRGECLGRDSVGRLYWVTGRPCKRPRLVADGSMMIPKDRDISMVTSHSQSTFDRGWNSASLVIYESDEEMKCLVDWLRDIDPREKDLKDSILHWQKSIYRQASFPITDPPVSKFSKSEPLMELPNTNAFIVLEQKYGLQTDQDTSELSKRRGTKSRSGSEERVYRCDCLEPIWPSRHHCLNCHETYLTLMEYEGHNGGKCTSSNDCPNESKEIDEPKLKGSKSDIKEKDPVVHNCSVEPSNSGKLESCPYDFEEICRKFTTNDSIKETVKEIGLLGSNGIPSCVPSPAYFLDPPVLLNESKRNDDKPNDWTSSLQECQAVSAKMSGQEGSQVGQDFSGNAGDEELPKSKKPVRDSTSAKEAPSTDISTRLLTVNGGLVPESSLMPVIGRNFHILKQLKINLLDIEAALPEEAFRASKSQQIRRRSWRAFVKDAELISYVVLAINFLQSMIKAEFLKKDWWYWSSFTAAIKTTTVSSLALRIYTLDDCIMYTKDPAPNLQPADNARSGNKGKRKKDIDS

SEQ ID NO: 61329 - protein, 282 aa, Zea Mays
MENMNGRKRVEEGELCDRRNGRGVDLNRNWSVDWGKKEKDYDPYEENPGIAPFSEPEAQIMRELSRSFKPHIWVNVHSGMEALFMPYDHKNTTPNGASAHSMRSVLENLNRRHFQDSCLVGSGGGSVGYLAHGTTTDYMYDIAKVPMPFTFEIYGDEKASSDDCFKMFNPVDKKTFDRVVNKWCMAFLILFEEGLRNLRDAQIVSQGTLENWVPIGGDIVEINVERKSSIRERRKLEGLDLGMQELRTYFRLFLLSTFLLMFMFCARISKNRNRDSGNLFDP

SEQ ID NO: 61330 - protein, 203 aa, Zea Mays
MHRDIYEAIAELGKLFQQLCAKTLKLDVLHTMKAKIPVILCKLEKIFPPAFFDVMLHLAVHLPDEAILRGPVQYGWMYPVERRLLTLKRFVRNMARPEGSIAKAYVANECLTACSRYFDDIDTRHNREGRNKERVDLRKGDFSVFQHGVDLLGAPRLTYLEDNYDRMVWIYKEELADQGTPYVQKTHDKQFSFWFKKHVFMYK

SEQ ID NO: 61331 - protein, 1323 aa, Zea Mays
MDRVGLQAFCKRHGLSARGSNADLIARLDAALGRAAGAEEAAAGVAARKACVRQTGGDADETKKVTFVEVGGDVPVKLSRRNSLGAHVPVRRSRRNSLGADVLVRQSSRNSLCAEAQDCELRSQVTCSPVVAKTRGKSAQAGSVEVGAVVPLRRSRRNSLRAAESEEVEVAVFVDRKRKCKNQENDKGVVLSAQVGASSRVTRRSSLAVAAAVLPPLVEPKRGRGEAAGVQTSTQVEVPARITRSRSIAPVVMSPTVVENKRRKNGDAQTNVELPTVSDVPRNDAPVTRSLRNRVVQVNNSVVDANKPATKEPVRGLRRRSVVSELHEKEKDVEKQLIVKQPVRRSSRKSVLPDMLENNIQSGKSQDNEKEQKLKEPIRRSRRSVATVLLEEQNSGLHEEKLSKLTMRRSTRKSVALNGVEKTSMDHTEIVVQSETLKGRSSKRRRTIDPVEMMPVKEANDDMIIREATIDTHKATHEYNKSTSRIQESCQVNATREEFSSGPLLVTVTPTNEIYTVQSIHEVVPGSESGDNAKENLDKSKQPQEHHDIQAVDSHLSETRSGELDQSSCIAGLVPHNCVASDDKALISGDRVEQSPVSGEGRVGLEANAIESGEKNLTGIMSTALYTKSLQHDIDIVAEETAKGDLEKPSLCSLAQKCKHQCGLLEEIVLPSRNMGSLPNAEESPFGLESLFWQESIHESVEYGAPASATTHTENGFGESKGCHVKSALENTHVSEPFSHHDTEENISKIGGCMHTSQQDNGMEDAIENPLISLSTPGCKHEGALSEEAVHTMKDYAGTCSSNPRVPMQLHDDLAFPGPEKSGDESVNIEVKVHHGSNLSQLGSTDLLDDTELLHQGHNYKDRSNEDMLEQAASEPCTNGDDIVEAAAATKCLESGAMLVPSEERSNLNDRQLTPKLESPDIMESGLNCDKDARNTLDNGSVVAVAGKRTPSGSGHYEHNVYQVSGICATSEAAPVGVVETGIAVETSSLVDDQPNPVLDGDEVEKHSLNCEADTGRILGTGSVTSNTTLVPKDGHTICCQELELPNGLSSFLFPEESGICQYASVSGSGPCLQHVNESTSTQATYNIETLNQQHHEEYDQTARGILASSFPEAVGIEQSGLAPAAEAPVLAVPDGQPNSKLEGNEVDEHSCSYDAEFLNREASNLHKDLFSEDSHRSHLPSLRSPQRSAYFHNGNDSGSVGVCQSSRRGGVDGLRAKRQSFKVSSSIKGSYVAKTSVPRPKPGDSLSQSAIALRGVRKNTTAVEVGGHPVSLKPNAVRSVAKDPSSSRGPPRDSLSQSAIALPKHRKDATAVKSKTNNKPWL

SEQ ID NO: 61332 - protein, 138 aa, Zea Mays
MKTELAKIILNKHSDDIYLVEVVRRHFFVEHLFDDLHQGQPLFRWRLRHTYVDSTFVERTKEVEASNSDDVARSISRETITNTTPFGEMMEDSLACILGSPGCNMESNNPPEKTANVLTRSDLRARRRGRRHHRHADD

SEQ ID NO: 61333 - protein, 541 aa, Zea Mays
MKAEMKEKTMRMFLVSQKHIVYTEPLEIHAGTTIDVLYNPSNTVLTGKPEVWFRCSFNRWMYPGGVLPPQKMVQAENGSHLKVTVYVPRDAYMMDFVFSESEEGGIYDNRNGLDYHIPVFGSIAKEPPMHIVHIAVEMAPIAKVGGLGDVVTSLSRAVQDLGHNVEVILPKYGCLNLSNVKNLHIHQSFSWGGSEIKVWRGLVEGLCVYFLEPQNGMFGVGYVYGRDDDRRFGFFCRSALEFLLQSGSSPNIIHCHDWSSAPVAWLHKENYAKSSLANARVVFTIHNLEFGAHHIGKAMRYCDKATTVSNTYSKEVSGHGAIVPHLGKFYGILNGIDPDIWDPYNDNFIPVHYTCENVVEGKRAAKRALQQKFGLQQIDVPVVGIVTRLTAQKGIHLIKHAIHRTLERNGQVVLLGSAPDSRIQADFVNLANKLHGVNHGQVRLSLTYDEPLSHLIYAGSDFILVPSIFEPCGLTQLVAMRYGTIPIVRKTGGLISRAAARQGSSTLSSMWTMTRNEPEIEALSPTGLALTELIATVLTTR

SEQ ID NO: 61334 - protein, 466 aa, Zea Mays
MQSFLSYGCFHIFSQFILEDLIYEPSWLQSIAMAYLNKFIEPLSNLWPMNKLRERAMSDLMEHIHYEDETSNYVGLCPINKALNMICCWIEKPNSNEFRQHLPRIHDFLWLGEDGMKSKVYVGCHSWETALIVQAFCSTGLTEEFCSTLQKAHQFLKNAQVIKNIPDYKSYYRERTKGSWTLSNGENFWPIADTTAEALKAILLLSNIPSELVGDPIKQERLYDAVDCLLSFVNKDGTLSSAECKRTTSWVEFINPSESFRNIIVDYPYPECTSSLIQALVLFRGKHPIYRRDEIDKIIKSGASFIEKVQRKDGSWYGSWAVCFTYATFFAIKGLVAAGRTYRNSLAIRKACNFLLSKQLGTGGWGENYLGCQIEEYVDSGSPHGVNTAQAMLALLYAGQVEQDPAPLYRAAKELINMQMENGEFPQQEIVGNFNSSLFFNYPNYRNLFPIWALGEFRRRLVAKKG

SEQ ID NO: 61335 - protein, 340 aa, Zea Mays
MDYLRTVVPSQLLAERGSNLVVINPGSGNVRMGFASQDVPFNIPHCIARHINPQEGEEPRFSVRDQMLNCHATSSQNAERESAYDIIAALMKIPFLDDEEMPSPNQPLPPKMGRVDGFSSQQNRDDNKFTWTDVSERIIKPSTPFDRSVYKDAEEDTLPSTSDDDNGQDFKENKYKEMIFGEDALKIPPSESYCLSRPIRRGHFNVSHNYSVHQVLEDLRTIWNWILTEKLHINPRDRGLYSAILVLGETFDNREIKEMLSIVLHDLGFSTAVVHQEALSAAFGNGLSTTCVVNIGAQVTQVVCVEDGVALPHTALALPYGGDMLALGSTSPWHVAKLPN

SEQ ID NO: 61336 - protein, 97 aa, Zea Mays
MRPQSFPSCHRSLVTSRVATTIADEREGTRDLCRMRILRFTIAELSEPGRGGSPVGNESFCGTIGREGRSWQVEFLIDDWESPSSTANHGWESMLQG

SEQ ID NO: 61337 - protein, 240 aa, Zea Mays
MLGDILHPAINWADKESHLDPDEMAKMKSAFIGNLPEDVNEEYLRKLFGQFGEVVRVAISRKGQCPVAFVHFAKRSELENAIEEMDGKTVRGPGRGPSFKIQVSVARPTADNDKKRSREEVRTRRSNASGDRRDYSHGRYGHDSLDRQVKAPRLSNYVADAADPYESAVNSLPSAVKEVLLRILRLRIGTRYDIDIHCVKSLDELPESSALAVLNQVETNTTKEIILHRWLLSTRLRPLA

SEQ ID NO: 61338 - protein, 2036 aa, Zea Mays
MAQNSSRLHRLLTLLDTGSTQATRFAAARQIGEIAKSHPQELNSLLKKVSQYIRSKNWDTRVAAAHAIGAIAENVKHTSLKDLYASVQAEKHASGFSDGSDDAGSALPRTDSAATSDLAFGSFDIGRVLEFGSPLLASGGQEYDIADSGKNPAERLARQKKNLRRRLGLDLCEQFMDVNDVIKDEDLLAQKNYWGSHVQNNGFHSFNSGHNIQQLVSTMVPRYPKHSNFRSRRLSARELNMLKRKAKSNAKDHTKAVSEDDEVTLKGSVPSNGASSEQAGAQNGVFDTAVEEDNLEYNENGRWPFQQFVDQLIHDMFDPIWEVRHGTIMALREILTHHGACAGVYFPDLSLPSSDLDGKTNFDSLKREHGIDLNEDVHLEHLEPALKKHKKEPKCAESMMDCDKELVDSDYLKTEGDLSNVPDVLTAEPNSTHVKVEPEFCVDDSADPSKGVSTCKSQKKLNSISHLSSHILAPESSKFMKLMKLAKYSYMKNWEFLQDCAIRFLCVLSLDRFGDYVSDQVVAPVRETCAQALGAVLKYMHPSLVCHTFKILLQMQHRQEWEVRHGSLLGIKYLVAVRQEMLKDLLDYIIHACKAGLEDPDDDVRAVAAEALIPAADSLVRLNDQILHPIVVLLWDILLDLDDLSPSTSSVMNLLAEIYSQPEMVPKMLGTAASGEKGEFDLNEATQIAEQEDELTSIENPYGLATLTPRLWPFMRHSITSVRRSAIRTLEKLLEVGNTRSSAGTTPSKLWPTSILGDALQVVFQNLLLESNDDILQSSERAWKLLLQCPEKDLEYAARLYFSNWVQLATTPFGSALDSTKMFLPVALPRGNRSRAAAKIRSARLEHEYTTMISFGSTGESISHEKHSDVPSIFSNIIVGSDPDKSVTHTRVLTSMALGLFASKLPVSSWQVVLSPLANHLMSLSGVQRQVASMIIVSWFKDLRGRDPVSVGTLLAFLSSLKEWLVDLLTCSDPALPTKGSVLPYSELSRTYTKMRNEANNLLHLIDSCAAFKDYSSSLNLNTDVLTVDDAINFASKLLLPSESDIPSETENIFLNNIESAKQGLLSTSGYLKCVQNNLHVTVCSLVASAVVWMSCLPSKLNPVILPLMAAIKREQEEVLQDKAADALAELIFSCIGRKPGPNDKLTKNLCTLTCTDASETPQAAIINSMQVIEDQNLLSIGKRFSSHRSRGHTTSGGDERSKMEGFISRRGSELAFKHLCVKFGPSLFENLPKLWDCLTEFLRPVKTEDGIPEDDASIAQLGRSYEDKDPQSLINNIQVVRSISPHLAEPLRPQLLNLLPSILGCVRHPHVAVRLAAARCITSMAKSLTDDVMVLVIENVIPMLSDLSSVCARQGAGILLSLLVQGLAVELVPYAPFLVVPLLKCMSDPDGSVRQTVTHSFAALVPLLPLSRGASLPCGLSERLSSSAEDVQFLEQLLDNTQIDDFKLNIDLNVELRRYQQEGINWLAFLRRFKLHGILCDDMGLGKTLQASAIVASDIAEARARNDEKILTSLIICPSTLVAHWEYEIEKYIDSSILKPLQYVGSSQDRVTLRSQFDKVNVIITSYDIIRKDIDFLGNITWNYCVLDEGHIIKNSRSKITFAVKQLKAQHRLILSGTPIQNNVLELWSLFDFLMPGFLGTEKQFQAAYGKPLLAAKDSKCSAKDAEAGILAMEALHKQVMPFLLRRTKDEVLSDLPEKIIQDRYCDLSLLQLKLYDKFSSSNAKDEISTIVKANELEESAPQPKATRHVFQALQYLLKLCSHPLLVTGENPPNHLVDLLNEIGLGSGSELHELHHSPKLVALQEILQECGIGSEISSPDASTAVGQHRVLIFAQHKAFLDIIEKDLFQSHMRSVTYLRLDGSVDPEKRFEIVKAFNSDPTIDVLLLTTHVGGLGLNLTSADTLVFVEHDWNPMKDLQAMDRAHRLGQRKVVNVHRLIMRGTLEEKVMSLQRFKVSVANAVINAENSSLKTMNTDQLLDLFTSTPASRKASDEQSKRKSGGKGLKSILNGLDELWDQSQYADEYDLNQFLAKLNG

SEQ ID NO: 61339 - protein, 328 aa, Zea Mays
MLHKWKAADGGGCAGVAGGVDQRRRCVAASLSTLIAATLAFLAYVAFFPDGGAHGLYRLWTCQDCAGDLGEFPGDEAAAADGPSAARAARSPTTLSHVAFGIGASARTWDQRRGYAELWWRPGQMRGHVWLEEQPASPWPAATCPPYRVSADASRFGDRAPASRMARIVVDSFLAVAGELGNGTAREEARWFVMGDDDTVFFPDNLVAVLSKYDHEEMYYVGAPSESVEQDVMHSYGTAFGGGGFAVSYPAAAALATAIDGCLDRYRYFFGSDERVKACLSELGVPLTREPGFHQAPRRQCCKTKRTRWGSVLEVRIRRCGRGELTSP

SEQ ID NO: 61340 - protein, 411 aa, Zea Mays
MFFSGDPSARRRVDLGGRSSKERDRKVLLEQTREERRRRQGLRLQNTSATKIQKFFRGKKALELARSEVRKNFCSTFGEHCERIEWNIFGTNSDFLRQLLFFFNANEDNDIAILCHVCNLLLQYVKQGGDVVTLFTGVNGSSLQPLVAHRVKKFALICVQAVYQKRHDWGSQLLTTPGTTSVPSVSLLETVGCLINPKFLWNCKVVGYLQQRKIYCLFRGIIVSVPQNVRNSGHFDSASVLEQVLMLVASHVGHHPCCCLKVDPRWSFSSQLLSIPFLWHRLPQLKKVFSVNGLNKYYIHQIACLLPSLVDVLPNDISANHPGYACVLANVLEAATWILSDAKLASDSAADIIAVCTSLLDTLPAVTTPTERADDDDEMPMDVNIKINLDVDLERQITAAIDSKLLQHLVV

SEQ ID NO: 61341 - protein, 77 aa, Zea Mays
MIKESRSRPGSDWPWSAENSTRRRLRRGKSVPRRALVELGGEVGAIRSQRATDSTCTTNLGRGGEDSVNLCFNRAHW

SEQ ID NO: 61342 - protein, 52 aa, Zea Mays
MFHLTLALLNAGACCSSRGVGSSSTSTFTLIIMLPRHNHDLIRNFLSKVVCF

SEQ ID NO: 61343 - protein, 173 aa, Zea Mays
MKILVAVKRVVDYAVKVRVRPDGRGVETANVKMSMNPFCEIAVEEALRLREAGVAAEVVAATVGPAQSADTLRTALAMGADRAVHVLHDPDPARPLLPLAVAKILRAVALQEKPGLVILGKQAIDDDCNQTGQMLAGLLKWPQGTFASKKNKKLLLSEKLMVELKPSALICQQ

SEQ ID NO: 61344 - protein, 1881 aa, Zea Mays
MCQESSQASPGRLIRSDSLPNINNTVHLITKFVLDCLDHLPSEFRSLAADILLAGFRVVTKNWHAVMLHEATENGQLCMLHDIGLSLGVVEWVEDCHRLCLTDEVHVQTEMHSSAKLATPASVGATHEDSNMHISSDVNMMDKRKQLFPVINDRAGIDKEDNKMLNPAGTEADVAELHTTSRSSMMEETSLEEASLVIETIRREEFGLDQALSDTENSLLKKQHARLGRALHCLSQELYSQDSHLLLELVQNADDNTYPEDVEATLAFILQEDGIAVLNNERGFSAENIRALCDIGNSTKKGSNQGYIGNKGIGFKSVFRVTDAPEIHSNGFHVKFDITDGQIGFVLPTAVPPYSTTSFSRMLSVEDDKDAHSLWNTCILLPFRSKFRECTGMCSIVSLFSDLHPSLLLFLHRLKCIKFKNLFDDTLLIMRREILGDGIVRISHGIETMSWLVVSKRLQGTIVRHDVCTTEIAVAFTLQQTEEGDYEPYLKQQPVFAFLPLRNYGLKFILQGDFVLPSSREEVDADSAWNQWLLSEFPSLFVSAQESFCALPCFQRCPGKAVTAFLSFIPLAGEVHGFFSQLPHLILSKLRLTRCMFLDGSTVQWVYPCNTLRGWDEQTKMLFSEGLLHEHLGLGYLSKNIVISDKLSRALGIHDYGPNILLDAISSICRIDGCIESLGLEWLCAWFVNLYLTLLSHSSQNVSSARNLEDILLDKVRKIPCIPLSDGSFTSISDGRIWLPYDVASSIPECSSIPNFPALYGNLRTVSPNLLSACCKNKYLMEEVRINDLADMLQRIGVRKLSGHDIVKNHIMVSLRNGLDANVADIVIREYVSFIMVHLQSSCTSCNFERGEIVSELRKSPIFLTNHGYKSPADEPIHFSKDYGNSVDVTRLLQNVEISWIELDSSYLQHHGSQSSSFAREKWRQFFEEMGVTDFVQVVKVEKTLSQVDSILAGGLSLADVSTKQCTVYDWESPELSRILSIFSSKRCKENCVYLLEVLDRFWDDHYSAKSRIFTDATHCGENRAVESSFMKCIQSFKWIASRMDEDLHYATDLFYDCENVRSLFGSVAPYAVPQVSSSSLKKAIGFKTEVSYCDALMVLKSWITSKVPFRASMSQMCKFYTFLSEGVADAKIDIKREFMSSPSIFTPLQRPRASEVIPGRFLAPEDLYWHDPTGCSEITEDFVATKNRSMFPRKMLSAAYPNLYELFTLTCGVPKAPTTSNYVEMLLRLSTIALPSQAGNHVFCVFVRWAKCMHSESDKMNDILYLKESLQKLETTILPTSADKWVSLHPSFGLVCWVDDDELKQQFVNSNDVYFIQFGDLSSEDKQMLYGRVAALMKSLGIQALSKVVYREAIFYGTSENREKVSLICWLLPYMQRYIYKMHRDTYINFQKNDIMKISNLQVVVVDKLFHKYVLRGLESSSKKRFQCHCLLQGDTLYATQEADSHSVFLELSRIFFDGSHDLHFANFLHMIKTMAESGTHAEQIETFIVNNQNVPELPEHEAIWSFSSLSAAKHGSANQGGADTQGVDFQPVHEFSIPNHQKAQVMVSSWPLNYWRTAPVFRTPLINQHASMQEAKVNDAGPSSNLNMPAMYGHTEDSLLSADLERDWIIEENPRTETTLFGDSSSEILDEPQMVMSAEPFHAPAYLNLEAGNSSPTVHVELTNSDEKLANLAEDKNRRLSDASQLRTGSNPMVDVELTNFDEKLANLAEGKNQRLSDASQLRTGSNPMVDVELTNFDEKLAILAEDKNQRLSDANQLRTGRLGEELVEKYLAKQLGSNNVRWVNNRIETGLPYDIVITHPEGFTEYVEVKTTVSSRKDWFDVSAREWQFALEKGDSFSIARVILGTKKASIEMLKNPHKLCKQKALRLALLISRSAAT

SEQ ID NO: 61345 - protein, 959 aa, Zea Mays
MLFFMKTGRAEMLSNLRYHTSVIISLFQSLGTISISSRRLNILSGYANRIHELLDVSRELSGGRDRLITQNSSDGNYISEANYIEFSDVKVVTPSGNVLVDNLNLHLESGSNLLITGPNGSGKSSLFRVLGGLWPMVSGHIVKPGVGSNLNKEIFYVPQRPYTAVGTLRDQLIYPLTADQETEPLSYGGMVDLLKNVDLEYLLERYPLDKEVNWGDELSLGEQQRLGMARLFYHKPKFAILDECTSAVTTDMEERFCKRVRAMGTSCITISHRPALVAFHEIVLSLDGEGGWDIQDNRNGSFSPEVEFDVLKASESDRKSDALTVQRAFITSTKGNASMKPKKHSYSTEVIASSPSMEIEHTVQSSIVTQLQCSPRPLPVRVAAMSQILVPKLFDKQGGQLLAVVLLVFSRTWISDRIASLNGTSVKYVLEQDKAAFIRLAGTSVLQSAANSIVSPSLRNLTSRIALGWRIRMTNHLLQYYLKRNAFYKVFNISGMSMDADQRMTHDVEKLTNDLAGLLTGMVKPLVDIIWFTWRMKLLSGRRGVAILYAYMFLGLGFLRAVSPDFGDLANQEQELEGTFRFMHSRLRTHAESIAFFGGGSREKAMIDAKFMTLLNHSKVLLRKKWLYGIFDDFVTKQLPHNVTWGLSMLYALEHKGDRALTSTQGELAHALRFLASVVSQSFIAFGDILELHKKFLELSGGINRIFELEELLQASQSNPVMPSDATNAGSEEIISFRGVNIVTPSQKLLASQLSCDVSQGKSLLVTGPNGSGKSSIFRVLRGLWPIASGSLSKPSEGIFNVPQRPYTCLGTLRDQIIYPLSHEEAKLKMLSGETSDKSTASELLDDHLRTILENVRLLYLLEREGWDATTNWEDTLSLGEQQRLGMARLFFHCPKYGILDECTNATSVDVEEHLYRLATNMGITVITSSQRPALIPFHSLELKLIDGEGKWELCSIHQ

SEQ ID NO: 61346 - protein, 147 aa, Zea Mays
MHSGCTFNHRYVKSNPREVENATWMLTVFHCFGQYFCLHFEAFQLGMAPVYMAFLRFMGDENDARNYSYSLEVGANGRKMIWEGTPRSIRDSHRKVRDSHDGLIIQRNMALFFSGGERKELKLRVTGRIWKEQQNPDSGACIPNLFS

SEQ ID NO: 61347 - protein, 169 aa, Zea Mays
MMNCGASCSTTGGERTLQRSTRRRAPSLGRTSSPCRTGATDTDCKPPLAHLLQLHCFRLPSAAGVTAVDQQFSRLLSLCFCLACECVCVTSFPFVFVWPGCQDHQGREGLLPDLPGRDPEVLGLPPGHGWRLRRGRATAGRWRRASADIRPDPVLPRGSGESLRRRQTC

SEQ ID NO: 61348 - protein, 85 aa, Zea Mays
MAAEADQKVVVHVRSTGDAPILKQSKFKISGRDKFLKVIEFLRRQLHQDTLFVYINSAFSPNPDELNFGIDGKLVVNYALSAAWG

SEQ ID NO: 61349 - protein, 89 aa, Zea Mays
MSHAKACQSTGLRPGCNCSHMATRSRVRDSIPIFAGEGFYPEVHKHNTSQADSAILALNCSGIVLGTLPVRVSPSKTPVRSRSPRVTSY

SEQ ID NO: 61350 - protein, 541 aa, Zea Mays
MNASQFMDKQILGLAASASPSGGGAGGGGGVDLSDLMIPIPQEDGEDRLRRRRSSSSVNGTSDDMLPSYDFQPIRTGGATAAAPVSQASWGSLDSKAPSASASASAAASYNLKSAGILEPHVLKKVSHEEDRSNFPTVTIADIDRTMKKYSDNLLHALEGVSSRLSQMEGRTHQLENSVDELKLTIGNYNGSTDGKLRHLENMLREVQAGVQILRDKQEIVEAQLHLAKLQTTKTDAHSSENSGSGHAGSQPVPPPQAAIQPQQVLTPLQPPALPALPAPNAPLPTLQSQPPSQFPSHLQHSQPTETMHQQYQAPPVPQPQAPPAPQQYQSPSQFPQYSQPSQPSNVNPPTPHVPPAPQQPEETMPYPPPQSYAPNARPPSPYMQPPSGPAPPYYGQQNPTMYEPPAGRANPGPPSSYGSGGYGPQGGSGFSDSYGYAGSPSHRGNAGMKPSTPFAQSSGGSGGYGSGRLPTAQILPQAVPVSSSSTSGASGNRVPLDDVVEKVATMGFSREQVRATVRRLTENGQNVDLNVVLDKLMNGR

SEQ ID NO: 61351 - protein, 552 aa, Zea Mays
MPPSRLQVGTKTTEGHNQAVQRLRQVMRNNARLQQLGIPGLCDTLPKAYSFHHNKNKPNFTNNEDSESDYNPSSNDTGEEDLLDDDNVQGSKDYNMRTTNMSNGVIKLRTKRLLAEKESIRITRSKKTAAQPNGTEVFDNNDGHTQATVQASDPALFDEYTHMANGGHSIARPDGHNLMGNKDNVNIQVDDNMTSGGEASIEPSVHVQLGENDRWERGVNMGHGLHRMNRAMRGKLPVVIPEGRIRPVAPLVAAKFSTECNIAVRNHVPVYKHWKDYKNHNGMFNLFTDKLSAKFDINTNDAPVQKACSQMMKNAIRQQRYRLKKKFFDPFPLHLVTKTSPIRSMSNEEWNDLVEYWKSPKRMETSQKNKDNRSKVKFHQTTGSRSYMVHVENLGDKNIGQEPDALDLFKECHYSRKKKCYTSTVQQAITQMDNKRSATTEGEKSMSATEVVANVLAENTKKNLFLQNVGIQNVGPRSSLRNIEAQLEVEKRANSDLKSIVDAQHEQLDALLKQMQETEENRIREQEEVKKKQAEMETKMQLVLSQIHSRLR

SEQ ID NO: 61352 - protein, 95 aa, Zea Mays
MLTPGKSLSPAISPGGGPLSQGFRRTPMASPFSPYHHGSSVLRSPASNHGQSPGTLPTILSPGRSPTAQTPGQSSPNGSQVSINSNGQHKKDGES

SEQ ID NO: 61353 - protein, 526 aa, Zea Mays
MAFLFGAFLGLVVGVAVVMAFARFENSRAEQRRELAATAAAFSKLTVQDLRKLIPPEFYPSWVSFTQKQKLKWLNQELTKIWPFVNEAASELIKTSVEPIFEQYKSFILASLHFSKLTLGTVAPQFTGVSILESDDSAIIMELELQWDGNPNIVLDIQTTLGISLPVQVKNIGFTGVLRLIFKPLVSEFPCFGAVCCSLREKSKVEFTLKVIGGEMTAIPGISDAIEGTIRDTIEDTLTWPNRIIVPIVPGDYSDLELKPTGVLEVKLVEARDLKNKDLVGKSDPFALIYIRPLHDKTKKSKTINNDLNPIWNEHYEFVVEDISTQHLTVKIYDDEGLQSSEIIGCARVDLADIQPGKVKDLWLDLVKDLEIQRDKKPRGQVHLELLYYPYAKHEGVPNPFANQIQLTSLEKVLKTESNGYDINQRKNVIMRGVLSVTVISAEELPPMDIGGKADPFVVLYLKKGETKKKTRVVTDTLNPIWNQTFDFMVEDALHDLLMVEVWDHDTFGKVNSKIPLSCKVPNREN

SEQ ID NO: 61354 - protein, 147 aa, Zea Mays
MLGRRENPGEHEAMRKMKNEFMVNWDGLRTREKERVLVLAATNRPFDLDEAVVRRLPRRLMVNLPDASNRRKILSVILAKEDLADDVDLETIANLTEGYSGSDLKNLCVTAAHRPIREILEKEKKELQLSFKWICSHAGESFSRSRK

SEQ ID NO: 61355 - protein, 69 aa, Zea Mays
MKTRLMIQGQTNQYRGFIDCAQTIMREEGAGAFFKGIEPRVLWIGIGGSIFFAVLEKTKSVLAERNTRR

SEQ ID NO: 61356 - protein, 86 aa, Zea Mays
MDVVWGETAGVEGQLLLLCPLLFLLQVVVCGILLISMAIGNFANTLDTLMAKSRFKAKMKKSKGKRDLDTCPSPTGSSPTDSATRA

SEQ ID NO: 61357 - protein, 203 aa, Zea Mays
MIDFIILEQMTAFAVIMQKHPGWVGFIQKTILESVGCIWFNRNDLRDREVTARKLRDHVQQPDNNPLLIFPEGTCVNNQYTVMFKKGAFELGCAVCPIAIKYNKIFVDAFWNSKKQSFTMHLVRLMTSWAVVCDVWYLPPQYLREGETAIAFAERVRDMIAARAGLKKVPWDGYLKHNRPSPKHTEEKQRIFAESVLMRLEEK

SEQ ID NO: 61358 - protein, 343 aa, Zea Mays
MFLPEVPFEILVRKQIGRLLDPSLQCAQFIYDELIKPQCLISELQKFPALKKRLSEVVCSFLRDGLRPAETMITHIIEMEMDYINTSHPSFVGGTKVVELAKHEVLPPKTSASLSGRKDGTIVGSEIQLAAERSQKSRAVFARDAIRRVTSEQASVEAETSLTGGNQIGNSQVGESSSKLPSIIPLKEPPITLKPSETEQDATEVAVVKLLIKSYYDIVRKNIEDAIPKAVMHFLVNHTKRDLHNFLIRKLYRENLLNELMRETDEVLMRRQRIQEMLEILEQAHRTLEEFPFEVDKLEKGYNLTEHATGLSKIHGVSGDSTNVIYTSSPNCYSPHRASHMVL

SEQ ID NO: 61359 - protein, 205 aa, Zea Mays
MLVLMRYAYTNIIAFIGHFRDKLEQGGYGHCFMFVTLKDLYPSLFPYYHGIIAFNIILYINYSYRGGVDSEDALNNHAVPEPAQSSLFSLDIHEYPNLTVVLVLSWQKYLMHLFMFCNGTSLLKYPKAWEIAHALHAWRSLFEFPCSTIRFPTRCRCMKRNEGKPSPGYLHPLQATNIRDTELFGVHVYGTDLDVEILNAKIAAT

SEQ ID NO: 61360 - protein, 430 aa, Zea Mays
MAAPGSAIKHTFSSLLKQKPPKTSPTKSRGSMAVSMREVDPVFQGAGQKDGLEIWRIEKLQAVPVPKESYGKFFTGDSYIVLKTTALKNGSFRHDIHYWLGKDTSQDEAGTAAIKTVELDAALGGRAVQYREIQGNETEKFLSYFKPCIIPEEGGVASGFRHTEVNEREHKTRLFVCRGKHTVHVKEVPFARASLNHDDIFILDTKSKIFQFNGSNSSIQERAKALEVVQHLKDTNHEGKCEVAAVEDGKLMADADAGEFWGLFGGFAPLPRKTFSELNGKDSTSTSKLLCVNKGQFAPIDCEILKRELLDSTKCYLLDCGSEIYVWMGRETTLEERKRGGSAAEELLREGNRQKSHIIRLMEGFETVTFKSKFDKWPKKADAVVSDESRGKVAALLKRQGFNFKDPAKAAPVKQEPQPQIDCTGNLQVA

SEQ ID NO: 61361 - protein, 1676 aa, Zea Mays
MAMGATVRAAAADAMVTFLWVLCASALDVSIAAVTSYQGLQEGTGHYALLVTTSLLSVLLFTFDLLYGVLGGASFNFTDFATSYSAGLDSPSLFSVALHFLARTVVVVKRTTLRVARKDAYMAELDLFAKGLHERLVPFLGHCLDKEEEKVHVYRFVQNGDLSSALHKKSREEDEGLQSLDWIKRLKIATGVAEALCYLHHECSPPMVHRDVQASSILLDDKFDVRLGSLSELPAIESVLNAMKSNTNQRVSPIFALVLCPTRELAIQLTAEANVLLKYHEGIGVQSLIGGTRFKLDQRRLESDPCQPDHLLDETNRAGSKIRVERAERSSYTFQSQLDGGAQFCVSQEASRLTSLFLVFMPTAQDNTTTPMELEDFIRLDSIWMRWTLLAEDRTPKPGSQPRKPGDRRRQVENTLGGRSQAASESRGGVAVLAHGGGHSRRRSGMATPTPMPGSEGTLVAVMPRSPSPTPAEAGTSATETPVLIFLYFHKAIRAELEALHGAAVLLATERTGDVAALAERCRFFFSIYKHHCDAEDAVIFPALDIRVKNVAGTYSLEHKGESDLFSQLFDLLELDIQNDDALRRELASCTGFSFLPLPASVLLFIRLVFPLLTKKFSCEEQADLVWQFLCNIPVNMVAEFLPWLSTSVTSDEHQDIRDCLCKVVPDEKLLQQVVFTWMEGKAAREVAESFATGNLVRNHSAEDVSDHGEIYVCSQQESKLGSKNCAESNGSQADRHPIDDILYWHNAIRMELHDIKKETRRVQQSGNFSDISAFNERLQFIADVCIYHSIAEDQVVFPAVDSELSFVQEHAEEEHRFNNFRCLIQQFQIAGAKSTALDFYSKLCSHADKILETIEKHFSNEETKVLPQARMFFSPEKQRELSYKSLCVMPLKLLERVLPWLVSKLSDEQATSFLQNIRLAASPSETALVTLISGWACKGRDKSKSGEYLCLTSGTARCLSDDVDDQGKCRSFCPCASHNSSDLSLQLQTENGSRPGKRGKDAVSFPGTNGSYCSQTADIDASPCSKKPCCIPGLRVKSSNLGIGSLASVKSFRSLPYNSTAPSIYSSLFSWETDASLSCSDGISRPIDTIFKFHKAIRKDLEYLDVESGRLIDGDESCLRQFIGRFRLLWGLYRAHSNAEDEIVFPALESRETLHNVSHSYTLDHKQEEQLFEDISDVLFQLSQLHDSQGHAQTKVNEVKQSCFHSSNDVDFTRKYNELATKLQAMCKSIRVALTNHVHREELELWPLFDKHFSVEEQDKLVGRIIGSTGAEVLQSMVPWVTSALTQEEQNKMLDTWKQATKNTMFGEWLNEWWKGAGTSDSSAEAPSAPEDSHLQDKLEQNDQMFKPGWKDIFRMNQSELEAEVRKVSRDPTLDPRRKAYLIQNLMTSRWIAAQQKLPEPNSEECSDDASIPGCAPSYRDQEKEIYGCEHYKRNCKLVAACCNKLFTCRFCHDKVSDHTMERKATQEMMCMVCLKIQPVGPFCQTPSCNRLSMAKYYCNICKFFDDERTVYHCPFCNLCRLGKGLGVDFFHCMKCNCCLGMKLTEHKCREKGLETNCPICCDFLFTSSAAVRALPCGHFMHSACFQAYTCSHYTCPICCKSLGDMAVYFGMLDALLAAEELPEEYRDRCQDILCNDCERKGRCRFHWLYHKCGSCGSYNTRVIKTDTADCSTPN

SEQ ID NO: 61362 - protein, 84 aa, Zea Mays
MEFATAGLSGSQPFPAMAKAYDPDTGLMKRGNRGGCGRRLYAQVGLVRLFSIHMDWRGLIWIERDFDLLGIETPLIPLNPYGLG

SEQ ID NO: 61363 - protein, 292 aa, Zea Mays
MAAVRRCCLLAAVLLWSALASAATAAPAPVVAGPVSRVEDATMFRIYYGQSFKVIKNSGDGKSYLLMQNTSKMASKTKYCTGRIKSFVIPLASFSVDTTTSPVSFFELLGVLESLKGITSNQVASQCVLQSYTSGNAQLVNRTDVQTLSQFTAHFISDTDEDRGCNFAAYVPLEEGTPLQMAEWIKYLGTFTNSENRANAVYDAVKTNYLCLSKVAANLGTRFKPVVAWIEFTQGMWTFVKESYILQYVTDAGAEIVDATITDKRFNSSDPEDMDNFHAILCFCIKSQHMEI

SEQ ID NO: 61364 - protein, 82 aa, Zea Mays
MDARLPGLSCPCPSPVCRLHRNAARGVAVLSRSSCRFQRRGCHSLPWPLPAPRGRAPEPEPRRESRVASASPPPPETPSGRN

SEQ ID NO: 61365 - protein, 154 aa, Zea Mays
MDILKLASEMDLSCIKAYKLDALKSVRKTDEARSLGMADNHSEAIETPTEDPCHATVGGRSTSVDEDSSTTTVVFSDNKNLNSKRYISKAELRKNLRQMKNGPGRNNCSGGRVEKSKGFCPNSFDRVLLDAPCSALGLRPRLFAGETHYYDRKL

SEQ ID NO: 61366 - protein, 704 aa, Zea Mays
MLEDGIKRDPLNAGKLKLFASVDVAQETTSFVLHFTKPPKVTLPYRIENYLSESSILYFQKDSVDSDVLHPQESEQYAWDDLSSPRKLVVRIVDTPALREIKIDKISPWKPFLKMRQNSRLNLDFSFSGGLNSRKQRFDESFGLRVFKIGYEVYADGLTRVLRICEHADNPKIEKIQWPIANIQFRISYVCIHLLDKDQNGENVQLPSTILAARLQHVSSDSVVTNRFKQVSVAIHSLNVDEKWEGASIGTILRRNKLQDATLDENILRMIFVLNSTDSSVKQIQYCAIILQPVDLKIDEETLMKLVPFWRASLAPSGTTSTQFYFRRFEVHPIKIIASFRPGGRRTTYSSAQEALRALLHSVIKVPEISNSAVELNGVLLNHALVTFRELLLKCAQHYSWYVLRAIYVTKGSKLLPPSFASIFDDSASSVLDVFFDPSDGSLNVPGLTIGMFKFISKNMKSGGFSGTKRYLGDLGKTVTGFHQGMLRLAMEPSVLGQAIMEGGPDRKIKLDHSPGLDELYIEGYLQAMLDVMYKQEYLRVRVIDDQVILKNLPPNSALINEIVDNVKSFLVSKALLKGDSSTVRPMRHLRNEPEWRIAPTVLTLCEHLFVSFAVRVLHREASKAIAGVMSRVKKPTGEEVEGDSPASGGVLCKRNRLWTVGRFAVSGMVAYVDGRLCRHIPNPIARRIVSGFLLSFIENRGNE

SEQ ID NO: 61367 - protein, 123 aa, Zea Mays
MADAPASPGGGGGSHESGSPRGGGGGGGGSVREQDRFLPIANISRIMKKAIPANGKIAKDAKETVQECVSEFISFITSEASDKCQREKRKTINGDDLLWAMATLGFEDYIEPLKVYLQKYREM

SEQ ID NO: 61368 - protein, 1580 aa, Zea Mays
MAAPGRRTADVSSSSPSPSPAAPSTGRRLLRTQTVANLGESIFDSEVVPSSLVEIAPILRVANEVEVENPRVAYLCRFYAFEKAHRLDPTSSGRGVRQFKTALLQRLERENDPTLKGRVHKSDASEMQRFYREYYRKYIQALQTVVNKDDRARLTKAYQTAAILFEVLRAVNDSQSVEVDQAILDTHIKVEEKKKLFLPYNILPLDPESTGEAIMRYPEIQAAVYALRNTRGLPWPKDQDKKPEEKNTGKDLLDWLQAMFGFQKDNVSNQREHLILLLANVHIRKIPKADQQPKLDDKALDDVMKKLFKNYKKWCKYLGRKSSLWLPTIQQEVQQRKLLYMGLYLLIWGEAANLRFMPECICYIYHHMAFELYGMLAGNVSPMTGENVRPAYGGDEEAFLTKVVTPIYKVIEKEAERSKTMKSKHSHWRNYDDLNEYFWSVDCFRLGWPMRADADFFKTPKDPYLNHLNGENRSAGNVHWMGKVNFVEIRSFWHIFRSFDRMWIFLILSLQAMIIIAWNGGTPSDIFDAGVFKKVLSIFISAAILKLGQAILDLVFGWKAKRSMSFAVKLRYVLKLISAAAWVVILPVTYAYTWENPTGLARTIKSWLGDGQNQPSLYILAVVIYMAPNILASMLFLFPFMRRILESSNVKVITIMMWWSQPRLFVGRGMHEGAFSLFKYTMFWIILLAMKLIVSFYIEIKPLVQPTKDIMREPIRTFQWHEFFPHGTNNIGVVISLWAPIILVYFMDTQIWYALFSTLIGGIYGAYRRLGEIRTLGMLRSRFESLPEAFNERLIPSDANKSKGLRAAFSSRPKASGDESEREKRAARFAQMWNAIITSFREEDLIDNREKDLLLVPDCKDRELDIFQWPPFLLASKIPIALDMAADSGGKDRDLTKRIKSDPYFSFAIRECYASFKNIINTLVFGQREKDVLVQIFTVVDKHIEEETLITGLNMKNLPALSKKFVELLELLQKNKEEDLGQVVILFQDMLEVVTRDIMEEQDLLETLDSLHGANSRKHEGITPLDQQDQLFAKAIKFPVVESNAWTEKIKRLHLLLTVKESAMDVPINLDARRRISFFANSLFMDMPNAPKVRNMLPFSILTPYYKEDVLFSLQNLEERNEDGVSILFYLQKIYPDEWKNFLERVGCKNEEVLREDEQLEEKLCLWVSYRGQTLTRTVRGMMYYRKALELQAFLDMANNDDLMKGYRAMEVMSEDSPLKTQCKAIADMKFTYVVSCQLYGIQKRSNEPCAHDILRLMTEYPSLRVAYIDEVEAPSKDRIKKIEKVYYSVLVKASVTKPNEPGQSLDQVIYKIKLPGNAILGEGKPENQNHAIIFTRGECLQTIDMNQEHYMEEALKMRNLLQEFEKKHGVRHPSILGVREHIFTGSVSSLAWFMSNQETSFVTIGQRVLANPLRVRFHYGHPDVFDRLFHVTRGGVSKASKIINLSEDIFAGFNSTLREGNVTHHEYMQVGKGRDVGLNQISLFEAKIANGNGEQTLSRDIYRLGHRFDFFRMLSCYYTTIGFYFSTILQYGLYMFSSTAGYILYLVDSMKHWLLERGLCTIHLSRLLLRQSLLCNLDF

SEQ ID NO: 61369 - protein, 389 aa, Zea Mays
MCHFYHNPSFGYIRGFLSICKFKQGISSIIFTDELWAMKLGLRLLQERAKSDSFWWPYIANLPETFTVPIFFPGEDIKNLQYAPILHQVNKRCRFLLEFEKEVQQKLHTVPLVDHPFYGQDVNSSSLGWAMSAASSRAFRLHGEVPMLLPLIDMCNHSFNPNARIVQERSVNSLDMSVKVLAEKKIKQNEAITLNYGCYPNDFFLLDYGFVITQNPYDQVELSYDGALLDAASMAAGVSSPNFSAPAKWQQDILSQLNLHGEGAVLKVSLGGPDVVDGRLLAALRVLLADDPEAVHKHDLNTLMSLDVQVPLGPTVEASALRTVLALCAIALQHFHTKIMDDQAILGGGPPLITQLAVQFRLQKKFTIVDVMQNISRRIKMLSPQKSTG

SEQ ID NO: 61370 - protein, 153 aa, Zea Mays
MMVLTAMYAGLSLSVGRLLACNSTKICAYTICLCFLMVKCNGIPSRCKSGKKFGEDLKWKASVAPDGIFLPRRARARCRWRKTTDQGDLATPTCILLRGGGRRGHGSRIPEHGLQQGEVLVSSVWLAIFSWRDQRINKLMKQGQPHVERWNRQ

SEQ ID NO: 61371 - protein, 1153 aa, Zea Mays
MTVPTKDDSQSGTVADTVPLPTYRSLAAPVRKPVDKFALLPAFLKVRGLVKEHIDSFNYFVNKGIKKIVEANNRIEARNDPSIYLRYLGVHVGMPSVHVEYNIENITPHFCRLTDRTYSAPIKVHIEYTVGKQHEVRRKNNFIIGYMPIMLRSHACILYEKDEAELAKYGECPLDPGGYFVVKGTEKVILIQEQLAKNRIIVDTDSKGRVIASVTSSTHAIKSKTVIFMDKGKIYLQLNQFNKPIPIIVVMKAMGMESDQETVQMVGRDPRYGDLLFPSIQECASERIYTRQRALQYMDEKVTYPGATNQKEGRSYSILRDVFIAHVPVKNGNLRPKCIYTALMLRRMMDAIVNSDTFDDKDYVGNKRFELSGQLISLLFEDLFKTMNSQAVERMNKNSDKTHSSPLDFSQLIMQDSITFGLERAISTGNWDIKRFRMHRKGVSQVLSRLSYMASLGYMTRITPQFEKTRKTSGPRALQPSQWGMLCPCDTPEGEACGLTKNLALLSHVTTDQEEGPLIYLCYSLGVEDLLSLSSEEIHTPGSFLVMFNGLILGKHKDPQRLVIDLRNLRRSNVIGEFVSIFINEKQHCVHIASDGGRVCRPLIIADMGISRIDETHMEKLRHGTCGFDDFLRDGLIEYLDVNEENNALIALYEHMDQDDVERSSITHIEIEPLSILGVVSGLIPYPHHNQSPRNTYQCAMGKQAMGNIAYNQLFRADSLLYLLVYAQRPLLTTKTIELVGYDKLGAGQNATVAVMGYSGYDIEDAIVMNKSSLDRGFGRCIALKKYTVLKDNYGDGVSDMIVEPQRDNGVLIKQNMRALDEDGIAGPGQIIRNHDIYVNKRTPKNTSKGIGRALRESDYKDSPALYKGVDGETTVVDRVMLCSDTNDKLSIKCIIRHTRRPEVGDKFSSRHGQKGVCGTIVQQEDFPFSERGICPDLIMNPHGFPSRMTIGKMIELLGGKAGVSCGRFHYGSAFGEPSGNADKVADISSTLIKHGFSYNGKDFLYSGILGQPLEAYIFMGPIYYQKLKHMVLDKMHARASGPRVLLTRQPTEGRSRDGGLRLGEMERDCLIAYGASMLIFERLLLSSDPYQVQVCRKCGLLGYYNHKLKTSYCSMCKNGENMAKMRLPYACKLLFQELHAMNVVPRLKLTEV

SEQ ID NO: 61372 - protein, 1133 aa, Zea Mays
MLKEIVLDRNSLSGQLIPAIAKLQQLAKLTISKNNISGELPPEVGSLKDLEVLDFHQNSFNGSIPEALGNLSQLFYLDASKNQLTGSIFPGISTLFNLLTLDFSSNDLAGPIPKEIARMENLECLVLGSNNFTGGIPKEIGNLKKLKKLILSACNLSGTIPWSIGGLKSLHELDISDNNFKSELPASIGELGNLTVLIAMRAKLIGSIPKELGSCKKLTLLRLSFNRLTGCIPKELAGLEAIVHFEVEGNKLSGHIADWFQNWGNVVSIRLGDNKFNGSILPAICQANSLQSLDLHLNDLTGSINETFKRCRNLTQLNLQGNHFHGEIPEYLAELPLTILELPYNNFTGLLPAKLFKSSTILEIDLSYNKLTGCIPESICELHSLQRLRMSSNYLEGSIPPAVGALKNLNEISLDGNRLSGNIPQELFNCRNLVKLNLSSNNLNGSISRSISQLTSLTGLVLSHNQLSGSIPAEICGGFTNPSHPESEYVQYHGLLDLSYNRLIGRIPPEIKNCVILEELHLQDNFLNESIPVELAELKNLMNVDLSFNALVGPMLPWSTPLLKLQGLFLSNNHLTGNIPAEIGRILPNIVVLSLSCNAFVATLPQSLLCSKTLNRLDVSNNNLSGKIPLSCTGFEGTLSSLILFNASSNHFSGSLDGSISNFVHLSYLDIHNNSLNGSLPAALSNLSLLYLDVSMNDFSGAIPCGMCNLSNITFVDFSGKNTGMHSFADCAASGICAADITSTNHVEVHTPHGMVITMTICAAILIVVLLVVFVKWMVLRNSSLPLVSGLESKATIEPASSKELLGKKSREPLSINLSTFEHALLRVTMDDILKATNNFSEVHIIGHGGFGTVYEAAFPEGQRVAVKRLHGSCQFLGDRQFLAEMETIGKVKHHNLVPLLGYCARGDERFLIYEYMHHGSLETWLRTHENTPEAIGWPERLRICLGSANGLMFLHHGFVPHIIHRDMKSSNILLDENMEPKISDFGLARIISAYDTHVSTTVSGTLGYIPPEYAMIMESTARGDVYSFGVVMLEVLTGRPPTGKEVEEGGGNLVDWVRWMIACSREGELFDPRLPVSGLWREQMVRVLAIALDCTTDEPSKRPTMVEVVKGLKMVQLMKRDSHNPQHHAVQP

SEQ ID NO: 61373 - protein, 702 aa, Zea Mays
MAHCHNFAMLGIIEVFIDFSASKLEKASGKSKEMIEKEIVELVDAHSGFEKKISSGRERIARRRANAGDATDKHTNEPRENSNASLQKHHGNRGKFADSSLYELSVMCVKQCHADNYNNVSQHSSQTKLNQSSNLTSFVLKAFLELLKSLASKHSRDFTIKLHGDFKKLSQPIMQLVWCFLLDPIQENGGSKKNMTQGKKNTECKKDQLYLALTCLKKFLEPSVSGEHSSDIIDFLISLAPPNIEDTMGTGDLDNNDTTMVEDRSTRNVHVILNILKTLYARLLTQSVLRESEAVIELILGISRKLQLERRHLVGKWATDLCRKKTMQSPRMAREMLKLAIHLTPAPDDMILVYEVSTELMNLMTSGDDGDSSDTFHIINCKTKSSLAALSLQMVESSLTELDWGFGKLKAMLTLGYDCANIDEDQPADEIMLRLALEKALYSRSTLVVQVLSSFAHMSPMDTQAEHFLKLTVKFYKLLTRMSKSQIVPKGYRQSIPSLKFQKLAEVTCKMLTAPLYDFVFQQNQQIPIKGNLAKIRRETKCIPDLIFQIEDYEKYLIQLSKLTKVNLLRHAKRSVARDFQIKDKSGGQQEDDHIPDNAAASDNEADKDAMGPNAPVESCADDAQKSYADENASCESGHDEDAGGPNTPAEADADEIIRSSIPYGSPVQESESDREEEELLARTKRAKTKQVVQDSDEDADE

SEQ ID NO: 61374 - protein, 157 aa, Zea Mays
MSSAGCAHFYCHECWEGYISAAIGGGPGCLSLRCPDPSCSAMVLQGMVNELAKDEDKAKYARFLLRAYVEGSKKTKWCPAPDCTCAVEFLGDENYDVSCNCKFSFCWNCTEEAHRPVNCETVSKWILKNSAESENMNWFVAGSGLAFDMWSSSFCFC

SEQ ID NO: 61375 - protein, 140 aa, Zea Mays
MHTCLHHSCLFLSSIRINRASNQPETNLEKPAFWMSNLVNLVWLQSLCNACGIRYRKKRRQELGLDSAKKPQQNQRPPPPQQQQQQEDHCPATSAVAVRDNTKSSRLQVVKKRRVLMGVEEAAVLLMALSSSSRSTLLHG

SEQ ID NO: 61376 - protein, 68 aa, Zea Mays
MPSALRMQRPEHTYSSHFLNTNQWHRRIQKEQKASSFFNFLSDLAGMMMSVAPVINFCIRRVSNIFSF

SEQ ID NO: 61377 - protein, 453 aa, Zea Mays
MVEAAAGRRTGTSRRRPSGSGGEHRHLVALAVAARVAMVTTRSVGPAAVAEGDGAGAAVTDAGAAGGGGRCMEDFFDCLLGLLGALGMTWAAARPQRQPRPPLPRGAAGAGPAPTDSRRFAAELRATPGRIAGNGACAVASLYTLQGKKGVNQDAMIFWENFCSRDDTIFCGVFDGHGPYGHLVAKRVRDLLPLKLGEGLTTEDGRVTSTGNIKLNTHDVASPEHIDKGSTAISSEAQQNGEYPETFPALRTSFLKAFRVMDRDLKLHKSIDCFFSGTTAVAVIKQEHNLIIGNLGDSRAVLGTRDENNQLIAVQLTVDLKPNIPSEAQRIRQRRGRIFALPEEPEVARVWLPKYNSPGLAMARAFGDFCLKDHGVISTPDVSYHHITEKDEFVVLATDGSGTCYQTMRLLALSAEPHLRPLQPGFSSSRLTALGGLGSPLLRSMTALLSACS

SEQ ID NO: 61378 - protein, 312 aa, Zea Mays
MTTESALLYLDLPCSISMAAAVQPLTDAAKDFLAVKYKDLTKFQDEVMNIPLAGIEAILSSNDLQVASEDTIYDFLLRWARAQYPKSEERREILSSRLLPLVRFSHMTCRKLRKVLTCTDIDHEQATKCVTEALLYKADAPHRQRALAADTTTCRKFAERAYKYRPLKVVEFDRPYPQCIAYLDLKREECSRLFPAGRIYSQAFHLAGQGFFLSAHCNMEQQSTFYCFGLFLGMQEKGSTSVTVDYEFAARTRPSGEFVSKYKGNYTFTGGKAVGYRNLFGIPWQAFMADDSLFFIDGMLHLRAELTIKQPT

SEQ ID NO: 61379 - protein, 981 aa, Zea Mays
MSSRLKDTGGGGGRATAAATRPLTPKPFSVSSSARRTTAVAAAGKENTASKPSKPTSAVRWSTSSLPRASRIQSSVESSKLVSTLRAPVLPGRPSVGKDNVVEAGLRRSVNGGIRASSVEKGRRSVSVVGSRASEARRGSAGAGGDGTSRRERLDAKAKGLDEISRRRDDLDAKGKQTDEIGRKRESFDAKPKQIGGKRQGFGVNVSKQCDEIKGKTDAFVSNMKKQSEDVGGRRVGSDSKAKAGEEINMRKEGLNKLVKEMHTQKADPGEVSSKSVECCATQKDDEIGNTSVIPVFTVHVVDSMDAPDPIRKQQKNNEEGRKPEEKGKLSDRIRVFEKVAAGGEGASAKPVSAVNRYPSKLHEKLAVLEGRVQKIATDIKKTKEMLDENNPDEPKQILSNIQKEITAIEKAISHVKDDNKIQLGTAENSECENSHPETAEKCTIAKPGDLKQAGKGLNADELEARFLPHHKLLRGHISSTSTQQESSVGMRKDCNGKTRSAASNPDDDENSIAMEFLASLDGEENDFFKERKANKLEKNKTCEVADATSKTSSQGSSKNPVVPNHKEETELLATEELEEFDDRENKSSMMLQEETDESCNSQLSGIGNKSSTGGWFVSEGEAVLLAHGDGTCSYYDIANHEFKSEYKPPSMVSNNMWGDCWLIRAPGVDGCSGRYVVAASAGNALDPGFCSWDYYTREVKSFHVEEEASQAFAPTSRAILGALSNVGSSRSSSALSNAERQQWWYRPCGPLLLSTASKQKMVTAYDIRDGDVVMKWEVSNPVMGMEYSSPLQWRSKGKVVIAGSESIGLWDVNSLNPQPLLSVASGKKLYCLHVNNTDAEVGGGVRQSSSEVEGNDGVFSTQESVNVFDFRVPAGIGLKIARHGGTANSIFSRGDSVFIGSTEGRLQIKGGSRSRVQHYSLRKGKLVATYELPEFCNVCHVIYVLRLCFTCDAICRVKHLAFTVVLASRCYLVLTPGMIN

SEQ ID NO: 61380 - protein, 839 aa, Zea Mays
MAGGGGGARGSDRAGAARSPTTTTAIQSTIQSIKEVVVGHSDADILDTLRESNMDPNETAQKLLNQDPFHEVKRKRDKKKESAGQKSFADSTAQVEQNSQWMKPHTQKMENDQRTPKQGQMSGPTREFRVVRDNRFQHGVVENRPELGHKGSANVQMSDRSTLVQSGRNRSPATTSGDQITHQNAMQNSNSDTTQGKRDAQGTTEKHVKPYLKNPQNEQHFPGSDPAHGSANVRIAGGTVGPAQRHVGVVNSTRQFAARSGSQMHAPSGSYANIQRGSFTSVGASGRYSAFMSRNIQQNQRPDTMFRGRPTVRSFVAQNTNRYHQGSTSNQKAVHPIKEWKPKSTKKSPTIDADNSIADATSPSASNCESANTLNVNELPEKISQTNLHEVEHVIIPEHLRVPEYEQTKLRFGSFTSGLDSEQVSASTPQDTEQPEHVQESVQQASEYDSLDAGPDDMDEQARSSQHLSTSTAEISLPPSEDSDRMSGQVENDDGLGLVQSDTPIGAADGDNTQITSTLTAFSAYSHEDPNMHTNNEAQLYGLVEPNVHPQVLASSSQGYPSENPEADNAVQVFRMPESNVHSQVLPSTSEALNPQIVSNSPVSISSQQQQHISQQQAAAQMYPQMHVQHFPNFMPYRQLYSPVYPMPMPNYSPNVPYPSNGNNYLQMPSGGSHLTAGSVKYGVSQFKPLPSGNPSGYGNYTHPAGFTMGSPGVIGATVGVDDVNRMKYKDNIYASTPQVETSDIWIQQAREMPPMQVPSYYNIPGQATPGAFVPNPANASFNATAQSSHVQFPGLYHPQQPPSIGFSVLCNLMQCDNLVRVLCNWVHLDDSLEQESTT

SEQ ID NO: 61381 - protein, 82 aa, Zea Mays
MEWINLKDIYLNFYNRRATGMMTMMRELQLPIVGNHHLGIDDSKNIARVVQRMLADGAVIQITAKRQSATGDVRFLFKDRIR

SEQ ID NO: 61382 - protein, 598 aa, Zea Mays
MATRPGPLTEWPWQRLGNFKYLVMAPVAVHGARRVVARGWGDIDLAFALILPSLLLRMVHNQIWISAARYQTARSKHRIVDRGIEFDQVDRERGWDDQIILNGLLFYVGYLAIPSARRMPAWRSDGAVAMALLHAGPVEFLYYWFHRALHHHFLYSRYHSHHHSSIVTEPITSVIHPFAEHMVYYVLFAIPMLSTLYMGNASVLGIVLYIAYIDFMNNMGHCNFELVPRWMFQLFPPLKYLMYTPSTMDKSSDQLYETSLRGAEETPGLVHLTHMTDLQSVYHLRIGFASVASRPSATGAMWWYMWVLWPVAWLSMALAWAYGSSAFVVERIKLGKLRMQTWAVPRYNFQYGLSWERESINGLIERAILDADARGVKVLSLGLLNQAKQLNGGGELFRHRYPKLRVRLVDGSGLATAVVLRSIPRDAKQVLLHAGPSKVACATAAALCERGVQVVMNPNKEYDMLKSQIADSKASYLERRSDNHHTPQVWLVDSIDDEEQKMAPKGAVFVPISQFPIKKIRKDCTYLSTPAMKIPETMQNIHACENWLPRRVMSAWRIGGILHALEGWTVHECGDAMVHADKAWSAAIRHGFVPLTKA

SEQ ID NO: 61383 - protein, 228 aa, Zea Mays
MFQSSVLQSRHEDLYGAAPSGFRTVVRLVPVATLHLPLRVPVQVLEKRLNDQFVMRRALEKALGYKPCAIHASSENCIPKPTEELIKEIAVLELEVICLEQHLLTLYRKAFEQQFSPASSACDMESNKQPARSFSGILSEAPELSFSTPRKHHQLNQSSRMVLARKSTPTASTSETSNEKINIGRSHSSLLHRSVRVSPSANNLARALKPCHTSPLSFVEGNAWILAW

SEQ ID NO: 61384 - protein, 252 aa, Zea Mays
MRLRTGATEQNTLSRQHRRLMGWAIGCLQELKDLNKYNILAPCYHHPEIQEVEFSNSSLPRSFRRLGETDRPFPVRKRMSGRSWPLRLALKDGHVPMWPGLSGRSLPCTSDEVATAWLDDEDVRAAIHAKPKSLIGSWELYTARIDFTHDTGTMVSYHKKFTALGYRVLIYSGDHDLCIPYPGTEAWVKSIGYQVTDRWRPWYFGDQVAGYTEGYGHNITFLTIKGAGHAVPEYKPKEALAFYSRWLAGEKF

SEQ ID NO: 61385 - protein, 106 aa, Zea Mays
MDQLGKAIGFVPHLAVCTDACKGLEAAVQQVFPWAEQRECSRHLIENMKKGFTGDVYGANMWPADRAYSDRMYKYFMDKVIAASPSVQTWLDEHYSLFWARSKFNT

SEQ ID NO: 61386 - protein, 448 aa, Zea Mays
MVAASSTVVEVAVAAAAAAASALPQEQQAQPRPRPMHAGGANGRHHAYSRKDKSLGLLCSNFVVLYNREDVESVGLDEAAKRLGVERRRIYDIVNVLESVGILSRKAKNRYTWIGFGGIPMALLELKERALRDKSGLASQQTEQQSAATISDDEDDDTLGKEVANIENEKLSQTVNNPSDKPGAPRCRLRSDHRKEKSLGLLTQNFVKLFLTMEQVDTISLDEAAKLLLGEGHEETNMRTKVRRLYDIANVLSSLNLIEKIQQGDSRKPAFRWLGRATTPDTENGVTVVVPPPGKTKSNKRAFGTELTNIDMHRSNLDSKVQKKAKLAKSGGDVLINCKLDSGGDVLINCKLDVRNRLGQGKQSGIVYGPFHPAGARKHELAGGNNPGQREMAEDWKSLSAPFRPQYKNQALSDLFAHYVDAWKTWYSEFAQGSNIMQQHFGHFDATK

SEQ ID NO: 61387 - protein, 275 aa, Zea Mays
MAALLLRRLAGTHRGRVPLGAAAAAACGGATLFYASSSPTVAHLEETGKAAEQVALNPDKWLEFKLQEKATVSHNSQLFRFSFDPSTKLGLDVASCLITRAPIGEEAEGRRKYVIRPYTPISDPDSKGYFDLLIKVYPDGKMSQYFASLKPGDVVEVKGPIEKLRYNPNMKKQIGMIAGGSGITPMLQVVRAILKNPNDNTQVSLIYANVSPDDILLKRELDRLASSYPNFKVFYTVDKPSTDWRGGVGFVSKDMVLKGLPGPAEDSLILFLYIK

SEQ ID NO: 61388 - protein, 899 aa, Zea Mays
MPPARRRPRRGGTPAGAGDDSVPSSSADLLALAATLIPAAATAALKAPPQLKQLVHSLPVSHPLLISLPQALTLALATPSDPDAGSTSDAPPPPPPPPRPAAVLLHLLVTHPTHPPRWEDLVCPLALLHGRLALLATADPPLAALAAACFELAWRADAPGREALVAQTLPYLVALALTSGTSARPILRRLFALRDALPLLDYDDDQSISDFKMLLLRCFVSPLFLKAEEGRKFLALVLGVSEGIARDGLELIRAQVGMTGAKRAAVVAYGEVVFRAWKDGGWVKGEVGEAFLQGMVEGAVHAGSKEVAKAARKILSPFVEQRAVAGVEKLVFQLAEPVLFRSLQVANSNVRHNALHLLLDLFPLEDPDVTKDVNDPLLEKQFFLIDRLLMDEYPEIRTVAVEGISRILNQYWEIVPAPTISKFLSKIVDDMSKDSCNEVRLSTLNGLIYLLGNPQSHEILKVLLPRLSDMISDTALSIRAAAVDLLLAIRDLRSFQYNKVVGLGTLLSSLANDHPRIAQKITKLLIPSYFPSKLSPKEACARCIALIKRSPTAGARFCEFALSEGSSPRSIVELVKYSITLALSQTGLNSDQIDGLIIASVNLIKSLSNERSSLAALREFLANGKLRLVLQVAVSERARAALLGIVPVVLPDELSVLHEECMDIVVNAARISKQEEYQETVLEAHKLIVLGGWSDELFEALTNTLQSKASDFAEIYGVEPPPCPVASSRRKKGKSLKKIPVRDNVVGKGSSKSKISNEELAVAAGAAWQVNEIVKTKDLRDAFLQSSYSEIVFSSLKIISQVYIEQCLYLDSLDLAPVLAYLSLATCNDLPDVNQTGSCFESSTANQSLDHLLNCFDKLLNGTVSNPPSKLNKNGKALRSKDQQKGASEAVLLKMDSIR

SEQ ID NO: 61389 - protein, 499 aa, Zea Mays
MPLLLRGASLLRLCQCTSGLSSVKFSSRVTVLVNLNAMRDGMRATYSRRAASKNSEVKKDEQPVTEKVSRAASKNSEVKKDEQPLTEKEDAAETDLEVERGRSSSPSQLQSMTVKELRELTRRRGISVKGTKKDLVSALMNSMAVEANGEGGKSSVELVSPLEVPLKRKGGASVVVEQKLESSEIISETPNKKSRTKQKSSKNTTREEISVTNVKLSKTVVQKETVAGLSPDDDSEPWTILVHKKPQASWIPYNPRTMRPPPLSKDTRALKIMSWNVNGLKALLKSRGFSVQQLAQREDFDVLCLQETKMQEKDIEVIKDTLLDGYTNSFWTCSVSKLGYSGTAIISRVKPLSIKYGLGISDHDTEGRVVTVEFDDFYLLTAYVPNSGDGLKRLTYRVTEWDPSLGNYMKELEKSKPVILTGDLNCAHQEIDIHDPAGNRRSAGFTNEERESFGTNFLSKGFVDTFRKQHPNVVAYSYWGYRHNARKTNKAHCLRHRFG

SEQ ID NO: 61390 - protein, 175 aa, Zea Mays
MTIAFTSVMAIFIIERVDDRAGAKSLAPLVIAGALSIMYWRHFDDLRPYAVVQFVPCIALPVMAIVIPPMYTHSSYWLWAAGFYLLAKVEEAADKTIYNWTHQIVSGHTLKHLCAAMVPVFLALMLAKRTTEPERISLLQKWKTSWVAVRERRFKDSSTVDVDCGYAVVSSISEQ

SEQ ID NO: 61391 - protein, 157 aa, Zea Mays
MSDSFCPDCKKHTEVAFDHSAGDMVCTECGLVLEAHSVDETSEWRTFANESNDNDPVRVGGPTNPLLTDGGLSTVIAKPNGAQGDFLSSSLGRWQNRGSNPDRSLILAFRTIANMADRIWRVLVTFMRAARCLILRLGLWNVTRVGYDCGSRFGTSD

SEQ ID NO: 61392 - protein, 175 aa, Zea Mays
MANVKRSTPVTVPAPAPAPAPLDPGATAAMAKKSASTGAAITATKSPAAASPLIVIEIPSSPDASTGGRRSTTKARKRPALWPLVLDDEIEMWTPREKRRLDEDCQILAGDPLASNIEVAPAAASDEIAVVAERGKIACRDYPHPRSACAKHPFSRTPHERYCDQPSDGPREADI

SEQ ID NO: 61393 - protein, 1599 aa, Zea Mays
MPEQSRSGAPMEWTTVQHLDLRHSGGRRGASARPMQPHAAAFRSSQAIVAVAIGTHVVEFDALSGSKIASIDLGARVVRMAYSPTTSHVVIAILEDATIRSCDFATEQTLVLHSPEKKTDHVSIDTEVHLALTPLEPIVFFGFHKRMSVTGYSLSLAVAVDSTIKLIGAGAFGFHPTLEWIFVGDRGGTLLAWDVSTERPSMIGITQAGSHPITSVSWLPTLRLLVTISKDGALQVWKTRVIINPNRQPMETHFFERAAVETMDITKILTLQGGEAVYPLPRIKNLAVHPKFNLAAVIFADMSGTEAAKNKAAYTREGRRQLFALLQGARGSTAAVLKEKLLALGSSGILAEHQLQAQLQEQHLKGQSQLTISDVARKAFLHSHFMEGHAQSGPIPRLPLVTISDSSNLLRDVPVCQPFHLELNFFNKETRVVQYPVRAFYLDGFNLMAHNLSSGADNLYKKLYSTIPSNVECHPTNMSYSPKQHLFLVVFELSGTNGVVHEVVLYWEQTDLQTVNSKGSSIRGRDAAFLGPDDNQYAILEEDRTGLNLFSLKAVATKEALENNAAVLEENTFADNAASATSTERQGPLQFTFESEVDRIFSSPLESTLLYVISGKHIGLAKLLQGYRLSADNGLSITTKTDGKKFIKLKPNETVLQAHWQTTLRGPVVGILTNQRVLIASADLDILSSSSTKFDRGLPSYRSMLWVGPALIFSSATAISMLGWDNKVRSILSTSFPRSVLLGALNDRLLLVNPTDINPRQKKGVEIRACLVGLLEPLLIGFATMQQHFEQKLDLSEVLYQITSRFDSLRITPRSLDILTKGPPVCGDLAVSLSQAGPQFTQIMRCNYAIKALRFSTALSILKDEFLRSRDYPQCPPTSHLFQRFRELGYACIKYGQFDSAKETFEVITDHESMLDLFICHLNPSALRRLAQKLEESATDSELRRYLERILRVRSTGWTQGVFANFAAESMVPKGPEWAGGNWEIKTPTNIKNIPQWELAGEVMPYMKTTDAGIPSVVADHIGVYLGVMKGRGNVVEVSEKSLVKAIAAASSENTQPVSSASAEKSKAIPRGDSVGDTLARQLGVQIASSDEQAKAAEDFKKTLYGVVDDGSSDEDESTSKTKKIHIRIRDKPAAPTVDVNKLKEATKQLGLGPPLSRTRSLSGTPQDFNQAPTQPGGPAAAVSPAMPNSAIDLFGTNTLVQPQAPSSSTGPVIAGMGVTAGPIPEDFFQNTIPSHQLAAQLPPPGIVLSRMAQPAPGIEQGRPVPNQMMANVGLPDDGVPPQAPPQQSQFPPQQSQFPQQPGIPMDSIGLPDGGVPPQSQPLPSQGQFLPSQAQGFQLGIPAPSQPIDLSALEGPGAAKQAARPPAPTAVRPGQVPRGAPAAECYKMALAHLEQNQLTDALSCLDEAFLALAKDQSREADIKAQATICAQYKIAVALLQEIARLQRVQGAGALSAKEEMARLSRHLASLPIQAKHRINCIRTAIKRNMEVQNYAYAKQMLDLLYSKAPPTKQDELKSLIDMCVQRGLTNKSIDPFEDPSQFCSVTLSRLSTIGHDVCDLCGAKFSALSAPGCVICGMGSIKRSDALAGGPGPVPSPFG

SEQ ID NO: 61394 - protein, 199 aa, Zea Mays
MHARAGRRALQQPVQDGDGALWPLRQPTLRQPPRPPAPARRAGAAQPSQLRSLLAVTHIPAWPLGRVGSPAGAELPDGAGECQPEQHHDGPQQQQQLRQQPAAAGADACSSACAAGSRTAQDRPVGKQASGEAAESPVGIQPVHQGRDPAHQGRQPGHHPPGGVQRSRKECNFLSSSSPDAYMHSSDNYSWLACCLRVL

SEQ ID NO: 61395 - protein, 390 aa, Zea Mays
MAIMQKGYSVTIMLAVLTFGVSTRWLLYTEQAPSAWLNFALCGLVGIITAYAFVWISKYYTDYKHEPVRLLALSSSTGHGTNIIAGTSGLVDESGNPTGGLFGTAVATMGMLSTAGYVLTMDMFGPIADNAGGIVEMSQQHESVREITDVLDAVGNTTKATTKGFAIGSAALASFLLFSAYMDEVASFAQMPFKEVDIAVPEIFVGGLLGSMLIFLFSAWACSAVGKTAQEVVNEVRRQFIERPGIMDYKEKPDYGRCVAIVASASLREMIKPGALAIISPMAVGVVFRILGHSTGQPLLGAKVVASMLMFATVAGILMALFLNTAGGAWDNAKKYIETGALGGKGSESHKAAVTGDTVGDPFKDTAGPSLHVLIKMLATITLVMAPIFL

SEQ ID NO: 61396 - protein, 418 aa, Zea Mays
MPVLTGNQSKSRSQSMSVNHSMSKSMSISPRRSPMKRSITTTKRSVSRSPVHHNRSGSPVGAPQKSVSRSSARRQSISRSPARSLSKSPPRDASRSPHISRTPVKAHRRSISRSSARSMEQRSLSRSLERIHVRKSVSPRPPLAKPKSITRTPVTSPLRSVSRSPARISRSPLRPSRRSPMRSPRRNIHRSLSRSPARILRSVSRSPVRGGRPRRNISRSPSPLRRALTPPNNGRSRSRSDSPDGSPKRIRRGRGFTQRYSFARQYRSPSADRLHRYGGRNDRDRYMGYRGFRHRSPPRRYRSPSRGRVSSPRYRRRSRSASRSPVHRGRRGGYNKSPVRSRSPPARKRSPSDRARSVSRSHLSRSVSKSPPVHHPSPLDSPSLERASDGKSRSPSPSGGGKKGLVSYGDGTPDSAGK

SEQ ID NO: 61397 - protein, 137 aa, Zea Mays
MNKPFFMLLTLNFSDGCSCLSSSIGWPVDFQKRKDSFVRDRALVLRELYSAAQRESCIGQQEILERENLPRAETSIHGIVTNIVRYDTEDEKLAPPKNDLMNHSRSNPAKRHVEGTDCHSSLPKKLKYFLKDKKLNC

SEQ ID NO: 61398 - protein, 395 aa, Zea Mays
MRGRHLKMKRRHKYGETRGVIVEIGNYRSGSPQCARQPSSSGRFQIPAASSIFCSARHSGCPKNFAHPRFPPALVRALVWFPCQPGHSTSQPPRAARAGTRGLGFGCKFGNTMAGAAGESSGERQGTVERRMLRSRYHAVKNIISDERDEMSRADSDRFTAIIQQVDCLHELVQRPREQIADAEALLGITNTLVTSVRSHSSEGISPSDFITALLKKFGQQGNHDDESVSLRWGDLGLSVSHIFRPVPGCCTMLGPMNTEVKQRKVVAVGRKRTARPTENTCPEELAESSEEVKTDTDRNVLVMFDILRRKKSAKLENLVLNRLSFAQTVENVFALSFLVKDGRVEITVDDSGHIVRPRNAPAASAIASGEVSYSHFVFRFDFKDWKHHAWSWSV

SEQ ID NO: 61399 - protein, 62 aa, Zea Mays
MLEASDLCLRKIHKNGTQKKVEEEFSTCPLSVLMMSVKNNTKILKANMACSVGQRQQRGWGQ

SEQ ID NO: 61400 - protein, 348 aa, Zea Mays
MSNAGEARGVGTGRGSRLPRWTRQEILVLIEGKRVVERSGRGRGRGRVRGGEGAGAGGAAAKPTKWAAVAEYCRRHGVDRGPVQCRKRWSNLAGDYKKIREWERGYAARKEASFWAMRNDARRERRLPGFFDQEVYDILEGRGAGNAAALEDAEAKEEEEVKAKAVLHTGRGIQGGGLFSSSEDEDDQEDDAATPSPTPTPTPAPAPAPAAVVVPIPGEQAVPFFARASSLSVHVTEKTDDVLPRQASSEQGTSKEKQPEQITEDSPAAQCGQKRQRSDDNASGRAATNLQGQLVEILDRSSQMVAAQLEAQNMNSRLDREQRKDQVSSLLGVLGKVADALYRIADKL

SEQ ID NO: 61401 - protein, 705 aa, Zea Mays
MGFDGLVVVSDPYLQRRFTQAELRALQAQYAALRDASPNGRLRMRDLPAAISGVRGAAKSRDAEKENSAPEPGPCHGLTDEEWASVLKAVARADEKPHQDASFELFLRVYAEMQLRLKAVSVCSGRAGGIVRSSSSSAVAFLTAATTTLLHTISESEKASYVGHINAYLADDPSLKSALPIDPATDHIFHITKDGVLLCKLINLAVPGTIDERAINTKRVLNLWEKNENHTLCLNSAKAIGCTVVNIGTQDLAEGRPHLVLGLISQIIKIQLLANVNLKSTPQLVELVEDSKEMEELMSLSPEKILLRWMNFQLKKAGFQKRVTNFSSDIKDSEAYACLLNVLAPECSAKPSAMSVKDLLHRARLILEHADRMGCKRYLTPKDIVDGLPNLNLAFVAHIFQKRNGLSKQMKQVSFVDGLSDDAQVSREERSFRLWINSLGISTYINNVFEDLRNGWVLLEVIDKIAPGSVNWKMANRPPIKLPFRKVENCNQVLKIGKELKFSLVNIAGNDIVQGNKKLILGPYNEIAFILAFLWQLMRYNILQLLKNLRFHSNGKEITDNDILAWANKKVKDSGKHHSYMQSFKDKSLSSGTFFLDLLSAVEPRVVNWSLVTKGEKDEEKQMNASYIISVARKLGCSIFLLPEDILEVNQKMMLTLTASIMYWYLKRPTSQSLDSENGSSCETTSITTSDDSASESSIDDNTTR

SEQ ID NO: 61402 - protein, 1278 aa, Zea Mays
MGVMRKPMTCCTSAAHWVYSRLGSPDELSHFLLSLLESLPSLAIHGFVLPLALQWISPMLKRDSNSVLYAMAVRLLCKIWAVTDWAFPNLQVVLDPENFSNFISDREISASIATSIRDVCKQNPDRGVDIILSVSFCIESRDSVVQALGLESLSYLCEADVVDFYTAWKVISKQVLDYYVEPAVAHSLCILLRCGAMDAEAYSVISGNLVRTLWRIGTSKKNNPDPLWDKARGTAFHSLSNYKVSLIQDAIPDFWKLNYEFFTNEHNLAVLKAMEHLQDEIIRYEHINRRRVTTDKRTAVHKFEKLLEVFPRAVFKGMLSHHQLPGAALLTLNFTPKDILNEGKPKDLPRVHSAFEQAFVEIAESMYVSRNIVVALLALQSWKSFVSNWMQAVVALLDTKDSSKLNKAMKAANDIFKILCDQVPVSTPQVVVNIALVIGALALIVPPTAHLVVSSVSDFLLKWLLQYEHEHKQWSAALSLGLIFNCFHPTDKKSRLQVINGFLEVISKTESCLVKGACGLALGYVCHGLLTRAHNAVDSEVEAITQLNERASVEDILHALVTLLIQLCPSSCYSLKKLSIYGISSMGGMEENIHSFSDDPWAVAGLVIGLGNSVVALYRLGAYEAVTEVKDVLISWIPNVDSNSALFDEIDSVSLCMGSCLALPSVVAFCQRVELLNDDLDALFNRYTSLASELLNLNKSGIIFQNLLMAICIGAGSFLSSILNDGVHAMEFNGVKGFLDTLRHIYTHPFPPLVHLGGMFGVVNAFGAGAGDLTGVFSKPMTSQIKHEDAKDKHIQDYAAWAISFLRSRWSKNQNQILYEDNGSNRSPDDHDQASSFSEQSLVWNLSLWLSDLKFEKSGDVVPISTVGTVLKCLSKAPRLPTTDWGAIVRRCIKAEAQISHKLTNQEDPKILKEACLYLTLAHAAHISPLLQFLDDLTDILRFQRLDINVQSILLKHLLHLMKLFSDSRLDKLHEDFTEYLYSPTSSYLNYSSEQKSMLRMSFWEGIYTCLVDVSEESGVFSFIEKCIQCLLPLLTLHSDGQPEFMKEWSVAILCLTNAQKKWLDDILQIRSTALVNEGHVDVAKKIILRARLCATGCGSTHELGNIKTAILCTKADGVWWSVLVEITSALNSAENIIKRQWLLDALDIGCVTAHPSTVLCFVGLLCGSCCIYMPLLLVNSINVLSDLPVTLPAFLSTIVSDDFRNSVADRLWLLTTDIYTWAEQLAHGHDQPGHDRIHRSETEIATFLANILLSTCITVEDYLSVDKRLKLANLEAL

SEQ ID NO: 61403 - protein, 272 aa, Zea Mays
MERGRGGSGGRGGGRTFQRNNAGEEWPNLVGVVLSWSLADVMNKDLFKDKVKQIPSTFPNLKSYLECYTSPLLEELRAEMSSSLESLSTVPSVRISRIEEKRDKHEIYLASDCQVAKPHNRPECYTPSVGDVILLSDVKPGHISDTTRNGRPYRVAFVTDADGGDEYDDSPPAKYGIVASGKIDAADDERQDGKSTSLFAACLLNIVTYIRIWRCLDYEALRTNRGLIEKMVNYQPGDKLAEDRYQRTEKLVLNLLYQYPCFLFLCYNILSW

SEQ ID NO: 61404 - protein, 459 aa, Zea Mays
MFEDGDFARTKLLAHLGFEPPQAPPASSTDELSQTLADTLNIDHAAVTDNADAQFLIDNGDDFFNNPRPSEASLAEESVSTNGQQIEQEVSGDSVPSDPSIDKSIQHALVVGDYKGAVNQCLASNRMADALVIAHAGGSALWESTRNHYLKNSISPYLKVVSAMVGNDLMSFVSTWPLSSWKETLALLCTFAQKEEWHILCDTLASRLLNVGDTLAATLCYICAGNIDKAVEIWSRTLKSEDGGKTYVDLLQDLMEKTITLALATGQKRFSASLSKLIENYAELLASQGLLKTAMEYLKLLGSDEHSHELAILRDRIACSTEENDNVSSVSESTGTPSPYVTNQPYTTPDHSQNVYQVPQPYNVPSNTYSEAYPQQGTGAYGYNNAYQPQQPANMFVPPSTPPNTQQQPGPSHVPVPQQTVKTFTPANPAGLKNPGQYQQPNTLGSQLYTVGILVTYIY

SEQ ID NO: 61405 - protein, 301 aa, Zea Mays
MAIPVRSAAAPRRLVPSIPPASSGHVRGLACFGTRTGPRGARGLSMVVADSTSRRAKQADGGDGVLGAPVLGGLGMEGLGDQLSVVMKFGGSSVSSAARMAEVAGLILTFPEERPVVVLSAMGKTTNNLLLAGEKAVGCGVIHVSEIEEWNMVKSLHIKTVDELGLPRSVIQDMLDELEQLLKGIAMMKELTPRTSDYLVSFGECMSTRIFSAYLNKIRVKARQYDAFDIGFITTDEFGNADILEATYPAVAKRLHGDWIQDPAIPVVTGFLGKGWKSGAVTTLGRGGSDLTATTIGMERC

SEQ ID NO: 61406 - protein, 113 aa, Zea Mays
MLDSSSSSGFIPLEISVWIHLSLHTLEFLSVGLLSTERDKSDIWLLEVTKFSFSCRDQLWNRMKIGMECWQGYSDLFITEISPVQISRTVPSYLHLPPLPWIIFTLQHRRGLP

SEQ ID NO: 61407 - protein, 1028 aa, Zea Mays
MRAGAYTIHQSLTAEAAAVLKLALALARRRGHAQVTPLHVAFALLTGPAACAQPLAAFSSPASPAVPYGLLKRACLRSHPAPGPAACHGAPQHPLQCRALELCFNVALNRLPASGPQSAPSSTSPFTSPLIQPSPTLSNALVAALKRAQANQRRGCVELQQPPPPANAPPAQQQALLAIKVELEQLVISILEDPSVSRVMREAGFSSATVKSNLEEESALMPPRSSSSPPLPLPPPPIPPHFFIDPSIPSSGKAGDRFGLWPAHFLSAAPGPGACNDDVRAVLEVMVRKQERRSNPVVVGDSVSMAEAVADELLRRLERGDVPEELAGAHLLKLQLSYVHIRLMSRGDVNARASELRRSVDAVQLQRGGGLVVYVGDLRWALDEEAHDNHAVSSYSPVEHMVAELGRLLDDLRASCGRAWLVATASYQTYMRWQQRRRRPLESAWTLQAVVVPTGSGTGLSLNSLGSSSSCSSLQSAGVPPPMLTSQPLGQNPFPEVGAATAFAGRDEQEDEMQLALCTECTKNYEREATLVKAEADAEGPRASLPGWLVLDRPPADQTPHEKYLTVLKRKWSRLCRKLHLCSDPGSPQCPWWSGSCSQPASKGKPSEPRFLGLDGLMGQHTSRRSPPSPSRSPRWAPSPPMGSGCQGVGTTLALASHLLSDSATSDSRAPGSGDGSAAARELEQRLRRNIPWQPRAIVAEIANAVVASRESDDGATGVWLYVKGSDHVATRRAVTVIAETRCGSADRVICADPSKFSSAERLCSDVVSRASAMGGKMVVVVVDDVENASRDVADCLVAASKSGSLKDRQSGQALDLSGCIVILLASKWTGGSSDQISLRLWAENEASSAALKRKTESPLRESKRARHDAGLGGLDLNLCAEDDPADEDDEALPSDITDEGDSSDTSEHGQPHGLLEALAARVVTLDNDDGDGDATASIRARLARAIGQGWTRVEETAVQMLAAASGQFLEDEFESWTSEVLEPAVALATVKNGGKGKVIVLGLGPCGESRETPGFMGSVLPSRVQVD

SEQ ID NO: 61408 - protein, 141 aa, Zea Mays
MVFKEKQKEFYKNAKLISKYKKTKKQQSQSNNHPEIPVHEDGGDTVRYVAKPHHKGKKHPVHSLKEEYEKKRAEEEKAKEERDAMVQAKREHREKSEAKRKELREKMFKKTRSGQPVMRYRIEHLLETALSKKVQFQLPSS

SEQ ID NO: 61409 - protein, 64 aa, Zea Mays
MYHCTNTGRSILLGTKGAGTEHEKDQCDLHDAIDMFLVRQAVGVISGVATRSYNPEYCTVKGTL

SEQ ID NO: 61410 - protein, 836 aa, Zea Mays
MEPRVPCVDGGGDGLELRAARRHRREGGRIHVLDAQILEPQRQRSNPFRNIFHLLTQREVLPRTKHHAKRIWNNSPKYDPHLIELRFSDADAKLGILSWAESLSLHRWSAKYCPLLPPPRSTIAAAFSPDGKSLASTHGDHTVKIMDCHTGKCVKVLSGHRRTPWVVRYHPLHSDILASGSLDHEVRLWDANTSDCIGSQDFHRPIASIAFHGRGEILAVASGHKLYIWNYNKRDDASVPTIILRTRRSLRAVHFHPHGAPYLLTAEVNNIESADSPLTLARSSGYSNYPSALLVSNTNSRFCPLPESNVTSPCLLWPAYLRDDGILHVLGNASSSTIVQQRSSLVQPSTSDTANLQLEQFATPMDVCPGEPTSFNNISDAVTVPTSNAIEMHGAGGQSNPRLQGSSSISNLERFSARDALQVSSLSSIEPIPSTAGSSGSNSRRAMPLNMLLTGGLDVQMFQRNVGSGQQDHFLFGDSSNWEVPFVQGFLMTQNHTGLHPALVNNNVLEDLSGAGTAGINNSTRESSHMHNFGRPGASSSIPLTSGSSRRPNRHYASRSVPGVGSLLLVGPQIDEAEAHAASLGAGSEITASMLAPGTELPCTVKLRIWRHDINEPCVPLAPEACRLTISHAVLCSEMGAHFSPCGRFLVACVACLLPQTEGGRGSQLPVPYEEAGSSPTRHPLPSHRVIYELRVYSLEEETFGDILASRAIRAAHCLTSIQFSPTSEHILLAYGRRHSSLLRSIVVEGENGIPVYTILEVYRVSDMELVRVLPSAEDEVNVACFHPLPGGGLVYGTKEGKLRILQHNGANMINMGSGCFIEENMVEIQRYALEC

SEQ ID NO: 61411 - protein, 55 aa, Zea Mays
MRAQGCKSEQILSDIRTVRNGRMEIRIHFSRYPDLFSNNKYKYGYLYRISNSNII

SEQ ID NO: 61412 - protein, 297 aa, Zea Mays
MGAPKQRWTSEEEAALRAGVARHGVGNWRMILNDPELSSTLRYRSNVDLKDKWRNMNVIVTSSSTRDRGRTSTRRTRAAPKNNDQLLAMSTITSEVDDEIVDVKPIVSMSVEGWNTSNSKKSHSRLDNIIMEAIKNLNEPTGSHRTTIANYIEEQYWPPSDFDHLLSAKLKYLATSGKLLKVNRKYRIAPSLLEDVQREPLKLGSDASRTLTRSQVDAELVRMATMTVEAAAAAAAHAVAEAEAIMAEAEAAAREAEAAEAEARAAQAFAEAAVLTLKNRNAAKLVVVRSFCFGLFF

SEQ ID NO: 61413 - protein, 171 aa, Zea Mays
MHLLYNLEKAGLLKRQESRSNWVGITRALQLIVDVNDTANPTDISYIFSGYAPLSIRLVQHAVRSGWRSIEELLKLLPGPHLDLKRGGLTINSSPEVHPGLGAQQSIDRVGHRSLVLVVFIGGVTFAEIAALRFLSAQEGMGYDFLVATTKVVNGNTILRPIIANSKEGMM

SEQ ID NO: 61414 - protein, 174 aa, Zea Mays
MSSVANGSRRASPRIHTKLHTTQALGLPCVPFGLHRRTSPSRSRAAALVRLSEIHTSPSHFAPGLASSSTTGALFVIPKSQNKGKSKRNDLGAGTTSRSFTTEEISKHSTRKDCWIIIKDKVYDVTPYVEEHPGGDAILNNAGGDSTEGFFGPQHGTRVFDIIEDFCIGQLKAS

SEQ ID NO: 61415 - protein, 497 aa, Zea Mays
MVAAEGGPVEEGVGESSSPPRVDAAPAPSGSVGSGGRGGASDICAEVLERLVADGHAEASDPEFRDRLAAHFGRLPHSYQLDINVDKATDVLVHQNVLAEAKDPDRRPAFYVRFLRIEDIDPANDSDASEEGDGDGDDLSVRQDTPYTHIHEVVFSTIDKPKLLSQLSALLSDIGLNIREAHVFSTHDGYSLDVFVVDGWPIKDTDGLHKALEASILRNEGSWSGSSHSSAAERTLPFQVKGGEWEIDKRLLKMGGLIVSGSCGDLYHGTYLGEDVAVKVLRAEHLNKNVWNEFTQEVYILREVQHTNVVRFIGACTKPPQFCIITVDVCRGMCYLHERGIIHRDLKTANLLMDNDHAVKVADFGVARFQDQGGIMTAETGTYRWMAPEVINHQPYDSKADVFSFAIVLWELITSKIPYDTMTPLQAAVGVRQGLRPGLPKKTHPKLLDLMQRCWEADPSDRPAFSDILAELEDLLAQAQGTSGKTVQDPSNSNAKD

SEQ ID NO: 61416 - protein, 628 aa, Zea Mays
MTEVADASPPPPTAGGGDRKRGRASPVPPLPGQHKRRREEGGGGGFDRRRLGPVGGGGHEQDDRRYGNGLGGIGGRGGDSRYTNRAPDSGRGGWNEGSGNSRREGLMSYKQFIQELEDDVSPVEAQSRYEEYKSEYITTQKKAYFALHKDEDWLRNKYHPTNLENVIERRNELARTTADDFFLQLQSGSLDTGPGLTGSAVSKSGNNSSKNLDAVEGDGKKGKLGKGSDDSYYAAPKAHPVSSEVRRIRIDIEQAQGLICKLDSEKGIENNILSSSNHEKPDMDKSHGSMGPIVIVQGSSTVKGLEGTELLDTLVTYLWRIHGVDYYGMSETNEPKGLRHVKADARTYNGASSSATEWENKLDSFWQDRIQGQDPLEILKAKEKIDGAATEVLDPYVRKIRDEKYGWKYGCGAKGCTKLFHAAEFVQKHIKLKHTDLVVDLTSKAREDIYFENYMNDPKAPGGTPIMQQPAPRGKGRQRPPIESRLRDERGNHRLDSDGSGENPDDPVYDSFGDPTMHGAFPPDIPAPPVLMPVPGAGPLGPFIPAPPEVAMHMLRDQGAPPPFEPSGGPHPRKAGRGSGGGGPPMRGPSPVFSAPPPHHMHDPRRIRSYQDLDAPEDEVTVMDYRSL

SEQ ID NO: 61417 - protein, 457 aa, Zea Mays
MRKPRLSVGGGGGLLHGFPSPVLLFLLLLLLSSWRVAAQAQQAPQTDPVEAAAVNAILSKLRLSAPPSWNISGNPCSGAATDDTSIDDNPAFNPAIKCDCSDQNNTLCHVTRLKINTLDAVGPIPEELRNLTHLVKLDFRKNYFYGPLPAFIGELTALESMTVGINALSGPVPKELGNLTNLLSLALGSNNFNGTLPDELGKLTKLRQMWASDNNFSGQIPDYLGSLTNLTQLRLQGNSFQGPIPTSLSNLVNLKKLDLSFNNITGQIPQSILNLTSLSYLDFSYNHISGNFPSWATDKNLQLNLVANDFVMDSSNNSVLPWGLECLQHSTPCFLGSPKSASFAVDCGGSRAISGSDNSVYQADNANLSAASYYVAGAPTWAVSSVGLFLDADAPNASYIIYSSRQFENTLDSALFQTARMSPSSLRYYGIGLENGNYTVTLQFAEVDFPDMQSWRS

SEQ ID NO: 61418 - protein, 673 aa, Zea Mays
MEATSPHPPTTIRRNPPRRARPPPTPLAGDKSKPSPLSRLLEGEAAFAASVPCPPQEERLKVFLRIRPLPDRDRSRPLPAAKDPRRKPKQVGAPGELCLAPDGPNSVVLTVPRSKLVDPKRGRTEVFDGFSAVFPSDSTQHDIFAQVMNPLVDDFLGGKSGLLVAMGPTGSGKTHTIFGSPRNPGILPLTLRRIFNAQGESKVSRKPTRSFFFSMFEIFSEGKGERILDLLSDTVECVLQQSVIKGLQEVSLSNPADAESLVSRGMLKRSTAATNANSNSSRSQCIITIRADSEHLLSSAVLTIADLAGAEREKRTRNQGSRLLESNFINNTSMVFSLCLRSLLEHQKNQKKPLEKHFKNSMLTRYLRDYLEGRKKMTLILNVKPGDDDYLDTSFLLRQASPYMKIKYTSLDDSFDLASQKRINVSLICQENKKKRKVQKPAVLVVERKENVDTDDISKVSEKDGVHHVSLNPEMPRVSRSEAIMTNFARALLTVLRQYKHKLLESENAVESMKELIRDKDIEIMELKKELKAVRYCSCKSSPINEDDSVDHDDSSSFGQAAQSLVNISNQADLGSNDASEDNFHVELQALHKESDKSESFTVPTPAPTGGAMPASSYSDQSFTGQSDEETEELSKITLENKDIQLDINIREEKHHESCSSSQQVNFDTEGWF

SEQ ID NO: 61419 - protein, 703 aa, Zea Mays
MLLVMGNPGRSRQLSALVASAAILLSLSALPICRPYTYEQDVFAINGLYTALGAPQLPNWTSNGGDPCNEGWQGVSCVASNITSIILSGANLGGQLGNTLGNFTSLITFFLSANQLSGSLPSTLSSLTLLTSMSLNSNHLTGAIPDVFSALTGLANLDFSDNNLTGPLPPSMGNLTSLTSLHIQNNQISGTLNVLQDLPFQDLNVENNLFSGPVPVKLLNLPNFKKDGNPFNTSIAPSAQPPIAPTPLPSIPPSSGHVPSKEPAHSSSVPGGSTSGSGKHTTLKLVGYILIGVVLAVVLVLIAMYCLSKYKEKRSRDDIYMKNKIGRVPQKLGEPKIKEPPLKLKNDAEKAPNVVSDGREEHKLKVPTSETSNVVYDPSPRDGAELRFITDSFSEENIIRDSRFGKVYLAKLPDGELLEILKIDSSNSKVPVDAFLELVVRISELRHPNILGLVGYCAEFEQRLLVYEYCSKMTLHDELRHVDDSSKPLSWNARLQVASEAAKALQHLHDGCQPPVVHQNFEPSVVLLNSTLVVHISECGLASLASKSVSQLSGHTLFHYEAPEVHESGSVSDRSDVYSFGVVMLELLTGRKPYDSSYPRAEQHLVRWATSQLYDIDAITKMVDPSIRGQCSDKALSRFADIISRCIQHEPEFRPPMSEVVQDLTRMMPLTTIDAVVGYFGQCKMGGTQWQDAETAPRFVHCQ

SEQ ID NO: 61420 - protein, 122 aa, Zea Mays
MIQFINLLLWSALYFLLVLMNLICRRVQVCADSTLFLLAMLVIGRQATEAWSMGELFRSVGLEGATYHPSMPGMSGEALLTRSATSVSLGYHASTFGGLQSNGSEPLFGPKSARNLLRSDTF

SEQ ID NO: 61421 - protein, 529 aa, Zea Mays
MISSRLVPYSRPVRLHLRSPGPDTPLYQSRPPAHFSHPRAASGAGEPSRRSSNDPSLSRPFSLPLPAQGEERERMWSSSQASTRGVVEMGRVEAGPSHFPKRPAPQNSARVNLSRTHTVKPTSAGDRSGISVKCNLGWSSQPSPDLRHHFRGYSSASEAVLTSQSDVRKLFVGNEKIGVLLLNLGGPETLDDVQPFLFNLFADPDIIRLPRLFRFLQKPLAKFISEVRAPKSKEGYASIGGGSPLRQITDAQAEALREALHGKDVPANVYVGMRYWHPFTEEAIEQIKRDGITKLVVLPLYPQFSISTSGSSLRLLESIFREDEYLVNMQHTVIPSWYQREGYIKAMATLIENELTKFQEPQKVMIFFSAHGVPLAYVEEAGDPYKAEMEECIDLIMEELEKRGITNPCILAYQSRVGPVEWLKPYTDETIIELGQKGVKSLLAVPISFVSEHIETLEEIDVEYKELALESGIKHWGRVPALGCEPTFISDLADAVIESLPYVGAMAVSNLEARQGSTKDSLEEDETNE

SEQ ID NO: 61422 - protein, 231 aa, Zea Mays
MPFLFSNWRALREVVNWLYTSLATSDLSLQTGPMLVTHWGLSGPVVLRLSAWGARELHQCNYQGNLMVDFVPDIHIEDVKRVLFHYKDQHAKHKVSNTFPTEFGLVKRFWRFLLEQESLNGDTHWASMPNNHLNAVAFRLKQWTFEVVGKGQFKDEFVTAGGVPITEISLGTMESKKQPNLFFAGEVLNVDGVTGGFNFQNAWTGGYIAGTSIGTLASTSNLPEQQSCFQL

SEQ ID NO: 61423 - protein, 642 aa, Zea Mays
MEVVDLSPTSRPLSPLLSTAPARRLRLLPPRCVVGLRASPRTRGLGCVGGSLSRRHSFCKNGFFATSSSSASVEPATQELGTADAVEWSGDAIRRRFLEFYAARGHKILPSSSLVPGDPTVFLTIAGMLQFKPIFLGKEPRRVPRATTSQKCIRTNDIENVGRTARHQTFFEMLGNFSFGDYFKKEATTWAWELATKEYGLPAERLWISVFEDDNEAFNIWHNEVGVPKERIQRMGAEDNFWTSGATGPCGPCSEIYYDFYPERGSSDVDLGDDSRFIEFYNLVFMQYNKKDDGSLEPLKQMNIDTGMGLERMARILQKAHHTATHLLQSALKSVVGSETSQAGSLVAFDHLRFDFNFHRPLSEEELTTIEALINQWIGNAAHVETKVMALQDAKNAGAIAMFGEKYGEQVRVVEVPGISLELCGGTHVSNTAEIRGFKIISEQGIASGIRRIEAVAGDAFVDYVCARDNYMRRLCLSLKVKAEDVNSRVETILEELRATRNVASSLRSKIAVLKAASLASRATTVEPQNVRIVVENMGDVDADGLKSAAEYLIDTLKDPAAVILGSSPGDGKVSLVAAFSPAIVEMGLQAGKFVSGIAKLCGGGGGGKPNFAQAGGRKPENLPDALEKARAEIVARVSGSS

SEQ ID NO: 61424 - protein, 784 aa, Zea Mays
MGASRKLQGEIDRVLKKVQEGVDVFDSIWNKVYDTENANQKEKFEADLKKEIKKLQRYRDQIKTWIQSSEIKDKKALMDARKQIEREMERFKVCEKETKTKAFSKEGLGQQPKTDPKEKAKAETRDWLNNVVSDLESQIDNFEAEIEGLSIKKGKQRPPRLVHLETSITRHKAHIKKLESILRLLDNDELSPEQVNDVKDFLDDYVERNQEDFDEFSDVEDLYSTLPMEKVEALEDMVSLAPSSLVKGVAPVSTTAVLSTKSSVATSPTQPTVSTASSQSTSQDQTEETASQESNPEPTPQTPPPKATVLSSAIPRSAPENTLAVTSIPANLSTTLKDDESMSVPPRRPSPATEIGIGRGITRGTTSQALGTAPITIGPVSGNGSLVMPLGSKVQPQQVPRTNDAIGSDSANTNENPILGGRVFSPPVVSGVQWRPQAAAAFQNQIETNQYRGRPEISADHREKYIQRLQQVQQQGGSLLNVSHITGINQKQFPTPQPNPLLQQFNSQSSSISSQVNLGLGVQGSDAGHIKSEDQQILAEDVGVESSATTGANKQTSEDDTKIPYSNPSAPAAENTQLPRDTDLSPGQPLQPGMPSSGVGVIGRRSVSDLGTIGDNLTGTSGSSGHDQNYYLQMLEAAFHKLPQPKDSERAKTYIPRHPAVTPASYPQVQASIVSNPTFWERIGSDTLATDMLFFAFYYQQNTYQQYLAARELKKQSWRFHRRYNTWFQRHVEPQVTTDEYERGSYVYFDFHVTEDGSGWCQRIKNDFTFEYNYLEDELSVQTN

SEQ ID NO: 61425 - protein, 206 aa, Zea Mays
MILDKPLADIGGKGLFTKEIDDALLQGRIDIAVHSMKDVPTYLPEGTILPCNLPREDVRDAFICLTANSLAELPAGSVIGSASLRRQSQILYRYPSLKVVNFRGNVQTRLRKLKEGDVSATLLALAGLRRLNMAENATAVLSVEEMLPAVAQGAIGIACRSNDDKMMEYLSALNHEDTRLAVACEREFLAVLDVLLEKGVPGVVVS

SEQ ID NO: 61426 - protein, 905 aa, Zea Mays
MLVDIVDLSSDDDEVAVTEEHSVDGKGVYAKANFFDLTIDDGILEGEHIAYEQEQGDSAQGTSFYKQEFIADDGQAEAAQCIVTLELQNLGADGGCYASQCTETLLVQQLRRNDGQNDAAHSTGTLPIQELRTDGGQHDAAQCTTSLHMQELRATDVQGDAACFTPTLQRQEHTAGNEQGDTVQYTTTQQGQESIADDTRGDFTHCTTALQWQGSHKAQCTTTLLRQEFLAAGDRMQDAALLRNSAEATTSLTSTQQGRHMRTELFNVSTATPFPRQFWKAGEKAGDYGLASQADLNNDHNRLQIHPKFLHSNATSHKWPFGAIAELLDNAIDEVSSGATFVKIDKMKHSPKGDYSLVIEDNGGGMSPKSLRQCMSFGFSQKSTTSSIGQYGNGFKTSTMRLGADAIVFTCTKDDRRLTRSIGLLSYTFLMRSNCNDIFVPVVDYELDALSSTFKRKMNCGEKHFLSNLFTILKWSPFSTEDELLNQFSNMECHGTKIIVFNLWLNDALEMELDFITDKEDILVSGAPEIRAGRNTVESLTQMHVANRFRYSLRVYASILYLHVPENFQIILCGRAVEPHYVVNDLIYRECIIYRPHVQVTTEVDVITTIGYLKGAPRLDIYGFSVYHKNRLILPYWPAGSCSGRRRGIAGVLEANFIRPTHDKQDFERTGLFQRLETRLKDMAKEYWTYHCHMVGYTRVMKKPPPAHYVSTIAEKGDDNLAAQSTTKTYGYNSRARVPVALQPCSNAYNTQDPMHADVGVVMDQMNYGACPSMTINVGTTLHSLRYAPQQSQSELCKRRKSSEIHWRSQKKQNTNIYSDKPESDSGTEMAEFRVVLDSSTMLKAECSELEAAGKQLASKADKLRIELDVWQRMYQGLSDKLRSYDGLQRLRCSRHCSSSSIGFI

SEQ ID NO: 61427 - protein, 250 aa, Zea Mays
MMLPQFLSSKDDKSIKVSICPTCAGEGEVISEYCRKCSGEGRIRVRKEIKVKIPPGVSKGSTLRVRGEGDAGSKGGPPGDLFVCLDIEEPSDIKRDGINLYSTVSISYLEAILGTIKKVRTVDGTNDLRIPPGTQPGDVIALAKQGVPSLNKPTIRGDHLFTVKVAIPKRISGRERELLEELASLSNGGFVRTDAKPKPAQPKRVHLEKEVGASQEDTDKSKAAGDWLKKLTHFAGSIANGAAKWLKENL

SEQ ID NO: 61428 - protein, 301 aa, Zea Mays
MYVARESTKLWRRVCAETTAELQLLLQKWQLLLAGLVFQYIHGLAARGVHYLHQPGPLLQDLGFMALPWSFHPFIYHSKRFYTVLLWRRVLAFLVASQFLRIMTFYSTQLPGPNYHCREGSKLATLPPPNNALEVLLINFPRGVLFGCGDLIFSSHMIFTLVFVRTYHKYGSNRLIKLLSWFMAVIQSLLIIASRKHYTVDVVVAWYTVNLVVFFVDNKLPEMADRTNGLSLLPVSTKDKDGRMKEELHKLEKDGRMMDEFHKLLNGNSIDATDWRQRVQMNGKHGEDTSHTVADATSAGT

SEQ ID NO: 61429 - protein, 178 aa, Zea Mays
MWTPRPSRRVVSSASDTLLLCLLLLAGAADAAPLLVGVFPKACPEGKFYCRNIGDTPRLLFSSFVNDKICDCCDGSDEYESGIHCQNTCRNIKDTAEADGGGGDLAVTHLDSTDDFMSKHAIAMEDHIQNNSNRDLVQKIRGLRTALVIELGLVVCIFAFCIARRRTRTRRRQHILKR

SEQ ID NO: 61430 - protein, 91 aa, Zea Mays
MENYENAMATYLEGLTYDPNNLEVLDGLRRCAACIKRANGGDVELEDLKDMLGNFQSENNLLKFRKATEQAAILKKEASDERLKRIESERM

SEQ ID NO: 61431 - protein, 84 aa, Zea Mays
MVRRMLIEAIVDLLHTNGQVYLQSDVESVLLVMKEQFLSYSKGQLVTDGDGGNCIDNPFGVVSDWERHVLARGAPMYRAMLKKM

SEQ ID NO: 61432 - protein, 1005 aa, Zea Mays
MAEPTPKSKRTKKAKKPSAREGDGEDMDTLKSDVATFASSLGLLPGAGDSNGGFDDSDFRKSGPMYKSSKFPSKQPHQKPDNTANPHLNPRPTKKPHPLELRDSYAATKPGAVNTNYPLMKAAALSGQWYTDADELEARVLGGRKQVPPAVGLQEMQGIVERKRELAEKLMLQYAREYDAVRRGHGDLKLLDISAKSGTSADKVSAFTCLVEDNPIANMKALDSLLGMITSKVGKRYAFTGFDAIKELFLMRLLPDRKLKSLIQRPLDILPETKDGYSLLLFWHWEDCLKQRYERFVMALEDAVKDMLPNLKDKAMKTVFMLLKSKSEQERRLLTALVNKLGDPERRAASSAAYLLTCLLAAHPNMKMVVIDEVDSFLFRPHVGLRAKYQAVNFLSQILLTNKGDGPKIAKRLVDVYIALFKVLMSSGDTKGDTYSKDSKKKVGKIEGGNNKMDSRSKGNNEVGSTAGSDLELDSRILSALLTGVNRALPYVASSEVDDIVEVQTPILFRLVHAENFNVGVQALMLLFQISIKNNIASDRLYRALYSKLLSPSAVTSSKPELFLGLLVKAMKNDVMLKRVAAFSKRLLQVALQRPPQYACGCLFILSEVLKAKPPLWGIVLQNESVDDGDEHFEDILEIPEDSSVASAVLHKHNEKVAAHEKHNLDAADGIDSVKQVNLVDENNASTDSSRQHAFYDPRHREPSYCNADRVSWWELTVLASHVHPSVSTMARTLLSGNNIVYSGDPLTDLSLPAFLDKFMEKKPKGNRIAEGRWHGGSQIAPAKKLNLNHHLIGEELLELAENEVPPEDIVFHRFYLNKTGTVKRKTKQKDSVLDEDAGELLADNDADEASDESGDEILDLGDGLADDGEYDYDDLDSNAFEEEKDLLRDDSDVEFDDVSDDTASGDEGSENDDDIPILAGDSDGNLSDDEMVDAGKGGVSYTKKRRAGKKSGLSPFASLDDYEHLMVGDADATTAKRKHMATGRAGGEKKPKLRPRKKRSRSSE

SEQ ID NO: 61433 - protein, 390 aa, Zea Mays
MTYSVKWVATDVSFARRFEVYLDYPFFEHQIHWFSIFNSFMMVIFLTGLVSMILMRTLRNDYAKYAREDDDLESLERDVNEESGWKLVHGDVFRPPRSLMFLSALVGIGTQLAALILLVIVLAIVGMLYIGRGAIITTFIVCYALTSFISGYVSGGLYSRSGGKNWIKAMVLTASLFPFLCFSIGFALNTIAIFYRSLAAIPFGTMVVMFVLWAFISFPLVLLGTVVGRNWSGAPNNPCRVKTIPRPIPEKKWYLTPSVISLMGGLLPFGSIFIEMYFVFTSFWNYKVYYVYGFMLLVFVILLIVTICVTIVGTYFLLNAENYHWQWTSFSSAASTALYVYLYSIYYYHVKTKMSGFFQTSFYFGYTLMFCLGLGILCGFVEVSGTIGML

SEQ ID NO: 61434 - protein, 754 aa, Zea Mays
MAAEPAATAAASAAAAISAVMDWRSSPDARAAAFAYLESVKSGDVRALASTSFFLVRKDQTSEIRLHGFKMLQHLVRLRWEELSAAERNEFANMTINLISDVVGPHEVWALKSQTAALVAEVVRREGVDLWITLLPSIVSLSNNGPTEAELVAMILRWLPEDITIHNEDLEGDRRRSLLRGLTESLSQILPLLYSLLEKHFGAALSEHAKQQMDLAKQHAGTVTAVLNAVNAYAEWVPVTDLAKYGLIHGCGSLLSYSDFRLHACEFFKVICQRKRPVDVAVAEYDAAMCNIFQVLMNISQQFLTRSGMQPSSIDESEYEFASCVCETMVALGSSNMQCILADGARTFQFLQQMLEYYQHYKITLHFQSLLFWLVVLREPSKSKSIARVSGDNSAAGNSASTGDLSTEKKKGVSVFVTDEIYSTILDVSFKRMLKNNGSATSGLLEIWSEELEGKSDFCNYRTKLLDLIKVIASQRSVIAAAIVVQRINVVFGDANQATKSPQDLDAMEGAQLGLEAVVNAIFDGSVDCGKTDLDTKSQLHKIFEGLLQQLLSLKWTEPNLAVIHGHYLDALGPFLKHHPDAVASVVNKLFELLTSLPITFQDPSNNSRLARLQICSSFIRISRAADKALLPHMKNIADTMAYLQGEGRLLRGEHNHLCEAFLVMSSSAGIQQQQEVLAWLLEPLNKMWTQVEWQTAYLSDPSGTQEKWNQKVFSNSTSTHHNSTWLSASDVFTSSMDCAPSLEAAAMHTCPLV

SEQ ID NO: 61435 - protein, 332 aa, Zea Mays
MAGRGGAGRRPRAVFMAFGTQGDVFPIAALAAAFACDQQEYAVVFITHSAHRSLSAHLAASSVRYMPVSSPPVLAAEQLENISSDSIQSNHERESFSMRKKAIQAEHRKECLSFVEEVFGNDPSISGDFIVINFFALEGWHLAELFQVKCVIAAPYFVPYSAPTSFKRQFKQTFPLLYKYFQEAPANTVCWTDIIHWMWALFMESWGSWRNDCLNLSPIPFTDPVTNLPLWHVREESPLLLYGFSKEIVECPGYWPFNAHACGFWFLPMDWQFSCDKCMELSGNINSSFGGMLCANHSSLEHFLTRNAYSSRPIFVGLSSIEWAFLEILKHF

SEQ ID NO: 61436 - protein, 68 aa, Zea Mays
MPKKMEKLHRSWSHMILVSQKHIIKGKEKGPQYDTIYSLRRTTLPVQHFHHHISKGEVRSINKGILVH

SEQ ID NO: 61437 - protein, 613 aa, Zea Mays
MEFGTARQYDTTDLFFQEDWLYDDHLFPSKLDDEDDEREEEDKFVLDAHGGASAQTEIGKLGAGHNHRHEHIGGDRCEGCAEVYTCSSPLCGCCGGGLKNDGLHVARSSSSTVYGRYQIMDDRTETMDDCAQDGFQLKQSGDIMFECGMQRDPGRGDDDSDLSVVEKELQMLSSFDTDAVTNHGVHDFTDNGDLNGICDKNPKISIDKEYLKGHRIQPFPEIGDPDEAYEFRNVGSLNADVQHSTALEAEEDAETNIDLALSDFHREYEVFELRIIHRKNRTGFEENKDFPIVLNSVVAGRYCITEYLGSAAFSKVVQAHDLQTGMDVCLKIIKNDKDFFDQSLDEIKLLKFVNKYDPLDEHHVLRLYDYFYHQEHLFIVTELLRANLYEFQKYNQESGGEVYFTLPRIQVIARQCLEALVYLHHLRIIHCDLKPENILIKSYSRCEIKVIDLGSSCFLTDNLCLYVQSRSYRAPEVILGLPYDQRIDIWSLGCIISELYTGEVLFPNEPVSMMLAQMIGIIGPVDMEMLELGQETQKYFTDDYDLFTKNEIVRLNEYSLIAKSILHELLLIVSFAFIKFISYQLPLGSYLFPTVCYKSCRKLKNRRKCMILV

SEQ ID NO: 61438 - protein, 880 aa, Zea Mays
MGPSKGSRTINKIIVKGSEYQQQHDDPSSSSKAKQKRRKLSDFDPKWSKDELTNFYEAYRQYGMDWRKISIAIGTKSSDMVQSLFTLHRTFLSLPEHQATAMGFIALVTGHHNASEKTTTHRGYDHVVRASGKARKHGEKPKSIDGPDLPNCQEAKISGFSDLFQSRYYGELVRYIRNHAVRRRTPRIPAIVSADRSTIDEATPGIENVISSTKRKYEAANNDSAIVPTNKYSPDRVSGFAEAHKAGQDHCLLETIGTGHVATCQQHSKKTRIQQTMEEGQTGVVDHETTMASKEGNKPVDLLNNNQLFIDNISEDDMLVLDVLCSLMNAPSKMPKLEINIPSGSVGKTDSTLSQRREEGHPTIDLSKQGKPVGKSSASKTRKKKYKILDAEVPAVAQNVCGNSLALPETLRVVITDDSSLCTDSGRVGIPEASEDIPAEVPSAQTETKPEVRMSGRTRRKSQMHCKTKHMSCNEGSDNLQAKKLLHCLSSEPLRRWCTYEWFYSAVDYPWFSSNEFVHYLDHAKLSHLSRLTIPEWGTIRSSLGIPRRFSNYFLAVEKENLEDYREKVRKIYAQLSDGSRDFLPADLARPFSIGQQVIVRHPNSRELCDGKVVMMGPDCYKVHFDDPDIGVDIVKDTDCMPVNWLYNRPDNMRSCLSNDAYSILEMDHIPDLTASENEDHAVNGSTVLEGLKSLRLTSDRQPKAESIVNSERPPYRSTSDSPAKSRDCPDNNSAGHYDELESYIAAFAERSLSQARQMVDKAMQANPGGNEDEKVCTSNQVAGCAGPGFEPARGAQLPSDLISNGIATVLSIKSLSDSRHPFANVAGVLDHACSMLRPSCPQNLALYDQIKRDIGIIKTQIFALMPTALGNCSPPVPPM

SEQ ID NO: 61439 - protein, 248 aa, Zea Mays
MKKTLVFHRGRAPKGERTGWIMHEYRTTEPEFESGEQGGYVLYRLFRKQEEKTERSSPEEVDRSGYSPTPSRSSPDNLEANEEANTPLNKESPESALHESPIELPKSVETNGGSMTRWLADRNDNLMVTAPDVSHIPFHGHAAGVAKVDPSVGASGHLVNPHNGNDDYNKFVSDFTPILPLENAFFTDIQQGAFGFDGIMNPLDPLDAFLNQTLVDPDEHSSTTSKVQYDSDIPTEFENHWNMKPNLF

SEQ ID NO: 61440 - protein, 135 aa, Zea Mays
MNSVPKPAPGSETSGREDFAVGDKDAVVIVDHGSRRQESNLMLNDFVEMFRAKTSYRIVEPAHMELAEPTIKDAFGKCVQQGASRVIISPYFLSPGRHWKQDIPALAAVASKEHSNIPYIVTAPLGLHELMVVCA

SEQ ID NO: 61441 - protein, 559 aa, Zea Mays
MELSESVLGKRGIGKKCLRLQWKKIENFVCPTVGSEDIFAVLFGHQSGEDTFWLDSSSVDQNRARFSFMGGKGGSLWKQMSFHLSGQRANCGGMLSIQDAYGFTAKKFIKDGFLEFLNKEIESIQYNEKDYEGLPFEFHGGFVGYLGYGLKVECDASSNKAKSSTPDACFVFADNTVVVDHSNGDVYILSLHDEFYSSNGDGICKNSTHTSWLVETEKKLLRLGGMPSGSPIIRKTHARSSSVHKQAGSPINGKTYVRSSSALKQSFVVEKSKDQYVRDVQNCLDYIRDGESYELCLTTQMKRRADCINALQLYLKLRKQNPAPYAAWLNFSSENLSICCSSPERFLRLDRAGVLEAKPIKGTIARGRTPEEDECLRLQLRYSEKDQAENLMIVDLLRNDLGKVCEPGSVHVPRLMDVESYRSVHTMVSTVCGTKKPDLSPVDCVKAAFPGGSMTGAPKVRSMEILDSLETSPRGVYSGSIGFFSYNHTFDLNIVIRTVILHDGEASVGAGGAIVALSSPEAEYDEMLLKAKAPTEVVEDLVQTIYSSDRSDSMQTTIS

SEQ ID NO: 61442 - protein, 658 aa, Zea Mays
MVQFIVGKRFYVAAYRALRHGSTNMDVLVVIGTTASYVYSVCALLYGAFTGFHPPIYFETSAMIITFVLFGKYLEVLAKGKTSDAIKKLVELAPATAILLLKDKEGKYSGEKEIDASLVQPGDVLKVLPGSKVPADGIVIWGTSHVNESMVTGESVPISKEVSSLVIGGTMNLHGVLHIQATKVGSGTVLSQIISLVETAQMSKAPIQKFADYVASIFVPIVITLSFLTFLAWFLCGWLGAYPNSWSAESSNCFVFSLMFSISVVVIACPCALGLATPTAVMVATGVGASHGVLVKGGDALERAQNVKYVIFDKTGTLTQGKATVTATKIFSGMDLGDFLTLVASAEASSEHPLAKAILDYAFHFHFFGNLPSGKDSIKRRKEEILSQWLLEVVDFAALPGKGIQCWINGKKVLVGNRALITENGVNIPEEAERFLVDMELNAKTGILVAYDGDFIGLVGITDPLKREAAVVIQGLKKMGVHPVMVTGDNWRTARAVAKEVGIDDVRAEVMPAGKADVIHSLQKDGSVVAMVGDGINDSPALAAADVGMAIGAGTDIAIEAADYVLVRNNLEDVITAIDLSRKTFIRIRWNYFFAMAYNVIAIPVAAGALFPFTGVQMPPWLAGACMAFSSVSVVSSSLLLRRYRKPRLTTVLQITVE

SEQ ID NO: 61443 - protein, 384 aa, Zea Mays
MSYPPTRKEMMRTADGTLQPIKGVGTVQCTQSIKLSSVLYVPTFHVNLISLSALVDQLDCRIILDRDNCLIQERQTGKKLGTATRRSRLWYMDHEGTNDTICTILATRMEEKEVAVMLLHYRLGHISFDKICKAFPDAMCGVDKSKLLCRACELAKRTRTSYISRGIRSISPFVLVHSDVWTCPVTSINGMKCFVTFIDCFSWMTWVYVMKHKDEASKYFQNFCAMVENQLNTQVKVLRTDNGTEYVNKEFNAFLSRNGILHQTCCPDTPPQNGVAEMKNHHILEVAFSLMVTMNVPKFLWSEAVLTATCLINCTPSKLLAMKTPWEIFFGENKFVVSPKIFGCTCFVRDHRPQVGKLDPRGVKCIFVGYTAGQKGYKCWSPSE

SEQ ID NO: 61444 - protein, 901 aa, Zea Mays
MVEAARRCLARSHPWAGGMDKIHDDTDQCRSWDHHDLISVKPEYNDSSRCSTSARLASIAPYSGRRETSVYATDIISGITIHCKVFVDKISRISIFHHAVKIDLDEIATLRIHAFDDEENVFSTLVGLQFLWHLTPRLVDNSSHHLIRIPLKETHLSDCGGFCGDMNIRFELEDKNLGSDFSVVKGIEIGQEVVKAQLFEPQFEHVIDTITLTVAESMSLEPSSPVLVTVGVLVKFKLKVFRQKVAQVVKLPSQYHRWYATNSSVAQVDSLGILHALSLGFTKVVVEDTRVSGHEQVSSLHVVIPRTLFLYLVPIMDDSAHLHGITNIPSSKVWYVYPGRKYMVLAKAFAEGFDAREIYITEENELKLESSTMEFWNLSQGQGHLDASLTYLTGASGPTKVLKLVQEVNVCSKVKAFWDEGLENSNVIYLPWVPGVHQEVEMMAIGGCGKTLDDYKLFSSDEDVASVSDSRIVRAKKPGQAVIRVVSAFDFLNFDEVIVEVSIPSVLSILPIFPVEVPVGTRLHSAAVLKTSAGHPFSQCTHFNAFIRWSLLSEDEAFHILNTAEASSIDDIKHNSGYWGQNGNPCAWVSLSAFAAGRSTIVATFAVDSDSDIETFGGPISLEATSKISAYYPLVVLQGGNGNHFGGYWFDLSGIHSRIKNMDNNSPKELYLVPGSTMDVLIFGGPERWDQVIDFVETVDVIDPSKNHIISSTAVKKLSSGLYRVSCLSKVSYKLLFSRGNMVGKDHPVPAISKSEFTVICDFPSEITLIANENENRLDILEAARKADRGPDRLQASPIVISNGRNIRLAAASIHVNGRFFANSSSLRLKWEATGCEGLAYFEETKSVEMLDESAWERSLVLQNSTGVLMTFLPNMLAKLMRKNTHSIVSQMLFSCRLFLL

SEQ ID NO: 61445 - protein, 92 aa, Zea Mays
MLPQLKRVNDWLGEIGKRSETETSSLPPADADGEATTTSTAPVPSNGGCGVPEETIERLRKKIYEYLLTNVDSAAAMLGGGGLAAPTNGKKG

SEQ ID NO: 61446 - protein, 670 aa, Zea Mays
MVQWWGREASGGRGTSVVVKMESPEWTIPAESEVAAGGKAGRGKNARQITWVLLLKAHRTAGKLTGAASAVLSIAGAAWRRVAAGRTDEDEDEDAGAAPPGESPALRSRFYGFLRASLVLSVLLLAADVAAHLQGWHLAVDVPDLLAVEGLFAAGYASWARVRLEYLAPALQFLANACVVLFLVQSADRLILCLGCLWIKHRGIRPVPKAGGKGSDDVEAGTGNFPMVLVQIPMRNEKEVYQQSIGAVCGLDWPRPNFLVQVLDDSDDAATSTLIKEEVEKWQREGVRILYRHRLIRDGYKAGNLKSAMNCSYVKDYEFVVIFDADFQPQPDFLKRTVPHFKGNEDVGLVQARWSFVNKDENLLTRLQNINLCFHFEVEQQVNGIFLNFFGFNGTAGVWRIKALEDSGGWMERTTVEDMDIAVRAHLKGWKFLFLNDVECQCELPESYEAYRKQQHRWHSGPMQSDSGRKFNLIFLFFLLRKLILPFYSFTLFCIILPMTMFIPEAELPAWVVCYIPATMSLLNILPAPKSFPFIVPYLLFENTMSVTKFNAMVSGLFQLGSAHEWVVTKKSGRSSEGDLVVEKQPRQQRAGSASNLGSLAKEPSSSLRKDSQRKKHNRIYRKELALSFLLLTAAARSLISVQGIHFYFLLFQGVSFLVVGLDLIGEQVE

SEQ ID NO: 61447 - protein, 286 aa, Zea Mays
MERPAPVRKSHTSTADLLIWPEGAPQESPAGATPPSNRRPHQPSEALRKVVFGGQVTEEEAESLNKRKPCSAPKWKEMTGSGIFAAGGEAEEDESANASATPIRTAPKNYQAISTISHISFSEEESISPKKPTSIAEVAKQRELSGTLLSEDDSKMKKQISDLKSKELSGHDIFAPPEDPRPRNSENGSTSQTPGKNVSNFKFGEADEDGMVKTAKKIPTKKFTDLAGNIFKGDETPPGTAEKHLSTAKLKEMTGSDIFADGKAPSRDYLGGIRKPPGGESSIALV

SEQ ID NO: 61448 - protein, 1220 aa, Zea Mays
MSIHICKNGYMPGYEVWVHHGWVTRRSRSTGVGLLMAVRGSTYMIRQYIKEPGFNVANEMASINQEIRQIGRMMVISGNILEPPEWILQAQDLACDVQDFTDIYTWLQSKSRRRALAHIGYIAQLKDRISSLREWQQRGGSSSSSSQQERAAALSFSRRSCGPCAPEDVLVGIDQPRKELSDLIFEREDVVHIVQQKPRVVSVVGYSGIGKTALARAVYYDRSVRSAFDDVAWVVASECSHGCDLVSKICQQVKDEQAGNGAVVVPDCYRLKEIMRDKRFLIVIDDLHGAGMWNDIKGVFSETHSGSRIIVTTSIQSVAAACTPEPRYIYRMPSLGNLDSEKLLWMRVGRHASRTPALEHALGNDTLKKCGGLPLALISVANHLCLGKALFEEMDRVLAKCYDSLPDNAHRMCLLSLSTFPQGHVMKRKRLIRRWIAEGLAVVGDCELSAEQVAGNIFDVLIDRNVTEPVLTAGHGSRSKVKACLVLGVIKDFINKTAVSNETVAIIQNDELLLPNRMLVAHRPVRRLLVHGGTTKKSEAVAKAIGLDQGCWLLRVLDLEACQGIDKSILGSICKLVFLKYLSLRGTDVYGIPKKVKKLQCLETLDLRDTRVEELPIQVLMLPRLAHLFGKFELPPQLKHGHRTARRRRSRLQAFFSQRSRLQTLSGFVMVDDSNSFEHMMITIKSLRKVKVWCKNSISSHQERHLASSLQQRLVAGNSNPLESLSIDFGNESINFLNDVGAISALIGSMKLQGRLTSLPSFMTSYDTTLSQLQLSSTGLGIEALSLLQILRRLVSLKLAQDGDGFWGDCFAVKKDGFPSLLRLCIQARELPQLHIHEGGMSSLTSLELLCPMFASRGQSDSDSDSDSDNLSPVAFRYAYAETYSEKRSKQVLSVEKPKAVDPGISFKEPSSETRSEGTEIQEIDSPKTSKEAGPSIGFKEPSSETRSEGTEIQEIDSPKTSKEAGPSIGFKDIILPENTFRRNFSKQVKSRFDLKQHFKGMEYLQCLNELVLHRSVSDEVLDAWTKRASSHINRPKVTRQCTRAALSIGRGPGTAKHEKEGQHRSQLMKNRGSETAIHEEVAEQHSSVETSREEAGLFQEQTSDTSHKEEEEEEGEGEEEEEEEEEEEEEECTSEVGAGKHSSVGTSREEAGLFQEQTSDTGHKEEEEEYMSEDWALSQPCDMLIGNRMTVRCLGWPDSWRLRSGMISSPMLICRPLGP

SEQ ID NO: 61449 - protein, 160 aa, Zea Mays
MMVTDEIFSEPICSNSESGSSGRGSPIFIQEISSLAEPYCLNLSGDALEAYDEAYEEFMRIADSPCTTSTNGKAQATEDYLVDRGLIWGMEDSSTKLKEVPTWERVLKSTDPNRDQESDRDESDDEDDDCKVLIQQIVERTKQGSPVLVNAQKLLFSVDQ

SEQ ID NO: 61450 - protein, 99 aa, Zea Mays
MPPPAAHATPPAGQLASRPATAPLCSSRCSIVCRRWCRPTSPSTRLMPCLRHSTIREGSCSMITTLARGTTCSLCGGCLRSLESKWETSYAECFVICFS

SEQ ID NO: 61451 - protein, 292 aa, Zea Mays
MEGAYQFLKWWLNWRDLNHMIEWGVVQTKFKASMTIEEKSGPKEVKATLPKVWIQFTGIPNDMMEFLLIWAVGSILGVTKTVDMKFTNQYGICRLQVMVLDPLLIPQFIEVVIGECLFELQFRVEENMDGDSPVPVDMDDFSCGEDENKSDQLEDVVRGGNSLPPNNSAPDSGKSVSKGAGNDGNTGKKGAAHDVISSVVQYADLGLGMQGVDHAGNPTQAVVPATSSCMAVSVPCTPDVAAMAAVPEATMGLTESGRSKRRNRSGNGDSMQRASKLKAARNLDAVLSTGSF

SEQ ID NO: 61452 - protein, 601 aa, Zea Mays
MPLYLFSSPAAAKLATGPHASLHRRRQFLFRVPHRPSRRAPLLTSAAERPAGRTMATADTGASTVTDSRLRATGVKQALISLSDKTDLANLGNGLQRLGFSIISTGGTASSLEASGVNVTKVEEITQFPEMLDGRVKTLHPSIHGGILARRDQEHHLKALKEHGIGTFDVVVVNLYPFYDKVTSGAISFEDGIENIDIGGPTLIRAAAKNHKDVLVVVDHKDYPALLEYLEGKQDDPDFRRTLAWKAFQHVASYDSAISEWLWKQSNKDSFPPSFTVPLTMKSTLRYGENPHQKAAFYGDRSLSLVNAGGIATAIQHHGKEMSYNNYLDADAAWNCVSEFESPTCVVVKHTNPCGVASRHDILEAYRLAVRADPVSAFGGIVAFNTTVDEDLAREIREFRRPTDGETRMFYEIVVAPGYTAEGLEVLKGKSKTLRILEAKRRRSGKGTLLSLRQVGGGWLAQEPDDVTPEDVAFTNVSERAPDARELSDAKFACLCVKHVKSNAIVIAKNSCMLGMGSGQPNRLESLRIAFRKAGEEAKGAALASDAFFPFAWNDAVEEACQRGVAVIAEPGGSIRDQDAVECCNKYGVALVFTGVRHFRH

SEQ ID NO: 61453 - protein, 120 aa, Zea Mays
MRRSSLVSRGLNGAAAGADATWMVTHAIDEVRAAVAAMGSAQMWSSRMRKTGWSTTAGWCCCWPAAAPLPTGAERGPVTQGSVFRGDMVFAVVKDLRLNHSKDPSAMWLRNPKASLTDFI

SEQ ID NO: 61454 - protein, 930 aa, Zea Mays
MTTEERKTLKGTESSAPSVPPDGGVSKEPQKGGRLSNGRTTGPARRSSKGNWTLEEDDILRKAVETYKGKNWKKIAECFPGRTDVQCLHRWQKVLNPELVKGPWSKEEDEIITQMVNKLGPKKWSTIAQALPGRIGKQCRERWHNHLNPGINKDAWTQDEEIRLIHAHQTYGNKWAELTKFLPGRTDNAIKNHWHSSVKKKVDSYRSSGLLAQSQGFTPVEYTAGGLNVDSSSAITNQISEGSGFNVFREAEDSMELSQSSFAKGSCSQEEQNDVTLGSHLHVHESLCPDGSTNDGNGASGLPDIHHRLCTSDMDQDKHLQEGMDLDKHLQHEFSQGTDLHLDVDEVPNNFVIKGSQSSNELAVQFHDTEIMNSSKNDGVSLVPHAITPCVPILPSVSGCVHNINVIYEMGIKNDNCFQSEKCQDISIQSGAYSSEAAGSFLAPLYPLQTSEPAIMMGGPVYYQSSVMSLPPGFISSDGASNASGVKSETSYYPVSRQNLEIKTCHNASGDPEQNSYISSEDDRNKTSEPMGRISESEKKQQVDVEQSCLEPAACIGKEALSSHGDTILSKKEDAGALCYEPPCFRSFEFPFVSCELVNSSDLPEYSPLGIRELMRTSLNFPTPVRLWGSPTRDGSPDAVLKNAAKRFMCTPSIMKKRHRDLLSPVSDIRTDKKPNTERDFMSSGISSTRVGKSCMDSADDSADLVSPKESAFQKKLKLCHENKENLNEIADQGENEANAKHSSGILTPSSVDNHNTHKHGPNFRIQELNTTVQALSNSKDIIFSRSKPSEHVEKSAACIDADYEYLNILADTPGIKRGLESPSAWKSPVFTPFQDAYFMSPASRAFDALGLVKQINEQSASAVEEAHEVLANGSPWKQHNKENSDKENIENTALKHEHVTSKPPSILMMVASKSESEVWSKRGISFCSH

SEQ ID NO: 61455 - protein, 413 aa, Zea Mays
MQLRKCCNHPYLFVEHYNMYQREEIVRASGKFELLDRLLPKLQRAGHRVLLFSQMTKLLDVLEIYLQMYNFKYMRLDGSTKTEERGRLLADFNKKNSEYFMFLLSTRAGGLGLNLQTADTVIIFDSDWNPQMDQQAEDRAHRIGQKNEVRVFVLVSVGSIEEEILDRAKQKMGIDAKVIQAGLFNTTSTAQDRRALLQEILRRGTSSLGTDIPSEREINRLAARNDEEFRLFEKMDEERRLKENYKSRLMDGNEVPDWVFANDNETLRKKTVADEFRNIIVGSKRRRKEVVYSDSFGDQWMKSDEGFEEIAKMTPRVKRTAYSPDIQVEYNERRKRPKSVENSADGASNPTRTPDKGRAGVSSYSKDETEDDGEDEVITSGLQKGNSFTWKTLGRKRSSHLSSSSDSKGRPSF

SEQ ID NO: 61456 - protein, 556 aa, Zea Mays
MSSDRVNAYGGSRRDVYGFIPMQKLRRNNSTWRFGNILIVLAMNMDSTALQYENQKLVQQLEVQKSEMHALERKFKELSDDQCSYDKTLISLNKLWNQLIDDLVLLGVRAGGDLDNLQALDHEELSEESLESCPSEEIFLLRLLKTNNIRDNSDTSLLKFVEEALAFRSSATVTLMKSLQETISSQQARSESLSLALNGQKSNEDVIVALRNHNDCLKEVAENASQAISIINEKHKRYLDEIEAFKSNHSRELQEIKRISGELEESIAELEESQRKLVVLQLQRHGSVMDASGANAVNGGISTHKSSDKSMSWQDLKDAVDAAKTLAGNRLLELHQTQEDNLILSKELGDLEGQLKDEKYVLVSKPYMILNDKLQHLNAEIERYRGLVEVLQNDKDQLMQREKEISAKAESLDSVKQTIITYEKKIEELETQIQILFSEKNDLETKVEETLQDSGKKDFKNEIHVMAAALSNELGMMENQLSRSKDAASEALALREQAESLRSLVAKKIEEHKKISDKYNSQVIEIKSLKALFHSAQKVPELQIPWRRGTIQITAS

SEQ ID NO: 61457 - protein, 1003 aa, Zea Mays
MDWSSSVLLASACRHVTIVLPSPLPSRVKMPALVNHQSTTSLAPSHPSSAPPFPTTTPHVRRLPSPTRRQALSSQQRTHHPLRLRSAARRGGLWSRVRLQTMATTATISLLQHVRPPASGGSLLPLPLQRLRPIHCRRSAPASHHSLHRSLHLRLPTRGAPADRPRATADPSSALDAAAGEGAAGATTALLDVSGMMCGGCAARVRSILAADPRVEMAAVNLLAESAAVRLRAPAPPGAGEELAARLTECGFPATARRGGAAAGAGESARKWREMAARKEELLVRSRGRVAFAWTLVALCCGSHASHILHSLGIHVGHGTFLDLLHNPYVKCGIATTALFGPGRDILFDGFRAFKQGSPNMNSLVGFGSAAAFTISAVSLLNPDWEWNSTFFDEPVMLLGFVLLGRSLEESARLKASSDMNELISLLSPQSRLIVTSSSDNPSADSSLNSDAITVEVPVDDVRVGDSILVLPGETIPVDGNVIEGSSFVDESMLTGESLPVAKETGLPVFSGTVNWDGPLKIRATCTGPSSTIAKIVRMVEDAQAREAPVQRLADSIAGPFVYTVMTLAATTFSFWYYIGTHLFPEVLLNDIAGPDGDSLLLSIKLAVDVLVVSCPCALGLATPTAILIGTSLGAKRGLLVRGGDVLERLAGIDTLVLDKTGTLTEGKPVVTSIASLAYEETEVLRLAAAVEKTALHPIANAIMNKAELLKLDIPITSGQLTSPGFGCLAEVDGSLVAVGTLDWVHDRFETKASPTELRDLRNRLEFMLSSEASSSNQSKSIAYVGREGEGIIGAIAISDILREDANLTVERLQQESITTFLLSGDRGEAVTSIGRTIGIRNENIKSSLTPQDKASIISTLQAKGHRVAMVGDGINDAPSLAAADVGIAMRTHSKENAASDAASVVLLGNRLSQVVDALSLSKATMAKVHQNLAWAVAYNIVAIPIAAGVLLPQYDFAMTPSLSGGLMALSSIFVVSNSLLLQLHGSFQNTEKRQGDLSSRLN

SEQ ID NO: 61458 - protein, 81 aa, Zea Mays
MCTRSFDERVWNNSIGGGDDVHGPTTAFQRRCALATDTPSPMAVMILWSATPWPLGFSFCQAIEELTRTSRTSTELPEYKC

SEQ ID NO: 61459 - protein, 126 aa, Zea Mays
METKPIVEHKSLYELLTVNPYDFPETGFECTITIAEIPAEHKWWFPSCTKCNKATIPHTTGYHCESCNWDGYKFKYKLKFLASDETDIAEMFCFDTVARHIVVAQTCSALILLLLHMGDNVLYQCK

SEQ ID NO: 61460 - protein, 269 aa, Zea Mays
MILVATPGRLRDHMENTPGFATRLLGVKVLILDEADRLLDMGFRSDIEKIVAALPKQRQTLLFSATVPDEVRQVCHIAMKRDLEFVNTVQEGSEETHSQVKQMHLIAPLDKQFSNLYGLLTDHISENVDYKVIVFCTTAKVTSLVAELLSELKLNVREIHSRKPQSYRTRISKEFKESKGLILVSSDVSARGVDYPNVTLVVQLGVPTDREQYIHRLGRTGRRGNEGTGILLLAPWEEYFLRSINDLPITEATQPLIDLDTKKKRFLFF

SEQ ID NO: 61461 - protein, 79 aa, Zea Mays
MGRCRGGLDTAAVHTTRGEATGSVPGHRLQLGAPAKGRSAGHASFPSGWRELELPAQANFFFLEAPNFACKGTAFFVGS

SEQ ID NO: 61462 - protein, 147 aa, Zea Mays
MEAQEPDAHEGHSRPPIPRISGSMIKRTSTRKKLMPAAKKISAAASTAPSSSTSCCGAVSVSIEKQLDVVMEEGQGEELEVMLSESDDSEFDLDDEFPPSTDGDELSKTEKTKRGGKRSRAGIQLSPSKCKANRVKRAGCWKYFKVV

SEQ ID NO: 61463 - protein, 189 aa, Zea Mays
MTPEVALDHARSVRPRVLLAPAQWQAVKMFSKLNARCLSIQSSNPTCSALSYEESSELSSTLSSRCLRIQSSNEVSITCEESNEASFGDPEVDGYTTTEFDTEHFVLPRCRSMLSRPTSPTGCSDAVFITEEDLEGYETYADDGKDVVEVQVVVRHKPIMRKLSCFLGSLKLTGNCEPPPGRLTEVRAC

SEQ ID NO: 61464 - protein, 554 aa, Zea Mays
MVGEESGCGVEGGTGGGEVPAASAPNGDRSGNSRLAVPSSSADDRGFHRSSTMPGVIKNDEITNESTGPSNLERSRTERRRQNNPTIDPAKQLLDERIPIKKKLKMLNRIATVKDDGTVVVDVPSGLEPTIVGGTEDIYTEAVEEALDGTEILYRPPMQIVILIVGTRGDVQPFVAIGKCLQDYGHRVRLATHANFKEFVLTAGLEFFPLGGDPKILAEYMVKNKGFLPSGPSEIPIQRKQMKEIIFSLLPACKEPDPDTGIPFNVDAIIANPPAYGHTHVAEALKVPIHIFFTMPWTPTNEFPHPLSRVKQPAGYRLSYQIVDSMIWLGIRDMINEFRKKKLKLRPVTYLSGSQGSGNDIPHGYIWSPHLVPKPKDWGPKIDVVGFCFLDLASNYVPPEPLVEWLEAGDKPIYVGFGSLPVQDPQKMTEIIVKALEITGQRGIINKGWGGLGTLSEPKDFVYLLDNCPHDWLFLHCKAVVHHGGAGTTAAGLKAAVKDKAVELAKAMESEDGVTGAVRAFLRHLPSKAEEQSLPQSSGFLEFLGPLSKCLGCS

SEQ ID NO: 61465 - protein, 630 aa, Zea Mays
MNISDAACAGVIKSVLCAECSPFSAELFNSSSKIQMVPLLCNYTSSSSSAQSKDSTRDYCKLVWETCKNVTIVNSPFQPPLQGSARLPSSSSKLTDVWQSEHDFCTSFGGSSGEQSLCFNGNGIFFNSTEPSPTPKGICLERISNGSYLNMASHPDGSNRVFLSSQAGKIWLASIPEQGSGGTLQYDEANPFLDITDEVYHDSQFGLMGIAFHPKFATNGRFFVSYNCDRTQSPKCAGRCSCNSDANCDPSKLGTDNGAQPCQYQVVVSEYSTKISSPNVSMATSANPSEVRRIFTMGLPYIAHHGGQILFGPTDGYLYLMMGDGGSEGDPFNFSQNKKSLLGKIMRLDVDSTQGQSQTTNQSLWGNYSIPKDNPFADDSDFQPEIWALGFSNPWRCSFDSERPSYFYCGDVGKDAYEEVDLVTKGGNYGWRVYEGPYIFHPQKSPGGNTSPESINAIFPVMGYDHSAVNKEIGSASITGGYVYRGSADPCLYGRYLYTDLYSSLMWTGTEAPEGSGNYTSAVKPVSCSKASPIGCESVAGSTDPLLGYVFSFGEDSRKDVFVLASKGVYRVVRPSLCGYTCPAERPATDNGTAPGPGGPSSGAPAATRLGRSVAAVAVALALIPCVLLL

SEQ ID NO: 61466 - protein, 440 aa, Zea Mays
MNLHELYRYKLPASLHRLTVLHLLSSMAAAHLFCSAPAAYRAANPRPLATRGRANPATGTYLVLKGVWCSCAHFPRATPSRRFFPCRASLSPDGSLAMLGAPSPRMAPPMRKPYMREHSCLIFPPPRGRRPLAVIKFLGGAFIGAVPEVTYGYLLELLALEGFVVVCVPYNVTFDHEAAAREVFQSFHACYDALLASGLPEAGLSALDIAELPLYSVGHSNGALLQLLVGSYFSERIPEANAIVSFNNRPASEAVPYFEQIGPLFRQLMPMMEASPVYSMARNASGYAWKALFDLAGGLLREYDQEATVSLSKFIDQLPSVMNQVSEGVSEFKPTPPENREFCKNSYSVPNTLLVKFTVDAIDDTDIVEDVLRPRVDSIGGQIKKVILSGTHLTPCIQDVKWQVGSEYTPADAIAQGLKSLALSETRVLSRTIADWFTSL

SEQ ID NO: 61467 - protein, 270 aa, Zea Mays
MDSPYLVGLLGYCADQSHRLLVFEYMANGSLKSRLHHPAPAAAAAAGPPPPPPLDWQTRLGIALDCARALEFLHEHSSPAVIHRDFNCSNVLLDHNYRARVSDFGMAKVGSNRTDGQVVTRVLGTTGYLAPEYASTGKLTTKSDVYSYGVVLLELLTGRVPVDTQRPPGEHVLVSWALPRLTNRQKLVQMVDPALKGQFALKDLIQVAAIAAMCVQTKAEYRPLMTDVVQSLIPIAKTTPAMSCSSTPLRPALQHVIFMGPQCGDDKASS

SEQ ID NO: 61468 - protein, 179 aa, Zea Mays
MILQSSLDYLFAFTTLVLCGIIKVIARIEGKSKVLRYIFGGLSDGTSRNSSRYGDFDEDYSSMNEDRQDGFGNLHGGYQRHAPRRNSPLAGSAKTLSQGVAMDSFYSTFHTTPERMEFTKEEYEAFTRKETKKAMKQLLSSPDFNRWALANADRISVAPPGGSYSSNNSQQRHRFLGLF

SEQ ID NO: 61469 - protein, 433 aa, Zea Mays
MPPLAFLRRYLPARNRVSVIDPELRLSVCFPEQRLLARACDGGVRGSPGVARDEEAGGSGGLSGRSAGAPSGECYACTQPGVPAFHSTACDQVHSPDWDADAGSSLVPVQAQQQAQPAAAAAQHAARWLFGPVLDPRSKRVQRWNRWILLGRAAALALDPLFFYALSIGRAGRPCLYLDAGLAAAVTALRTCADVAHLAHVLLQFRLAYVSRESLVVGCGKLVWDARAIAAHYARSVKGLCFDLFVILPIPQVIFWLVIPKLIREERVRLIMTILLLMFIFQFLPKVYHSIHIMRKMQKVTGYIFGSIWWGFGLNLFAYFIASHIAGGCWYVLAIQRIASCLQEECKKNNSCDLISLACSKEICFHPPWSSNVNGFACDTNMTSFSQRNVSTCLSGKGSFAYGIYLGALPVISSNSLAVKILYPIFWGLMTLR

SEQ ID NO: 61470 - protein, 748 aa, Zea Mays
MDPDDESAAQRKAADLHLPRVTEPASAPARTFCAAQRVLSYGDGPVASASAQRCASFPQRHGHGHGHGEAALAPAASFAAWVDGGPTPPSAVAAALERAMSQYDGAGDALPEFVGAGGGEGIFRVPLRAAVHPARPPPLEVRPHPLRETQVGAFLRTLVCDPRRRKLWAGAESGVRVWCLDEVFRGWWPGAGPRRRGDEEAAPFRDSVPVPPALCAAVDSANGLVWTGHREGRIRAWRVDHAAPAGGDPTGSAAMFKEAFAWQAFSRTPVLAIVVTPYGSEGGAIKAWPWEALAKCLSSTPEEIHEAASLVEKSYIDLRNHATVGNMCSLPTADVKHMLADHCRLKVWSVTSMTFALWDAKTRELLKVFGIDGQVDLARPEAPVMPEQFIEEEIKAKPTKKEKLQGSLSFFRKSRNALMGAADAVRRVATKGTFVEDNRRTEAVAQAMNGTIWSGCTDGSIIVWDGNGNRLQEFHYHSSSVQCIEALGERIWVGYASGTIQVMDVEGNLQAGWIGHSCPVISMAVGDSYIFSLAHHGGIRGWSLSSPSPLDDILRYELASRELSYTRLENLKILVGTWNVAQEKACPEALKSWLGGAFFDVGLVVVGLQEVEMGAGVLAMAAAKESVGLEGSTNGQWWIDSIGKTLDEGISFHRVGSRQLAGLLIAAWARNDLKPHVGDVDAAAVPCGFGRAIGNKGGVGLRIRVFDRRICFVNNHFAAHQENVSRRNADFDHIYRTMTFNKPHGSTG

SEQ ID NO: 61471 - protein, 4076 aa, Zea Mays
MLEDQVAFLLQKYLGNYVRGLSKEALKISVWRGDVELTNMQLKPEALNSLKLPVRVKAGFLGSVKLKVPWSRLGQEPVLVYLDRIFILAEPATQVEGCSEDAVQEAKRSRVREMEIKLLERQQQLKSELSSSWLGSFIGTVIGNIKLSIGNIHIRYEDVESNPGHPFAAGLVLSKLSAVTVDDLGKETFATGGDLDRVKKSVELESLAVYFDSDSSSWIVDKPWEDLLPSEWSQVFEFQEQDGSRSASKKHAYILQPVSGKAKYTKIQLTEAKKTGQALQNTAVDLDDVTLSLSKDGYRDMLKLADNFSTFNQRLRYAHLRPSSPLKSDPRAWWKYAYKVVTQEMKKASGRLSWEQLLRNARLRKTYVSLYASLLKSDMSRLVVDDHEEIKRLDRELDMEVILQWRMLAHKFVEQSVETYQYAQQNKKSWWTGSSKDEEDSKSFTDEDWERLNRIIGYKETNEYVTDQQDMKLMQFDFEIRMKHNASKLTIDDSECLADLSCQDFCCNLKMYPEAKIFDLKLGSYRLLSPYGLLAESASVIDSFVGLFSYKPFDEQLDWSLTAKASPCYITYLKDSVDQIVGFFKSSPTISQNLALETAAAVQMTLDEVKRTAQQQMTRVLKDQSRFSLNMDIAAPKITVPTKFRPDDVHETKLLLDLGNLVLRTEEIWDAYTSEEQDIYLNFNLVLSDVSAFLVDGDYHWNETSDEKNLLPVIDKCGIALKLQQGVGNREAVWQHRYLRLVGPFLYVFENLMSTTYKQWFSLRGKQVHQILEDTGALILLFDNDEGRKIWQNRLQGAIYRASGSAISSFPGVALPSEAHSFKGNFLDVADTEKLFVAGILDELKICFSCGYEVELSMKGGNLLIGTILGSLEIEDQYYYPGSPVPRFLARSFINSMQTQELPSLSRKNSAGPRNTPLMKNDSEENFFEASDDFDEFETPMHQKRTISDYFSTQKFLPTSVPSLQPPTFKRIPDLIPDTELQTGKFTLEGSGTFNSFVKAQIVIYDQHSPQYNSLDNRVVVTVATLSFFCHRPTVIAIMEFMNAINLANGSDTDKDKSTYPATVEDSAIEESKSDLESEPSIKPLLAKGKSRIVFHLTSSMAEAQILLMNENGDRLATLSQNNLSTDIKVFTSSFSIKAALGNLKISDDSLLSSHPYFWVCDMRNPGGRSFVEIDFSSYNVGDEDYCGYDYSLVGQLSEVRIVYLNRFVQEIISYFMGLVPKSSDAVVKLKDNKTNSEKWVSKTDMEGSPALKLDVSFSRPIIVMPRETNSNDFLELDVLYITVQNEFQWIGGDKNEMSTVHLDILTVTVRDINLVIGMNMVRGETIIQDVEGLSFELRRSLRDLRHQLPVVEAAIKVDVLKATLSNREYEIISECALSNFSETPHPVPTLDDPRYGTSTTPSHVSASSSESIHVLSEGAETWIANKFSVSINLVELSLHSGSTRDSPLASVQASGAWLFYKSNTRGENFMYATLKGFSVFDDREGTKDELRLAIGKSASVRDTSSVDGYDNPNELDSGERRIQKDLGLEPIPSMLILDAIFRKSSSSVSVCVQRPKFLVALDFLLAVIEFFVPSAQSLLSNDEDKDLLHMITPVVLNDQIYFQEHSTFSLSPQKPLIVDNERFDHFVYDGKGGKLYLLDSEGKILSSPCTESFIHVLGCKRLQFRNVTIVNGEYLDSCISLGDDSCYSASRNDHVYLVREDDGSLSTPSKEIRGDSVKNGSADISTEFIMELQAIGPELTFYSTSRNAGENLALSTKVIHAHTDAFCRLIMKGDSMEMNGNILGLKMESNGIRVIEPFDMVVKYSNASGKTNLHLLVSEIYMNFSFSILRLFLAVEEEISAFLRMSSKKISLVCYQFDKVATMQGNANDQVLSFWRPRAPSGYAIFGDYLTPMNEPPTKGVLALNTNIVRVKRPLSYKLVWQSGSPRTNIFHQKDLEDKISNIDQLCSVWLPVAPAGYVAMGCVASSGTAEPPLSSAFCLTASLVSSCNLRDCIALRDNTNMIFWRVDNAFGSFLPGDPASMSVDGNAYDLRHMLFDSADSSSKTVSRRQDSRNDFSQLERSELTSGRLFDAVASFKLIWSNSGTSSPKKLSIWRPMLSEGMFYFGDIAVNGYEPPNSTVVLRDTGEDTFLRAPEGFDLVGRIKKHRGTEGVSFWFPKAPSGFVALGCVASKSSPTKEDFSLLRCIRNDMVAGGQFSEESLWDSSNARTSEPFSLWTVDNDAGTFLVRSGYRKPPKRLALKLAGPPTSSSSDSIIVDAKIKTFSAVSFDDYGGMYSMQMVPLFGVSFDSVGLSYHGGPHHLNATVSLSFVARSYNDKYSSWEPFIEPTDAFLRYQFDMNTPGSPRQLRITSTQDLNLNISVSNTNMLSQAYASWNNISCGDELYKKETFSSTERPVLDVHQRRSYYVVPQNKLGQDIYVRTTENRGSLVTLLPSGDDRSIKVPALRDLSDSHLNGRSVKPYRLMITAILADAEVKDDEGLETGEYMTAVRLFSENHSISVQQQSARTCAAIGEHLSQNTRKVNWNEMFFFKVERVDSYTLELLVLDAGKGQPVGIYSAPLEQVVQKLPPTSNPDSVKFDLALGDLMSTKTVEQETVKPSGKIRFAVLVSGRASVQQGNRASPESKTGYIQISPSKEGPWTSMKLNYAVPAACWRFGNCVIASEATVKEGNRYVSIRSLVSVTNTTNFIVDLRLKGRISQSARADEQGDSFGKEDQILIGTLEPNSTIPVPLSGLSHPLMPYMLQLRPAKHHDHENYSWSDVQERRSQTEFRKEEILDLCISDLYESENLLFCSQVDGTSNSCHGLWFCLSIEGKEIGKDVQMEPIYDWCIIIKSPLCLTYYLPIAAHYTVSSSHLDNEDSSCSLGTLSPGEAVKVHNVDPRNPLYLSLVPHGGWELMHEPVVISHPTQAPSKFINLRSSLSGRVVQILLEQSSDSDYLMARLIRIYVPYWISFSRLPTLTLRLIDISGRKEKRRLLSRSHLERGEKQLYDIKHDELVEGYTIASGLNFKGLGLLSSVGHGGRFGSVKELSPLGDMDGAVDLSAYDDDGKCMHILLCSKPSSYQAVPTKVIHVRPYITFTNRAGQDLYLKLSIEDEPKVLHAYDWRVSFMYSKGTTDKLQVRLVDTEWCQPLEIVKEDTIVIAMRKQGGTQKFVKAEIRGYEEGSRFLIVFRLGPAYGPIRIENRTSHTTISTCQSGLGEESWIQVKPHATRKYSWDDPYGQKVIDVSIDKGDDTCVLCVDLENPIGSSTSFREHGLMFTVDTSDIKILKFADYIRKEEVYGLPGSELTDHQGSSLKENETEPGAGPLELIVELGVVGISLIDHKPRELLYLHLQKVFVSYLTGYDFGTTSRFKLILGELQLDNQLPLSTMPVVLSTESRPDSNRSVFKANVAVSNVTSNGIQVYPHVYIRVTDQTWRLNIHEPIIWALFDFYSNLRFVTTINSTTVTEVDPEIRIELIDISEIRLKISLETAPSQRPRGVLGIWSPILSAVGNALKIQVHLRKVMHRSRFMRKSSIIPAITNRIKRDLIHNPLHLIFSVDFLGVTKSTLSSLSKGFAELSTDGQFLQLRSKQVWSRRITGVGDGLVQGTEAFAQGLAFGVSGVLRKPVESARQYGVIGIAPGIGRAFVGFIVQPLSGALDFFSLTVDGISASFMRCVNILSNKSVPQRIRDPRAIHRDGIVRDYDKFEAAGQMALYLAEASRYFACTDLFREPSKYAWSDYYEDHFILPSQRIALVTNKRVMLLQCLDLDKMDKKPSKILWDVPWEEVLSLELAKAGYQRPSHVIIHLKNFRRSENFVRLIKCNIDNEREPQALSLCCSIRKMWRSHQAAMKVIPLKVPSGQRHVYFVSDDDKKESHSLSRPLLSSGGTSTDVEQQFINNTVHFQKMWSSEPEIQSRCKLVAKQIADDGRVFSIWRPLCPNGYVSIGDIAHVGIHPPHFAAVYKNINGNFALPLGYDLVWRNCAEDYKSPVSIWLPRPPGGYVALGCVAVPSFKEPTLDCAFCVDERLAEDAAYEEQIIWASSDAYPWGCYIYQVQSASMQFMALRVPKEQSELRPKKILESFLQQASETQTSRA

SEQ ID NO: 61472 - protein, 57 aa, Zea Mays
MAQVSLLHSGSLTKTNDNNKANYILFLGTIKLTARRHLDELVLLIIWHLLDHIFFSC

SEQ ID NO: 61473 - protein, 384 aa, Zea Mays
MSNGLCFVKKGMICLDETWTSHVSLTVSNKELRKTAMAMHGAPLYIAETSPSQIRGTLISLKELFIVLGILLGYLVGSLEIDNVGGWRYMFGFSAPLAAIMAIGMWTLPSSPRWLLLRAVQGKASLEDNKKKAIQALRTLRGRTASEKVLADDVDDTIVSIKAAYAGQEAEGNVWDVFEGASLKAFTIGGGLVLFQQITGQPSVLYYAASILQTAGFSAASDAAKVAILIGLFKLLMTGVAVFKVDDVGRRPLLIGGVGGIALSLFLLAAYYKILNNFPFVAVGALLLYVGAYQVSFGPISWLMVSEIFPLRTRGRGISLAVLTNFGSNALVTFAFSPLKELLGPANIFFLFGVIAVLSLVFVILVVPETKGLSLEEIESKILK

SEQ ID NO: 61474 - protein, 516 aa, Zea Mays
MDFDDVRTKSSVIHVFPFNSEKKRGAVAVQLDDGVHIHWKGAAEIVLSSCKSWLSVDGSVQSMSAEKHDEFKRSIEDMGANSLRCVAFAYCSFDIEKIPMEDITSWELPEDDLTLLGIIGIKDPCRPGVRDAVRLCTTAGVKVRMVTGDNIETAKAIALECGILDANSVISEPVVIEGKVFREMSESARGEAADKIIVMGRSSPNDKLLLVQALKRKGHVVAVTGDGTNDAPALHEADIGLSMGISGTEVAKESSDIIILDDDFTSVVKVVRWGRSVYANIQKFIQFQLTVNVAALVINVVAAVSSGDVPLNAVELLWVNLIMDTLGALALATEPPTDNLMKRNPVGRREPLVTNIMWRNLFVQALYQVAILLIFDFDGVRILRLQNESRSDAEKITNTFIFNTFVFCQIFNEFNARKPEEKNVFKGVTKNHLFMGIIGITTVFQILIIQFLGKFFKIVRLGWRLWLVSVAIGLVSWPLAYVGKFIPVPVRPLPDYFKPRCCWKPPRRDEEEGGQS

SEQ ID NO: 61475 - protein, 904 aa, Zea Mays
MWLCQNRVFGPSTTTEAVYDVAARPVVKGAMEGINGTVFAYGVTSSGKTHTMHGEHNCPGIIPLAIKDVFSMIQDSPGREFLLRVSYLEIYNEVINDLLDPTGQNLRVREDAQGTYVEGIKEEVVLSPGHALSFIAAGEEHRHVGSNNFNLFSSRSHTIFTLMIESSARGDEYDGVMYSQLNLIDLAGSESSKTETTGLRRREGSYINKSLLTLGTVIGKLSEGRATHIPYRDSKLTRLLQSSLSGHGHVSLICTITPASSNMEETHNTLKFASRAKRVEIYASRNRIIDEKSLIKKYQKEISSLKQELDQLRRGIVGGASQEEIMSLRQQLEEGQVKMQSRLEEEEEAKAALMSRIQRLTKLILVSTKNNIPALTDGHQRHNSVSEQDKLSTSQDSSTLVQNEGTTKDHLPDSLDEINQLRSGSGEHSSATCSATDSMQAGFTASDHMDLLIEQIKMLAGEVAFGTSSLKRLIEQSIDDPEGSKDQIENLEREIQQKRRHMRALEKQIMESGEASVANASMVDMQQTITKLTAQCSEKAFELELKSADNRVLQEQLQQKNAEVNDLQEKVFHLEQQLSAKVGISPEQETDCAQQEAIDLKSKLQSKEAEFEKLKFEHLKITEEQCDLINQNHKLSEEAAYAKELASSAAVELKNLAEEVTKLSVLNVKQAKELLVAQEMAHSRVHGRKGRTTSRGRDEVGTWSLDLEDMKIELQARRQREAALEAALAEKELLEEEYKKKFDEAKKKELSLENDLAGMWVLVAKLKRGALGISDFNVDDRTVNLADITNGTKENKGEKNFALVEKQVSEDSVKSLSTEEHRSPEFEPLLVRLKAKIQEMKEKDTDPLSDKDGNSHVCKVCFESATAAVLLPCRHFCLCKPCSLACSECPLCRTRIADRIITFT

SEQ ID NO: 61476 - protein, 148 aa, Zea Mays
MDIVSPPVVVERSCLAPSPTRLPTSRLARRSAAPGEAAEIVTILHPARYGESHKALKCVDVFKEFYQTRTKHMKLTWMGTCNISVKFDAKPIELIVMTYQATLLLLFNGSDRLRYSEIATQLNLSDDVLMRRKKVLKMLTKTGGRSGA

SEQ ID NO: 61477 - protein, 231 aa, Zea Mays
MAMDAERRQAELIAQFSSQAVALSSAQQLAALVLEATSHPALFAFSELLALPALSMLAGTQYSSSLDLLRLFAYGTLKDYKNNSGSLPALLPDQVRKLKQLSVLTLAESTKILPYDQLMQELDVSNGIVRGKLDQLRRCFEVQFAAGRDLTPDQLNNMIEILSDWLGTSDSLLHQIQEKIKWADTMSDVNKKHQKEFEDRVEEAKKSIKKLNNLSRQTSTYEGMTTTSLNL

SEQ ID NO: 61478 - protein, 127 aa, Zea Mays
MHHEEPANAIDDHGAPGALSSPLSLPIKSGTPFLSSSPSSSLPSPYPSSLSLSHTPSSSAPSPFVPKPVETRWSSCSLSASPGRTPCLAPYSTEHYPSSTFIPAHEQEPKVEDNPKTLIYFVKHVLN

SEQ ID NO: 61479 - protein, 91 aa, Zea Mays
MQRIVCLLELTPPRPRRTVNKTGGKMLSPDLIKGTTSSALSRRSRHKGSPTEMWSDGVRRTYRVGDDNTGRAVRKVLGTPHALLPHLCRGR

SEQ ID NO: 61480 - protein, 51 aa, Zea Mays
MFNLSVSIEKLTLTVLWYMEDEMCLSNLVESIKEIGFIIISINHKDPLIHA

SEQ ID NO: 61481 - protein, 505 aa, Zea Mays
MGRRRRFAQLDDDDDDDEDVPINFKPSGGASSSDAKPRKPQPPPQQRREQEAETKTRRRRGRPKRRRDPGSEDEEPEELELQTEDPREEEITEAVPVAVGDPVKITGKGKKQKKHYASFEYEGNSFELEDPVLLTPEDSNQKPYVAILKDITETDGSLYVTGQWFYRPEEADKKEGGFWVARDTRELFYSFHTDDVPAESVMHKCVVHFIPQQKQIPSRKQHPGFIVQKVYDAVEKKLWNLTDKDYEDNKQQEIDLLVKKTIDRIGQLPDLEPEETPLENNYLSNKRGLRKKPVNPIDVTREPPVGKSEQFAKAETPGSDKIRNYDTLVKYKVLTGHSHRDRWLDKLIESIPLASKENAGTSADANSTAKSSISGSPAKDVGSAENEKSYGLDVVVEIMTALERSAYEALGTDFGKYNQKLRQLQFNIKNISKLRRRLMDKELDPPVLLTMSPDELKVYFPFHILCFCYCTIQIPYPIYLVDKIDFILVVISFNIVCTAKVDMTI

SEQ ID NO: 61482 - protein, 676 aa, Zea Mays
MTVGAGIAVQDGSLLALGAKVLREVRGNVLVTPAAGGGLTNGAFLGVRSAPAASRSIFPVGKLRDQRFVCTFRFKMWWMTQRMGSAGRDIPSETQFLLVEVSGGGEQPAVVYTVFLPVLEGSFRAVLQGNADDELEICLESGDPDVESFQGSHLVFVGAGSDPFEVITSSVKAVERHLQTFSHREKKKMPDILNWFGWCTWDAFYTNVTAQGVKQGLQSLEKGGVSPRFVIIDDGWQSVAMDPVGIACLSDNSANFANRLTHIRENHKFQKNGREGHREDDPAKGLAHVVNEIKGKHQLKYVYVWHAITGYWGGVRPGAAGMEHYGSKMQRPVPSPGVQKNERCEALDSMTANGLGLVNLDRAFSFYDELHSYLASAGIDGVKVDVQNVLETLGAGHGGRVMLARKYQQALEASVARNFPDNGIISCMSHSTDNLYSSKRSAVIRASDDFWPRDPASHTIHVASVAYNTVFLGEFMQPDWDMFHSVHPMAEYHAAARAVGGCAIYVSDKPGSHDFNLLKKLVLPDGSILRAKLPGRPTRDCLFSDPARDGKSVLKIWNLNEHSGVVGAFNCQGAGWCRVAKKNLIHDQQPGTVSGVIRAQDVEHLARVADHGWNGDVVVYSHVGGEVVYLPKNALLPVTLRSREYEVFTVVPLKHLPNGASLRRSAFSACSTPVAR

SEQ ID NO: 61483 - protein, 99 aa, Zea Mays
MLQALRAVRASGWRTSRCRAPGRLGLHGPQHAVALVLRVCQQASELAHAGAGGFRLDSPLHIREGLKPDLAAKDSLLHRGGGGGVRSVRRIIGFAAAGA

SEQ ID NO: 61484 - protein, 249 aa, Zea Mays
MTFMRCSAAVSDGIALRFPAEGRALRGGVCARGRGLLALGSHRSSSRRARRRHVAVFARRRLGKWQRPWWRTFFADWNDDEESLAGFREDDELLEEIGADQELSEKAKFEEWRRKAEAIVELREAQQDAFNAEERSWEDWTGGGGGGGAPENGGGGDWGGEASLSEQITDDPAEIVWDKGVVEVFRGTIDEDYEDMLFEDRVFMYASTNSAKFLALLIVVPWVIDFLVHDYAMMPFLERRCRLQLSYLM

SEQ ID NO: 61485 - protein, 398 aa, Zea Mays
MYCHVFPDRTKPKRQYRHQWVPCFSKGSSFQDPLPSVKPSRLLPAEELKTYPNTVPEEIFNTIILDDSDAFYVLELSTSREFSSSLDKNSAILICLFDVDGDSLLQRVPAIYLGQPTHGFKTEQQIPFQSGSVDIVTFKGSKLKTIKEVWIGLESGSWRLDGLSLKVIHGPVGQPKEINGTPEQKFSGLQYTFENVNVFLGDDGASVAEARPTAITDLSGVGLSDLQQGMLSSRSKASSIQEVREDGLREYADLKQSLLLYDASIVITGFSTFILASNDSAAYSFLIGGIGGFLYLLLLQRSVDGLPVIGSPSEAGGAQPSVKSFSGVRRPWLILSLVLVAGAVALKYGAGGDSFALTPTDLFVGTAGFLANKVAVLLAAFMPMLSDSKSEDGSGDSS

SEQ ID NO: 61486 - protein, 732 aa, Zea Mays
MLDLESHKAFAPVVGRVLRIERLAETIINAESFSGSSWTLDSFTESYISKLNSVSNQIVALKSIAAYRSGLEINPNVSKTDAEDGLRKELTGPRPFRITNKNLIDYLFTCSLGIAVSLSLPVQIHTGFGDKDLDLRKCNPLHLRAVLEDERFAKCQIVLLHASYPFSKEASYLASVYSQVYLDFGLAIPKLSVHGMTSSLKELLELAPIKKVMFSTDGYAFPETYYLGAKRARDVVYRVLSAACEDGDLSIQEAIEAIEDIFRRNALNLYKLNVVNGSINHETAIVGKRVSLSSVEEDVLFVRIIWCDASGQHRCRVVPAGRFYEITRNKGVGLTFAAMGMTSFCDGPADGSNLTGVGEIRLVPDMPTLVRLPWSRHEEMVMADMQIRPGEGWEYCPRNTLRKVTKVLLDEFNVTMKAGFENEFFLRRKLVSNGVEMWIPYDNTNYCSTSAFDGASSILQEVYSSLKDSGIVVEQLHAEAGKGQFEIALKYILCTVAADKLIYARETIKSIARKHGLVATFLPKPDLDDFGSGSHVHLSLWENDQNVFMGSSKDNFHGMSKTGEQFLAGVYHHLPSILAFTAPHPNSYDRIQPDTWSGAYLCWGKENREAPLRTACPPGVPLDLVSNFEIKSFDGCANPHLGLAAIVAAGIDGLRRHLKLPEPIESNPSDHSSKLKRLPQNLQESVESLSADKVLHELIGDKLVTTAIAIRKAEINHFAKNPGALKDLIDRY

SEQ ID NO: 61487 - protein, 70 aa, Zea Mays
MQPRSGEGGRGTGTRFRFRVGEEGKRRSIRTLSLEGRAGQGRAGGDPNPIAGGRKPPVAAVRAAEVEAKG

SEQ ID NO: 61488 - protein, 156 aa, Zea Mays
MLSFLEFYETLLGFVNFKIYHSINVNYPPILDPRLEALAVELYALCRYMSAGSRRMIGNSQTDEVMEDKDEKSKAEEVIEEEKVVKNKASSKADESEFRLAQLQHQLPTNEPGALMNLVEESTADDADDDDTKDCKGLFKNLKFYLSREVGSPCYL

SEQ ID NO: 61489 - protein, 52 aa, Zea Mays
MKELNGLSYGHETPEGPTKFGAWKMVLRFSRAASQRQCISFKIVHVTFPLLS

SEQ ID NO: 61490 - protein, 1842 aa, Zea Mays
MASDDGDKDILLLVHQVPLDMEDVPAPRLAHLLAPLHRAPPPPPPPPFRSPPPPQAAASAEHRLSFRGWLGIPRHWDDWVAKLRPLHARLWRRLGIHDAVLASTLRFKRDASAILHLASFWSPATATFAFPWGEATVTLQDVALLAGFPALGAPATAPLPPQWRPDEAALNGVRLGFNRSACKKAHHSAWVKHFLTDDNADTVFEHAAFLALWLTRFVLPGHPESTMRQAVFPIAVRLARGDRVALAPAVLASIYRDLREIKAFLIATGAAATTGNADMISSLSVYSPLYILQLWMWERFPALRPAKVNPLVDGDPLAARWHDLSRKLNPAQIREALSTGCNFVWQPYVSSMEHTGWVHSSDLAEDDELASLAQFLHPCELVGMDCIEQYLPHRVARQFGLDQDVPADVHRANQDWAIAWQTYQLEGKNVAFFIPHSEPGITTRYAQWWRQQLLPSGIDAATASAPVEWKTSKRKVKKTPAAMEAEAEKERKMKKARVSPTYTDKKRKLEELYDAKLSDWLPTARNEISDTTSDMESEEALLPNVGTTNDDIVLLMPRKQTTTAPVRALMDNDMILALGERGNFMVDEPPDIQSEPEAVVPATLDEEIVKIPEVISLDIPDKPEEGATAVMEEQKEATSVSDRSEEASALVIGEVEEKVAIEGAICVTGMNPSGNNSATVMEADERNAVPKEFGRAAKEVIEAVPQSQHEVNAGVINNSHDVVALPEEAHPVQPTNNSGGCPVVSCIMEDSKVAGDSGKIDYEYFCDFVEEQREIPCVQEISGENSRMGEKEREETSHESPQLEIVECVQDIVLRETDYDVNQKIVYPAVEDVATSDSMSTSLLGVPEPENAELNKHPYLAIKDEEDIPMEAARGEVAEMEQISTSAKGGAEEHGDFSELDHMGRADAKLHLHLNSEVPEKIDEIECKEVAGTMRLTGRYSDQKLGDVPEVGYTEDENIRGLVVNTSDRKPSEVSQVEPAKLEHSKDLVKEETDKSENIPGLECIGLEETRGDLMEECANTKSDNVPELENTGLGGTHGPIEDTDGRLKEIHDVNAELDKHNVHESDIDRSEDIMQIDPLTQDKATWLAKEETEDKTTKVQEVKYEQLRNEPPIQEDSKEKPCADSKDLSENVVVQSKEVDKLKQAGEGCQALMEKDMENASGAFVLEQTEDGHRKSLIETSINNDSEITLVEQLDGQSESLTRTGTVEIHGETIKAQDNEFYKDVVEDSNDSTNEKDVVEDSNESINAKMPCSSATVQLKEDKMEVFHEGKMEEPCAQDAELSNQREPSSDATAMEIEAVALEQDSRIICKNMEATTVEGSHTLDSGLSSDLAKVNETHAAREIKNQEVLDVDMKVAMSVCGEYQINSIGMEDVKSTKGSQNQECLDQKEDHIMEERVECEVREGSGVSYEEACELGGGRVKASGVAVDVSGPVLNKEACNTEELQAREDKKRHGVGHVNEKRVLEETSMIDTGELKSDSTVMEISMAGLRQGTLNQCASSSEKEEAVQEKHDQGLVDENTNRGSADNDALECGGVNPDVAITMFHETILTTEAVNIAGSKISSENQQKEAPFEVHSITEVEGSESNESSRKEPEGALALPQEPGNLVKVKQESLENETEMSIFRENDKVSGKDQASAEFIIDPSNTDERRENDIGRPDESAKGCERLTSDSINTVHSKFGKSSNEEDKRTQNTRSTDPKDIKESLGRIRAEPSNRVHTTSVGYYSQHAAHDPISSCKEIKVPLRDGARDSGRDRALELVVTSPREETPRWRQEQYALQILEDVQNSRIAERSRMEMEIRVLKAQVSSMERQVMNLDHFSEVKSRSSLNQQMVIPNLLPLY

SEQ ID NO: 61491 - protein, 736 aa, Zea Mays
MSVDEKRELVRDLSKSPESAPDRLQSWTRREIVEILCSDLGRERKYTGLSKQRMLDYLFRVVSRKSSGPVEHVHEKEKGKDKESILEPNTTNHQSPAKRPRKSDNPSRLPIITNNSAASDVTGPTNNLRFCQNLACRAILRDNFCRRCSCCICFSYDDNKDPSLWLSCSSDQHLQKDTCGFSCHLECALKDERTGILQSGQGKKLDGGYYCIRCWKQNDLLGCWKKQLVIAKDARRLDVLCHRIYLSHRILVSTEKYLVLHDIVDTALKKLEAEVGPLSGAPNMGRGIVSRLTVGAEVQKLCAQAVDAVESLFSGVSPASSKIQRPCMMRPNFVKFEAITQTSVMVFLDLVDCPMLAQEATSFNIWHRVAVTESYPSNPTGIILAPLKKLLVTWLAPATSYIFKVVAFKNSIELGSWEIRMKTSWQKDDPRGSMPGGTGLGQNSESPKANSDGQSDPSSEGVDSNNNTAVYADLNKSPESDFEYCENPEILDSNKASHHPSERINDLQNIQMAADGVTEVTELEEAPGLSASALDEEPNACVQTVLLRDSNPLEHNQRTVVPRSHDTSNILAGHELVIVGPRYSGSVPPTAPRSVENSKDNGGRASKPKPCDIVVQNGSSKPEREPGNSSNKRATDKMDDFGHKDSFSEVSYEYCVRVVRWLECEGYIETNFRMKFLTWFSLRATLQERKIVSVYVDTLIEDPVSLSGQLVDSFSERIYSKKRPSMPSGFCMDLWH

SEQ ID NO: 61492 - protein, 248 aa, Zea Mays
MHQHLKFHQGEISKTSEYNPLDLFSESKERISMAIKSFFSTPQNNFRIFVNGSLAFGGMGGGADSVHPADTDKCIKDLSKVSGLELPDFTELLSETIFKSGVLGKLLTTQKLDDHDIEGAIHLYYNIISQPCLVCKNLTDVELLRKYTLLHSLPLDKSLKIVRNFLISATAKDCSLMISFRPRENGSTDSEYDSVFLESAKRTYEYKTYFVDLDVKPLDKMVHYFKLDQRIVNSYTRYGEVLPPPKGK

SEQ ID NO: 61493 - protein, 391 aa, Zea Mays
MASNMYGTTVACRMCYRDQYRPPPRDFTCEARKSEARRWGNGYHLIPRLCQWKPRGSKSDGSLLGDGHGGRDARCHSCGSHNSCECETRDCDAMEDAAASSYRDFKQHSRGNPQFSDDQVSSKNKSAYASQGLAEACKFVYNDAKFVNERAQNDILLLSRGITRLNKRACQDAAVLGLGFLKLDARARKDTQKIDHTVKERAALLNHFARAFKERAQSDLKKAADKHWSDGALEADLRRADLVVKRRAMEDAFMALKFVQDIHDMMVNRLYEQLPKDGSSSRTNSTGFITLEKNGKALELFPGEVSADQIYAIEEAYQSMASAFSEADGIDYTDPEELELLVATLIDLDAMDGKRSVSLIAECSSSPDVNTSQKTKLGANFLFSMALVPIA

SEQ ID NO: 61494 - protein, 142 aa, Zea Mays
MIKNTVATLMVRLHHLPLPRAAPAPTYRCGRHLALAPPLPRLRASAAVMSTAAEQTIADQKRTLRAEVRRALKALSADQRASEDLAIQTTILDSSWFKASKRLCAYISCQQLREVDTSKILAECLPSNPGTGKGSLCSSSGG

SEQ ID NO: 61495 - protein, 562 aa, Zea Mays
MEDEADGGGESFVLRSGVRAGLKREFAFAIASQAVLSSSYAPLGRTRRSSRILNPSAASTPSVAGAAVSTSSSSTPDTKPKAKRPRPPDPPPPPPFPPPPDYAPAPGEDHDGAAVGPVLALMAAAGPSPPPTPLTPQPHADADADPAHLANIIIPPESSPRRITRSMLQPKSRLPTAARSPDNAAPLKPKLEPPEEEDGKPVPALRRFTRSLLVKDKDSNDDDLSGTTTASNASSPSPKTNTTSTSRSSNKGNKNTNKIPTNLRELLATGMLEGQPVKYIMRKGKRAVLRGVIKRIGILCSCSSCKGRKVVSPYYFEVHAGSTKKHPSDYIFLENGNNLHDVLRACTNATLDMLEPAIRKAIGPAPQERIFRCKSCKSSFSTLRSGKFALFCDSCLESKGAKNNISSSKVGRSQTSSAKVYKSASPGAKSSSVGRLTRKDKGMHKVVFMSGILPEGTDVGYYVGGKRLLDGYIKELGIYCHCCSTVVSPSQFEGHAGRAARRKPYHNIYMSNGVSLHELSISLLKGQKMSNRQSDDLCSICSDGGQLLLCDTCPRAFHRGNF

SEQ ID NO: 61496 - protein, 85 aa, Zea Mays
MSVLKCLVGSVYMDFCMYTMFAYVIDSSQVRVRRGGSSRSAARSSRRSTQDPAEVEQPREELRRHQDYLKQQATQHEYYATQIQQ

SEQ ID NO: 61497 - protein, 457 aa, Zea Mays
MGAAKTGSGKTLAFLIPAIEMLYHTHFSPRNGTGAIVVCPTRELAIQTHNVAKELMKYHSQTLRYVIGGNNRRSEADQLAKGINLLVATPGRLLDHLQNTKSFIYRRLKCLVIDEADRILEQNFEEDMKQIFKRLPQNRQTVLFSATQTPEVEKFAKLSFEKNEESKKKPVYVGVDDDKSKATVEGLQQGYCVISSDKRFLVLYAFLRKKRNKKIMVFFSSCNSVKFHAELLNFLGIECSDIHGKQKQQKRTTTFFSFCKAEKGILLCTNVAARGLDIPDVDYILQYDPPDEPKDYIHRVGRTARGEKGKGSALLFLLPEELKFLIYLKAAKVTLTEYEFNQKNVPNLQSQLENIVGENYFLNQSAKEAYRSYVLAYDSHSMKDIFNVHQLDLQKVAASFGFKNPPKVNLDLDSSAAKHRKKMRRVDGGKRHGISASNPYGRKDKGGAGDKRQLARF

SEQ ID NO: 61498 - protein, 387 aa, Zea Mays
MLLLIKTLIALSRLAEKGAKLWLDSSSVNAAIITAFKSSCDMKKKGKAGEEVGEKEASSNDRITGDPSVHNGVISAVYNVSPVALAKSVKNDAEIEGMKNSHLRDAAALAEFWCWLEEEICKSVPLTEVQIAEKLLEFRQKQDGFIETSFDTISGYGANGAIIHYRPTPESCSSVGSDNLFLLDSGAQYIDGTTDITRTVHFGEASPRQKECFTRVLQGHIALDQAVFPERTPGFVLDVLARSSLWKIGLDYRHGTGHGVGAALNVHEGPQSISYRYGNLTALQKGMIVSNEPGYYEDNSFGIRIENLLLVKELNLANSFGGISYLGFEKLTFVPIQSKLIESSLMSPSEINWVNDYHEEVWEKVSPLLSGHSRDWLWKNTRPLLDV

SEQ ID NO: 61499 - protein, 141 aa, Zea Mays
MQNLGRQRSLYLCNSHPPPKPPTDLRPPLGRLYGRSPQPGRPRRLRGFAHLPSRGPPRPPPTVDPRPAVQSTPDLRLRPLPGRPYSRRPQPRLRPPDSAPPPGVLRHSARPPRAAAAAAGERLSSLSYCPVHALGSGACSV

SEQ ID NO: 61500 - protein, 197 aa, Zea Mays
MSAAAAAEVGKEKGAATPGPGPGPGGACELCGAAARVYCGADEATLCWGCDAQVHGANFLVARHARSLLCRGCARPTPWRAAGPRLGPTVSLCVRCVRRGPAGAVGVGGDEEMGGAGDGDAEDDDDEDDDSEEEEEEEEEEGEGENQVVPWTEDAEATPPPVGSSTSSSSREAPANGAERAAKLYLRQATCDDWCRC

SEQ ID NO: 61501 - protein, 409 aa, Zea Mays
MRETDGLVDAVAENLLYRLEDCRKAFPSALCLGGSTDAVRRLLRGRGGIESLIMMNMSADMVKKWRESENATGDGPETHFVIGDEEFLPIKASSQDLIMSCLGLHWTNDLPGAMIQDGEQLYGICEAIDEEKDPECLMLSFHVVEVVMELFPDPSGLAAQFTGDVFEILSKYFPVYFTHGVGNGLDTTQEDLSIALMHVFCSTQFFEPFVIPLLLDKLSSSLPLAKGSWWLILQKKLEQLIHLFRSIFTIASQSMQPNFRQEYVSCAMKGLLTLATFPEQYINQVLAYAQQSRERANKEQASLVERMHEYKRQIDRETRSSINGLNDSYNGDGIQTIGRSSHKQIEAVMQSTSKGKVQTIRQGYLSKRSSNLRADWKRRFFVLDSRGMLYYYRKQITRPPVGLCCNIRC

SEQ ID NO: 61502 - protein, 70 aa, Zea Mays
MLSNTSQVDLDNIDLKEFPRVENLEFIDCILEEGDLLYIPPKWWHYVRSLSTSFSVSFWWRAAVQPSGGS

SEQ ID NO: 61503 - protein, 71 aa, Zea Mays
MDDGLSAKERICFLNSMMDLGSDVQVRAAGGLLAILDNERLLDTIEQMEGGASIAIDSVVQISFYPLMEIN

SEQ ID NO: 61504 - protein, 753 aa, Zea Mays
MTNKILIAGDKKGNITAYPFPKILVLHDSGLMQQKMLPCCRFKGAHGISSVTSVHIEDSTSDHIEIHTTGGDGCICFFKYGRIAQKIEFFGMRQVKELGTIQSIYTNLASESQSSSTYAIGFTSADFIIWDLENETKMAQVSCGGWRRPYSYYLGTVPEYQNCFAFVKDHDIHIHRHWAPTHDKKLLAQVLHLQFHGREVHSLCFINPASHSDPENSSDLLIATGCEDGTVRLTGFLTGSSGKWHSSKLLGEHVGGSAVRATCFIPETYTVTYNSCNYSSNGISDGIAVEKDETFLLISVGSKQVLTTWILQPRNAENRQVYSSGLDIDSKQNSRNLENVDSAMSFQWLTTHMPPKLPRNRLKSGHIKQRVEEGNFSVVQPNMDVMDHMENDWRYLSVTAFHLKHPVLSRLTVCFVAVACSDATVVLRALLLPSRLWFDVAFLVPHASPVLVLRHIIINASHYKDDAGDRYLIASGSTDGSITFWNLTETIHGFMQLISETQPHMSIDYQKRPRTGRGSQGGRLRWRSLSYASKKRDGDMSSSDGSNPGSLNTAENSSEASGVENTQIVVHEASDSSKTEMPSSTQSCDIPELRPMHSLSGVHQSGVNCLHISFSTPDKSYCIISGGDDQSVQRFNFRVISSEDCLTTPARLNSHDNDTLKILYQHKVASAHSAAVKGIWTDGTWSFSTGLDQRVRCWKMGLAGQFTEYSHAIISVPEPETLDVFHDRAKRKYHIAVAGRGMQMVEFSPPEDD

SEQ ID NO: 61505 - protein, 1247 aa, Zea Mays
MDSRFRECWFLLLRQFGLQVLAPQSSNINFMEWWHEANEAIQGPFRDGLNSLIVLGAWALWNHRKTHASLMVLLRKLSQFLDPIGGKFLHFRHYSDNSKSPFLYRCRLEGTVSEYEALLLTERQQNEAANAAVAESQARSEALVSKLEDAVKQNDLLHEAAQRFEEATKNLESSLTFEKQRHQANLIELDEAREKIEELQREVGDTDEKSTLLQTSIQSLEERLGEKDALLTTERLESEATKKSLNESEDRNKDLLMKIEVAEKDIAHFQETVQRNEENMAALETSLRSERQQKDAIMKQLAESQGEIGELQRKLEDADARNGLLQDSLQRLEESTADKDSLLATERHENSETKKELAGSQKKIAELLTEVQDTGAYIAELEGSVRRLEGNLTVTEASLLTEKEQNASTLKLLTEAQLRIEELIKKLEGSNRKSDSLLDTITRLEQDVSAKEVLLLTEKQAHEATRKTLTEVQEKSEELLKKIHDNDKHILQLQFTIQRLEETTVANENLLLREREQNDTTTKAHNESQEKYEELLKKFIDVDRKIDLLQGTIERLGENTTAKDSLLLSERHEKAAIKKALTEAEEKNEELLMKVEDANEKIGHLQTKINMLEDNVAAKDVSLEAAIKENDATRKSLTEAQERNGELLKKISDSDYRIHLLQDTVQKLQVDAISRLSSFVMEKQESDIAKRAVTEAHERNEDLLKRNEDLLKRNDDLIKKIEDSSKIVTQLQEALQRLEGKASNLEVENQVLRQHATSTPPSTAKSPASRSKISRIHRSPENGHILNGDIRQTEMKPSTGTSAAITSVANVPDLGDQKEFEHGEKLQRIPKQKYQPSHNQQPQDDQQWLVTCISQYLGFSGSKPVAALLIYQCLLHWKSFEAMKTGVFDSILHAINSATEVQNDMRTLAYWLSNLSTLTVFLQRSFKTTRTTISTPQRRRFSSERMFGNQTSNAGLAYLSGQSVGSAGLLQVEAKYPALLFKQQLVDLIEKVYGMISDSVKKELNPLLELCIQDPQTSQSSIAKGNLNGMGQQNQLTHWLGIVKILTSYLDVLRENHVPSILVHKLFTQMFSLIDVQLFNRLLLRRECCSFSNGEYIRAGLAELKHWSDNATREFAGSAWEALRHIRQAVDFLVISLKPMRTLREIRTDVCPALSIQQLERIVSMYWDDVNGTNTISAEFTSSLKSAIRDESNMATNFSILLDDDSSIPFSLDDITKTLPVIELADDDFLPFVHENPSFAFLLQRGE

SEQ ID NO: 61506 - protein, 419 aa, Zea Mays
MLWWRAWDAFRPPPPPPRAASATAAARPSRWPAASACAPAASGLTSSASSSSPSRATPWVALQFIHEMQSKAIQSWEASNSQALPVFSLGVAFVDERSVISASLPGHEIQAAIEDIRSVVSGLSPGDKRVHIASLEEVFSSGSDDKAARLKEVVGVISDETGRDDFVRRLRMLSLQKVALENRYTKIMLGTCASGIACHVLSATVKGQGYALPADVQYVDTRWEVPVVLPLHDCLAQELNLLCEIDSLKTQQLLDRPCSGINGLVSSFVSRLREENSSREHTILRTAQKLKPFSFNKFSANGYHDFLPSRLRPKFQNIDANECTFSEILCLICGSPFSESELLNLENTKLKAQKKIDLYTAHCCQSCHFQILPAATDMYGHFFSLLPKFWTEKVDAASASHSSLRDQIADYLLDEDDGN

SEQ ID NO: 61507 - protein, 611 aa, Zea Mays
MAMAPSSSSSGGGGGDGANAADAMALVQGYTAEELAIAGEFLTTWLPFLSAGLCPSCASSLRGRVDSLITRAEESPPVDQIEPSGWDSDPADPQNLPFEPSGWDSDPPPPPPPAPAPAPVEKPRMSWADMAQEDELAAAAEDDAAAAAADEGEDGAEAGRPKVPLTREQREQRRLSSLVRNKEFRCYERVRGQLVNILAGLELHAGVFSAAEQRRIVQCVYDLQARGQRGELGERTYTEPQKWMRGKGRVTIQFGCCYNYATDKKGNPPGIIRTIVSDPMPDLFKTMIKRLVRWQVLPATCVPDSCIVNIYEPGDCIPPHIDSHDFVRPFCTVSFLSECNILFGPNLKVAAPGEFIGSIAIPLPVGSVLVLNGNGADVAKHCVPAVPTKRISITFRKMDPAKRPFGFEDDPELLNLAPLGTVVQETGISSDEGKGKLPDVQITNMGKASRGKRSKGRTAAGKYGSGILGEQSPGHAQAPAVEVQSLRNPHGQRPVSASSAERERNSAGRSRESRHQSSTLVVHSQVDNSRQWPRRSAQERWHSNGMSFSEDGVGSAERRPRVEHRQISLINQTISDDMDSLSLSGRESGDQPRASVRTVYNKPREDQIKPR

SEQ ID NO: 61508 - protein, 168 aa, Zea Mays
MLVNLGVPWVILGHSERRALLGESNEFVGDKVAFALSQGLKVIACVGETLEEREAGSTMDVVAAQTKAIAEKIKDWSNVVLAYEPVWAIGTGKVATPAQAQEVHASLRDWVKINVSPEVSESTRIIYGGSVTAANCKELAAQPDVDGFLVGGASLKPEFIDIINAAAV

SEQ ID NO: 61509 - protein, 510 aa, Zea Mays
MSAGFDKQILAQKLSKLNSSQQTIETLSHWCVFHHRCCQQVVETWDSEFHAAPVERRVSLLYLANDIMQNSRKEGNGYIAEFMRVIPAALNGVLTVRDDFGRNVPKRLIDIWEDRKIFDTQAQSLKDDFFRRLKDIRNQLKNTGSEQLEKVVSSYKHVLNAPMDEDTLMRKCQAALINFDELNKTYGNNSILGSSNRSGFMQELQEQHSILRNSIEQLKVSESLRATLIFHLKEALNEQELKVEHLRSQLQAAQPRFKRASELCVGLGSNMERRQPSNQGLKRSSLSDPLSTVAPEAVKSLQKGQSSAVLYSQEGNGVEHSVTETKLAAGAASDDIRGGALSSRVNGGNTMLKIEEHTSGNKRQKLEDDAHISQPRSESPPPPPPPFPHPDTFQPPPPPPEYPRSPDPSPPPPRTSLPPHIIPPPPPPPPAMPLHMFSHLPPPAGTFVPFPAGPPGPMYCTYPSFTPVVNFPMTSPPGFRNLTPPPSFRGLAGTFYGPRFPTAPPPADRK

SEQ ID NO: 61510 - protein, 1094 aa, Zea Mays
MDRPPHLVIDLNEAPPPPSSDTPPAQAPSPPQELAPPVQAPPPPPPPPPPPQFPPLLPPQLPLGAPNQQVRLQQEALDVVLRVHRPLELRNTPFGPIGNVPAGLLPGLGLPLLPLQPPAPHPGEAGWGNPPAPCSSCGRQEILGGTLVCDACDRGFHPNCVRVWPPLFPPPPPPGPPGARRPRAAANEDWICPACERRGARSTRWKLGAVELDINAAPPEDPVTVIANDIRRQNITDGPQLTVANLPHFEGGHLQNTTLYDGMQFMPAFDLAQCFGMRQNFTSMDQDLIADGNVPQRSAHLRRRRDLPQTSTLPKVAVNHELGSAGTSMDPSFFNNTIKQSPSENRSSLKPPIFLMENSNHQPHHHTVALPVQYSDFFITSLGEIDNRTSYHNSYQIWPVGFTSYWHDRVTGSLFECEVHDGGNFGPLFKMRRLPCSAFQLPDASTTVCLNVVRNADTIETKEGSDLIEDTANDANDNISMLLSDFSETNQDFLSCLGNDLEGKESLGCSNVETKDMTVPDVLSDPGSFSWAPTNDANMYDKIGDFSYEGTSPSSVWRMISCAMMEACEKMYKEHGHLVLFCTHSSEKSPFDYESGPQRTDGPFNLLAKFCSSNGPKVPQFIEKENDVQSTCALLKEWLYPDRIGFDLEFVQEFVESLPKSGACSHYQFLCNRTGINSSLTIASGTLVAVNKNSPMHARHGSVVSGPQDHAQPSSSSIRELPPGNPISRKLAPELAGDVFQILEFLGRFAEIIGLKELPSIEQVEDELIDPWPMHPNKNDIHNYMDHNPPMNSPANVSSSYSNGESGITSIEEMVYVSIPVETSSAREAAQNKLAAQTLGRCSGLVLPEIHIALLKVLFTELVSRVAIFVDPSIDLKESKSRRGRKRDTDTLTRELKIDMLTANNLTWPELARRYILAVSSMSGCMDLSDISSREGVKLFRCLQGDGGILCGALPGVVGMEKDASLLAEAETLICNSSANEGNTVFMMDYKDTDIVDSPEEPASDTTLPDWVKSLEPVRKLPTNVGTRIRKCVYEALERKPPEWARKILEHSISKEVYKGNASGPTKRHAVQKYPRIQKNQEKREILSPSQRLS

SEQ ID NO: 61511 - protein, 184 aa, Zea Mays
MQRRVGMADGEARCRTLGAVIKEKDEEFALFLEMRRREKERGAAAAAADQLLLSGDVAAENGMLLLDPPPPAEPKPAAYKVAGGGFRRAPGGVDDFLNADASDKNDYDWLLTPPGTPLFSSLKVEPKRSLVSQAGTPKARPTALKSRGEGDDGDIESVEFPKCVVASNCTWSHTHIEEMEERER

SEQ ID NO: 61512 - protein, 254 aa, Zea Mays
MPINAIMSPSDVVCSEKLHWDVCPKINQDQSKHDATILKVFRVQAVLLVLGGYEVPPGLVNMAVSSANDEKNTTVAARRVASLMRFREKRKERCFDKRIRYSVRKEVAQKMKRRKGQFAGRSDFGDGACSSAACGSPANGEDDHFRETHCQNCGISSRLTPAMRRGPAGPRSLCNACGLMWANKGTLRSPLNAPKMTQQLLANPCNMVDTDDKNSNVLPVEHNQATPKTDSMMPKEEQKLDIRLPTEEDTKAVS

SEQ ID NO: 61513 - protein, 284 aa, Zea Mays
MFNLHDVYDANTNKPILVLFVGCLPKFFKGVYLSGGPACRWYFNPTIPEAEPYLTSQSTKRIVLQLPQNLQHPPAMETKPIVEHKSLYELLTVNPYDFPETGFECTITIAEIPAEHKWWFPSCTKCNKATIPHTTGYHCESCNWDGYKFKYKLKFLASDETDIAEMFCFDTVARHIVGKSCEIVLRSVTEQSPIPPDLAQIISLKFTFRVTIDNQSLFQQTSCPNVFRINSIVAAHGRQRSLPMQIGISDQQGPSTPQNKSKPMLLEDSPSTTLEKLSTTTPTT

SEQ ID NO: 61514 - protein, 86 aa, Zea Mays
MSSAPPHVRSCSKDSCTSPASLGGDHHRSMDLGEWRSRIYSTGVDEVCFPVLEKRRRNRSSCTAESSPPSRKGITPLHPRSLNRSD

SEQ ID NO: 61515 - protein, 142 aa, Zea Mays
MLPSILLPTSTTTPPLPPRRLPRPRHVLPGRNDRSPTVVPASKPKLVGEKSKGGAEACLPSSSGPYGDPAPPGLGNSKVVKVQSEEAWDLFTDRASNEGWARYRRCPRRHRNLLRGHRRARPVQRPVGLGRVLSSLCSAPRP

SEQ ID NO: 61516 - protein, 130 aa, Zea Mays
MRDVIFADIPKLIPFIDLEDMSLFSCFYDFVFFICREKGQKSVTIQRAVAAWRIVLSGRFRLLDRWCNFVEKYQRHNISEDTWQQLLAFSRCVNEDLEGYDPRGAWPVLIDDFVEQMHRHVPVGINKPRL

SEQ ID NO: 61517 - protein, 326 aa, Zea Mays
MGGVTSSVAAKMAFFPPTPPSYALVEDAGAGVTTLSGQPHRENVELLRFRTRKGNTLAAMYDYSGYGQSSGKPSEHNTYADIEAAYKCLIEKFGAKEEEIILYGQSVGSGPTVDLASRLSQLRAVVLHSPILSGLRVMYPVKRTYWFDIYKNIDKIPQVTCPVLIIHGTADEVVDWSHGKQLWELCKDKYEPLWLRGGKHCDLELFPEYIRHLKNFFHSLEKSPSHRQAWRENVDRIEPSRKSTDFFEPSRKSTDQRKKSRSTRDKTRNTEHRYSNVEKVDKLKISFDQFEKSRRSVDIFERPKRNIEQLDCGRKSVDRLDRIWAS

SEQ ID NO: 61518 - protein, 588 aa, Zea Mays
MLVISEPARSLTVTGMEQYEVLEQIGKGSFGSALLVRHKAERKRYVLKKIRLARQTDRCRRSAHQEMELIAKVRNPYIVEYKDAWVEKGCYVCIVIGYCEGGDMSEAIKKANSNHFSEEKLCVWLVQLLTALDYLHANHILHRDVKCSNIFLTKDQNIRLGDFGLAKVLTSDDLACSVVGTPSYMCPELLADIPYGSKSDIWSLGCCIYEMAAFKPPFKAFDMQALINKINKSAVPPLPTMYSGAFRGLVKSMLRKSPDHRPRAAELLKHPHLQPYVFELQLKSTPRNLFSAKLPTRYVTNKAAVSDAEDNCPPKYSKSHSFKLDRHGRPGSTTRKDCPELSEQMEGLSVQVTKNVNDELIHEKYPKVTTSPAPTPRRASSTPRRRLEASKTFHARTAHKEQSQRSRSSANQASQARRESLPMRMIKTPDKRQATDILTRLKSPDVSVNSPRIDRIAEFPLASFETPLHRITKLTSPSIIDQYITKDKCTFQVLRSDSENYTDSPDVDLLGSDNSPRSSSNLRQRRFDTRSYQQRAEALEGLLEFSAQLLQQERFEELGILLKPFGPGKASPRETAIWLSRSLKETGL

SEQ ID NO: 61519 - protein, 1630 aa, Zea Mays
MGRMAAVGAAGESAAHTGGVGGGWLKVVHVAAIAEREAGWLLLASLLASMPKEELEDQVFDVLLLWAGPFTGNPESYLRHIQDWASELRVLSVAVEALTAFIRSFVYPSITTTDCGILLNPVLAYLGGALSLISSLRSKQVPNVRSALDLLTTRTLMAYWSLSNPVVYKTEHQQILQLCSSPFSDPSGWEESSCLKFLLDKRDASLGPWIPGRDSFEDELRAFDGGADGFLPCVWDDEISNFPQPESIRKMLVNQMLLCYGSIFACQENTVKISLLNNLDQCLKSGKKYLWFKFLITNACVALLSGLKEFLALRGAQSLPIDILSMIQSIFKAILVEPEISTAQRRAACEGLGLLARAGNDIFTARMARSLLGELVTTTDLSYTTSVAFSLGCIHRSAGGMALSTLVTPTVSSLSHLSKSSNFNLQLWSLHALLLTIEAAGLSYVSQVQGTLFLAMEILLLEENGYVDLRQGIGHLINAIVAVIGPELAPDSTFFSRCKSVIAEISSSNEMATLLESVRFSQQLVLFAPQAVPVHLHVQGLIPMLYSRQPSLRYLAVSTLHHLIERDPAAMIDENIEENLFSMLDEETDSETAMLVRATIIRLLYTSCPVCPSRWLAVLRNIVLATSIRRNTGEVLSCFGHNPPDSTSENDVYYGEDEDNMISSSKQQQIRCAGSISSQFPPRNKHLRYRTRVFAAECVSHVPIAVGAEPAHFDLLLARSAISQGTYLSNDWLVLKLQELVSLSYQISTGQFEGMQPIGVKLLCLIMDKFGKAVDPEFPGHILLEQFQAQLVSAVRMAISTASGPLLLEAGLELATRVMTSSIIGGDRLALSRLFSLITRPLSDIEGLLYPSFADWVVCKIKVRLLTAHAAVKCNTYQFLRMRENAPNEYQQLAPSLVNSSTLLGKYWIRALKDYVSISFGLHSKINYKPFLDGIQSLLVLSKVQRTEFQFLWGLSILVLFHSCQSMKNNSLKINLDFKQDKNFGEFIVHGLDDKRPCDQVLRVLSSLTTEVFFSNNFISVDICQQLLQALTYADCSSAPIIHLFTQIIRFCPDNFFEVEAFVFSAIELLSQYLGLILQCRDGSSQNNSSNTLISELSIASETMAYRIKGEYLWKLVMLVVSTSHQSFQQVSTNLCFSNIICFLQNIFPFMRKIFRERVESDGECTSPKVVFGAMVGLVGYFYVECDKKISLLENKISDSYKLLNKILLFCLGEATALAKLVPEIIYRSENVSNNDVLLWGSFRLCVQVIQGSFRSTNIQVHMLGLQVLRSYAQKELTEGSETKLDSFMMLLTELLGDLFLVMETTLKECSNKKSVSVVDECLKLVFLFHTLAQSKKYRQDATTLLLEALLMVFSLSSDTVSQELAEVNTISRKLFSHFIQIPSVAIQIKDIMLSAPAERRLQLQDMVRASVSQGQITVPVATSAHSEQNIQDSCSKNPGSTSEASDCVATHGNNDNEVVDDDWDDDWDAFQSLPAIANDGVDSGEISLTTRYNEQIPQENSSYGSCNADITARAMEDITCVDKELEEPSDLQFSSTEQQPKHDLPGSSHEGCAKLERHPSVDCKEQLADDETADELQQQVHEDTDHVNKDSEVLSAEIHGVKLDILDEDVEDDSPMNSNNLSDIAEEES

SEQ ID NO: 61520 - protein, 68 aa, Zea Mays
MSSSARVPRSRSDWRSSGNFLNGRTGSSWWTCTPHRHGCRACTRGVPASGIIKHSQFVGERTPYIKDD

SEQ ID NO: 61521 - protein, 411 aa, Zea Mays
MRRPLASAALRLRFFSSTSPARLLSPCPFLLSRRDDDGGREASSSPLPPLPPSGSAFSPRPLLFSASAAAGLFSLHGGWWRQALPPAASRPLGSVSDAAPVRLTISRSYSLRVAKGKKKAHFDDEHSYGYSKERFVWSLISAVGIFCLGSGATIVHGVQNLWNSHPPENIHWAALVIGGSFLIEGASLLVAIKAVRKGAEAEGMSIWDYIWRGHDPTSVAVMTEDGAAVTGLAIAAASLVAVQMTGNAMYDPIGSIIVGNLLGMVAIFLIQRNRHALIGRAIDDHDMQRVLEFLKSDPVVDALYDCKSEVIGPGFFRFKAEIDFNGVVLVQNYLERTGRGSWAKQFREAAMSKDDTELLRVMANYGEDVVEALGYEVDRLESEIQKLVPGIKHVDIEAHNPEGLALRAEVL

SEQ ID NO: 61522 - protein, 225 aa, Zea Mays
MHDVHAVIGELSESGSFIGHVNQLLGSCPIEVFNLVKQSILQAVEPLKERLPAIINVMIGIIVKKSNEDLKHLKGITATYRMTSKLPVRHSPYVSGILHPLKVFLEGDRIRYLSEDDKTKLCRGSTDKITAIYYDLVSEVVTVARKTESSLQRLRQGAQRRVGASTDASDNIISDTDKICMQLFLDIQEYARNLRAIGIDAREIDSYRALWQCVAPKDRQENIQF

SEQ ID NO: 61523 - protein, 437 aa, Zea Mays
MREDRKVLSADDNANMIELHSHLMKPDYCSSGQGKCSESSNTESSDDVGQQELDELLDDDDYQFYDTRQSFSDSAGLSCLNMKCSNSGKDTFLYGDKFVKPKAGTGDSECLPPFFKRRTKLPDPVEKEKSVSLWSMIKDNVGRDLTQVCLPVYFNEPLSSLQKCFEDLEYSYLLDRAYECGLKVSHHPMVMACHCEGKGWKFWGDSNVKSKFWGQTIQLDPVGVLSVEFDDGEIFQWSKVTTTINNVIIGQIYCNHYGTMSITGNRGYSCKLIFKRQSFVERNPRQVEGLVKDGDGSTVASLMGKWDERMYCSASGQNVILLWEKNEASTNPTRYNLSSFAITLNELTPELKESLPPTDSRLRPDQRHVENGEYSKANAEKLRLERRQRMSRKMQDNGWKPRWFRRDDDTFRYVGGYWEARQQRKWDGCHDIFGEFV

SEQ ID NO: 61524 - protein, 173 aa, Zea Mays
MLKEFRGHSSYVNYAIFTTDGSRVITASSDCTVKVWDTKTTDCLHTFKPPPPLRGGDASVNSVHLFPKNTDHIVVCNKTSSIFIMTLQGQVVKSFSSGKREGGDFVAASVSPKGEWIYCVGEDMNMYCFSYQSGKLEHLMKVHEKDVIGITHHPHRNLVATIAEDCMMKIWKP

SEQ ID NO: 61525 - protein, 394 aa, Zea Mays
MITVTVFSGTGDVLPMPYTVTVQKNGNCRDLTKALADVCCLKNSETLLLAEVYERRIYRYLTNPIEGLHIIKDEDILVAYRLPVGHEKLLRLEILHSRADRAKAHSPDVSAVKLNGNGPSLDGIVLTDNGTTSEEGLSTSRSREDDNAADNELLPFQLSLTDEKGSTRNAIDMDSNRVLGLVIRVLMDWGEKEHGMYNIDHMDVLPEVFKPGFMSKKTRQEAVNLFSCLDAFLKEEPLGPDDMWYCPGCKEHRQASKKLDLWRLPEILVVHLKRFSYSRYMKNKLDTFVNFPIHDLNMSKYVKPTSRGDQHPVYELYAVINHYGGLGGGHYSAYAKLVEEDNWYHFDDSHVSSVNEDEIRRSAAYVLFYRRVGGSSTAANGGPVDIEMVDSLET

SEQ ID NO: 61526 - protein, 202 aa, Zea Mays
MASPPPTSLSSPHLIHLRLQPLPSVPPLHLTTLPFLRSLPLHLHSLRLNRPHLPPLPLASSGSGSDITGSGGEDDLPPSGGGGGGGGGEGDGEGEGDGSEGDSVNRREALFVLAQLGRKLESLPADLAAAVEGGRIPGEIVRRFVDLEASPVFRWLLQFGGFKERLLADDLFLTKVAIECGVGIFTKSMRKGGRTLSKSLTL

SEQ ID NO: 61527 - protein, 592 aa, Zea Mays
MPKVKNPHVFMDISISGGSAERITFELLANVVPKTAENFRALCTGESGLGASTQKPLYYKGTHIHRIVKGFVVQGGDFSRGDGKGGESIYGGKFPDENFRLLHNQPGVLSMANSGPDTNGSQFFITFKALPHLDGKHVVFGKVVSGIALLKKLEAVGSETGNPSYQVKIVDCGEVSNTNSPDLLKGEKDSGSDSESDSSMDTSSSSDHRRKRRKGSKKDKRKPTKRKGKHTRSKRKSRGSKRRSRRSHGSSSDDSVSSKTDNSSSDSEKGGHHTKRSLPKDKESTKMTISEQGRTFQEADKDEQTVTTINRSQSHDGSKPSNKDGNRADERSGNYNSEDRNGPGGSSRNNPIQVDVNLTKPVNVDGNTGGDNAEAGMSRTGEGRHLPSNDSVSTNGKDLGVGSADNGQPQRIRKGRGFTQKYGYARRYRTPSPERPPVRPRYDGGRDDRWNNFNRYERNGPYSRRSPVRRYHGSPRANSPSRYPRRERMRSRSRSPVRRHDRGGYHRPSPRRSRSPAEPRQNVNDRPRSGHGGGDPDHSPPANRSRSKSRDPLGPRSPDAAPAKRESSRYNRRRSSSSRSSSPDGNKGLVSY

SEQ ID NO: 61528 - protein, 436 aa, Zea Mays
MAGGEGEMRSLALTPTWSVATVLTLLVAGSLLIERSIHRLSNWLKKTHRNPLYKAMEKMKEEMMLLGFISLLLAATSRIISGICIDSKYYNSRFSPCTKEEVQESINAEHAIAHARKHLLEVILHHSPRRNLKTSYHNHEGCREGYESFVSHEGLEQLHRFIFVMAVTHVTYSCLTMLLAILKIHKWRKWEDEAFRDNHESFSQIAYESATRRQPALTKSYSFRSWSQNNVVMWLVCFIAQFGQSVVRADYLILRKGFIMTHNLPPTYDFHNYMIRSMEEEFEKIVGVSGLLWGFVVAFMLFNVDGSNLYFWIAILPVTLVLLVGAKLQHVIATLTAEGAKMSTYGPRIQPRDDLFWFKKPEFLLWLIHFVLFQNAFELASFFWFWWQFGYDSCFIKNHLLVYCRLILGFAGQFLCSYSTLPVYALVTQKCISTYK

SEQ ID NO: 61529 - protein, 90 aa, Zea Mays
MYIAHIIWHCFYSQSCPLHSGSFPQLLLSLATLILYHQFVLAPSCLAVAFGVLNPTPAPPPFVMYPEISMEGTQAQDTVITVTQYTVPIL

SEQ ID NO: 61530 - protein, 91 aa, Zea Mays
MAYWREISVCFWFLIGHRHASEEQFSRFLHYEVDAIRKACASLEEGYLPLVTFIVVQKRHHTLFCPEDHRSHRQPDRRGNILQATLAFRMN

SEQ ID NO: 61531 - protein, 94 aa, Zea Mays
MSIFVSAIVVKFLLWLPRLRVCGSENRAMVQDKNEVRKQRSSGTPSSTTLVLRRRIRVSDSSNLAVIKWNSQGACQELDRRPEQESSTLAWNSS

SEQ ID NO: 61532 - protein, 134 aa, Zea Mays
MCTIQVKRDPGAAPRGRGEQPGVRGQRARQGPGVRLRGRHLVAAGAGGGAAGAAGAGAGRDGQAQDDQRLHRAPPQGGQQGRRRGQQLRRLALVHVLAQDGGAGGALQGHAGAAGHGRGPARHGRRPLLVVLLA

SEQ ID NO: 61533 - protein, 400 aa, Zea Mays
MHENLGLGAAKLRQVCKEIDIVVNGAATTNFYERYDVAFDTNVMGAKHICEFAKRCSKLKMLLHVSTAYVAGEQEGVVLEKPFRLGETLREGTHLDIESELNLIKETRRELKASRCSEKAERRSMKELGLKRAREFGWPNTYVFTKAMGEMLLGAHLRGDVPVVIVRPSIITSILKEPLPGWMEGIRTIDSFIIGYAKQALSIFLVDLDLIMDVIPGDMVVNAMMVAMAAHSEERGQQTSIYHLTSSVRHPAPYAVLAECGRRYFLHNPLRSGGKNSEPVRPSRMRFFRTLPGFRAYMAIKFRLPLEILRLLNIVLCGALSRRHDELSRKYRYVMHIAELYAPYSLFKGCFDDSNTERLRAAMANRSSGYDFGFDPLCVDWDDYFYRVHIPGVVKYLCGY

SEQ ID NO: 61534 - protein, 717 aa, Zea Mays
MTSLCDLELELEPDPNLTKEALCEASALAKALISGSSQASGHRINLDTHVLNTRNEKIVRVPSEKQLAQSHRVTNVAGPVSNSKQLAHIGPSAGLLDPNGPSKKRKKPKAWSKEEDADLAAGVQKYGEGNWEDILHKCNFDNTRTPDQLSQRWALKRPGGSTKPASTKHASVGLEERSAALKALSLAVGPMRGSSALRSGAYPQSIQHKSTVFAPKMPELRSAVTPSPAPAVPVPVAMPLRVAAQVQAPPHQGHQAPAHAAPPKLLNASNKTRKKQAAQPNPTISPSSIQAAAIAAGGRLATASTAANFLKVAQSKNAVHIRSLGATSLKPSASFKASIVVEHGTQPGGSQHLEPLNASAVHDVSGVAAVNQSGPLAGACSETKKALSTALAPVPCDSEEKEDDSEFCVITIDDLFPEDAKQPETVDTKAKQPQTTGLKANQPENADPKVMQQETMDPKSKQSDTVEVEIVDPKDKDMLEFDQYVASQGGHLNTDDLNKSKCTNSVSQAQGLVGSQQKLIPADGKGSPVTVVGKGKPVTAGVAATGRKTKFPVSHLAAGTPRGIVDTVNANAPNKTLVRRAAIPAPVPAGCQVRKDAMNSKGNQMTPGNAGSGVPASSQTSVAAQAASKANLPSSSSQAKPNNMVVNGGNRLVVNPPSSSQASAAVNDANRAATPQSSNPVNGANNREVNPPPSSQASTAVNGAANKGNVPAAARPP

SEQ ID NO: 61535 - protein, 431 aa, Zea Mays
MPGGKRRRARNPTAGGPQRSAGAGRRRPVPELPSFVSPASVAAAFSPASGGRSRGRCARRCGAYSDGESSHAVPFSYPSLRSCSAYPERDQAQALEVTIDTAPCADPAASVPMYSYGPAVLGETGLVLSADEEEACDRGLHLGLGFRDGGHDEMELKLKELTEEDVSFKTPKRKQEQRAKANPGFLLIGGVRIYTEDISSSESDRMSSSDVDLEPNSGDGERFENDDGDSDEEDRQGEERDSISDSESLGSESDEDLSTGDSSSVDNEVVADYMEGIGGSDELLSSKWITSMNLGDADTIEQMYTNDNDGFVKKGKEKLEGYALMTASEQYGMKRRNSLEQRKGKGMVCDRDLSSMQVMDQEDMFMVNNVWMPNRSRKGMKTGSSSSQLSQSWPKDDRKSKNYQSRPGLAQPKVSKIHISLLRGLTKQVFL

SEQ ID NO: 61536 - protein, 232 aa, Zea Mays
MGSSSNTNTSGGASDKEEKKKEDKIKGKDSSGPSFKENERVLAYHGPLLYEAKVQRIENHEDEWRYFVHYLGWNKNWDEWVANDRLLELTEENVRKQQELDKNQVVDKTMKSGRSTQHKPKVSNADAKADKDDTKSLISVKGKKRKSQLGTEIQDKEKRSSHSLLVLQFPLPLKKQLVDDWEFVTQMGPSGKLISSFRKRLCNSILIQKEDFITPCIPIIFNGNSAICQPLW

SEQ ID NO: 61537 - protein, 51 aa, Zea Mays
MKKSTVVDSATGGSKDSRVRTSSGMFLRRGQDKIIRTIEKRIADYTFIPVG

SEQ ID NO: 61538 - protein, 284 aa, Zea Mays
MVLISLAARASPSLCALLFLPQPILLSRLPASCAHLLSSLCRAQLPCSLGVFLPASAACFPCFSFPSPMDARALAPAFLADARQSPARGTSPLLLRPTARLLLCAHARAKLPAPRLDPFLPRALCLSLSPSRPAGSLLGHGSRGSQLHLLATHAQPLPKLEFLCFFPNRAGRISLIPRSLSGRGTHPARTTKLSGALPWLALGSSSAARPGICHDHRAVESCALGSARSLCSRPAEVPCARALVSVRCCARVLAGCAARPWCPSLCSPLRAAMCSFVSCSLELA

SEQ ID NO: 61539 - protein, 85 aa, Zea Mays
MNHRHACHAYRLSCVFFCCDRLHHERWILLIRLKGNLFQETDNFLLPHRSEQLQLTASKETEVISNHYSATTNLSPSRTLENHLV

SEQ ID NO: 61540 - protein, 53 aa, Zea Mays
MFVLFFEYPTKLVVLVSDTPKPRGPNANRKRNGRKQKLFPKHYVTSEDDTAGS

SEQ ID NO: 61541 - protein, 533 aa, Zea Mays
MVWMMLMEQRTFLLMNLLVLASNAIFLIVVIFVPFSLGRIVLYYLSWFFSSASTPMLAKMMPFTETAISIANDTLKSALNVVKNFSSDSNNEGVIGHVIEVVTQSLKINATGLSVIQVTGKSSLMKGTAIGSSYLSDLTTLAVGYMFIFCLVLLYIGSLALLRYARGERFTIGRLYGIATILEAIPSLCRQFFAGMKHIMTMVKVAFLLVIELGVFPLMCGWWLDVCTLKMLGTTIAQRIEFFTVSPLASSSIHWLVGIVYMLQISIFVSLLRGVLRNGVLYFLRDPADPNYNPFRDLIDDPVHKHARRVLLSVAVYGSLIVMLVFLPVKLAMRVAPSIFPLDITIFDPFTEIPVDVLLFQICIPFAIEHFKPRATIKSLLHHWFAVVGWGLGLTDFLLPKPEENGGQENWNGRAERRDRGHGGQEMVAPQVEQLMIQHVAAEHNDRGNANEANDVTEESDVDDQGDSEYGFVLRIVLLLVLAWMTLLIFNAGMIVIPISLGRLVFEGVPRLPITHGIKCNDLFSFSIGCYIL

SEQ ID NO: 61542 - protein, 493 aa, Zea Mays
MAGGDRERDADEETRNQMMQNLFGDQSEDEDDADDDDVAEMVDEDDGHQPQSPPQSPPQRHQELDDDAYDDEEEDARSHAPARASGYHSEEVDGEAENGGEGEGESEGQVVIEEESEGEAHGADLDQGESDGDKVQSSPERELDDQRMEPDARGMDSEDEGYQQRTVSGRRRGVIASESEGSEDSYYAAGAQEDEEPRQTRKQSSPLEEERDHEVVRDVFGDSDEDEPAPYRVRHEIDEDSHRSHMEDEGHYEKDMQPDDVVADEDMRYESDDNRELKPKEKPVGPPLDLVVPFKQPPARPDKMNVIKVSNIMGIDPKPFDPKTYVEEDVFVTDESGTKKRIRLEDNIVRWRTIRNADGTTSCESNARFVKWKDGTMQLLIGNEVLDISVHEAHHDQSHLFLRHGKGILQSQGRLLHKMRFMPSSLSSKSHRLLTALVDSQNKKTVKMQKWFETKDPEKAKMEKERRKSEPQVHTACPSKAAAFSRVLGRRSR

SEQ ID NO: 61543 - protein, 216 aa, Zea Mays
MPKKARMESPAFSTSSPQPSANASNGPTQTFLFVRVPRNPKLSTRFAHSTLRAHHRQKPQNPTRSSIRIASSPPIGIESFPSNGSSHASRPSRGSCPIQRLPLHLATLYYSSPHSPHLHPTHQYPTFPYTRKIPSSLVRVREAAAMSGRGKGGKGLGKGGPAIRRLARRGGVKRISGLIYEETRGVLKIFLENTVTAMDVVYALKRQGRTLYGFGG

SEQ ID NO: 61544 - protein, 74 aa, Zea Mays
MGSHCIADSEEQKVHVIADERPLELLAKAYAINSFDIDPQNPSDVVFTLEWESVGVLPCGEKKDNFYYRGTSEF

SEQ ID NO: 61545 - protein, 283 aa, Zea Mays
MAPGVCLNSLATAQKPCDGETFISADDLRINLWNLEISNQSFNIVDVKPANMEDLTEVITCAEFHPTHCNTLAYSSSKGTIRLIDLRQSALCDNHAKLFEEHEAPGSRSFFTEIIASVSDIKFARDGRHILSRDYMTLKLWDLNMDSGPVATFQVHEYLRPKLCDLYENDSIFDKFECCLSGDGLHVATGSYSNLFRVFGCSPESVEASTLEASRNPMRRQVADPARPARTLTGAVRRGGENTSVDASGNSCDLSTKLLHLAWHPTENSIACAAANSLYMYYA

SEQ ID NO: 61546 - protein, 204 aa, Zea Mays
MEPGAKSEAKQGEAGSGAGESGSGKVYHERQRLQFCLLHALNNLMQEKECFTRAELDGIAGNLVLNDPNKGQWTPLPFIFKPHHNVITGNYDVNVLITALEARNKKVVWHDRRKGASSVDLNAETLVGLVINVPIRRFRGLWTGRHWVAIRRIDGIWFNLDSDLSEPKQFKDQENVIGFLDSVLSQGGELMVVLQGIPPARAAT

SEQ ID NO: 61547 - protein, 317 aa, Zea Mays
MESLVLASSCSPSPRLPLLSPSARFRRLPGSMPQAPASTSGATRKGLRRHMLFVAAATATPSGSRNVFKELRAKGFASMSSSTANENMSTETGTLPPMPPPSSYIGSPVFWIGVGVALSVAFTTVSSMLKKYAMEQAFKSMMTQAPPNSFGSNSPFPFGMPPQASPTAPSSFSYLEPRKGTSPQVSTVDVSATEVDAAGTSKEVDVTETPKPSKNFAFVDVSPEDLQQKDLQSSLEMVDVKHDSTESESKEDTEEKAPRNGATFKLNEDAARGPTESSQSGPMLSVETIEKMMEDPAVQKMVYPSQLTRQKGTRAGG

SEQ ID NO: 61548 - protein, 229 aa, Zea Mays
MGNKGETTTMIKLTANLSSAFFPRFSPDGKYLVFISAKSAVDSGAHNATNSLHRIEWCTDGKLDGSLGVADVVPIVLCPKDNCFPGLYCFGLLRDPWLTDGQTMIISSVWGSREVILSVNVVSCELSRVSPQDSDYSWNVLAVDKNNILAVSSSLITLPQMYYGIKVSQTESNWEWQGVSTPFPKPSDKISSVLAEHKFSILKIPISNPSDELANGYVTFLEASTLPTL

SEQ ID NO: 61549 - protein, 722 aa, Zea Mays
MAPAWERARRALTARFCMRFAARRVVVEDAPRGMVDIEAPFPVAVAEAEQQQEQPEDEREMLLAAVSSEPVSEQLASSRSGSRSSAICAICLSAMRSGRGQALFTAECSHKFHFNCISSNVQHGNKICPICRAVWKQLPFQGPLAASAAHGSARVNPAIWPQMSMLSVNPLDELPVFGNPEPAVFNDDEQILLQPETAVGGEEGDEVPPLLEITTYNEFPATQESVAQEEFAILIHLKAPHVPSWVSTRAPLDLVTVLDVSGSMSGHKLALLKRAMRFVIENLDPSDRLSVVAFSSSAWRLFPLQRMTASGQQQSLQAVNSLAADGGTNIAEGLRKAARVVEDRQARNPVCSIMLLSDGVDSHNLPPRDGSAPDYGPLVPRSILPGSEHHVPIHAFGFGMDHDSRAMHAVAQMSSGTFSFIDMAGSIQDAFAQCIGGLLSVVAQETRLGVDCADDGVLLTSIKSGGYASGVDGDGRGGFVDVGRLYADEGRDFLVTVRVPQSRGDIALIRPSCTYRDAVTMEMVRVGGDPVTLLRAANPANAGMSLRVEREWHRVHATEDIAAAQTAAEEYDYARAASILEARRLLLESCASLSSDQQTQALVAELREMQERVLNAELYEGSGRAYLLSGLSSHSWQRATARGDSTELTGLVHSYQTPFMIDMLNRSQALQPEVAEALSRSPTIASSRSSAPTPAPASSGSPWTRRGLRSFRPAKSFTGLSL

SEQ ID NO: 61550 - protein, 311 aa, Zea Mays
MGTCGRRVLGVWFFFWFLLTLEQCTSLNREGAALLRFKAAIEADPYGALLDWNQESLSPCTWFGVECSDDGLVMSLSLANLGLKGVLSPELGKLMQMKSLILHNNSFYGTIPREIGDLQDLKMLDLGYNNFSGSIPSELQHILSLEFLFLEGNRLSGRSPVGVHQLTRICEHENQVPTTTTRIVTIKIRRLLMSKQKDFKMVNITGHPIRFPLNSPAAPSPSDPIPPPPAPPSPSEPIPPPSAPPSQENKSKSSATLYASIGAVIVFFMVASSALCFFYYCRKKTSTVVPLSANSSSRQLQTTTMEGCLMC

SEQ ID NO: 61551 - protein, 420 aa, Zea Mays
MAPEPEDDIMNEKNPRPLDEDDIALLKTYGLGPYSTSIKKVEKEIKEMAKKINDLCGIKESDTGLAPPSQWDLVSDKQMMQEEQPLQVARCTKIISPNTDDAKYVINFVVGLGDKVSPTDIEEGMRVGVDRNKYQIQIPLPPKIDPSVTMMTVEEKPDVTYNDVGGCKEQIEKMREVVELPMLHPEKFVKLGIDPPKGVLCYGPPGTGKTLLARAVANRTDACFIRVIGSELVQKYVGEGARMVRELFQMARSKKACIVFFDEVDAIGGARFDDGVGGDNEVQRTMLEIVNQLDGFDARGNIKVLMATNRPDTLDPALLRPGRLDRKVEFGLPDLEGRTQIFKIHTRTMNCERDIRFELLARLCPNSTGADIRSVCTEAGMYAIRARRKTVTEKDFLDAVNKVIKGYQKFSATPKYMVYN

SEQ ID NO: 61552 - protein, 214 aa, Zea Mays
MHELRLIHTDLKPENILLVSSEYIKVPSTKKNSQGEMHFKCLPKSSAIKLIDFGSTAFDNRNHNSIVSTRHYRAPEIILGLGWSFPCDIWSVGCILVELCSGEALFQTHENLEHLAMMERVLGPLPEDMIRKASSSAQKYFRRATRLNWPEGAVSRESIRAVRKLDRLKDLVSRNADHSKVALVDLLYGLLRFEPSERLTAEEALDHPFFRNPT

SEQ ID NO: 61553 - protein, 681 aa, Zea Mays
MLEDIGKIGEFKKCISHARQVTTFIYMHGKLLDATREKIWGDLVRPAVTKFVTSFLTLQSIYKHKQSLRCLFVSDDWTRSKLSSIEAGKKVTEILLSTNFWNSVQDCIRASQPLIVLPEVAAAMDMAKAKITSGFEGREAMKRKLLAIINRRWQDQMEVKLYGAALFLNPNKFFELQKKDPTKREVGKLRATFNEVLWKMVEDYDLQAIISKQADEWKKTKVDMNMYRKAAALWVELRVELLSAIEYYAEDKVNSAQIWRLYWASHQRFFRHMCMSAKVPAVVRLAKEALAEEKCVVIGLQSTGEARTEEAVAKYGIELEDFVSGPRELLLKLVEDNYPLPPKPDCFEQGEEKVQEFQHKRHYGSDMSLKGRVSKLGKKEDVSEDGGDEYPPHSDHESTESDEDFYMCQICNTEEEKNSLFCCCICASRVHPGCLTPPSTDIVNDDWSCYGCKEKVKSYLKERDAYLTELSKRYDAALDRKSKILDIIRSLDLPSNPLDDIIDQLGGPDNVAEITGRRGMLIRASDGKGVIYQARNTKEVALDMINMHEKQQFMDGEKNVAIISEAGSAGVSLHADRRAKNQRRRVHITLELPWSADRAIQQFGRTHRSNQTSAPEYRLLFTNLGGEKRFASIVAKRLESLGALTQGDRRAGPSLSAFNYDSNYGKKALTMMYRGIMEQVT

SEQ ID NO: 61554 - protein, 396 aa, Zea Mays
MGNCCRSPAAAAREDVKSSHFPASAGGKKKPHQARNGGGGGAGEKKRLSVLGEEGCDVGAGIEEKYALDRELGRGEFGVTYLCMDRGTRELLACKSISKRKLRTPVDVEDVRREVAIMRHLPKSPTIVSLREACEDDGAVHLVMELCEGGELFDRIVARGHYTERAAAAVTRTILEVVQLCHRHGVIHRDLKPENFLFANKKENSPLKAIDFGLSIFFKPGEKFSEIVGSPYYMAPEVLKRNYGPEIDIWSAGVILYILLCGVPPFWAETEQGVAQAILRGNVDFKREPWPNVSDNAKDLVRQMLQPDPKLRLTAKQVLGRLYLYIELINSVLHYMAHCIRSVHLKGSTPVLPRHHVLFLPSQIPNTYVWILGFQVPFGGSQKKSGKSDPLTRIGH

SEQ ID NO: 61555 - protein, 254 aa, Zea Mays
MHKWLFKSTKTTIARVWSSWLVHRSTEAVGIAPKGIDKVFLDIPDETFMEFLPRFDVLVLSSGHWFAKRSAYILNENVVGGQLWWPRKAGKMQVNNVDAFGISVETCLTAVVNNPNFTGLAIVRTWSPDHYEGGAWNTGGSCTGKVKPLNEVVRNGFTDAMHEKQVAGFRKAVKNAGEHGSRLKLMDITEPFAFRADGHPGPYRSPDPNKKTQRGPDGKPPPQDCLHWCMPGPVDTWNEMLLETIRREFETDRT

SEQ ID NO: 61556 - protein, 270 aa, Zea Mays
MRNRSIVEHRSKPSVNMTQIKGIYAGDGMVIHFTRAAGHEIGTGTFLDWFLYSSSPAATEGPPCQKCGHLVKSDGVITSCLDCFLDGGSLYLFDYAVSPAFFLAKARGGTCTLAASDPSDVVIHRARYLLDNGFGMYSLFKNNCEDFAIYCKTGLLVETAFSVGRSGQLASLTAAFSAVASSPLRFLTTSAGGLAIVTSGMYCVGRYVSDIGVRRDVVKVPVERLVEQNVTWIPQCVATETDIAAGAPQQQLEVPCAVAEEASVIQPAAP

SEQ ID NO: 61557 - protein, 903 aa, Zea Mays
MSTIATPPPPSAAQEKAASRNKRKYRAETPSTELGPFGLEYPLTTDCVGFEFMSPEKVAMAAAVAAAEGVSLDLLQNSCENCKDLHPTAEDLLECQRYVNWGDPNEMQLEEILLKSLDTTFDNSVSLITTMGYSEAAARAAIMRTAAQYDWRESLAGFGEAAVEVLKTEGDMLPREGASVEDMRKIEEAVLGSMVTLVTEAQPFNTPGDVMYCLLMSDMNVANACAMDYNSFSLPAVSAQVIAQPVAGNYEPGSGSNLSVSITNPQTGVTFRGKLTPVPPGSYGAIKADSSTAQASPNVSNTEPSVSDKTQCVIPNIEPKKHHVPICDHSEDQPFVAAATQSVKNDKSSPSKRGGSKRDSFHRQKLTNYDKSSRALGSKGSLRSGKQSSSASAVLERKCRSFSDSTTSNLKGSSRVAKGFAASISGSEVSVDLSFTGTLSPSPSFDAKVVSNSNSAPAASTDLSLALSSSDSLTPSLSHDSNTEVVDSSSKINFSYDEEQKVWIPQDKKDEIVLILVQRQKELQAHTRDWTDWAQQKVMQVAHRLAKEKDELQSLRKEKEEADRLQEERHHLEESTRKKLLEMESAISRANAQLEKAEASARRREVENAQLTLQMEAAKRHAAESATNISELVKKDENSRKRSQRWQSDRALLQEDLAAQKSRLSRVQEHLQHAKELKDQVQARWKQEEAGKIEVIALVTSKKKEREQIETSMRSEENLLHLKAANDTERYKSEIRALEQRIAQMKVSLDSSKVAAPKWGADNKTYALHLSEGRKNSSAQILSNIAVPQDPSFDDIQRDRECVMCLSEEMSVVFLPCAHQVVCAKCSDLHEKQGMKECPSCRTPIQRRVRARPAVWCRRTDELVDGPNASHISALALDRWESRLEDIFAGRPYDMLDAVKGHI

SEQ ID NO: 61558 - protein, 136 aa, Zea Mays
MDRIVGSKYKLGRKIGSGSFGEIYLATHVDTYEIVAVKIESSKTNHPQLLYEAKLYNALQGGTGIANIKWCGIDGDENILVIDLLGPSLEDLFVYCGRRFSLKTVLMLADQMVYVIDFGLAKRYRDSATNRHIPYS

SEQ ID NO: 61559 - protein, 621 aa, Zea Mays
MAQDAGDGGGELPPPVKKKSPAEEEAEKRRKKLTPGSLMKGIIRSGSGDATPAEGDQVILHCTTRTIDGIVVNSTRREHGGKGIPLRFVLGKSKMILGFAEGFPTMLKGEIAMFKMQPKIHYAEDDCPVATPDGFPKDDELQFEIEMLDFFKAKVVADDLGVVKKIVEEGKGWETPREPYEITARITARTADGKEIIPSKEEAYFFTIGKSEVPKGLEMGIGTMSHKEKAIIFVSSTYLTKSSLMPQLEGLEEVHFYIELVQFIQVRDMLGDGRLIKRRVFDGKGEFPMDCPLHDSLLRVHYKGMLLDEPKSVFYDTRADNDGEPLEFCSGEGLVPEGFEMCVRLMLPGEKSIVTCPPDFAYDKFPRPANVPEGAHVQWEIELLGFEMPKDWTGLTFEEIMDEADKIKNTGNRLFKEGKFELAKAKYDKVLREYNHVHPHDDEEGKIFANSRSSLHLNVAFCYQKMGEYRKSIETCNKVLDANPVHVKALYRRGTSFMLLGDFNDARNDFEKDATAALLKLKQKEQEAEKKARKQFKGLFDKKPGEISEVGVESDGGKDAGDARVNGGEATSADRGVNTNDSPTSESEYAFEEERPGLLGSLWPSARMIFSSLGMNRCAIL

SEQ ID NO: 61560 - protein, 52 aa, Zea Mays
MFMYITLQLLTCCAFDFAIVTIALSKYTSNQQDRATQIAPTFSHTLRGDNGL

SEQ ID NO: 61561 - protein, 150 aa, Zea Mays
MQLHARLRPPTARATLCLPPAPTPPDVASIHHPSLPPPPPNPDPLQSRGRGGRCCASLSIFAPLSAAKEPYLSLMAPQPFVEVDLLNYGVIEGDESCKHFSELKVLPPWMIKDGTNLKKEQRGEKIESQKLEKYEARDDKKHDSKYDQSV

SEQ ID NO: 61562 - protein, 889 aa, Zea Mays
MPVVGISHSAKGYCLISVLETMKTYSAEEGLTEEAIVTKLRICRYHHLYLHNSLKNNSSGTSRWGEFGEGGLLWGECSGKSFEWFDGSPIQELLCKVREIYGLDEKTVFRDVTVSLEGRPQPLHLGTATQIGVIPTEGIPSLLRMVLPSNCGGLPSMYIRDLLLNPPSFEVAAAIQEACRLMGNITCSIPEFTCISAAKLVKLLESKEVNHIEFCRIKNVLDEIMLMNRDAELSAILHELLVPASVATGFKVEADMLMNGCSIISQRIAEVISLGVESDQAITSLEYIPKEFFNDMESSWKGRVKRIHAEEEFANVDRAAEALSIAVIEDFMPIISRVKSVVSSNGGLKGEIGYAKEHEAVWFKGKRFIPNVWANTPGEQQIKQLKPAIDSKGRKVGEEWFTTSKVENALARYHEADNARNKVLELLRGLSSELQDKINILVFCSTLLIIAKALFGHVSEARRRGWMLPTISPLSKDCVVEESSSAMDLVGLFPYWLDVNQGNAILNDVHMHSLFVLTGPNGGGKSSMLRSVCAAVLLGICGLMVPSTSAVIPHFDSIMLHMKAYDSPADGKSSFQIEMSEIRALVSRATARSLVLIDEICRGTETAKGTCIAGSIIERLDNVGCLGIISTHLHGIFDLPLSLSNTDFKAMGTEVVDGCIHPTWKLIDGICRESLAFQTARREGMPDLIITRAEELYLSMSTNNKQGASVAHNEPPNGSPSVNGLVEEPESLKNRLEMLPGTFEPLRKEVESAVTTMCKKILSDLYNKSSIPELVEVVCVAVGAREQPPPSTVGRSSIYVIIRSDNRLYVGQTDDLLGRLNAHRSKEGMRDATVLYVLVPGKSVACQLETLLINQLPSRGFKLINKADGKHRNFGISRISGEAVATGRN

SEQ ID NO: 61563 - protein, 650 aa, Zea Mays
MVEDSSSVAVLDTAAGVWCDTKSVVTTPRTGRYSADAAGGDASVELTRRCRHAAAAVGDLIFVYGGLRGGVLLDDLLVAEDLAAAETTSAANHAAAAAASTNGQREPGRYAYNDEQSGQTVTVSSPDGAVVLGTPVAPPVNGDMYTDISPENAIIQGQRKMSKGVDYLVEASAAEAEAISATLAAVKARQVNGEMEHSPDREQSPDAAPSTKQNSSLIKPDVALVNNSTAPPGVRLHHRAVVVAAETGGALGGMVRQLSIDQFENEGRRVIYGTPENATAARKLLDRQMSINSVPKKVIASLLKPRGWKPPVRRQFFLDCNEIADLCDSAERIFSSEPSVLQLKAPIKIFGDLHGQFGDLMRLFDEYGAPSTAGDIAYIDYLFLGDYVDRGQHSLETISLLLALKVEYPHNVHLIRGNHEAADINALFGFRIECIERMGERDGIWTWHRVNRLFNWLPLAALIEKKIICMHGGIGRSINHIEQIENLQRPITMEAGSVVLMDLLWSDPTENDSVEGLRPNARGPGLVTFGPDRVMEFCNNNDLQLIVRAHECVMDGFERFAQGHLITLFSATNYCGTANNAGAILVLGRDLVVVPKLIHPLPPAITSPETSPEHHIEDTWMQELNANRPPTPTRGRPQAPNNDRGSLAWI

SEQ ID NO: 61564 - protein, 89 aa, Zea Mays
MNIVTSSPRPSSSWRPTCGRASATLASPSSSHRQTRAPRGALVTSCAAPRQDEARGRWQEAARLGAGGLGGAQDPGRRAQGGRRPTGAA

SEQ ID NO: 61565 - protein, 349 aa, Zea Mays
MPLLHLSLPSHRLLVGGRGRLFFPSSPRRICLSVRAAGDAAVSVAAGAYGLPFRPEGAAHHRELSAAVAVVERACCLCVDVKRSLFSRRSSILEKNDQSPVTVADFGVQALISLELQRLFPSIPLVAEEDSASLRSSKADDNSSDILVESIFSAVVDKVSNNGSHLTQDDVLRAIDRGGKDAVSFDSNPATYWVLDPIDGTKGFLRGNDALYVVGLALVVNGKVTVGVMGCPNWTNDDIVNKKDDSVAACNGRGILMVSHIGCGTWSRRLSADIGQLNTAQDIWKRCFVDTCSIAHMAHYCIPDSQTWDMIPLSATYDSTTDATDPRNENEILLLSVFCGRFVALSNLH

SEQ ID NO: 61566 - protein, 73 aa, Zea Mays
MYIHPGRSDKRSPQQWSRIITFSGNRCNQKVVAYLREVCYSRLKRILACLLILGKSLFVQPYNYWGLVGFGLL

SEQ ID NO: 61567 - protein, 117 aa, Zea Mays
MFSVEKSYRRVIYNLIILLGLKFDSHKSDRLGVILFANSVTESVHFLYRLQKLHCLLNLILQSVHGRYKKVVDVFLILLVLKFQNHRPDILGVMNFANWLLCSVHRQNRFGKLCCLI

SEQ ID NO: 61568 - protein, 370 aa, Zea Mays
MALNMKTLTQALAKASAVIEKTVSTTVQEVTGPRPLQDYELLDQAGSGGPGLAWRIYTARPRDGAPSAPYPVVSVWVLDKRALAEARARAGMSKAAEDAFLDLVRADAARLVRLRHPGVLHVVQALDETKAAMAMATEPVFASVANALGCLDNVGKVPKEVKGMEMGLLEIKHGLLQVAETLDFLHNNAHLAHRAISPETVFITSNGSWKLGGFGFALSVDQAAVGLSLTSSQLFHYSDYDVEDTALPLQPSLNYTAPELVQSRDSKVGSACDMFSFGCLAYNLVARRPLLDCHNNVKMYMNALTYLTSEAFSNIPSDLVLDLQRMLSMDALSRPSAMAFTGSSFFRDDTRLRALRFLDHLLVCIYYSPG

SEQ ID NO: 61569 - protein, 311 aa, Zea Mays
MATYFTLNTGARIPSVGLGTYKAGPGVVADAITAAVKAGYRHIDCAPLYKNEKEIGVALNKLFDDGVVKREDLFITSKIWCSDLAPEDVPLAIDITLNDLQLDYLDLYLIHWPFQIKRGSELSPENFVHLDMPKTWQAMERLYGSGKARAVGVSNFSTRKLADLLAVARVTPAVDQVECHPGWQQARLRAFCCSSGVHFSAYAPLGRMKAVASDPVVASVAESLGKTPAQVALRWGIQQGQSVLPKSANESRLKENIDLFGWSIPDELCAKFSEIEQVPLQFLQRWIIMRGGELINQVKVLWSDMDEELAT

SEQ ID NO: 61570 - protein, 982 aa, Zea Mays
MAPTLAAGRLEEGATTTDALYLAERKGHDQTKKSLSEAQETNKELLKKIEKAEKNIDQLLENVERLEKDAITRESLLLTTKQSYGDTAKLLLESQEKNQELVHKVEDSDSKIVLLEDSVKRLEESTADKDSLLAIERHENSETKKELVGSQKKIAELLTEVQDTRANVAELEDLIRRLEQDVTAKEALLLTEKEAHDATRKTLTEAQEESGELLKKIHDNDKHILQLQFTIQRLEETTVANENLLLREREQNDITTKAHNESQEKYEELLSKFVDVDRKIDLLQGTIERLGENTTKDSLLLSERHEKDAIKKALTEAQEKNEELLMKVEDANEKIEQLQTTIDMLEDNVAAKDVSLEAAMKENDAIRRSLTEAQERNDELLKKISDSEYRIHLLQDTIQKLQVDAISRLSSFVMEKQESDASKRAVTEAHERNEDLLKRNEDLLKRNDDLIKKIEDSSKIVTQLQEALQRLEGKACNLEAENQVLRQQATSTPPTSAKSPASRAKISRIHRSPENGHNLNGDIRQTEMKPSTGTSEAITSAANVPDLGDQKDFEHGEKLQRIPKQKYQPSHHQQPQDDQQWLLACIPQHLGFSGSKPVAALLIYQCLLHWKSFEAMKTGVFDSILHAINSATEAQNDMRTLAYWLSNLSTLTVLLQRSFKTTRTAISTPQRRRFSSERIFHGNQTSNAGLAYLSGQSVVGSAGLPQVEAKYPALLFKQQLVDLIEKVYGMISDSVKKELNPLLELCIQDPRTSHSSIAKGNLNGMGQQNQLTYWLGIVKILTSYLDVLRVNHVPSILVHKLFTQIFSLIDVQLFNRLLLRRECCSFSNGEYVRAGLTELKHWSDNATREFAGSAWEALRHIRQAVDFLVISLKPMRTLREIHTDVCPALSIQQLERIVSMYWDDVNGTNTISAEFTSSLKSAVRDESNMATSFSILLDDDSSIPFSLDDITKTLPVIEVADDDFVPFVHENPSFAFLLQRGE

SEQ ID NO: 61571 - protein, 126 aa, Zea Mays
MNFEITIRPDEGYYMGGAFVFTFQVSPSYPHDPPKVKCKTKVYHPNIDLEGNVCLNILREDWKPVLNINTVIYGLNLLFTQPNDEDPLNHEAAAVLRGNPKMFEANVKRAMTGGYVGQHYFQRCLA

SEQ ID NO: 61572 - protein, 445 aa, Zea Mays
MLSYTFLRSTGKEDIIVPMIDYEYKQGWERMVRTTLDDWSTSFQTIITWSPYSTEAELLEQFSSMKDRGTRIIIYNLWEDDQGDLELDFDAEIHDIQLRGGNRDEKNIQMANQFPNSKHYLTYRHSLRSYASILYLRLPTYFQMILRGKEIEHHNIVTDMMLKKEVTYRPVAPNGHPKDSNMVADVTIGFVKDAKHHIDVQGFNVYHMNRLIKPFWRVWTAAGSGGRGVIGVLEANFIEPAHDKQDFERTTLLARLEARLVQMQKDYWSGNAHRIGYVAPRFGRNTEAGDGEDSPENTASAQPSPYHSGKGYTHAKDLSNNIKKGGKASTSFGIQQRAEKSARTKRSTKSILHGLSDSDNSDSEFMGTLSRSRSHTLKTNRKLFQNGSTGLITPQSSGLIERERVRTKSQPLDPKATSNGDLHTMDEYQSVIMQLRDENSSLKER

SEQ ID NO: 61573 - protein, 1180 aa, Zea Mays
MEITEEQRRRAEANRLAALEKRKRYAEAAAATAFPTSGASTFPAYDTAAAAEWRLAKCPRIAPPARQLPFVPLPPRPSPPPLPPTPPQPPVGFQVVLEVCGPDEFWVAVVPVEGRAYPGEAECLGAVQDCLAAASVVQYSATQSLSQSTHLRPVFKLVDYGVVLKCLKKLPGASVQEIPSSTKRIIQNIPRYHVQKWASDEEVHELLKKLPQQIKDALLPFQLEGVMFGLRRRGRCLIADEMGLGKTLQAIAIACCFKDEGSILIVCPAVLRYSWAEELERWDPSFMPKDIHIVFGRQDSLEHLNATPRAVIISYQMLSRLRESMVNRTWALMIVDESHNIRCTKKLEEKYETKAVLHLASKTERIILLSGTPSFSRPFDIYHQINMLWPHMLGTDKFDYAKKYCLLHVARSYQGKMFKDFSKGTRLTELNVLLSQTVMIRRLKEHLLNELPPKRRQIIRLKLKAPDIRAATSSCGKRVNPNSCNGTLTIELPSKSNDDENTKEEEEDDCKKSPRSLTPQEIGIAKLSGFSEWFSNHFIMNGFDANHNLDPQSSCQKTIIFAHHLKVLDGIQVFISENEIRFVRIDGSTLQRERKEAVDSFRLDPEVKVAIIGITAGGVGLDFSSAQNVIFVELPKSASELLQNTLDESHWLQLNQSLFRVSSLMNGKKDAVREIEVDQVCQLEEIKDTEETQRKLHPLENHNADLTHVPKKLLESDDLSIDGFLGIEDLEFDLDFTIRTIPLEFEDENPGTSLKNNPTPTVLEDRSCIDVSLSPAAVFCSVLSSCKSIKSRKRLSGNSGSLSQAASVPDFPIQVESLRFEVSRHTGRIHLYSCVPGHDSRPKPLCENFLPEELNSPLCSPSDVKTRTLLLKKIPSFCNVFNAFIKEWLALRPIDQNKLLGKPLQLPLNLELCFLKDSINHSTEGILKGGSKRRAASLNDVSNPLPENAEWRQVVLRNGTCKERQYTQGWTIDDEPLCKLCQGLCNGRLAKSPEYFEDLFCSLACFQEYRLRTSGRALRQALFQIERGKCSQCKLDCCKLVKHIKLLPLGKREEYIRKVAPNIASRKKLLDKLVREPIDGNAWHADHIIPVYKGGGECKLENMRTLCVACHYEVTRTQHKELKEIRKKAKEHLKNALNKQKDKPSEATEELDDESLLIAVPGSAYSLGFPGNGSDEKAAE

SEQ ID NO: 61574 - protein, 64 aa, Zea Mays
MRYDDLRKVEKGIRRFFHDDITVVVVYIDHGLLQERDTSVPELSVRGFVDSVGPSSFSGITAIS

SEQ ID NO: 61575 - protein, 169 aa, Zea Mays
MTGDCSWAVVKVLCMELTLGLGPQAKQQIREVAEGKDFFVDDFKSQGSHVPYNIAEFSTQASQGGYGVEFTQAPQSGYSGNYMNQNSHPGYSHIGTTNDIVSQDHMAHGSHGMFTQAGYNDPSQDESSQIHYGMAAAGPLQSQGMMNPLYSQSYAHYNTQPQSLQPPPQ

SEQ ID NO: 61576 - protein, 552 aa, Zea Mays
MMSFRSKDAHAQTRLNWPWRSQSPLSAQLLVDIPPEIELSDYRRLPSSRSESPSGLLHDEGVKEEPIPDLDIFFERLYEYFCAKGLRCIITKWIIEILNVLFMVCCIGFFFLFVDWDTLIHLKCGVEALESGEKPCDLMKAIKHDPLVPFTLPKMITVGSMVIMTAYGLTNFLKFFVQLRSTLNVRQFYYDRLKVNDLEIQTISWPKIIEKVVLLQKSQKLCVVRDLSEHDIIMRIMRKENYLIGMVNKGILSFPIHSCVPGAGPTGSHEHGRRNYLILPKSLEWTLNWCIFQSMFDSKFCVRKEFLTSPDVLRKRLIFVGIAMLILSPCLVIFPLVYVILRHAEEIYNHPSTASSRRWSNLSRWIFREYNEVDHFFRHRMNNSAVHSLNYLKQFPTPLVSIMAKFVSFVSGGLAGALIIIGFVGESILEGHIFGRNLLWYTIVFGTIAAISRKVVADELQVFDPEGAMCLAVHQTHYMPKRWRGKENSELVRREFETLFPYTIIMLLEEMASIFITPYLLISEVPKRVDDILRFISDFTIYVDGVGDSKLV

SEQ ID NO: 61577 - protein, 141 aa, Zea Mays
MSRGEVVIGGPNVSSFLPTAVPLLQNTVKQKSFIGSSHLGSHAVLEYQFLPEQPSDAYERGSQLRFYDALAEVLNSRVDSFSIGSHFTHVVEQAPSYTFHSQSSGSSCLSNIIASMAQIQILLLAWLKSTVKNWHPSSCQI

SEQ ID NO: 61578 - protein, 502 aa, Zea Mays
MSSLLQLQAAVYREDYRTAHKLRLAIAATSKNDAVGRAISDLNMAIDEERYKDAAYIRDHAGAGLLGWWSGISGNLSDPYGLIIRISAEHGRYVARSYDTRQLASDSPGLPIFEIYFAEANGGYNLQAVHLKPDGSDSDQVPNMLREKLGIDSINISSSPLGSKHEEFDGSVNMDDKDSDDSNIAAGPGSKNLSSDLTAVPRIKILKVVPMQNVDHDYIINIFDQISEEDDDNDDHEVENESSEDVDNDDNSGVAETVSAEENGDESGDESDIETLVSFDFVSENNVYASRPSAEAFERMPARLEKRDRFSFSFYTEEYSKKLDAGKARQTSKETVGLHADQQDYDGFVQLDRVKLSGSNKKLSILQLGIKQNNKVQQKLHGVTHFSRIQMPIFSDPLTGLYVTTSGFDSEILSLQRKFGQWRDDGSSEEHSDLLFYEHVEAVKLTGDNLMPAGQVVFRAKVGERYQLPHKGIIPRELGVVFSIIQIVFCVFTRRHQTSQSM

SEQ ID NO: 61579 - protein, 822 aa, Zea Mays
MASPQESNSLCLKRKLVDDCLSKDCKSRRVKSENEPSSDSFAKRCNCCCTRPNLANDCVNFLKSGAPNRVMYYKKGSWHNFPEQIMNSLIDEFKGNKSSVVSVMDDEPILVDFLSMTLVNLKTRKQRSVAWFDDTGKRFFPSLFFDEESDEMPKQDSGNVNNTAQGIMLDKVTSSPPEVVKQVVLESSPPVPQKPSTVDVLRKKITSVERGSEGFLFVQDLFLSGMNPFATPNNILHVHRYSPNDITAQCRFEAFERQMKSTKEARGDANVKYGWLGSRKSDIVRILINGLGTTANPVEKAGLSAGVYLSPENRAFTSVGLCDVDEKGVQYMLLCRMILGNVEAVEPGSQESFPSSEIYDSGVDDCSNPKCYVMWPSHLSTHIRLEYLVSFKLAPKVRNYLLDLKGLWFNPSLKELGTDICTLQPVMCETGEGPTSPWISFRVLFAVIQDNISSVARELIFHHYEELKESIITREEMVKKMIIVVGEKVLLEALKKLHYCPSLWYRPSVEAVSSDSVMAAPGKLSLDKAADMVPNGQDCPAPSGVPETSSSAVAMRGASTSVEPKRRDPPVQIVPPGSSATPCAKNQDSFVGRVTPIARDGLLRTICGSSSSPGGYASLAQANTSQTNGVSAPGVTPRGYESAVPSLSLGNSESTGVKQVNSAPRMTPEGQKFLSLGIAPRSPALRDLVKCQASSTLVAMPPAGLGKSRSMKIEGHDSLAPSVKEPKGNGGLAPSKTPKLHEPVIADMSIKSCDSLALGIAPNGHTHDGPASGSGEAKKEQAALVTGSQSKSSVPSLDASSHVTGAASALVALSTLREKGGR

SEQ ID NO: 61580 - protein, 294 aa, Zea Mays
MEASAEAAAAAAAARTLRWAGRAGHLGGVPRAVVFAAVGAFAKACASLLNTTTVHNADALLRLVSARAPGTPLLTVSNHMSTLDDPLMWGFKGFPTSDAKLGRWVLTAEDICFKNVVMSYMFRLGKCIPITRGGGIYQEHMNEALDVLRNGGWLHTFPEGKIAQEDQPIRRLKWGTASLIVRAPITPIVLPIVHSGFEKVMPENSFFGRRPPVPLCSKKIDIIVGEPIEFDLPSLKQEASTVPHDSSSERKGWPAITPDGLDEAAQRWLYQKMSDKVQSVMERLRKTVTNLKQR

SEQ ID NO: 61581 - protein, 550 aa, Zea Mays
MASVAGSGGGASAGAGGLKTYFKTPEGRHKLQYEKTHSPAVVHYNHNGKTVAQMTVAYLKEKPAGQGSTPSTPSAGSGMRSAAARLLGTGNGSRTLSFGSNGTSRAVSGSSRMGGGIGVSTSASGSQGMANYDGKGSYIIFNTADTLFISDLNSHDKDPIKSIHFSSSNPLCHAFDPEAKDGHDLLIGVFSGDVYSMSLRHQLQDPGKKPVSYQHFVNKDKDKDKDPSQGGAASSQCTCVAWVPEREGIFVVSHADGNLYVYDKFKDGNTDWTFPTVKDQSQVLISHAKSSKGNPIARWHICQGAINGISFSPDGAYLATVGRDGYLRVFDFTKEQLIFGGKSYYGALLCCSWSADGKYLLSGGEDDLVQVWSMDDRKIVAWGEGHNSWVSAVSFDPCWSQPNSDETEENVMYRFGSVGQDTQLLLWDLALDEIAVPLRHPSGGSPTFSSGSPSAHWDNACPPTGVLQPSPRMRDVPKLSPLVAHRVHVDPLSGLEFTSESIVTICREGLIKIWARPIHSENNQQPDSSEQVIGSATAKDKMLTSSNKAE

SEQ ID NO: 61582 - protein, 509 aa, Zea Mays
MATGDARDSSPSPATISAERSTASPKRQKPHSSSAAPEACAPETTSVNPPSPAVMAGVGGSGGGGGDDAEMGGWTGLLHSSTKLLEQAAPTPHFPPLQRNLDQLEALSTKLKAKTIRSEAPSQSLSATRLLAREGINAEQLARDLKSFELKTTFEDVFPSEATTVEEYLQQLHEMAIVSSIQEAQKDNLKSFNNYMMQVLEDDWQKEKRDFLQSLSRLSTLPKRNTNLSTSGLGRPASMPPSTSSLHAPSGLPSAEVMPIPNKTIIEKKSSVYAGVVRDLNDSRGRSLPFNPATAFRAAYESLSIDAIGTKSVSMQKVWHLIQALVGEGLTHRNVSRKMSLVVGARHHLEWGHEKYILETINSHPALAALGGSVGNLQKIRAFLRVRLRDQGVLDFDATDLRRQPPVDTTWQQIYFCLRTGYYDEARQVAQSSRTAYNFAPLLADWISTNGAVSPETALAASEECDKMLRMGDRPGRPGYDRKKPENWRHGCLCRGCKHNTTVWLYILA

SEQ ID NO: 61583 - protein, 55 aa, Zea Mays
MKVDISGVNVEKFDDKYFVREKKATKTEGELFIHRRQPRTCHNSRRTTRRRWTLS

SEQ ID NO: 61584 - protein, 71 aa, Zea Mays
MPRGVLDSIPPEQVMQCQSEEDCAWVSKCLPLAEAALLDWAVNLMDDVVQEEQINKMNDRNIAMVFVPNTT

SEQ ID NO: 61585 - protein, 142 aa, Zea Mays
MGSGSFLKVLANNFDVLAGLPFWSYAKLFFNCWLVLPWFNGAAYVYDHFVRPMFVNRQIVNIWYIPRNEKLGKSDDVLSAAERYIEQNGPEAFEKLISKSTKSSKSRNTKRLNLEDGEAENRAKAERESWGENPFYDKNYRY

SEQ ID NO: 61586 - protein, 110 aa, Zea Mays
MSDVENPGVGGKPPPYKDPDNGSQRFLLELEFVQCLANPTYIHYLAQNRYFEDEAFIGYLKYLKYWQRPEYIKYIMYPHCLFFLELLQNANFRNAMAHPTNKDAAASKGK

SEQ ID NO: 61587 - protein, 287 aa, Zea Mays
MTSSSRCGSSTCTSSRRETSPRCPPRAPSTPSSRAASHNPSWQQSSPSPPRTSSPICSRSPSRPRISPATTSSAASPSTSRRCRSACPRTRRSRRSGTASRPSAARSCRTARSCSPSGSGPRPTRRSRTPGTPTRTPPRARRPSRPRAPRPRHPSHMDTKLSHAELTHPDELDEEFDTFPSSRPAEIVRMRYDRLRSIGGRVQTVVGDLATQGERAHALLSWRDPRATAIFVFLSLVVAVVLYVTPFQVLMVIGMLYLLRHPRFRSRMPSVPFNFYRRLPARSDMLL

SEQ ID NO: 61588 - protein, 356 aa, Zea Mays
MGRSPCCEKIGLKKGPWTPEEDQKLLAYIQEHGHGSWRALPVKAGLQRCGKSCRLRWTNYLRPDIKRGKFSLQEEQTIIQLHALLGNRWSAIATHLPNRTDNEIKNYWNTHLKKRLAKMGIDPVTHKSISGTRIGTTNDKSTKAAASLSHMAQWESARLEAEARLARESKIRTATPTPTALHAQPTILPASAASPCLDVLHAWQGAKIDLESPTSTLTFTGSNSGTLPTPRTNRLDVSESNCAVWHQRSDDLEDEENDWQIFSKHQLLELDSKEREEDFIGCEEPWFSEMAGVGAGFTGMLLGVSNEHDASECWGESNNGQTERSNQASDEEDKNYWNGVLDMVNSELTPKSPPFV

SEQ ID NO: 61589 - protein, 621 aa, Zea Mays
MNPLLPSSFPKSPHPPDPNPSSPNPSPCSYLLHADTDDEALIQIPGQNPTLVGASAPFALLPSIDPVPHVSSQFYTFSAASYGLMVRCIRAGRSASSDEVRGATSLSVLASWRAVWKDRNEDTAYLTAWKRIQDKLAASADGRHLHFKSNTAQRVSHVGMWRDIVSEAHADPDLLRHLAFKDTVDRIKQSWTVGAKIYGIPESFIRACVAACPVCKAAPASQPDPATSSPKRGKRRRRFVYTETLDVPARDVPWRLQQLAAKHKVVLCIRQKYIRYKPFMAEVKDYACDRAGVPTSSSGSAASSANNSEGKKARVLKREPYQSKRCGCGFRIRAIVPIANYNEKDKTFVYLEEGTAVFKLYAVHSGHEPGPLDGNARIVHRLVGHKGALEFDPDIYGVSEEGDPTFSAKGDEDVDIDDSHQAVLRQVRYLRSEVLSLEGKVAKMHPELLGSLSTELSEVLHRIRKFNLEGNVYQQQILMVGNEEVRGWGSGDVSHQLDQHDRPFCKDDEMLDDDDTDFGSSIGPIVSWDRMAAECEDRKMLMGDSPKCDKWMLKDDVGDFDAKSILNCGDDDGVEDSKVIKPLMHDDTMVHQQCLRCAAFQQGYCQALTSDGIPPVQGHPG

SEQ ID NO: 61590 - protein, 264 aa, Zea Mays
MPPPGSQSRSSTTAGPSGPSNFHYNPSDPDDFFAEFMASNKTYSFDHDRRRFQPRSHWTSARNSRSEAPSGSQKENGASTSNIEKPPPVEKTLLCTLEELYNGTKRKMKITRNVAKPDGRIEVETEVLAVEVLPGWKKGTKITFPNKGDKLHGQLAQDLTFVLDSKPHDVYNLEGNNLLVKQVIPLVDALAGAEINLTTLDGRNLPVRVEEVVRPGYEVVLENEGWPIRKEPGKKGKLVIKFDVTFPMRLSPSQRAAIRRIMGS

SEQ ID NO: 61591 - protein, 220 aa, Zea Mays
MKVLEFPSQEQRNTILTQIASIREVVLGAPLKLLLKHLASKTVAPNVNNLVALVHRPNESFFLAPQADKVTIVYPMRFQDSIDIVLATSFLQEFVEARRTAALNNVPSCMWSPVPPLELKGVSADALNANAGFVTFVVYPRHVEGKKLDRTVWNLLTFHAYVSYHVKCSEGFMHTRMRRRVESLIQALDRAKSDAEKLKKLVHGGSFKRLSLKNEGDSRF

SEQ ID NO: 61592 - protein, 380 aa, Zea Mays
MAKARKQKGDGSGTGGGATVLHQKLCLSIDMENQLIYGYTEIKALLAENDTFALHADNMTIRSILVDGETVEFDYSPHWKNETDQPNWSSISCLNTVADAACSTYTSSLNREATPNLIVSSERSIKSMIEQQLDENSEKYEENSGRLEKHGGKTIQTSYDQIVNGCNGSAVEEGIENSAVEEGKKKEKEKEKEEKNGNEKSKENGNETENEKNIKLVHIDYILEKAETGIHFVGNVMHSSNQIRRAHCWFPCVDTATQRCPFDLEFTVSTDFIAVSNGDLLYQVLSKEDPSKKTYVYKLNTPVSAQWISLVVGPLEILLDRNDINVSHICLSPALSKLQNTIAFFHDAYSCYEDYLAAPFPLGLYKQIFLPSEMTVLPAS

SEQ ID NO: 61593 - protein, 703 aa, Zea Mays
MEIHMLPYIVALQAFCIVDPTLCIPVTDPSKFVVTLQPYLNIQVDSKSAAQLLESIIFVIDAVLPLIRKPTQNVVEELEKDLKHMIVRHSYLTVVHACIKCLCALSESAGRGPGLVENLVNIFYKHLSGANSDSQLLGRSLFCLGLLLRYGYQLMQTSENQLDFPKIINLLQRKYLLRDDFSLKVRALQTLGYILIAKPEFMLQKDMLKLIETALSSEVDYRLKIQGLQNLYEYLRDAESQLTAESTVKPPVRCEINGRSKVPVAAGAGDTNICGGIIQLYWSSILERCLDTNDQVRQSALKIVEVVLRQGLVHPITCVPHLIALEMDPLEGNSKLAHHLLMNMNEKYPLFFESRLGDGLQMSFKFFESIVSNHKMAANIKSNPIAFVKPGISRIYRLIRSNRNSRNKFVHSIVRKFESDSRSRSTVSFLVYCAEVLASLPFTCSDEPLYLIYDINRIIHLKAGGVESNLKRWTSMSQSQNTVDMPTLPGERHVVMQEPGGYYDNVGYAHERVNANPCSTSDVDMAKVQVDVDMAKVQGDCLDAIALQLLLKLKRHLKVVYSLDDARCQSFSLKEPPKSGETFSRQNIPFNVSSTNISLPSCLQDVASVYQDFKTVLHEDSMDFAVFIPSVQIRKRPTPRNTTNPTPRSTTRVRRTAASSVTKARGGARGDDSDDSDDDDWTGGPRVLDFSGGGRVTRQRVQV

SEQ ID NO: 61594 - protein, 882 aa, Zea Mays
MATESAFRLIGGTGARDWSKGFGAFGSSAGALSGEDLGFVDNDTGVYGGWNKSVPNRSGSAPPSMEGSLAALGHLIDQQSGSFEASLTTLDNITDSSKSEEQLRADPAYFEYYGSKVNLNPRLPPPLISRESRRLMNRVGKAKEWRMVSQDNSSKGSIYVPRSMLSTHKEEPEDDKSPRLDSSSVEDAQIVSSASNFQSQDFMLPYLLELEERFQQSVASSPDSSSSNPSNSNTGDSMPVYSDINLLKSLSFDALKQSDLNSWTPKGPLKSNVNNDLSSPPLSSSSYPGSKTGTQTFEQEKAAADTKHGNVVLGSGAAVTEVDNVDSIMKNLKLSLDVHTSSPAKQRWQDNVLQQYGSFLPAQGDPIQLTTQGPHPPHVPFVDNLSHAQLKLPDIHQNLPQPSMTTPFYTPNSFGNPYYQNLHPANAFPTSIGTGGYAVSGSILPPFMAGYAPQGPLATPLDSSMTPSFSGRPSGFLPAGNLTGGTDFMQSCKVYGQFEPGMQPSIPDPNFIHFFQHPSLFQYTGGNQYNTMGPRFTVVGNLAESFDSQNTIPQAASAYPSDQRLPLPITGFPNSPTARRGGTVPNYQGISSYIGVPMTYPTSPVFQGQTLPGVLPPVRRNDSAGFLPPSRNITGSPGIQGQRARQKFDESKTCSFLEELKSNRARMVELSDITGRVVEYSADQHGSRFIQQKLENCTAEEKTSVFAEILPHASALMTDVFGNYVIQKFFEHGTREQRRDLATKLVGHVLPLSLQMYGCRVIQKPRKPYRLSLSRSCLGLWRRHRRFTLLLLRQPVAVASVSGVRLSGSGLPTSTSGSAPPDRYVGALKKVQKDLGASVFEPLVQAYAAVGKFPGMWQRLKIENVEVGEGTAQLLDSICADQ

SEQ ID NO: 61595 - protein, 67 aa, Zea Mays
MCTLESQSKFILSPSHVSCLDDNWLASYMSWQSEKGSTDRKGDEVDSPRRSFMVFSRDTETNEKSNY

SEQ ID NO: 61596 - protein, 351 aa, Zea Mays
MRFLHVTPMINVALWLLAVAVLVATSVTYALKCIFYFEAIRREYFHPVRVNFFFAPWIAAMFVTIGLPRSYAPERPHPAVWCAFVLPLFALELKIYGQWLSGGKRRLCKVANPSSHLSVVGNFVGAILAARVGWTEAGKLLWAIGVAHYIVVFVTLYQRLPTNEALPKELHPVYSMFIATPSAASLAWAAIYGSFDAVARTFFFMAIFLYLSLVVRINFFRGFRFSLAWWSYTFPMTTASLATVKYAEAVPCFASRALALSLSLMSSTMVSMLLVSTLLHALVWRSLFPNDLAIAITKDRQNGAVKPNDRGKRASKRVHDIKRWAKQAPLSLVSSITKSHSADKEEEERTE

SEQ ID NO: 61597 - protein, 604 aa, Zea Mays
MASARDEHLDGIRALMAAHSPPLHGLVVPSEDAHQSEYVSEQDKRREFISGFTGSAGLALITMKEALLWTDGRYFLQATQQLSDRWKLMRMGEDPPVEAWIADLSSDLVDEVWKDRPLVEPRPVIVHPVEFAGRSVPEKMKELREKLVHEKATAIIITALDEVAWLYNIRGSDVDYSPVVHSYAIVTLHSAFFYVDKRKVTVEVQKYMSGNGIEIREYETVQSDASLLASGKLQSSVHVEKYMDEVESSKIWIDSGSCCLALYSKLSPHQVLTLQSPIALPKAVKNPTELDGLRKAHIRDGAAVVQYLAWLDNQMQENYGASGYFSEIKGSHKNEHLATKLTEVSVSDKLEGFRATKENFKGLSFPTISSVGPNAAVIHYKPEASTCSEMDADKIYLCDSGAQYLDGTTDITRTVHFGKPSAHEKSCYTAVLKGHIALDIAVFPNGTTGHALDILSRAPLWREGLDYRHGTGHGIGSYLNVHEGPHLISFRPSARNVPLQASMTVTDEPGYYEDGAFGIRLENVLICKDANAKFNFGDKGYLAFEHITWAPYQTKLIDTGLLTPVEIDWVNTYHSDCRKILEPHLNEQEKQWLMKATEPVAARG

SEQ ID NO: 61598 - protein, 386 aa, Zea Mays
MEAAAPAPARGLGRQEYAVLALTFASYASFHASRKPPSIVKAVLSADWVPFSGPRGPHRLGELDVAFLSFYALAMFAAGHLADRADLRCLLGTAMLASGAACAALGAAYFLDIHALAFFAAAQVSSGVVQSAGWPCVVAVVGNWFGHASKRGTIMGVWNSHTSVGNIAGSVLAAAALEFGWGWSFLLPAVVIAALGVVVLVFLVAHPSEAGLDVEVMEVEMNGDGGEEVGLLGEDKKEVQGNEDNEFELEMGSQLPRAIGFVEAWKLPGVAPYAFCLFFSKLVAYTFLYWLPFYIRNNVLVTQGFRNFINCIRHWRRLRRDFGWFSLRCHRCPCNNISSVPLAVNPITRCVPDIWKHIHAPQHCSHVSLWLLCEWSILSDHHSCCN

SEQ ID NO: 61599 - protein, 651 aa, Zea Mays
MTVMMISAAGGQEAVGEEVEGATGGATRFGPRSDRFDNDRSRTATTWEMRRMRERRWKASQEELLDSVLGQILSIDGYSRTAESVTVVNNTLVNGTETTGTSTISTPSLHDLQVYGVIVTILLCFIVFGGVKIINKVAPAFLIPVLFSLLCIYLGVFIAPRHNAPRGITGLSITTLKDNWGEDYQRTNNAGVPDPSGSIYWDFNALVGLFFPAVTGIMAGSNRSASLKDTQRSIPIGTLYATLTTTAMYLFSVLLFGALATREELLTDRLLTATVAWPAPAVIYIANQVHPKNWYPIPLIFCRPWGKLPENVPCHPKLADFANCMKKKGRGMSIFVSIIDGDYHELAEDAKTACRQLDAYIDYKRCEGVAEIIVAPTMSDGFRSIVQTMGLGNLKPNIVVMRYPEIWRRENLTQIPSTFVSIINDCIIANKAVVIVKGLDEWPNEYQRQYGTIDLYWIVRDGGLMLLLSQLLLTKESFESCKIQVFCISEEDTDAEELKADVKKFLYDLRMQAEVIVVTMKSWESHMESSSSGVQQDNSHEAYTSAQQRIETYLDEMKETAQRERQPLKENGRQVVVNEQKVDKFLYTMLKLNSTILRYSRMAAVVLVSLPPPPLNHPAYFYMEYMDLLVENVPRMLIVRGYTRDVVTFFT

SEQ ID NO: 61600 - protein, 306 aa, Zea Mays
MGSSVSQAGAPPPHPPTYASTPPFAPAAADAADAAAAPPPKPHEEEATEEKVDYLNLPCPVPYEEIQREAFMALKPDLFEGMRFDLTKMITPYFALTHSVAMGSIEIPAQGSEVIKVPTSNYEFGANFINQRTMLMGRVSHEGRENIRVKHDITDNLSLKINAQLTSEPHYSQGMLNFDYKGKDFRSQVQFGNNGFYGANYIQSVSKNLSLGTEAFWLGQQRKSGVGVVARYDTKKMVATAQIATTGMVALSYVQKVSEKVSLASDFMYNQMTKDVTASFGYDYMLRQLDHWKKDYKFGFGMALGE

SEQ ID NO: 61601 - protein, 356 aa, Zea Mays
MVVGRFLYGIGIGLAMHAAPMYIAETAPSQIRGMLISLKEFFIVLGMLLGYIAGNLYVEVVSGWRYMYASSTPLCLIMGVGMCWLPSSPRWLLLCAIQGKGNLPETKENATRCLCRLRGQASPDLVSEQIDLILEELSYIDQEKQASFGEIFQGKCLKAMIIGCGLVFFQQVTGQPSVLYYAATIFQSAGFSGASDATRVSILLGLLKLIMTGVAVLVVDRLGRRPLLIGGVSGITVALFLLSSYYTLLKDASYVAVIALLLYVGCYQLSFGPIGWLMISEVFPLRLRGRGLGVAVLVNFASNALVTFAFSPLEDLIGTGALFSGFGVIAVASLAFIFWIVPETKGLTLEEIEASL

SEQ ID NO: 61602 - protein, 615 aa, Zea Mays
MPSRSHTAKEIKWGGAKHHPEDKDDGQRMHPRSSFKAFLEVVKSRSLSWENAEMDAIHSLQLILRDSFRDAAEGTSNSKAIVNGQRQLGELELRGINELSSVAREMVRLIETATVPIFAVDTDGCINGWNAKIAELTGLSVEEAMGKSLVNDLIFKECDDIVEKLLSRALRGEEDKNVEIKLKTFGSEQSKGAIFVIVNACSSRDYTQNIVGVCFVGQDVTGQKVVMDKFINIQGDYKAIVHNPNPLLPPIFASDENTSCSEWNTAMEKLTGWSREEVVGKFLIGEVFGNCCRLKGPDALTKFMVVIHNAIEGHDSEKFPFSFFDKNGKYVQALLTANTRSKMDGKSIGAFCFLQIASAEIQQAFEIQRQQEKKCYARMKELAYICQEIKNPLSGIRFTNSLLQMTDLNDDQRQFLETSSACEKQMSKIVKDASLKSIEDGSLVLEKSEFSLGDVMNAVVSQTMSLLRERDLQLIRDIPDEIKDASAYGDQFRIQQVLADFLLSMAQSAPSENGWVEIQVRPNVKQNYDGTDTELFIFRFACPGEGLPADIVQDMFSNSQWSTQEGVGLSTCRKILKLMGGEVQYIRESERSFFLIVLELPQPRLAAGRENQLIC

SEQ ID NO: 61603 - protein, 1317 aa, Zea Mays
MAAEDKGTGDRENADPNLCSIADASLSHENTEDKSDLDTKSAPSIQLLQPKPGENKEPGSHDIHFNSANTTGNSEEGNNTGKKRDVFRPSVFDRISGHRDQWCNEDTRLNSDSHRNQWREMEKEHSDMNKVEQHCDDPKQYLGSQRSRKERWVSNERNYDQHHENNWNSRWGASSKDSQNWREKSTDSDIKDDYSCEKVFSYSTCHGKEKDGTNHEKVNERDSNISRSWNSSYFANRGAGGTSDHLFTDPQKLSASFGYSSYRQESDSPNSTSSRRRFTSVTSRVNSRSSRPFHLGVLSERPVGPSSNSVRYSRIKLFEIYRTTDVRNFTMPINDIGNNEISSLWQEDPMDPLALIAPNAEEAVILKGIEKGDITNSLAQACKDGSDDKNIPGVAALEQMKLSGREDQTGNNEEFNGKMTIDIRGILGAADLREHLKSDKSPPKESESGGGGIHGPCAEFGHQRNALDQGTKVGDGENVNPENLSLYYKDPKGCIQGPFPGYDIIGWFEAGYFGIDLLVRVASAPCDSPFLLLGDVMPHLRAKVRVPPGFSNTKPRSMTDASHLGSVYLGTSDYGSINKNGCVTEAENYFLEAPVSSKIQNPRAATNVVTGGMNEWRFVSGEKVNSINHLEVQKVQLETENTFQIEGDVISVGESQKKESVQSTSHSTFFPQMVDPSSEALQPQNINLLSMLLPAEKGQAPTATSGLSLRSNNADSGNLHAGMCGIDVTQEILNVHQNLHNSQQIGIDAQQHYVLTQNQPTLACLNSQITQPEKFLGGIYHDPQLNINQQQYLLSELHLQPLIPGVPEPQSSLLNNMLQLRQQEQQQQYISQSIPHDRSMQQLYDSSHGTIHTSLSSGDRMKLCLQRTEEILDLALKLPGHGKHNLQLHASVKLRDTGNIGLSESCATALPLPHEMMGHAAWKECSASLTQGSAVVDALSQKESIVDSPSKKTPSYGSNDYSKMTVFEVTGFPQPFQGLQKPKSVASHISNEVHEMDISSVHPHSWKPTPGVRAKSVLEIQAEERLETQREIALENTKVTTTTASGLSIHWVDLVETSGQQFGDQARPMCDKKNDNISQSNRSHLHDLSAREELIKSNAKAGVIINSADDTSFPPLAPSITQSDAHIHDGADFIEFKGTRKISNRGKKPKGSAVKTPASHANVIPGPATDPAQVREPCSLRNIQVEEEQESANLQQLVPASSHAKGPMDQHIHGNNSSWQGSESPPSRGNEFLKMTSHVSSHSTPNSEEYLFWEPREHAKQDKPRLQSPPSSVVNTRSTALDIHKKGKKGTKLSTSALGFKVQSTRIMMGEIAHVDE

SEQ ID NO: 61604 - protein, 299 aa, Zea Mays
MMLFQYLVNTLEADFVPRQIATKESLDWVIFRESLLSMLLGSRKLVFKSFVKNCMCILLNQYYHEAKDDYEDIIPSERETESTSYHNFSLNYLSFELKKTLISLRKLFVMVMKLDLTRKEADTLGLTSRADRFRNSIMDIILDELTYNSSYLSPFLLAFVERKWKLEIILQYFSKYCGKGAVRTRRSDNSQEDLKLENVLNFFVTATSAKAIVRKMSAEIAQLLLTHAYQACLSAEDANSNSADTPEKVGATLQEISSNFIAAFQNIRKVSPDIQISPFEKEALFTAATLVRKLKSKER

SEQ ID NO: 61605 - protein, 347 aa, Zea Mays
MAGELEAEASQNENGETQVDIYKHFSDLTVDNIAYAIFGSSYKLGKQVFEAQTELLGITMATFLDVPIPGSKYLPTQANRRKWMLETKLKSLLTRIIQPRLASGEHGNDLLGVMLDSCTETKQGGKQQQVDRLRLSLSMEEIIHECKLFFFAGHENTALLLTWSVYLLSIYPEWQERLRKEVLREFGRDAPNPNALNRLKEMTMVLFETLRLYSPALFMQRKTLADMTVGPIKLPKGTAIVIPIPIMHRDKQAWGDDADEFSPMRFANGITGAAKVPHGLLAFSMGPRSCIGQNLSMLEAKSTLALMLRKFSFALSPDYVHAPVDLFTLKPKFGLPVILRPLDNVLI

SEQ ID NO: 61606 - protein, 104 aa, Zea Mays
MESTALMTARLPLLTSGSRSKPLPFASFTRAACRLASAPFSGSGSVVLLSRRSRDYAGVGSLVSAAADPGDTADAGSESILLSVQGMMCDGCAASVKRILESQA

SEQ ID NO: 61607 - protein, 444 aa, Zea Mays
MQRWLPALLRRAAPGGGAARLLATSSLLFDDTQEQVRHALALSTSHSAGPPPLRLAPCLIDPIPRPPAPLHPAASSRRACASSRRRPSRRAPRPSTPPTTSRGTWTCGGSWETSTSTASPRPRSTAGWGSGTCTTASPWRRSPGHPAPSASPTARTPTSASTSSSGTETRSRSSSICPSGEHIGALAMSEPNSGSDVVSMKCKAEKVDGGYVLNGNKMWCTNGPSAQTLVVYAKTDLAAGSKGITAFIIEKGMPGFSTAQKLDKLGMRGSDTCELVFENCFVPCENVLGEEGKGVYVMMSGLDLERLVLAAGPIGLMQACLDVVLPYVRQREQFGRPIGEFQFIQGKMADMYTSLQSSRSFVYSVARDCDNGKVDRKDCAGVILFAAENATQVALQAIQCLGGNGYINEYPTGRLLRDAKLFEIGAGTSEVRRMIIGRELFKED

SEQ ID NO: 61608 - protein, 180 aa, Zea Mays
MKEASNILHNCSSRSLVIIDELGRGTSTHDGVAIAYSTLHYLLKEKKCIVIFVTHYPKILDIQREFEGSVGAYHVSYLATRKLLEVTDKQVETSPEANDLGEIIFLYKLVAGASDRSFGLNVALLAQLPSRCIKRASVMAAKLQEELSPREEIKLRRTTDAQTVDGPSESSAEEIAQKTI

SEQ ID NO: 61609 - protein, 325 aa, Zea Mays
MACTVSCSRVFVVRCSASPSGGGGGGNAVRVNGAAHRAPLQVGAALETSINRSLAELSPPLLPLLPTDDAGEERSRQNIPTEKQTVDPFRQALIVEGGVRYQQTLVVRSYEVGPDKTATLETVLNLLQETALNHVWMSGLLGDGFGATHGMIRNNLIWVVSRMHVQVDQYPIWGEVLDIDTWVGSSGKNGMRRDWLIRGRNSGDVFVRATRQASLVTRRLSKMPEEVRAEIAPWFIDRHAIYQEEATDKIIKLDSNAMYVDSDLKPKRSDLDMNHHVNNVKYVRWMLEVKKTNFLQCQNIAALTFYFWYNILSPSHRGCRLTFSV

SEQ ID NO: 61610 - protein, 1002 aa, Zea Mays
MFPWEMDIDGESSKTLGQMEDLEKIPLENESCGICRDIVIDRGVLDCCSHWFCYTCIDNWAAITNRCPLCKSEFQHITCTPVYGTIGATDEDEYSLTSCDDDWYGQEESSTLSFPSYYIDAEAVVCLDDGDCKIRNGLVAAEDDSTLDTSIACDSCDKWYHAICVAFNATMASDSSWLCPRCKFNEVEYEANVILKQNLGEDCVIGSDRTCTNASFSGRVSVSVADEGETALVVSMVGAHSETRGGLSEASLGLETAHETFNCSPYPSHSKDVLVADASSLRNTDIVSRSQNKPSEINVVHTLCSEPTETSLQFSPIREPATTIFSSEQDNMSTERLEVPKLVSSCPVVDNSKEAKSTGEENAAQQSNNELSSVIKSPQPASSVHQMKTAQNLQLPLRHDEHSSDDRKEEHIESGNEMIHPAKKAKLEVQEDINVIGNFDFSSIHSHTTSPAKAITDDIMSESVAQQKSIPDIMSIVDGEVYRRDPGRELAKPVGRRAGDKPGPRVKKIFRKEEGKESSALVQKLQKEIKEVVRDTGTNILEKDESFDEKLLTAFRAAIGKSVDGPAKSTNTNQLIRTRRSLLQKGKKRENLTKKLYGTSTGRRRSDWHRDWEVEFWKYRCSPGINPEKIETLQSVLQLLKKSSEMDKESAKGKREENNNSSILSRLYLADASVVPRKDDIRPLSALAGCAPLEKSSQIKASCNKSSSIPAGGNETMKISSPSSTGKASSYSILNKEAPSRRENRNSQPSQDKRNQSSGDIKQDKRKWALEILARKNASSITNKDQTGGNDALKGNFPLLAQLPVDMRPQLAAGSNKKVPVSVRQAQFHRIAEHYLQKANLDVIRRCADTELAIADAVNVEKGIYERSNSKSIYVNLCSQATRQHAKAKSDNDTSTLTKRTESGSDQISQEATSEGTNVSGSDMEEDLNRAAISNQKNELEDDTAPEHIVHKDTVSFNSAEDALRKAGLFDSPPNSPERGNTAVEGNSESTAVSNCPKFSQK

SEQ ID NO: 61611 - protein, 237 aa, Zea Mays
MAPAKTDDPLSQLLAKIEEGNKETHRRMEAIQGAVGNMEAAVKVVMTEQGDLQKWKPEVEAKVTEISDALKAIQIQMGKMEKKPLGFGSRQEEEGEDGFLKPPPSDSSNLEFRREEGRTQFSHGVLGMNWIQQYSPMKVDWANKWAVIPYNGSPAYLQGVQVTLPAGAVTELLLLSVESQATPAGQSVDPKVQAVLDQFVEVFEDPVGLPPSRTCDHTIPLVPGTNVCVLPLSSKAE

SEQ ID NO: 61612 - protein, 461 aa, Zea Mays
MQVPWNTSYPDVVKFMRSGFALGFPVWYGDNIRECLANNMRTFHKEPRNSTGIRQQILDILTFETLWFCVIEQLGSTNNGVKSVLIHIIEEIPYVLSGLKSAHVICRFILMPLAVFVFLAYKYWKTRITIDAVEKFLRMHHMLVPMRYAYTNIIAITGHFRDKLGQGGYGTVYKGVLQPGEVHVAVKMLGNSNCNGEEFISEVATIGKIHHVNVVRLIGFCSEENIRALIYEFMPRGSLDKYIFSSEKTFSWDKLNEIALGIARGLNYLHHGCDMQIVHFDIKPHNILLDSNFVPKVADFGLAKLFPRDDSFVPLSAMRGTIGYIAPEMVSRSFGVISSKSDVYSFGMLLLEMTGGRRNADPHAGSSSQAYYPSLVYRQLSQGDANRISEGVDMHELEKKLCIIGLWCIQMKPQDRPTMSEVIEMLEAGVDGIQMPPRPYFCDEEGESSYSTISELDTIEE

SEQ ID NO: 61613 - protein, 311 aa, Zea Mays
MPQKRSQPAQKGAQSSLSLPPLSLSLLFPARVAQGRDEEKRQRVTSPMASPSLLRATCTLMRTSSLPAVIEASGNDDWKKRKEAQSLKRLEVKKKRIERRNSLACNTSKEAAGQSPKEMNANTDKLVSSDETIVSANESHSSGKHLVKGLPPKYQATITSEDSSSAMRKKPNSAFKAITEEQNSSSSVPSSGEAISSVTAPSLPLLSLVPITATLGSREDQSILGRAGARANGMGDVERRMMQEMPGVFTKGLSNGSRVEGFLYKYSKGEVRIVCICHGSFLTPSEFVEHAGAGKVDNPLRHIVVSATPNL

SEQ ID NO: 61614 - protein, 161 aa, Zea Mays
MLRSALRRGGASARQVALAGEASPRDLLRMRVAERERARRRRRDPGRDEFFVPTPESLAWLDSVSLPMVLTAAAVALFTKLLMMEHEATDQERRERKIKNSHPDQGTVRMLSREEWEEVQEVRPRTPFESKLARPHARIRTGEPVRLLVALVLPTSGFRYF

SEQ ID NO: 61615 - protein, 1734 aa, Zea Mays
MIPVSADIPVELRFLLECATGSNFDSIRLELCQLVDSGLDGCILVLRVCLNQMLLNAGEVKNLQLQQKLLSDVFRYCLHKTCFTTSFCEALATIALTDDFLESLTNLLELSVAEKIGVGLALSDSEDSEMKQKGQWFSIAQIEKLCTSHIQSLSNGQIHEIVMFLHQSDGLSKHMDTFNNIISLLKVTERPFFVPVTNGDFDSQANPSRHLEMYFGSTNDDFESLLSEIGKEISMADIVAELGYGFTVDSTHCKEILSIVEPLDDIAISKLLGAVVGTHIGLGEAHNTYATFVSAIRNSHTNDSPQPTKWNTDVLVDSINELAPSTNWVRVIEYLDHEGFNIPDEASFYLLMSIYECACKDPFPLHAVCGSLWENTEGQISFLKHAVCAPSDKFTFAHSSRHLAFQDLAGPSQGNHAWFCLDLLEVLCQLAEVGYTASVRSMLEYPLGHCPELLLVGVSHISTVYNLLQNEVLSCVFPALLKDPTKRNVVNYLWHTNSYLTLQGFVDAHNDPDCLLRIVDVCHDLKILSTVLDSTPFAFSIKLAAASLRKDYSNLEKWLTEKLSLYGKGFVEECVNFLKATMSNTDYVLEGTTQPQSIVRNIYWESSYAFIKVYMVLQSHSGQLLSDAILDEIRKLCVSFESRNPSSAVRELANSDGGSDDIEVEANAYFQHMFSGQISVDSMIQMLGRFKESTDKREVSIFNCMISNLFKEYTFFPKYPDKQLKIAAVLFGSLIKHQLVAHSELGIALRGVRDALRKPVDSKMFMFGTSALEQFMDRVIEWPRYCNYILQISHLRGTHLEMVSVIERALAKISSSQNEPNVGNLLSAEQHVSGSSSMEGIEASESSWLMGTIPSQLGRPLSSPLQHRQQGLLSERSEVSMNSLNKSNLSSQPPLASSSADLTINSKTTAPPSLLASPHQSISVSTSVHVGFLRSRSTPGLPRQPSYTTGFGTALNIETLVAAAEQRDIPIETPPPEVQDKILFMINNISISNMEAKAKEFNEVIQEQHYPWFAQYMVMKRASIEPNFHDLYLKFFDKLNSKSLNKEMLKATYENCKVLLRSDLIKSSSEERSLLKNLGSWLGKFTIGRNQALRAKEIDPKSLIVEAYEKGLMIAVIPFTSKILEPCQSSIAYRPPNPWTIGILSLLAEIYNLPNLKMNLKFDIEVLFKNLTVDMKDVKPTSLLKDRLREVEGNPDFSNKDVTTSQTPVVPEVLPGTIPSSTHVELQPEINITSRAMSLPNILNQYVAPVRLPTNSTVEADKVALMMPEQVSSLTQVLPAQTQSPSPSPFSVNQLMAAIPRDEICFKINPKLGSIGPQLQYSKIMDLALDKANREIILPVIQRSVTIASRTTKELILKDYALESDNNMITRSAHLMVGTLAGSLAHVTCKEPLRVALYSNLRNLIQNLMSGSETIEQIIHMLVNDNLDLGCAIIEAVATRQAVELIDAEIAQSFSQQRKQREGGGPTYHETFAYAQGPFARVPEALSSKPGHLSASQQRVYEDFVHVWHPHNQNVGATGSGLSGVATVSSTLGVLRAYSPNSTSASSSNLSTVHMGGLTCITQPTELGSEDTVIAQFLSNPAQVGPSESPVLFSGTVGAASTFSPLASNDLPEISAMVPPPSTSADRLGSILPEPLNTGDALERYKQVAQKLEALIANDGKHVEIQSVIAEVPDMLRRCVSRDEAALVVAQKVFKSLYDNASNSAYVSWLLATLIAIRDVCKLVVKELTSNIFR

SEQ ID NO: 61616 - protein, 115 aa, Zea Mays
MVVVVAGPSQTAKISVSPEPGSTRSLSSQLRARAGPFPVSWRGARAAASPRLELAQPPRLDLALGLEPGSSQPPLSSPGARARVPLAAAAVEVLLAKACTEQLKRPCCTCTACSD

SEQ ID NO: 61617 - protein, 109 aa, Zea Mays
MRPPRGRGGGGRFGGGGGRGRGGGRFSGGGRGGGGGRFGGGFRDEGPPAEVVEVSTFLHACEGEAVTKLTNEKVPYFNAPIYLQNKTQIGKVEEIFGPINESVSTSSPP

SEQ ID NO: 61618 - protein, 491 aa, Zea Mays
MGCGQSKMEEEYAVRHCRVRSELLALAIRQRYTLADAHHAYAESLRAVGALLHDFLRGVQSLPPPPPEPALRLPQQRKGDGLPAASPPPAMASSSAAAAAPPVAKQVRIAPDDGHIQFSDGDSDSEDGHIKFHSDEEPDPARRRPEVVRSTGAPGPPPPQMGQPYASGGGYAPPPYGPGYGYGYATGPGPGPGPDYGGIGMNGGGGYEPGHGVIQPPPPSVSHEQRLEATNARVHYYSGNGEQQPPPRGYGGGYSYPPQSSRSYNQYAYGGYYGGGSAPAPPADIPSSSGEPAAVPPPPSPPRVSTWEFLDPFGTYESYYEQPTATAAPYSPGRSLKDVREEEGIPDLEDEDMEVVKEAYGDEKHPVKGYMGNGKAAKGEGRSSTGDELPRKSKSSEASGSGSSLEHDVHVVEKSVVGEQVRHSEPRQHVAGLPPTGSEKLYIDDTEVVVEIRTQFERASQSAGEVSKMLEVGKMPYYQKGSGFKGGVSAF

SEQ ID NO: 61619 - protein, 182 aa, Zea Mays
MCVAVVIISHVRSQCRLVIHRGVVLGKASAAGAAAVLWCWFRVLCSLKRSSRSADCSLVSLSFFRVLPSSSSSSAPAQARGNAAVDDARSPSASSTRSLFTPATDSDDTLCAAPPPPDPVAVASSGKLSVSDGSSGCGDGSRTSLLSRRLIPPWRAAPEAPPLPLPRDRPSARPASSRCTSS

SEQ ID NO: 61620 - protein, 58 aa, Zea Mays
MLEVKKISLYAASSAVREIQRITLDPKFNLDPSFEDQNLTRAVSENLARVNKRKVSCS

SEQ ID NO: 61621 - protein, 184 aa, Zea Mays
MKHVVVVSKRIVTTLQDVQLNSVVLVVHKTIKYQAPVYVEQPRQQQVPPPQRQPRRPPAQFQQLEYEDSYARGRGRGRGRGRGWGRGGYGGYGGYGNNQGGYHQGGGYYDNQGGYNGYDNQGGYSGYDNQSGYGGGYGYKQGRYGNYQENGGYNRDPGSGMRGRCNWGYQGARTPWWPPPAARM

SEQ ID NO: 61622 - protein, 1089 aa, Zea Mays
MESLSSGGELARRQSSGGGSSGWGSFSGDADPFDIPAKGAPLERLRKWRQAALVLNASRRFRYTLDLKKEEQKEEIRRKIRAQAHVIRAAFRFKEAGRIHVQSEETKVPCADGALGFGIKEDQITALTRDHNYSGLQQYGGVSGVAHMLKTDTQKGISGDDSDLLARKNAFGSNTYPRKKGRSFLAFVWDACKDLTLIILMVAAAVSLALGITTEGIKEGWYDGASIAFAVLLVVFVTAISDYKQSLQFQNLNEEKQNIRLEVVRGGRRITVSIYDLVVGDVVPLKIGDQVPTDGILISGHSLSIDESSMTGESKIVHKDQKSPFLMSGCKVADGYGTMLVTAVGINTEWGLLMASISEDSGEETPLQVRLNGVATFIGMVGLSVALAVLVVLLARYFTGHTYNPDGSVQYVKGNMGVGQTIRGIVKIFTVAVTIVVVAVPEGLPLAVTLTLAFSMRKMMKDKALVRRLSACETMGSATTICSDKTGTLTLNQMTVVEAYFGGKKMDSPDNAQMLSADVTSLIVEGIAQNTSGSIFEPEGGQEPEVTGSPTEKAILSWGLKLGMKFSETRSKSSILHVFPFNSEKKRGGVAVYLAGSEVHIHWKGAAEIILDSCTSWVDTGGSKHSMTPEKVAEFKKFIEDMAAASLRCVAFAYRTHEMDDVPDEDRREEWQLPEDNLIMLGIVGIKDPCRPGVRDSVRLCQAAGIKVRMVTGDNLQTARAIALECGILDDPNVSEPVIIEGKTFRALSDLEREDAAEKISVMGRSSPNDKLLLVKALRARGHVVAVTGDGTNDAPALHEADIGLSMGIQGTEVAKESSDIIILDDNFASVVRVVRWGRSVYANIQKFIQFQLTVNVAALIINVVAAVSSGNVPLNAVQLLWVNLIMDTLGALALATEPPTNHLMERPPVGRREPLVTNIMWRNLIIMATFQVSVLLSLNFKGISLLQLKNDDPAHADKVKNTFIFNTFVLCQVFNEFNSRKPDELNIFKGISGNHLFIGIIVITVILQALIVEFLGKFASTVRLSWQLWLVSIGLAFFSWPLAFVGKLIPIPKRPLGEFFACCCNCKGSKQGPDDATSNGKEDNKLEP

SEQ ID NO: 61623 - protein, 198 aa, Zea Mays
MVSLRFPTAAIPRLPPSQAPNGVAIAATVAAAAAAAAAVAASLTLTGKSTGRPVPHPAPLWASLSLADAAAPSSVEPRTGATFPTEAAVGRRLLGIGLRKTSVLGLKSIDVYAFGVYADDNDLKQQLKEKYSKFSVSELKGNGELINDALERDIPMTVRLQIVYGRLSIRSVRSAFEKSVGSRLQKFGGQDTKELLQS

SEQ ID NO: 61624 - protein, 99 aa, Zea Mays
MDPAQRAAFLEEDDEMEDAHSVAASAGDTDANVDVNEHFVCFSCVDGELYELDGRKSQPTSHGPSSPETLLQDAAKVIKARIAENPNSMNFNVMALSKK

SEQ ID NO: 61625 - protein, 496 aa, Zea Mays
MGKDNVPFHTIMFPSTLLGTGEKWTMMKTISVTEYLNYEAGKFSKSKGIGVFGNDAKDTNIPPEVWRYYLLMNRPEASDTLFTWADLQAKLNSELLNNLGNFINRVLSFVAKPAGAGYGSVVPDAPNAGAHTLTKTLAEKTSKWVEQYLDAMEKVKLKQGLKSAMGISSDGNAYLQESQFWKLYKEDPAACAIVMKTSVGLVYLLACLLEPFMPSFSDEVLRQLNLSPEENLSLSEEKGEIAKAKTPWNFVPAGHRIGKPAPLFKELKDEDVALHREKYAGSQAERSSKAAADAEANKVANQLKGTKLSDGGTKKEPKKQSGGSKSKTAEADITVAKLDIRVGLIRKAEKHPDADSLYVEEIDVGEDAPRTVVSGLVKFIPLEEMQSRKVCVLCNLKPVAMRGIKSHAMVLAASNEDHTKVELVEPPESAAVGERVTFAGYAGEPEASLSGKSKTWEKLAAELHSNGELVACYRDVPFTTSAGVCRVKTIANGEIR

SEQ ID NO: 61626 - protein, 1920 aa, Zea Mays
MAPKSRRGKAKGEKKKKDEKVLPVAIDITVNLPDQSHVILKGISTDRIIDVRRLLCVNTATCAITNYSLTHEMRDGALKDAADIATLKPCTLTLVEEEYSEESAVEHVRRLLDIVACTTCFGPAPPPPPPPSPKDADAAKETSSSSSTSKAVASASSGGRRTASPPPASPSSAAAKESSAAKEAAAKESAAAVELEAEMSGACPRLGAFYEFFSLANLTPPLQFVRRVLQPRQEEQPSDDHLFFLEAKLCSGKFLVVEARRKGFFSLGKQRVLCHNLVDLLRHLSRAFDNAYEDLMKAFLERNKFGNFPYGFRANTWLVPPIAAQSPSTFPPLPAEDETWGGSGGGWGRDGKSDMVPWADEFLYLTSMPCKTAEERELRDRRAFLLHSLFVDVAIFRAIAAVRHVMEGTELSASTNIDEVLYSETVGHFSITVTRDSSDASCKMDTKIDGNRATGMDSKDLAERNLLKGITADENTAAHDVDSLGIINLRYCGYVAVAKVDNIDKTKVNASIKPMNIADQPEGGAHALNINSLRMLLNEATSTGEKKISNLSQNHRQEELIAAQTFVEKLLKESLQKLEEEENVKHSFMRWELGACWVQHLQDQKNSDKDKKQGGEKDKKKTLDKSKEPKIEGLGKPLKALKNAKNVDSADLGSSAGPKSSAESQKDKPSDVKLPQGESSASENENLLKDLLPESAFTRLKESETGLHQKSPPELIEMALKYYDEVALPKLVADFGSLELSPVDGRTLTDFMHTRGLQMRSLGRVVKLSEKLSHVQSLCVHEMIVRAFKHIVRSVIAAISDIRQLALTIAAALNLLLGVPESDVSGSSPNVHPLVWRWLVIFLKKRYEFELTEKHYHDVRKYAVLRGLCHKVGIDFAPRDFIMDCSFPFHKQDIISLVPVHKQVACSSADGRQLLESSKTALDKGKLEDAVNYGTKALSKLITVCGPYHRMTAGAYSLLAVVLYHTGDFNQATIYQQKALDINERELGLDHPDTMKSYGDLAVFYYRLQHTELALKYVKRALYLLHLTCGPSHPNTAATYINVAMMEEGLGNVHVALRYLHKALKCNQKLLGPDHIQTAASYHAIAIALSLMEAYSLSVQHEQTTLQILRAKLGPDDLRTQDAAAWLEYFESKVIEQQEAARNGTRKPDASIASKGHLSVSDLLDYINPDQESKGRDSEFGKRRYSSIKVLSHSNESSNGASPEISPRDSNPIIDEEQQVKEPSKDDSTKSISEAEVKQTPESFEHPAPSEPQLEIVEANINAPKEVIEVENSEPEDGWQPVQRPKSAGGSGKQMKHYRPTTRKVYDPDSHDPTYTSQYKARNSYSNNRYYFLRKRTVVPTTYTDPQQHVKVQTFGARFGRKIYKAVTYRVKPATATTEVLDTFKSTEQMSGKAESQVANSQAHNPTSTDHKGSESHGTLVASSGNAPSYKDVALARPGTIAKTQIQKPRDDVPQNQPSLGQIIAQEMKDSLVDSLQVEQGPVSANTNNSKEETNVLGKLQKLEETKFSEGELEIENLCKDRVQDLPIPKAEESGIGSEPVNSKKDANVLSNTSQELSSSSNDGAAIEFSESTGSVKTEQTEKSDTDFFEALPRSIENISVSASTTNTGSLGGDGSEKSKPNLVLSNIDLREMPNKKLSASAPPFNPSPPSVLSPLSGNVGLPPPGAIPGVAPWPVNVSLHPGHSTMVPSGPPLCTSPHHLYPPAPRSPNLMHPVPFIYPPYSQPQVVPNTTFPMNTNIFRPNHYGWQPYMGPAPSEFVPMSAWSSSHTIDFIPTPHVVDPISQSLADKHIQSDAAVVSIGPSLDSSAVVAKEEMETPAVAVSGNLISNKHDDQDKQLKDATRIELSPEMQEDNKHDEGSFRIYVKGKSRRKQTLRIPISLLNKTYGSRSFKLVYNKVVRENDIFRPSSVSFAEVVSSGN

SEQ ID NO: 61627 - protein, 299 aa, Zea Mays
MCYIFFCLVWVLTYSSMYILFQPTRAWSKRVQHDWKLLENDLPAYIYVRVAEDRMDLLRAAIIGPKGTPYHDGLFFFDVHIPSAYPSGPPLVYYHSGGLRINPNLYENGRVCLSLLGTWDGRGCEKWNPAQSTMLQVLVSIQALILNEKPYYNEPGYESFATTPNGQLLALKYNDDTFLYSCRTMLYSLRRPPEHFADLVAGHFRVHGHTILAACKHYMAGNDIGSVVPEEEEESASRSAPKAKPGVIRTIPLNRRYAGSFDTSLKVLYEDLLMEFNVKGADTRKFMIEKLKKDQPAGT

SEQ ID NO: 61628 - protein, 59 aa, Zea Mays
MWRLVWPCARRGPGVEPQPRHGGAGDSCDCPCPSPAQRCPCPCGPNVQPSSFCLLIGAA

SEQ ID NO: 61629 - protein, 539 aa, Zea Mays
MVFGRSVEEVDLSGFLSVNSEWLAYLGSFRYLRVLKLADCKNINNDAVWSLSGMNTLKELDLSRCKKISDAGIKHIVTIESLEKLHLSETELTDNGVMLISSLTNLSFLDLGGILMTDKTLQSLQVLTKLEHLDIWGSETTNEGASALKSFARLLSLNLALTRVNHLSIPPTTSYLNMSNCEIHSICDVDSEVPVPLENFIVSAATFGNIDKVFSSIQASSLIHLDLSSCKLSNLSFLEKMKNLEHLDLSYNIITDGAIEHIAKIGTNLQYLSLKNTGITSQALCILAGTVPNLTSLSLANTKIDDSALAYIGMIPLLRTIDLSQTSIKGFIHTEVNSEKLLSMSAFEHLKYLESLNLEDTPLSAEVIPPLASFATLKYLYLKSDFLSDPALHALSAASNLIHLGFRGNILSSFGLLQFVPPVTLCVLDLSGCWILTGDAISTFRKRHPTIELRHELLHEVEENFVGGSQFRKPRRRRSPHVKAEVGNSFAGSSRLHDIRFVDERIKYSKEEFVELQGLAKPNSLMLGVWLPPELRRPK

SEQ ID NO: 61630 - protein, 510 aa, Zea Mays
MASLTPGILLKVLKHINSDVKFIYVEKVQSSIPVPVLVGVRPVPGRNPCIGNPKDLMQMSTPSGVMEALDHQRTTSKSADLSESEKENLQRKVVIKEQKTVVASRYMLGVSSNNGKITNLNSSIDSEKSNGGSTISESNKKSVALKVRQEAKPQERSNNTSPSNAKLVSTKQEISKDTRKNIGTSPSPNGSAVVKKQMPKESKKEVATERRSPPKLHRSSPTPARTSPTKLSPAAKQNGNSGPVSSVSTVKKRVSETISWDSLPTSLINSGKAVVRRKNIALIVAAEAQREAAAAAYLVKGLGIFSEIRESSEVDPQAAITKFFELHRLIVQQSAVWKAYTPEPSKESRPEKEKPSRKASASHHHQNKAGTRDTAKNPEGAQGSEKTEWAREDGFKEICRSWIVLRKESRSWFLSFLEDALESGFMSEGQTTKNTRERVRGQPKPKGGDGRIAVLLSQLKETSNWLDQLLQDEADTSADGLAETVDQLKQKVYKCLLGTVETAASALGGR

SEQ ID NO: 61631 - protein, 820 aa, Zea Mays
MSWSIQKENPLLRLTVENCELSSIGVIILLDCLTNAKQLLDVLSIADNHLGSPVAAALARFLGSHVRALNATDIGLGTVGFQILEETLPTEVALSHINISVSLGSAPAIADSLAIRVGGQAMSRFWKPGSEKPSTLLVDDEEGGVVFLPSSSSVSSSGFGYASLERQRQRLPVYKYRKAILYLVERHATTIVVGETGSGKSTQIPQYLKEAGWADGGRLIGCTQPRRLAVQMVASRVAEEVGVKLGEEVGYTIRFEDQTNPGMTMIKFLTDGVLIREMMEDPLLTKYSVIMVDEAHERSISTDMLLGLLKKIQRRRPELRLIISSATIEARSMSTFFNIRRKNSLLGSSDNLPSPEPAVLSVEGKGYTVEIHYVEEPVSDYLQATVNTVLLIHEKEPPGDILVFLTGQDDIEAAVKLLNEEIQHLGRHYLDLLILPLYSGLPRGDQDLIFAPTSKGKRKVVLSTNIAETSLTLEGVVYVVDSGFSKQKCYNPISDIESLVVAPISKASARQRAGRAGRVRPGKCFRIYTEEYYLTEMQSEGIPEMQRSNLVSCIIQLKALGIDNILGFDWPASPSPEAMIRALEVLFSLGILDEDAKLTVPIGFQVAEIPLDPMISKMILSANDFGCSDEILTIASFLSVQSVWVSVRGVKKEFDEAKLRFAAAEGDHVTFLNIYKGFHQSGKSSQWCYKNFLNYQALKKVVDIRGQLLRIVKSFGIQLKSCDRDMQAVRKAIIAGSFTNACHLEEYSQNGMYKTIRTLQEVYIHPSSVLFRVNPKWVVYQSLVSTDKHYMRNVIAIEPSWLTEAAPHFYQFRAFNPAPH

SEQ ID NO: 61632 - protein, 202 aa, Zea Mays
MTKTELDHLDDGYRWRKYGQKAVKNSPFPRSYYRCTNSKCTVKKRVERSSDDPSVVITTYEGQHCHSIGPFQRGGGGGAAAARYHSAAAVALAEQMYSSSTTSSFIPAARQQLFSLPPLHPQSSPPSSETTPPPVVSSVTTTSFQRANDGDELWRTGTGYGSGVSVAQSPSTPPSVPPPVVSVQKAGLLDDMVPHGVRHGTP

SEQ ID NO: 61633 - protein, 820 aa, Zea Mays
MHALERKFKELSDDQCSYDKTLISLNKLWNQLIDDLVLLGVRAGGDLDNLQALDHEELSEESLESCPSEEIFLLRLLKTNNIRDNSDTSLLKFVEEALAFRSSATVTLMKSLQETISSQQARSESLSLALNGQKSNEDVIVALRNHNDCLKEVAENASQAISIINEKHKRYLDEIEAFKSNHSRELQEIKRISGELEESIAELEESQRKLVVLQLQRHGSVMDASGANAVNGGISTHKSSDKSMSWQDLKDAVDAAKTLAGNRLLELHQTQEDNLILSKELGDLEGQLKDEKYVLVSKPYMILNDKLQHLNAEIERYRGLVEVLQNDKDQLMQREKEISAKAESLDSVKQTIITYEKKIEELETQIQILFSEKNDLETKVEETLQDSGKKDFKNEIHVMAAALSNELGMMENQLSRSKDAASEALALREQAESLRSLVAKKIEEHKKISDKYNSQVIEIKSLKALVEELEQEKQELEFIADMYVKESSESRTIADIEESETRARNQAEYLRSNLEEHSLELRVKAANEAEAACQQRLSFAEVELEELRTKVDASERDVVELKEAIRIKEAEGDAYISDIETVGQAYEDMQTQNQHLLQQLTDRDDFNIKLVSDSVKMKQACSSLLSDKLMLEKQLQQVNTSLESSKLKIARGEEQMKTCVAQAIKTSAENRHLTISLERIALELSNTDKELKWLRSSVGSSEKEYEQTQQKISELRALLEHERSERRRLEEQYEEVKNEVMELTSETEETTVRKLEDEIKECKGILKCGVCFDRPKEVVITKCFHLFCSLCIQRNLEIRHRKCPGCGTPFGQNDVREVKI

SEQ ID NO: 61634 - protein, 182 aa, Zea Mays
MNWLFFHSRRPRLFSPRRACRSAHSAATTLPPPPRASAARGPDMEGAAGEEGASTPAARGGAEAGAGAGAGGGMLKGRSCKGCLYYSSKLRSRARGPVCVGVTRALPQVSERKVGKLELEAIQEGRYLADFRYACIGYSMYLNGKETPTGVRDKPRAHLPVCAGVELQNHVNINQGMQEMIS

SEQ ID NO: 61635 - protein, 57 aa, Zea Mays
MFGSAAPNDIIQSSTTCHNYSCYQIIQLKLSFRTNSIQTPELFRLLHHSVHGHYNSN

SEQ ID NO: 61636 - protein, 60 aa, Zea Mays
MFKLLHETIKKTMLSYSLNLPATISGFLGRSLKMRRANIEKKECTCLQSKLAVEWENGKK

SEQ ID NO: 61637 - protein, 488 aa, Zea Mays
MAGAEGRGPRRSRVAFVLVDGIGDVSVPSLGGRTPLDAACAPRLDAVAAAGVTGLMDPVEPGLACGSDTAHLSLLGYDPREYYRGRGAFESMGAGLAMAPGDIAFKSNFATLDENTGVIISRRADRHFEEEGPILCAALDGMKLRSFPEYEVRVRYATEHRCGVVVKGPKLSGNISGTDPLKDNRLHLKAEPLDGSEEAKNTAAVVNELSMEITRILVSHPINAKRAAEGKNIANVVLLRGCGIRIEVPAFETKHGLAPCMVAPTKIIAGLGLSLGIDILEAPGATGDYRTLLTSKAKAIAKALSAPMDTPPRVFVPGEDGYKAGKENGYDFGFLHIKAVKLKVRGLEAVDRAIGQLARLLWEAEKAGHYQYFLCVTGDHSTPVEYGDHSFEPVPFAICRLRDYAGAIGEDNIMNTQLDDFPLPSVKSGEDLLDSIESLEHKPGQLKAFSGDSVCEFNEIAAARGCLGRFPGSEMMGIIKKFIKAKND

SEQ ID NO: 61638 - protein, 330 aa, Zea Mays
MGMGPLDNAASAALEAAAAAAAAPSRAGSYAVLQCGEDSEYVRQKYGGYFAVFRALLEEDGERWRVYSAVRGELPADAEAAGFDGFVISGSCADAHGDEPWILALVDLTRRVHAAGKRVLGVCFGHQILCRALGGRTGRSAKGWDIGVSCIHPTAAAARLFAPLKLPVHMPVIEFHQDEVWELPPGAEALARSDKTRVEMFRLGGRAMGVQGHPEYSKDVLMSIADRLLRHNHILVINHNSNDSVPSVRLSLCLSVCLSVCDMEKKYLSLFCLLLAGLPGGSGQDELRRAAAGQGAVEQGVQGLPQGKAPVVAAARCGAIAGGNWGALDA

SEQ ID NO: 61639 - protein, 60 aa, Zea Mays
MVTTSATSHNPCRRRLLHPAVAMGKFRKLDRGYSHRLSMLRTMVSQLVKHERIETTVAKA

SEQ ID NO: 61640 - protein, 82 aa, Zea Mays
MIEHDGSAKGIVFSQFTSFLDLIQFSLERSGIKCVQLNGAMNITEKGRAIDTFTHDADCRVFLMSLKAGGVALNLTVASHEH

SEQ ID NO: 61641 - protein, 188 aa, Zea Mays
MQAKVVDNGVRGGELAAQPGDEAIALVDEPGDGLGHGGAGGRRGDDGGGGGHRRASLTTAGRSIAQPAMPRFLQENPEYVAQGVTLAQFSFQIPIPLRQDYVKKKPKLINASDEASTITSKSSEPDEVNPIAWAVPTKHEGDASEEASLADETLASEVVLTRKRKIGSSLSVEPNHLSDELEPKLEDA

SEQ ID NO: 61642 - protein, 95 aa, Zea Mays
MGRNRKVKKRQFLQLQNQVRLPRRARMTMILMRTRLMILTRTRQTILMRVRVCLLKKAMMMIQVMKMIPVTMRRKTLQLLRSMRQARRELLKVSC

SEQ ID NO: 61643 - protein, 165 aa, Zea Mays
MHADYTGKGFDQLMDVIDKIKNDPDDRRIILSAWNPSDLKKMALPPCHMFAQFYVENGELSCQMYQRSADMGLGVPFNIASYSLLTYMIAQVCDLSPGDFVHVIGDAHVYRNHVRALEEQIQKMPKPFPILKINPSKKDIDSFMASDFKLVGYDPHQKIEMKMAV

SEQ ID NO: 61644 - protein, 434 aa, Zea Mays
MLSSSASRRDAARSGAELPRPHAVAGMARSGELPKGAPSATAPDAVRCEGWMVRHGRRKIGRSFFHTRYFVLDNGVLAYYKKKPRDHMIPLKSIIIDGNCRVEDRGLKTHHGQMIYLLCIYNKKEKENQITMGGYDIEDALAWKRKIELLIDQQQDTTTAKNHKAFASLDFDIDLGGPFSFSDHDSGPEDEEEPRPTLLRRTTIGNGPPDSVLDWTKEADSGLSNQNATSQAYSRKNWRLLRCQNGLRIFEELVEVEYLARSYSRAMRAVGVVEASCEAIFGLVMSMDASRYEWDCSFQYGSLVEEVDGHTAILYHRLQLNWFSMLVWPRDLCYVRYWRRNDDGSYVVLFRSTENQNCGPQPGFVRASIESGGFKISPLKSLNGRPRTQVQHLMQIDVRGWGVNYLPSFQYYSLLQMLNCVAGTKNTQLFNLIA

SEQ ID NO: 61645 - protein, 105 aa, Zea Mays
MSMKELLEAKHPTAWSEFEKGLIDENELAKKFFKDGRSFDLQGLKECMVRAYEYIDGVEDILCCLKKNNYEMHAFTNYPVWYQLIEDKLKLSKYLSWTFCSCRTG

SEQ ID NO: 61646 - protein, 458 aa, Zea Mays
MYPAFKGDKSKILPVKMPICSCEETIHEFEMLTRDAGRVQKDTLKKILELNADAEYLNKFGLNGRTDVESYKSCIPLCVHSDLEPYIHKIADGDSSPLLTGKPVTSLSLSSGTTQGRPKFLPFTDELLETTLQIFQTSYAFRNREYPIGRGKALQFIYGSKQVVTKGGILATTATTNLYRRARYKEGMKDIQSQCCSPDEVVFGSDFHQSLYCHLLCGLIYSDEVHQVFSTFAHSLVHAFQTFEEVWEDLCADIRDGVLSEKVTVPSVREAVTKILKPNPELADSIYKKCTGLSNWYGVIPALWPNAKYVYGIMTGSMEPYLKKLRHYAGHLPLISADYGASEGWVGANINPTLPPEQVTYAVLPQTGYFEFIPLEVENSASSIHYLESEPVGLTEVEVGKTYEVVITTFGESAQLGCIHQSYALSTWSNYCLYLWSKSLQAAAYPLMFVGSCCIRYL

SEQ ID NO: 61647 - protein, 1157 aa, Zea Mays
MCADIIVGNELMRGISGGQKKRLTTGEMLVGPTKVLFMDEISTGLDSSTTFQIVKCIQQIVHLGEATVLASLLQPAPEVFELFDDVMLLSEGQIVYQGPREYVLEFFEVCGFRCPQRKGVPDFLQEVTSKKDQEQYWIQNEKPYHYVSVPEFVAKFKKFHMGKSLKKQLSVPFHKRKIHKSALVFSEKSVSTLELLKVSWSKEWLLMKRNSFVYIFKIVQGILVALVASTVFLRTQMHTRNEEDGQIYIGALLYVMIVNMFNGFAESSILLARLPVLYKHRDFLFYRPWTIVLPNVLMRVPASIFESIIWVAVTYYSIGFAPEASRFFKHLVAVFFIQQMAAGLFRLVTGLCRTVIITNTAGSLAVLFMFTLGGFILPKDAISKWLIWAYYCSPLTYAYIALASNEMHSPRWMDQFAPDGRRLGVAILENSSIFTGKEWYWIATGALLGFTVLFNVLFTLSLMYLNPVGKPQAILPEETDTSLEDSEEGKKMTDITQRTKIPTPEPLSSNSMITLDKVLEQLRGQSPNTSDRSHMNASVRITPGRGMILPFEPLSMSFNEINYYVDMPAEMKSQGVTADKLQLLSGISGAFRPGVLTALMGVSGSGKTTLMDVLSGRKTGGYIEGEIYISGYPKNQETFARISGYCEQNDIHSPQITIRESLLFSAFMRLPKEVTDQEKKIFVDEVMELVELNGLKDAIVGLPGVNGLSTEQRKRLTVAVELVANPSIIFMDEPTSGLDARAAAVVMRTVRNTVNTGRTVVCTIHQPSIDIFEAFDELLLMKRGGQIIYSGPLGRNSHKVVEYFEAVPGIPKIKEGCNPATWMLDVTSASTEVQLNIDFAEHYKSSTMHQRNKALVKELSKPPPGSSDLYFPTQYSQSTFDQFRFCLWKQWLTYWRSPDYNLVRMFFALFTALLLGIIFWRVGSKMKSSSDLLIIVGSMYFAVAFIGFENCITAQPVIAVERTVFYRERAAGMYSAIPYAFSQVVAEIPYVFVESVIYTVIVYPMMSFQWTLAKFFWFFYISFLSFLYFTYYGMMGVAITPNPQVASIFAASFYTLFNLFSGFIVPRSRIPVWWIWYYWICPVAWTVYGLIVSQYGDVEDLIKVPGKPDQQVKAFIKDYFGYDPDFMGVVAAVLAGFTALFAFIYVYCIKRFNFQQR

SEQ ID NO: 61648 - protein, 693 aa, Zea Mays
MRRGLRRGLGILLVPLPHAPSRLPPISLAALLPRRFNGFSRHSFCSFPVGERAVEQFSDDEYDHEYEDLRPSSSVANIDEWRWKLSMLQRNAEEQEIISRDRRDRRDYDQIANLAKRMGLYSEMYGRVVVASKVPLPNYRPDLDDKRPQREVVIPLGLQRRVEGLVQEHLDRAFLPLNKCGGNTKNGSDMTENANLDEQHDSLLDRSVMEKILQRKSIRMRNFQRSWQESPEGAKMLEFRRSLPADKEKERLLAAIARNQVIVISGETGCGKTTQLPQFVLESEIESGRGAFCNIICTQPRRISAMAVAERVSTERGENLGESVGYKVRLEGIKGKDTHLLFCTSGILLRRLLSDRNLNGVTHVFVDEIHERGMNEDFLLIVLKELLSRRRDLRLILMSATLNAELFSSYFGGAPTIHIPGFTHPVRAHFLEDILERSGYKLTSSNQLDDYGQDKVWKTQRQLLPRKRKNQITTLVEEALKNSSFEIYGSRTRDSLVNWNPDCIGFNLIEAVLCHICRKERPGAVLVFMTGWDDISCLKDQLKAHPLLGDPNRVFLLACHGSMATSEQRLIFEKPPPNVRKVVLATNMAEASITINDIVFVVDCGKAKETTYDALNNTPCLLPSWISKASARQRRGRAGRVQPGECYHLYPRYKKFASWKHWGVPISCSTASRTTSCRECSGILEDDWSIRWK

SEQ ID NO: 61649 - protein, 525 aa, Zea Mays
MEAEARNILERAAESSFPPLHAVHHLLSVGVCVRCILRLLGAYSSACSYACLTASVLHSFLEEHDESIKGGSCPCLSMNDAYCSVCLGVLLPTFHRDEGLETPNGISHIDNMSSVISQAVHGESYQVDEFSLEISLPPVIAANERAVRLYMKQKYGNENWFKDKMFAQQTMSVKEALRLLIAPSLEKLMNAKHGNNSFRIRLTYTHGDASQKLHSLLPNEHSRKRKPDSRKGGDASNEAHKRNSADGNPIQTSESDSFIYKSLEGIQDQEFCNAFQLPPEKVFKPCHLLISCLRSPTYLGGRYLKLSRNVSQSCWIIDDERMGEASVEEIIGENVRAICRGDSCKFHAAGREDIDVRMLGSGRPFLVEVLNVRSIPSETEVQQIEERINNSEKKYVIVRNLKLVDNEIWTMMREGEAEKQKQYTALIWTSRDLTDDDLHNISIMKEMEIVQKTPIRVLHRRSPLERKRIIHWMEIEKITGSSNYYLLHLCTQAGTYIKEFVHGDLGRTHPSNTTILIGLVPLCLL

SEQ ID NO: 61650 - protein, 821 aa, Zea Mays
MMEDSSVCSKVLSGETTKQLLKLLGPGNETSIRAEAAGALKFLSAQSKEARRQIANSNGIPALINATIAPSKEFMQGESAQSLQENAMCALANISGGLSYVISSLGESLESCSSPAQIADTLGALASALMIYDTNAESISASDPVDIEKTLLKQFKPKVPFLVQERIIEALASLYSNPVLCKTLADSDAKRLLVGLITMAATEVQDDLTKSLFALCKKDCDLWQALQGREGVQLLISLLGLSSEQQQECAVALLALLSKENDESKWAITAAGGIPPLVQILETGSPKAKEDSATILGNLCNHSEDIRACVESADAVPALLWLLKNGSDNGKEIASKTLNHLIHKSDTGTISQLSALLTSEQPESKVYVLDALKSLLSVAPLDDILHEGSAANDAVETMIKILSSPKEETQATSATALAGLFHCRKDLRETHIAVKTLWSLMKLLHMQSNKILMGASCCLAAIFLSIKQNKEVAAIARDALTPLVSLANSSVIEVAEQATRALANLFLDQELSLQVSFEENLFRVTRVLREGTIDGRTHAAAAIARLLQCRTVNQPLSDTINRSGSVLALAELLEVANGEAAATSEVLDALVLLSRSKASSGHTKAPWAILAENPHTILPLVSCIADAAASLQDKAIEVVSRLCSDQHDVIGGLVSETPGCISSIAWRIIGSNTLKVKVGGCALLVCAAKEHCQKQIEVLNDASLYIQLIHSLIDMIHMANTPAENVSSESISDIRISRHSKENYSDGETVCRTAVISGNMIPLWLLAVFSRHDSKTRAELLEAGAVEMLTEKISQNAFQYVKIAPHGCVPCFLLCYSKKER

SEQ ID NO: 61651 - protein, 1673 aa, Zea Mays
MPDGLIRSPTRTRPRSVVAAAVAMGDHSDSDSSPKSSSSSSSPSARRRSSPQRSRAHTDETGSSDGVLVELPTQEARSPGADPDSGVLVNMPADDATSGETFDDAPEDLAAAGSLSARSLDESIAVIDFPEVSSTSAELRKYQEEKAVFAREAVALRRLLQEMLGQEASVALHGEDADETLLHSMLDDCSRLVLELNSMARAREQEIESLHARAAEAEVSSEVAHVYLGSWREGSEQAVGRMLASIDAVVRQDDASFEGADQDGISILERKTSLLVERYRQASMGIEQLEQILAEVKPGFAATGHGDLATTLSVLSDELVGSKRNEVDLLQKMNAFAEEKKAIADELEEVKAARNAVNAEASKAKAEFEQMEQKLSTTKEKLSMAVTKGKSLVQHRDSLKQALAEKTGELQSCMTELQKKSDALQAAESRVDELQIFLDEKTSEHEKCLDELRDTYSAWEAAKTSMEQLNESKSALHASLSLKDGVFERIEDIMSEATFPEDLLSLEMTDRLGWLVEQKKIADMIFSEHQKVKEILSSVDIPHSVLTSELDSQISWLASSLNQAKDDAVRLRDESAEMLAKMAAHESKLVSMHEEIDRLTIILLEEKQEKDILLNEHSELMSLYKAAVNKLSLVSSQNNELLKAFAEFFDVTLEGSQSMDIAKLVQQGLRNIQQRPKSSPIESGSFEKLQALLYTLDQESTLCKMILEEDMINRSERTGELQRMAEEIIVLKNEKVSLQKEVERVEERSALLREKLSMAVKKGKGLVHEREGLKQALDEKRSQIENLKQVLEGKSSEIEKLKHALDENKSVTENVKQVLDGKNTEIERLKHALGDSCVETENLKQAFAEKTSEAYKIKQELDAKNMDIENLRGAIESRESAMTDLREHVEHLLSSQVARLEKLQVDIVTLNDEKVKLESMLEEARASWDTLADSISSLTLPIDQPFEGPMEKFSQIAQYIQESQVAKSSLENELQKANEQITLHASRHSDALSTINMLEHELSKLKDHISSISEEKRQMQLNTSAVQEELEKTNEELAINFRNLESANTTINSLQDALSQARSNIFILAAEKNEAEAKYETEINALNAELTKCLEELDKTHGHLQSHSTEYHGYLEKLGMFMMDDSLLSLIAEEYGKTFNSLRDMCLIVKSMHEQLSVKSFQNDSIVEDSELSSLLSLPDYESFVRERLVKNINRKGNIDDTSSFSTIVEQLSNQTEYLSSFLKDLSTYMNSNIIVVLRSLQLVSNTFAHTLEEHDMLKVELGNKDAHNRAQESEVLSLQKDLRAMSSKCIYCVQQIEIVFDDMVDLGYAIDLATGSSSIGSELEVTVSDLKNEDTSDYSKVADTLLATIDTLKSKSEKLSTIKGLVITSLDDFKMKLKQAEAAAETASHEHQLSVERVCMLEKELKILQDECNKMELNIQEYKEREGALKARELELLSVEHTQISADRGLTDNAISKDQTEALVEKISKLNMLSGESNVQREEATSPLDKLFVVIDEFSALQHEELGAKLQSREKAVDELSTKVKMLEDLCHAQLSQPEPSKDRSFEASSSTIGSDMSDIEDAGPVGKTTSVSSVSTAAHARTMRKGSADHLVVNIGSESERLIAAQDSDDKGRIKSLHTSGFIPAQGKHIADRVDAFWVSGSQILMNRPRARLGLMLYWLAVHLWLMGSIL

SEQ ID NO: 61652 - protein, 540 aa, Zea Mays
MAANHNADDAAREPVASASPPASEAEHRALLRPSSFISAISDDNEGCKERAFEPSEKVIVSVSGDPEGDASEERAFYASGGCMPPFSWRKLWAFSGPGFLMSIAFVDPGNIEGDLQAGATAGGTLLWVLVWATAMGLLVQLHAARLGVATGRHLAELCRDEYPDWARRALWLMAEVALVSADIQEVIGSAIAIKILSHGLLPLWGGVVITALDCFMILSLENYGVRKLEALFAVLITTMACSFAWMFVETEPSGKDLFIGILVPKLSSRSIKQAVGLVGCVITPHNVFLHSALVQSRKIDPDKEYEVREALRYYSIESTLALVVPLMINLFVTTVFAKGFYGTKEADSIGLENAGKYLQEKFGGDFFPILYIWGVGLLAAGTSSTITGTYAGQFIMGGFLNWRLKKWIRALITRSFAIVPTIIVALYFNNSGYELDVLNEWLNVLQSVQIPFSLIPLITLVSKEEVMGVYKIGPRMKILTWIVASLPILINSYMLLDFFSLEMGGMLYNTTLCVAVVAYSMFILYLIFRGMKFPSYLTTT

SEQ ID NO: 61653 - protein, 209 aa, Zea Mays
MEKGDLHRWLHELPAGRPDMDDTGSGDIWEAAEVKRSISDWPTRHRIALGVARGLAFLHQGWAGGSGRAAVVHGHLVPTNVLLCDDLEPRISDFGHNNDPPSAATPEGDVYGFGVLVLELMTGQAGWDEASVSWARGIIRDGKGLDIVDPRVRDEAAGAEAEAEREMVECLRVGYLCTAHAPDKRPTMQQVVGVLKDIRPAPPTPGPGS

SEQ ID NO: 61654 - protein, 1129 aa, Zea Mays
MSKMCHACASEETTMNEANIDLACSTSCCKMCDYGEGSSIVTSEINWLAMDSSPYSTPYGTPVFSRENSFSSFASCFSSLGDSLTDSDSEEEIELQDTGQFYHDTILIKDFMEQEESFVRVEECQFKDIADDCAIFSIPINQYISSAEQQLERHEDSNKGNFDTINISLDSDISYEQRKDILSDDKHVRTKCAVPVEDIDHKESGAIVVEQITSLPMPGGDIFPLNEQVMDGLSSTLENTIVYNNILNTEPEMKHGTHFENENECLYPLALPSFEADPLIWLPPEPENNEDDFDTVSNDDDESGNNSTGWGRSSFKVNLAERNKESRDDQLQKVMSEVMNGQFKILVSRFLAAEGLSLSDGGTDKNWLDIVASLSWDAALRVKPEANSGNAMDPGSYVKVKCLASGSYQQSEVINGLVFKKSAAHKQMRANVKHPKLLLLQGALGHSSTGLSSINSMKQENDQLERTLYEVIVKCQLDVILVEKAVSRNVNEYIQKQGVTVVSDMNTHRLERIARCIGSPILSLQSVLMKPSLIKQCESLHFEKFVEEHNITGEDGKKSCKTFLFLEGFPRPLGCTILLKGATREELKKIKRVLHFTVFAAYHLILETSFFADQKLFTTDKTTTGKEKCFKTNQQLLGSCYDNSKNSDTMNNTPTCDDQYPNQEKLIHTEKSVPLHLHDSKTMASEDSAGEEHIDSKGIQSYSSLPVSDPSTNFMQDMPSPDCAESKISGGFDGSTFTDTSKEVQKKELSSDNFQGTFDVICAESGAALNTQDILVSMSSQHIRNQAVCEQSHLSRITYYGYFDTSLGRYLQDTLLNEKHSCLSCGESPESHMYSYTHHNGTLTVLVKRLPLELTLSGETQGRIWMWTRCLRCNAKPTHRVIISSSARNLSFGKFLELSFSTHSATKKLPTCGHLLHRDCLRFFGFGSRVAMFIYSSVEIYSACKPPLSLEFNNRNKNDWLDIEVKNVLLKWKQLFTTIENVIQDLRSRYSSQAMGEDTNVSVDEDEGLLLEVSRMLTQEKNKVEVSLREFSRIAIPESFAHGILGLNWLYQQLLLGFYIWDLRLLHILQYTKVNTASSDNSIHESTAKNEPKSSASIAIQDTPSLKEIGTERKEATINSSGNFDDPFG

SEQ ID NO: 61655 - protein, 300 aa, Zea Mays
MCSNPRISGWGGWDEGEANGRWIKEMSMAVQFSMASSRKVRNANKRYTKINEDWQDKDETNVHKSKVRKKKLSDMLGSQWSKDELERFYGAYRKYGKDWRKFFLCPSRQNRDIKIHLVAGAIRDRTSEMVEALYNINKAYLSLPEGTATAAGLIAMMTDHYNILDGSNSDHESNDSPKASRKPQKRGRARFQSVSKTSDARYADLGQSQPSSSSYGCLSLLTKKCAGDLLVGNRPRAVGKRTPRVPGASIYYRDDRGVTDRRAKTVANNGDDEGAHVAALALAEVFQRGGSPQVSETSKW

SEQ ID NO: 61656 - protein, 542 aa, Zea Mays
MNKLKVLLLFILACDILVFMLSSGPFRVAPYIRVVFLIMTISWLAYVTFEDTPQGKTIFTSYGTTLYQMFVLFTTSNNPDVWVPAYKSSRWNALFIVIYVLLGVYFLTNLILAVIYDSFKEQLAKQLAQMDSIRKSILQKAFDLIDTNGQGYLNKEQCISLLDELNKYRSLPKTWREDFELIFSELDRSGDFKVTSEEFADLCNTIAIKFQKEPPPSYLEKYPSFYHSPQCERLKSFVRSRLFEYIVVFVLLVNLIAVVIETTLDIENSSSQKVWQEVEFVFGWIYVVEMALKIFSLGFGAYWMEGQNKFDFVITWTIFIGETLTFAFPSTLPFLSNGEWIRYLLLGRMLRLTRILLQIRRFRAFVATFFTLMSSLLPYLGTVFCILCVYCSIGLQFFGGIVYAGNLKLEETDLFGNDYLLFNFNDYPSGMVTLFNLLVMGNWQVWMESYAHLTGSSWSLVYFISFYLISVLLLLNLIVAFVLEAFFAEMELEKAGEADTQDSTPQGRNKRRSMRVRTKGTMVDILLHHMLSNELDGSQNSD

SEQ ID NO: 61657 - protein, 257 aa, Zea Mays
MASPDLLFNLRNLFYLGAYQAAINNSDVPGLDADAAAERDAIVFRSYIALGSYQLVISEIDSSAATSLQAVKLLALYLTGDKEGAISSLKEWLSDSAIGSNPVLRLIAGIVFMHEQDYNEALKHTHSGGTLDLHALNVQIFIKMHRSDYAEKQLKIMQQIDEDHTLTQLANAWLGIAVGGSKIREAYLIFQDFAEKYPMTGMVLNGKAVCCMHMGSFEEAETLLLEALNKDAKDPETLANLIVCNLHLGKPSSRYLS

SEQ ID NO: 61658 - protein, 301 aa, Zea Mays
MVGGAGGEVIGGGGCSGEVVVVVVGRAEIDTRAPFRSVKEAVALFGERVLAGELSAGRRGPLSSVTEPTRSSIAQNRMAATRPKHHAMSPATGAVTTAALRAVPPVVVTAGQLEEAKQKLEKEREEKQKMAGCIQTLQEELSHAMEELKRLKARDDEEAAGTKVIDLEIDEGLYFTEAAEKQMAPPPQGAAGGAGELQKKRYVTFADPPTVATTAAAACRAPPLPDVVMEVHRAPTHQLHQPHPHYYREPRFQRQMSAGHEAAKAMADEGRKKKKPLIPLVGALFMRRKKSSKSCHDDVAF

SEQ ID NO: 61659 - protein, 1449 aa, Zea Mays
MLELFVLNAGKVSSEVLMTLNTMIMQWPPLVEVAETRQLPPMLIERYNTAAGEGTALCGIFSDIHRAWATVDNSFFIWRFDKWDGHCQEHNVDEQAICAVGLARAKPGIFIEAIQYLLVLATPVELILVGVCCSASADGTDPYAELSLQPLPEYMIATDGVTMTCITCTDKGQIFVAGRDGHIYELQYTTGSGWRKRCRKVCLTTGIGSLLSRWVLPNAFKFSTVDPIVDMVMDEERNTIYARTEGMKLQLFDLGVNGDGPLTKITEEKNIVDPRDGPYGGRRSNAPRAARSPRPSIVCISPVSSVESKWLHAVAVLSDGKRLFLTTSGGSGSSVGLNSGLQRPTCLKIVATRPSPPLGVGGGLTFGAVSVAGRALPEDLALKVESAFYSAGALVMSDSSATAMSSLLAVQKDSAAQLSLPSTFGTASRTSRALRETVSALPVEGRMLCASDVLPLPDAAYMMQSLYADVECFTCFRKPSEKACIKLWAKGDLPTQHILPRRRVVVFNTMGLMELIFNRPVDILRKLFDGNTLRSQIEEFFNRFGAGEAAAMCLMLAAKLLYAEDSLISNAVSEKAAEAFEDPGLVGMPQINGTTALSNTRTQAGGFSMGQVVQEAEPLFSGAYEGLCLCSSRLLYPIWELPIMSIRGPSGNNKREDGVIVCRLSAGAMKILESKIHSLETFLRSRRNKRRGLYGYVAGLGDSGSILYKTGPIIGPGGHSNGRSPYNSQIRDMNPVDKSASNKKPRLLYTSAELAAMEVRAMECLRRLLRRSGEALFLLQLICQHNVARLAQTLGNDLCKKFVQLTFHQLVCSEDGDQLAMRLISALMEYYIGPEGRGTVEEISTKLREGCPSYFNESDYKYYLAVECLERASMTNNADERDILARDAFNLLTKIPDSADLSAICKRFENLRFYEAVVRLPLQKAQALDSNADIINGQIDPRHHDTIMLQREQCYRIVMDALCTLKGVGHSRMQSADKSSALATAADPASRSKYIKQIIQLSVQWPDTVFHEHLYRTLIELGLENELLEYGGSDLVSFLQSAGRKHQEEVRAVSSVTPGAAKMHDLGAPISTSQTKYLELLARYYVRKGEHIAAARMLLILAERQCSNSEEAPALDKRYEYLRDAVLQAKSAGIAADLSKNPVDSSTVDLLEGKLVVLRFQIQIKEELELMVARLENIPSSSELPNVPFPRDNILANAETAKAAKDKAKELSLNLKSITQLYNDYAVPFDLWEVCLEMLSFANYSGDADSKIVREVWARLLDQALTKGGVAEACSVVKRVGSKLDPADGACLPLDIICLHLEKAAVDRLSSGEELVGDDDVARALLGACKGLPGPVLSVYDHLLSNGAIIPSLNLKLRLLRSVLAILREWGISVIAHRLGTTSAGASFFLDGTFSLNQTGTANQGARDKIISLANRYMTEVRRLNLPQNQTENVYRGFRELEEKLLSSY

SEQ ID NO: 61660 - protein, 311 aa, Zea Mays
MAVVYLVALTFLLFQTRDDARQFMKYLHPDLGVELPERSYGTDCRIYVPDHPKSRFNNVYEIIFDEFVIAHILGWWGKAIMIRNQPLLWVLSIGFELMELTFRHMLPNFNECWWDSIVLDILICNWFGIWTGMRTVRYFDGRTYEWVGLSRQPNIISKVKRMLGQFTPAQWDKDEWHPTRGPWRFIQVLSLCVVFMAVELNTFFLKFCLWIPPRNPLIVYRLVLWWLIAIPTIREYNTYLQDSKPFKKVGSFCWLSLAICIVELLICIKFGHGLFPKSMPSWLITFWSAVALLLVLFVWTWKYRTMKRKMI

SEQ ID NO: 61661 - protein, 563 aa, Zea Mays
MGWSPRPPPITRSTASLRLVPHFSHFRFSFHRAQESRGGGGSRRRTLRCCGGTAPAAAAGAAEGRMAAATAADMVWVRVLEDGVFRFDASEAARAAAGPSLSFADPRRREAPHDGADMPAVVPVCEVAAGGSQKVVIKLPPGTSFYGTGEASGPLERTGKRVFTWNTDAWGFGPGTTSLYQSHPWVLAVLPDGKALGVLADTTRRCEIDLRQESTIKFSALSAYPVITFGPFNTPADVMTSLSHAIGTVSMPPKWSLGYHQCRWSYDSSEKVLKVVRTFREKDIPCDVVWMDIDYMDGFRCFTFDSIRFPDPISMVDDLHSIGCKAIWMLDPGIKKEEGYFVYDSGSKSDVWIQKADGSPFVGEVWPGDCVFPDYTSEKTRAWWASLVKDFISIGVDGIWNDMNEPAVFKTTTKTMPESNIHRGDADIGGVQNHSYYHNVYGMLMARSTYKGMEMGNAAKRPFVLTRAGFIGSQRYAATWTGDNLSNWEHLHMSLPMVLQLGLSGQPLSGPDIGGFAGNATPKLFGRWMGVGALFPFSRGHTETGSIDHEPWSFGKEARYVHR

SEQ ID NO: 61662 - protein, 421 aa, Zea Mays
MGNSQASPASASSSRFVMASRAFPKQELDGLRELFASLAAQSRTGGRAISRPVFLVRGRLGDRLFQLVAKESGGSDGVTFEDLIISKATYGRGTRDEVDEFIYQLCDVTGDGALTRSDLESVLASVHETVFAIKKEAVEVSNNRPFEEFLNSAVFSKDVEGVSGKSMSLSDFRNWCTLLPSLRKFLGNLLMPPDSGRPGFEVPLLHYPENICTDTLLLNKEYAWHIGGGFSQHEVQEWKLLYHSSLHGQSFNTFLGKVTNGDAQTVLIVKDTEGSIYGGYASQPWERHSDFYGDMKTFLFKCYPQASIFRPTGANKNLQWCAVNFSSENIPNGIGFGGQPHHFGLFLSANFDQGHSFTCSTFTSPPLSKTNRFRPEVIECWGIQMRGAQDEKLELVKGTVLERFKEDRNMLKMVGLANASD

SEQ ID NO: 61663 - protein, 347 aa, Zea Mays
MAAANAPIAMREALTLTSLGIAPQFVTFTHVTMESEKYICVRETSPQNSVVIIDMAMPMQPLRRPITADSALMNPNTRILALKAQIPGTTQDHLQIFNIEAKTKIKSHQMPEQVVFWKWITPKLLGLVTQTSVYHWSIEGDSEPTKMFDRTANLANNQIINYRCDPAEKWLVLIGIAPGAPERPQLVKGNMQLFSVDQQRSQALEAHAASFATFKVVGNENPSTLICFASKTTNAGQITSKLHVIELGKPGFSKKQADLFFPPDFQDDFPVAMQVSQKYGLIYVITKLGLLFVYDLETAAAVYRNRISPDPIFLTAESSSTGGFYAINRRGQVLHATVNDATVVPFV

SEQ ID NO: 61664 - protein, 296 aa, Zea Mays
MPSPLGGRIQFGPGKAGMPSASLARRLLSTISSPAIPSRSTSTSASNSNSCGFSTRRARKKRSCVSWTVSAATPADMATNSGSALAKLAPLEAILFDIDGTLCDSDPIHFCAFRELLQQAGFNGGVPITEEFYSANISGGHNDDLARSLFPGMDHQKAMRFMDDKEAMFRKLAPGQLKPVDGLQELCGWMEGRDLKRAAVTNAPRANAELMLSLLGLTDFFPVLVIGSECDRAKPFPDPYLKALQLIGASPQHTFIFEDSASGVRAGVAAGVPVVGLTTRNPGKVEVEPAAANAQG

SEQ ID NO: 61665 - protein, 851 aa, Zea Mays
MSRKPLLPTCGSSTPPPLLLLRRFLPRRRATSSPPPPSTRRRTAAMPPRAGDSAAAAAAAASFRLGMVRVVSFLVGGLNLAVLLLGLYIIDAVLPSGCGGGLAFASAPALAGVRVLSMIGAARAQHATADAIAKRHLHESDASVAADAVARHEIRVRYKRWLWWTRFGMAVGALQLVAAIYLMFVIVRDLSNERRSTSCFFGQDKADRVSVRALIALFLILSWVVIIVQCFTGSDILRWRSFYATHDMAWKAHYREVFDHGIREALCCLGRAKYLTVLEEDEVYSVARLLGDLVAYRASGTGHLELLAGLALLQKHGNLSELQTDLVEASHELMQEAAFLHPFAEACYTGPLLDFGRNPILFPCAWVYRQGVLTPWARRRRPALDGDNWWRGHAAAFLRFVNIPPKALLKGRVCQSKREAAYFVVVLHDKRTVVIGVRGTETPEDLITDGLCRECAFTMEDLDGLVNSEQLPATTRERVISTFPHYGHGGIVESARELFMQLNGENTSSGRLGFLSTLLGEGSECHGYKVRLVGHSLGGAVATVLGMMLYGKYPSVHVYAYGPLPCVDFVIAEACSHFVTTIICNDEFSSRLSINSILRLRSAAISALSDNSPADTAMIQKLARRILHVNRYHDNGPDDGIIQGYADHTRTADTTVPNERQISHQIPLCNTELDLHNTQNGFFRYNGSSASIDEHLSYEGISSGHDMQIIPLDGADSGFEGHQTSYREIPVEPPEMFLAGLIVHIVRQRRSLFPLWKCWSIQETEPPYKAVLAKRENFRDIVVTPYMFTDHLPWRCHFAMQKIVEAQTPMRRAHSDPPVQQHLHGLLQAGPLEAYFSPSGSQNMSVTDPKS

SEQ ID NO: 61666 - protein, 754 aa, Zea Mays
MHRVGSAGNTAGSTRPRKEKRFTYVLNDADDKKHCAGINCMAYLNGSTFSTSDYLFSGSRDGTLKRWELNNGDASFSATFESHVDWVNDAIIVGEKLVSCSSDTTIKVWNCFSDGACTRTFRQHSDYVICLAAAEKNSNIVASGGLGGEVFVWDLDAALAPVAKSVDAKEDEVPNGNSGPPLTTLCSVNSSSNIASSNSQSHGYSPIAAKGHKDSVYALAMNDTGTLLLSGGTEKVVRVWDPRTGSKNMKLRGHTDNIRALLVDSTGRYCLSGSSDSMIRLWDLGQQRCVHSYAVHTDSVWALATTHSFGHVYSGGRDQSVYLTDLSTRESVLLCTNECPILQLSLQDDTIWVATTDSSVYGWPAEGLTPQKVFQKGGSFLAGNLSFSRARASLEGSAPVPVYKEPSFVVPGVPAIVQHEIMNNRRHVLTKDTTGSVKLWEITRGAVIEDFGKVSFEDKKKELFEMVSIPAWFTMDARLGCLSVHLDTPQCFSAEIYAVDLNVSGAQEDLKINLAHDTLCGLLVHWSKRKQKSSSHGLPNGDSSIGKDVPSKDSHRSRTEVDDTTENHTTHVLPSFEFSTVSPPSIITEGSSGGPWRKRITDLDGTEGDLPWWCVDCVTHNRYPKENTKCGFYLHPAEGSPAPNITQGKLSAPRILRIHKVANYVVEKLVLDKPLDGGSDSTFVMGLSSAQSQLSQLDSSSRLGLKPWQKTKPCIEVLCNNQVLSPDMSLATVRTYIWKKPEDLILHYRVVQSR

SEQ ID NO: 61667 - protein, 416 aa, Zea Mays
MSAPLDRLARPCFEGFVHNDERKESRSDADNSEGDKKTKIGSFKKKAINAGNKFRHSLRRRSKKKTERGDSIKDIRDIKELQDVETFRQCLIDEDLLPPQHDDYHMMLRFLKARKFDVEKAKNMWSDMLKWRKEFGVDKIEGFKNFSKSARELITRLQKIDNDNYPETLCQMYIINAGQGFKMLWSTIKSFLDPKTASKIHVLGNKYQHKLLEIIDECELPEFLGGKCKCIEGCERSDKGPWKDPNIIKRVLNGEANYGRQIVTISSTDGRIVSYAWPVHPNRKGSDASAESGSEVEDVTSPTASRNLITHPILTPVHEESKLSAHGSSSVVHASIGENIPVVDKIVDDGWGSPRSSPQAASSGSLSLRNLHGTFEGLRAQTITWLTFLMMTLFAMLCSVPSKMARRISNQSGAGA

SEQ ID NO: 61668 - protein, 1193 aa, Zea Mays
MTGSKPAPAASQNPSAVPHRRPPPPPPPPPPPPVTAVARVREEGELSSGADDDETLQTQLGAASILGKFVEAGSQVPSASLLGKGSNTLIVSNALNHKASAPSYKKIMRVNQGQFKPGTNRNLSWQKPVSSDNLLITFSDDDSGADSGKTGRDKVRKASSQGTQRTGNSMQTRIMREEVSQQKNLGSKVGPAHLPAFPFTHRNVGAGRASGNTFFRKELPVRQVNPLKSKQKVQNGVGVHSEDHRLEILRHKIAAKENELKGQKRPLSAVATKNADFSSNQPRLPSEKIRLEASSIGEYSRFNSLSEHSGGPNKRLKLNQQYNQFCSDLTPLAPIGSISGKTNVQSSEVTNRSENGITMNLNVNETDTTDTTELADQIQQGGATKSLRHHKDSGGAENHVMLESHDGLAAQPPFTDTQTIPEDTSALAPVTSAQARQQVLAVGTSPVLDGTPQLQPGKENDECLNSSGQIGVETQNTILFSLLEMEELQDKELEDAQEHRQKCEAEEREALRAYRKAQRALLEANERCAILRRKREICSSQVHGLIAENSSLVQSLSIRNPEDGLAMPSLLNSQIHAVSQIPENQGGRHRLCPEEPSQQQIDKHEDEARPHYCDKLAASTADPSSVSAVNADSILSDYMEDDLLFPTRQARSECALDVENQMEETIHVYAEENRQVSGDGGEDYELLEASLRSRLVERFGKKSCLNGTIDEGTEGLAVGKVAAEHGKQSAYVGHQLQEAEQNIMTTTLEGTMELENDGAEKTVGLSNSCSGPSMGNCDPEDNISSLKELCMPLVMDSLIFPSSAPLNAARQIKRAFPGICKELSDYKNDHLTSDAVSEVTGSVQDMIHDLVGENMKMLPTTQNDNNMVHSVIDPFWPFCMFELRGKCNDEECQWQHFEHHDWRKLELTKHSMISVSGQIPYGLSQYILPVPVYRVGSNLIKADLNLTQSVLASSLWQYWQRGFCASFPLPLSVQRVLPSDAPFFQAGDGRIADFDRNRQLLKFRMLDSRKNKIVQGSVDIEFFLEAALDLYCGKVNKPDRIKALSFLARSIEADPSTVILWVFYLHIYYQKDEGLGKDDMFSDAVQHNVYSYELWLMYINSRLRVDDRLDAYNDALSMLCQMTAETDKDLQERSAFILDIFLQMIYFLCMSGNIDKAVSRIIGILPTAMPDNSGTFQRKLLISWSFRKLYLVL

SEQ ID NO: 61669 - protein, 1156 aa, Zea Mays
MSLCQRRHDISPQTAQPAVSSHWKVFDDGNVRGSSSSDMSIDEPQVDLGESNNKSTVGGSGSQVHRLSNSQGLEVAAEQQPKPTIPQAIDKQEAETDASPAPAAGGLSRRLSVKDRINMFESQKKEQTPSSGNSNSAGTGRVVPGRGEHRRVPSGASMEKLVRRWSSVSDMSIDLSNNESVNINDKKDNGTPVVTPTSTDLEANSKAKADVDSNGQKDLVTSHSWPYQKDNVPMDPTTTDLCPPSTLSNTLAPHSDGAGNDMVINSSIESESSFGKEAGVIQGLTRMSNHATSNVSTRNHLKSSAKPVEEGLLKNKDILTSTSLEEHVRMIDKEITAVPHEVLVASEQIPQNDIRGLHTKDIHTESEVTGRKDQPSRSFGKVSGGVNPKPKTSSNSRANVKGSSGRANVKGSSGRDEITFTETEFRDVSLQRNRLPRKAEDVGRKVTGGSDSDSSGRQGTNLSRQSSITIQELNFQARVMGPGKGNQDRHGELQMKANELEKLFAEHKLISSRRGKPTDVQVDSTRTVSEVKPITVLHETIHTKQVVKESITTNDFDASELLKMVSNQGFNISTPQKLGILSLEESRGKFYEHYMQKRDAKLKEDWKLQRGEKEAMLKAMHESLERSKAEMRAKFSQSGDVSDSTYVYHCSQKIPPSRSARRNNDQGVDSFLVEEELNSDYLSGDGSSRSADSRKHFPNKVASTQKASVGPIHKRSSRTASSGYGNRRNLPENPIAQPVPSFSDLRKENTKPSPGLSRAAARVQQKSFARSKSIIEESKSILKEDQSRRSQSMRKSQIPDELKDISSGNEDIYNWAPSRISKNQSEGAFAYSARRTGPPKPFLRKGNGTHPVIGIAGFQAAAAMMANALQNGDSGDFEDHQDDSPDDAKEEEEYESIEENFRESDFPADSDSENPRVSHEFGNSDDPGSENGDANFSSEAPAIGGTKFTAFTGNVHDPASDVPAPWSSRLPQLSPYMNDNTDGDTFADSPCGSPPWNSHSLDEITDADVSRMRKKWGSAQMPFAGVSASQQPRKDVSKGLKKLWKFGRKTRGGDGLVNDWVSASTASEYDEDMEDGRDLVVGSSDDFKKSRMGYLASYDDFVEDEVFAEQEQSLRSSIPNPPANFRPREDQLTGRAPRSFFSLSTFRSKGGDARLR

SEQ ID NO: 61670 - protein, 62 aa, Zea Mays
MSLCGVGAWEPRTIGHAVLVFPRFSYIRSELSSIPCLHIQLYLSISSALRLGSVKLPLALRF

SEQ ID NO: 61671 - protein, 524 aa, Zea Mays
MNEDFLLIVLKELLSRRRDLRLILMSATLNAELFSSYFGGAPTIHIPGFTHPVRAHFLEDILERSGYKLTSSNQLDDYGQDKVWKTQRQLLPRKRKNQITTLVEEALKNSSFEIYGSRTRDSLVNWNPDCIGFNLIEAVLCHICRKERPGAVLVFMTGWDDISCLKDQLKAHPLLGDPNRVFLLACHGSMATSEQRLIFEKPPPNVRKVVLATNMAEASITINDIVFVVDCGKAKETTYDALNNTPCLLPSWISKASARQRRGRAGRVQPGECYHLYPRCVYDAFADYQLPELLRTPLNSLCLQIKSLQVGSIGEFLSAALQPPEPRAVENAVEFLKMIGALDGNENLTDLGRYLSMLPVDPKLGKMLIMGAVFRCIDPILTVVAGLSVRDPFLLPQEKKDLAGTAKARFSAKDYSDHMALVRAYEGWKDAEREGSAYEYCWRNFLSSQTLQAIHSLRKQFSYILKDSGLIDSDGNTNNSLSHNQSLVRGIICSGLFPGIASVVHRESSMSFKTMDDGQVLLYA

SEQ ID NO: 61672 - protein, 104 aa, Zea Mays
MSLFTFVPAACVFGASRIDWQDVLSHSIYFTPTDVENYMISAPCHGAVLGAWLGAWPMPLDWERPWQEWPICVTYGAVAGYLFGMAVSLVLTALYKRRVRAKAD

SEQ ID NO: 61673 - protein, 509 aa, Zea Mays
MPPPSLVSILPAASISPRRRQAKHPKTPTASHPFFSRRLVSQPPRHASISPSAAGGSGSDELHLLEKPLPAVAEDNEAEEELESAPVSSTEEALAPFLKFFQVKSTDPDVGADTADGEVPEEASRRDVLSAAGERGVSYYDPKPGDFVAGVVVRSDGRTLDVDIGSSGEPALMLAKESAPVPAEEFGYLACDVASKCAAEFAAEGRVGVVVRQFRGGGEGDGEAIIGRNGKEKVAPVLRAGTIVFAEVLGRTLGGRPLLSARRLFRRVAWHRARQIKQLNVPIKIKIYEWNASGLLSRIEGLRAFLPKPEMMTRPRNFTDLKNKVDQEMHVCITRIDEETNELIISEKEAWAVTCLREGTLLQGTVRKLFPYGAQIRIGETNRGGLLHISNMTHGKLRSVADVLKVGETVKALVIKSTPDRIALSTKDLESEPGLLITNKEKVFSEAEEMARRYREQIAEPQPPGSIAAEDSCDDAVPFNDESRSYANWKWLKFSKSDDVANPKSGVES

SEQ ID NO: 61674 - protein, 470 aa, Zea Mays
MERGRGGSGGRGGGRTFQRNNAGEEWPNLVGVVLSWSLADVMNKDLFKDKVKQIPSTFPNLKSYLECYTSPLLEELRAEMSSSLESLSTVPSVRISRIEEKRDKHEIYLASDCQVAKPHNRPECYTPSVGDVILLSDVKPGHISDTTRNGRPYRVAFVTDADGGDEYDDSPPAKYGIVASGKIDAADDERQDGKSTSLFAACLLNIVTYIRIWRCLDYEALRTNRGLIEKMVNYQPISSTSENSTEDAGPTDSVEIWTKLSAMELNTSQNDAVLNCISKMHSKSSTFTLIWGPPGTGKTKTISVLLWLMREMKHGTLVCAPTNLAIKQVASRFLKLVQEHSGDTRCLGDVLLIGNKERMCVDGDLKQIYLYDRVRRLFGCFAPLTGWKHHLSSLSDFLENGYSQYLQHLQDSQEGDTPSFFSYARKRFAVIYMELRRCFNDLLLHVPKSSILEVNYNMPITSNSQKQGLH

SEQ ID NO: 61675 - protein, 56 aa, Zea Mays
MQSKIKSGAVDELKKEVKEMLDFAQGYILKVRSPDQENSNLAQQDNMAPDAVSGDQ

SEQ ID NO: 61676 - protein, 382 aa, Zea Mays
MEDSPVKFRTFMEPLQQVALNLEATPDAAFRTDVAKRAFVGWMRDLRGIAMATNSRKTYGLLFDWLYPSRMPLLLRAISLCTDEPEVTTPLLKFTYEFVLNKAQRLTFDSSSPNGILLFREVSKIIVAYGSRILLLPNGTDIYGSKYKGIWISLTVLSRALCGNYVNFGVFELYGDRALADALDISLKMTLSVPLSDILAFKKLSKAYFGYMEVLFNNHIKFVLNLDTNTFIHIVSSLESGLKGLDAGISSQCASAIDNLAAFYFNNITSGDSPPSPASVNLARHIGECPNLFPQILKTLFEIMLFEDAGNQWSLSRPILSLIMTSEQMFSELRAHILASQQQRLSQCFDKLMTDVNRNLEPKNRDRFTQNLTAFRRDFRLK

SEQ ID NO: 61677 - protein, 248 aa, Zea Mays
MEQVRVAPFTYGSTFTAIDYSPRSVIQACLCFGGSPIQAETIAVGNGKAKHARIRPPILSRAMTTLSRAGSAWTMLSRAFAEYVTMGWDDNLPRTLLLYHANIVSSPEFYFQTVACNSRRFRNATVNHDLHFIRWDTPPKQHPLYLTARDYRRMLLSGAAFARKFRDGDPVLDRIDRDILRRRDPAAHFAYGGWCSEAGDQNGGAALCSNPQEPGRRGAVKPGAGSRRLKAMLRKTLSPRNFRRQQCR

SEQ ID NO: 61678 - protein, 136 aa, Zea Mays
MSVVVRRVCCRELAPGVHSVSGPRFLQFGQAGHRSVLCSPKSPLSNRRSRSTRQSYLVRRVGNVALYMPPSYIVVEAVILCSTPTSPARSKHDLVVKSQASDEDGANSMVFIKCTTGSSSQDLSAFVRVLGRVWCW

SEQ ID NO: 61679 - protein, 825 aa, Zea Mays
MSSGKLVLLDKLLVRLRETNHRVLIFSQMVKMLDILAEYLSLRGFQFQRLDGSTRADLRHQAMEHFNAPGSDDFCFLLSTRAGGLGINLATADTVIIFDSDWNPQNDLQAMSRAHRIGQQETVNIYRFVTCKSVEEDILERAKKKMVLDHLVIQKLNAEGRLEKKESKKGGPIFDKNELSAILRFGAEELFKEDKTDEETKRNLESLDIDEILERAEKVETKGGEGEEGNELLSAFKACDVANFSSVEDDATFWSRLIQPDPADIVQETLAPRAARNKKSYIEDPQLDKNNNRKRRAVETQEKPRRLSGRTVETVNSLPLVDGAVAQVREWSFGNVPKKDASRFVRAVKKFGNATQIGLIVDDVGGVLAKVPHEAQIELFDLLVDGCQEAVKENTDIKGTVLDFFGVAVKAYELLARVEELQFLAKRIARYKDPIKQYRIQLPYKKPQWSASCGWTETDDARLMVGIHWYGYGNWEKIRLDPKLGLTTKIAPATLGERETFLPRAPNLDNRASALLQKEYAKFSGKSLKVKGNTRQTVNNDSNSGVRSMRGRQKDVPEKDDNKPNKDDIQKRRVIVEAEAREEGEISESEAETRYRQDKEEKWLEWCSEVLDEEQETLKRLDRLQNTSVNLPKEKVLSRIRKYLLIIGDKIGEVVRQHSESYRQSRMVMRLWNYVATFSNMSGEQLHDLYMKLSQDQLEGGVGPSHGGNFTSIPPNKGGNSNQLHPSRNQRPTRSLQYNSESFHNESSGSSEAWKRRRRADTDNQFDTQPLCQPPIMTNGNRLQESSSSAGILGWGPVEIRRYGNERPKRAVHPSHFPTGHGPLL

SEQ ID NO: 61680 - protein, 1523 aa, Zea Mays
MEGSPADAAGSGRRTRTRGAEASGRAAVLQQLRAVRSGQIRASDAIQVKVDAPIYDTVPEEEYNVLVARRRKEAGEFIIDDDGLGYVEDGREEDWSHRALPSSSDEGSEGEDGAPRKRKQTRPPQAKRQPQQSAKVASLSAAAAKTGQQISSMFTSSVFKGRGSDRAKNLALAADSIVDDVIAEFAPDENDREERRRRVARVCAPQPVPTVSYIKPQKVILDAEMVRSENENDMVVVELKNDTEMETNLEEIPGSSAELVVNKSLEEPKQEDNGEVKIEKAHRLNAKIKAEECRNNDVTSATEGWMKICGNGENAVGEEGVAVDGNTNVDESSEFELKDGALPFYILDAYEEPFGANSGTVYLFGKVEVGKQFHSCCVIVKNIQRCIYAIPNRSVFPMDSISGIERNPTADLLPSLRATLHELASGLKSEIADKLSDLNVSNFIMTPVKRNYAFERTDLPNGEQYVLKINYPYKDPALPADLRGEHFHALLGTNNSALELFLIKRKVKGPSWLSVSKFVTRPSTQRVSWCKFEVTVDCPKDISVLTTSTNLEVPTVVVGAVNLKTIINEKHNVHEIVSASLICCHRVKIDSPMRPEDWQKRGMLSHFTVVRKLEGSIFPIGLAKEASDRNQKAGSNVLALESSERALLNRLMIELSKLDCDVLVGHNISGFDLDVLLHRAQTCKVPSSMWSKIGRLRRSLMPRLTKGSTLYGSGASPGIMSCVAGRLLCDTYLCSRDLLKEVSYSLTQLAETQLKKVRKEVSPHDIPMMFQSSGELLKLVEYGETDAWLSLELMFHLSVLPLTRQLTNISGNLWGKTLQGARAQRVEYLLLHSFHARKFIAPDKFARNKELNSTKRKMNPDTGGANADDGAADPSVDDEVHNGDQSKARKGPSYAGGLVLEPKKGLYDKYVLLLDFNSLYPSIIQEFNICFTTVERSSDGSVPNLPASKVTGVLPELLRSLVERRRMVKSWLKTASGLKKQQFDIQQQALKLTANSMYGCLGFSNSRFYAKPLAELITLQGREILQNTVDLVQNNLNLEVIYGDTDSIMIHTGLDDISRAKAIAGKVIQEVNKKYRCLEIDLDGIYKRMLLLKKKKYAAIKVALDGSLRENIERKGLDMVRRDWSLLSKDIGDFCLKQILSGGTCDDVVESIHSSLVQVQEQMRSGQIELEKYVITKSLTKAPEDYPDAKNQPHVQVALRLKQNGYSGCSAGDTVPYIICSQQDSDNAHSVGIAQRARHPEELKRDPDKWMIDIDYYLSQQIHPVVSRLCASIQGTSPARLAECLGLDSAKFQPRLTESSNQDTSMMLLSVIDDEDERYRGCEPLRLSCPSCSGTFDCPPVSSLITSASATSVSDPIEGKDATANFWRHMRCPRCLDNTVESKFSPSMLANQMKRQADNFISLYYKGLQMCDDEGCKYSTHSVNLRVMGDSERGTVCPNYPRCNGRLVRQYKESDLYRQLSYFCYVLDATRCLEKLDQKARLPFEREFVAVGQTIKLALLEIQKIRDRCAFGWVQLKDLAVSI

SEQ ID NO: 61681 - protein, 146 aa, Zea Mays
MYFDGFPYVIRDIMLYILCADIWELMFKYTSPNSKNMVTNASLLNDKVEMETENVQAIPEGNQAPKNELSNSNNGSPAMEISPNSVPDNSRLTVSDQMATAFVTVESPDAISKVAASRIVCSLPYISNEILKEAQTLEKAGNNPSM

SEQ ID NO: 61682 - protein, 119 aa, Zea Mays
MKYKAKQIKSLIFFQEGKGNDRKVRRVRGVQIWMRAEKRSRKACPICATRVGMDLIGHLTMQHGSYFKISFFNYAAVADHLHFYIFHIILQLKIHRCHGRAHVTVMLNCNFSLVLEPAT

SEQ ID NO: 61683 - protein, 71 aa, Zea Mays
MQILPSPPIPALRPEKRSCFFFSVWALLPAIPRELRGRLCCSVLTSRCFQRQAETGVGAVVILMTGFWWIG

SEQ ID NO: 61684 - protein, 146 aa, Zea Mays
MVESSEDEPCSGDTDATTDPGQEHSSRLADRELKEMLLKKYSGCLSRLRSEFLKKRKKGKLPKDARSALMDWWNTHYRWPYPTEEDKVRLAAMTGLDPKQINNWFINQRKRHWKPSEDMRFALMEGGVSGSSSGTTLYFDTGTIGP

SEQ ID NO: 61685 - protein, 76 aa, Zea Mays
MLTHLNTTTIEELVGRLRVAEDAEADDAKAKEIATKGVGQLLLTEAQWEARCRERNKQRKPRDGDKRRGNGDRGNN

SEQ ID NO: 61686 - protein, 247 aa, Zea Mays
MDLIRRKCTCKKSGCLKKYCDCYQGGAGCSINCKCDDCRNPFGRKVGVILDGKSSGLPAPVHVHERNGTEADSSGDDEEDDDLYMNRQLSPSPVSRESSFQQETLVGVEVQTMNGHLYPKPLTQVRPEPSSWQLSAARRPAEEPRGEVWRFSGRPGEDGASDAVEAARAVAVAPPRESRRPGTRGGDRLRFSIPRCVEAMSAMAELSPVEKSLAPDVFLDESNREIFLSLSVDVRPIWLRRKMKSLV

SEQ ID NO: 61687 - protein, 299 aa, Zea Mays
MKEKGEQPIMFSHLAPPKRRPTGDEDGRANPKPEDSVYYHPTLNPSGAPPPGKPPMYKSSIGPRIPPPSSSSTGASSSMSESEAGPTTLPPPPPPPPLPDTSESIDPPAPPFPLPPLPPLPPPPPKPNSDAALPGLPLPPPGPPLRESVSGHTVLPPPLPPSQRSSNPPPASSANESKTDSAWPLVVLPPPPPPPGLSPKSYDMEAAGTSKDTPGLKEDTAARVLPPPPPPSLPPLPPMQSDMLSPGVMRLPPPPPPPDSRPSLMAPGVSRPPPPPPGFPRLKCQYHHMHPVWFSFFFD

SEQ ID NO: 61688 - protein, 143 aa, Zea Mays
MILKDGFFHADPHPGNILICKDTEVALLDYGQVKEMPEDLRLAYANLVVAMADDDFSRAEESFRELGIRTWAITDNKLEELFQLSLRMFDTRLPPGVTVMSPFADDSSLNKIGVEVWSLLQESNRASRRSYFQCFEQSSFCEG

SEQ ID NO: 61689 - protein, 932 aa, Zea Mays
MVKEREEQVAIVRMVLGEGTPEMDIIRALHMAGDDPTKAINILLDLNKAAPPLPPSPSPFPCPSPSPSPGKPAKALVDSTPPCKAPTRPMPTAEKPKSTTSNGGSEEHWWLVGSAEMVGLSTCKGRRITSGDVVTFSFPNATTAVGKSRPSRPALASCSSEIMRFSTPSHGEVGRIPNEWARCLLPLLKENKLKVKGSCKSAPEVLTIMDTVLLSVSIYINSSMFHDQKQSSPKAARFAPYDSTFHPLPALFKLIGLAPFIKAAFTPEDLYSRKRPTETKSSIGSPAAKLTSGRLRLSSDGNEDDHGEETVSDSDLDDIIGISDSCALEERAPPDSLMCDLRSYQKQALHWMLQLEKGSSSQDAATTLHPCWEAYKLEDKRELVLYLNVFSGDATTEFPSTLQLSRGGILADAMGLGKTIMTIALLLSDSSKGCITTQNAAQTPREASGLGESHDAVKKLANPFSFSKHKKPKAPLIGGSNLIICPMTLISQWKAEIEAHTKPGTANIYVHYGQNRPKDASIIGQSDIVLTTYGVVSSEFSIDGSTENGALYSVHWFRVVLDEAHMIKSSKSLISLAAAALTADRRWCLTGTPIQNNLEDLYSLFRFLKVEPWRNWALWNKLVQKPYEEGDERGLKLLQSILKPIMLRRTKNCTDKEGRPILNLPPANIEVKYCVLSEAEKDFYEALFRRSKVKFDQFVEQGRVLHNYASILELLLRLRQCCDHPFLIMSRGDTKEYADLNKLAKRFLRGGNGAVNGDSCIPSRAYIKQVVQELQKDEGECPICLEAFEDAVLTPCAHRLCRECLLSSWRSATAGLCPVCRMSMSKQDLITAPTDNRFQIDVEKNWVESSKISALLQELEALRSSGAKSIVFSQWTAFLDLLQIPLSRNNFSFARLDGTLNLQQREKVIKEFSEDKGILGAQTTQAAATPHT

SEQ ID NO: 61690 - protein, 81 aa, Zea Mays
MRFRDEQKLTLPHSAPSSIHCGRRGFLLVDLILVQIQSRPTVQWLLASMLPGASETQDEYQLPTIYGMAACAQRGSRELGA

SEQ ID NO: 61691 - protein, 222 aa, Zea Mays
MEEVGGDMPLPKQKLSAAPYRDGGGVVLVATGSFNPPTYMHLRMFELAKDELELRGYSVLGGYMSPVNDAYKKKDLLPAAHRIRFCELASKSSSFVMVDPWEAMQNGYQRTLTVLSRIRNSLCKDGVADQGSLKVMLLCGSDLLESFTTPGVWILDQVRTICQDFGVVCIRREGKDVGKLIDNSDILQECRDNIISVDEIVPNQISSSRRLHKKISIDKVSH

SEQ ID NO: 61692 - protein, 541 aa, Zea Mays
MFGDVEVPAEVLTDGTLRCYAPAHQSGRVPFYVTCSNRVACSEVREFEYRDSEAHYMETSRSQANGVNEMHLHIRLEKLLTLGPDDHQMLAINSLMLDGKWSNQESSVKEVVSTARVQSLKKLVKEKLHQWLICKVNDDGKGPNVLCKEGQGVIHLVAALGYDWAIRPIMIAGVNVNFRDAHGWTALHWAASLGRERTVSVLIANGAAAGALTDPTSEFPSGRSPADLASVNGHKGIAGFLAESALTSHLSALTIRESNDSTVEACGLPFAEDLTGIDSVHLAGEGPDAESLEGSLSAVRKSTQAAARIFQAFRVESFHRKKVVEYGDDTCGLSDECTLSLVSLKNVKPGQHDTHLHSAAVRIQNKFRGWKGRKEFMIIRQRIVKLQAHVRGHQVRKNYRKVVWSVGIVEKVILRWRRKRPGLRGFRPEKQLEGPSQIQPAKAEDEYDFLHDGRRQAEARLQRALARVHSMSQYPEAREQYHRLTTCVAEMKQSRMMQDEMLSQAAGGADDFMAGLEDLICIDDAPPRCLPFGEAEPFYIR

SEQ ID NO: 61693 - protein, 470 aa, Zea Mays
MAAQFAAEATLRRVHGAQKDDDMPPIEAILAPLEAELKLCRKEIAKLQDDNRALDRLTKQKEAALLEAERTVQIAMAKAAMVDDMQNKNQELMKQIEICQEENKILDRLHRQKVAEVEKLSQTVRELEEDVLQGGAAANVVRDYQRKVQEMNEEKKIRDRELARAKVTANRVAVVVANEWKDANDKVMPVKQWLEERRFLQGEMQQLRDKLAIAERTARSEAQLKEKYQLRLKVLEDGLRGTPSGSCRPSMEGKCISNGPPRRLSLGGADSISKISPNGVLMRRSPSFNSRSPLSTSSCLVLKHAGRTSKSFDGGTRSLDQGKVLGSGPHSLNRSTDAVRDCETADSWKANAEEKSNETANNDSADMVSGVLYDVLQKEVVSLRKACHEKDQTLKDKEDAMEMLAKKVDTLHKAKEVEAKKKRQEIAALEKKFAAVCLEQERLGNLRGPGTSQTVSGRTASRGGLTRNLQ

SEQ ID NO: 61694 - protein, 346 aa, Zea Mays
MARKCSSCGNNGHNSRTCGGHSRTAAAFENNGGGVRLFGVQLHVGSSSPVAVAMKRCFSMECLSPPPPLPPPPAAPAYYAAALAAANSSSPSASASASSSSSLVSVEEAQAPEKMASGYLSDGLVGRAQAERKKGVPWTEDEHRRFLAGLEKLGKGDWRGISRHFVTTRTPTQVASHAQKYFLRQSSLAHKKRRSSLFDVENAAERATTTSSRERPRLTVTDAIIATASAAAPGTTTAALPALSLGIRRPARPEYHAALPPNSLSLQLPRCSAAMGSASPSPSLALALAGPKHKHPSPSSLTAAKASSSGQAPDLELKISTGRQSEHQVQTGSPPRTPFLGTIRVT

SEQ ID NO: 61695 - protein, 93 aa, Zea Mays
MLRAIHQKIIGSTFASFFTTQGGPTSFGRSMSLCKRWTKMANGELLQKGSWERRQVHRELEWEWWQRGLPIPVPASEENHTNAWKLVPPVFRP

SEQ ID NO: 61696 - protein, 409 aa, Zea Mays
MMRPNFVKFEAITQTSVMVFLDLVDCPMLAQEATSFNIWHRVAVTESYPSNPTGIILAPLKKLLVTWLAPATSYIFKVVAFKNSIELGSWEIRMKTSWQKDDPRGSMPGGTGLGQNSESPKANSDGQSDPSSEGVDSNNNTAVYADLNKSPESDFEYCENPEILDSNKASHHPSERINDLQNIQMAADGVTEVTELEEAPGLSASALDEEPNACVQTVLLRDSNPLEHNQRTVVPRSHDTSNILAGHELVIVGPRYSGSVPPTAPRSVENSKDNGGRASKPKPCDIVVQNGSSKPEREPGNSSNKRATDKMDDFGHKDSFSEVSYEYCVRVVRWLECEGYIETNFRMKFLTWFSLRATLQERKIVSVYVDTLIEDPVSLSGQLVDSFSERIYSKKRPSMPSGFCMDLWH

SEQ ID NO: 61697 - protein, 58 aa, Zea Mays
MKAKSKVIKKVAAEDLGVDIRSDMEVIEVNEPPKRKAGVILSCVDELLDKLKNEARVL

SEQ ID NO: 61698 - protein, 211 aa, Zea Mays
MLVKSGKSEQEAQLALKGTFAKDKNELLAKQFQINYDDELAMFRKGSSVYREKVETTVKIDDYGEPIKRPRLKVTVAHVDTIGTAFWENHPHILREGKFMHGFVKKFGINHIFSPCNWIIVRIIACQFDQFSTIHSFDKPNDETALRLMNESASLMMEQYPDIVFGYGFSNEYSFVFHEKSELYQRRERWLLSLCRMCCIYNSWANCFGLK

SEQ ID NO: 61699 - protein, 384 aa, Zea Mays
MAFFLALVCILILLAIASYVQYTRWQKGKGRFGGHGRSAPLKLPPGSMGWPYLGETLQLYSQDPSFFFASKQKRYGEIFKTHLLGCPCVMLASPEAARFVLVTQAHLFKPTYPRSKERMIGPSALFFHQGDYHLRLRKLVQGALGPDALRALVPEVEAAVRSTLASWDAGHVRSTFHAMKTLSFDVGIVTIFGGRLDERRKAELRKNYSVVEKGYNSFPNSLPGTLHYKAMQVILESLRMASIISFTFREAVADVEYKGFLIPKGWKVMPLFRNIHHSPDYFQDPHKFDPSRFQVAPRPSTFLPFGHGVHACPGNELAKLEMLVLIHHLVTGYRWQIVGSSDEVEYSPFPVPKHGLPVRLWRQNNPVDRKGRETDDDHVERIFI

SEQ ID NO: 61700 - protein, 278 aa, Zea Mays
MGNRVRSEDYGVMGVRYGSENLSVGASFVPISLPSEVPFGAWLVGRKGSLSAGVQYKPLSGSKYPMPFTELENWNYAISYGVGSTSPLSPSFIFSLELARSTQLTASFYQHLVVQRRVKNPFEDDQVVGITNYIDFGLELAAKVDKDKVSGDGNSFQLAASWQANKNFLLKGKLGPSTSSVALAFKSWWRPSFTFSVTAVNDHSKGTTSYGFGLRVEDLRRASYQRADPNYVMLTPSKEHLAPGVLREYGKRPMFQTQIDSGNYDHLPTELKPLGRIF

SEQ ID NO: 61701 - protein, 63 aa, Zea Mays
MNRFRLDTIINHNAHAKNKIEYNFVDHFTKPEMSLPTKAGTTPSAPAPPLPPPAAGEGTWVGG

SEQ ID NO: 61702 - protein, 313 aa, Zea Mays
MEAAAALPPERDTSADWGDGVVPLGFRVKASSRESPSQKAGNVLEADLRSHWATATNTKEWILLELQAQPRRSRSPSVQPASYLLAFRSETTMLLLRKAHKDKTLGVVCVRASKVLQKLLEPEPFLDKSMYTDVMLPNQVSDEIPKSDALSLVHSTDYSSMFGEEFSLSENQFDGSLLNILDIAAVEEGILHVLYAAASQPMLCRKLAETTSDIWSVLPLVQALLPALRPPISSGPIEHIDDSFSQWNHPNIQNALSQIVTMSVSSSVFHPLLRACAGYLSSYLPSHVKTACVLLDLCRGALLSWIPMITAKV

SEQ ID NO: 61703 - protein, 271 aa, Zea Mays
MSQIQSFSRNNCALLAVLCGKYAENRTPAARSGLEAKRPRPAYPFPELSSAGRLEVHTLFNPTPEQFLEAQRVVQPNFLYIQGQQLEDEKEIGSLVWGDADVSDPQAFSTLISPPFPTIVYLEVPIGEKLAQAVHSKGIPYVIYWRNSFSSYAASHFRHALMSAIQSSVSHTWDAFQLAHASFRLYCVRNNHVQSVKLGPRLLGDAPKINISPPETEMVDEEGSSEVTPAIKIYDEEINMKLLLCGVPCTLDPCLLGSLEDGLNALLNIEV

SEQ ID NO: 61704 - protein, 442 aa, Zea Mays
MEMAGAAEADTPSHEPVRTGRSNTILLPIVGVLFAYLLYRFLRPRLRRGLRLDRHVPFPSGASLPAWLRRRAPSGSAVLPYFAPIADRLGALPYLGPFADRLPHGGGAHALVTFPGGEALSVATILEAPGEVVAKSAHSTLYRAAVRSGEAAVLLRFVRPACAVAAEEAYAAARRVGAVSHPNLVPLRAVYVGPRGEKLLVHPFYAAGSLHRFLQEISSQATVKTRSRTCIRQCYTSTSTPPYVWGYGEGIEESHRWSIVCNLSLGIAKGLDHLHTGLDKPMVHGNLKTSNVLLDANYECRISDYGLYLLLSPAAAQEMLEASAAQGYKAPELVKMRDATCESDVYSLGVVLLELLAQKERADDDGRPNPRDILLPASFKNLVLERKISDAFSSDLARHCKRSGKEKSLNAFFELATACCSPSPSLRPSTRQVLKRLEEIAR

SEQ ID NO: 61705 - protein, 147 aa, Zea Mays
MRVLPYLKKAYGNAMQKVLHVGPDSCTVVSNLLKEGKVEAWGVEPYDLEDTDSTCKSLVRKGFVHLARVSTDGLVIFAGNPGQQKAKVSELPKFGRPAKLRSSSWWTRYFVQTGLTENEGPLKKFEDATSKNKYKPGCQIFHLSSPR

SEQ ID NO: 61706 - protein, 159 aa, Zea Mays
MFQALHVFGLIDIAAKQLLGQGLVLLLRLPLEHLKHGFFKIEAVHIPGTPRPFIWTDTYTIYARYSALQIHFKNKFGKEQDYNSVQDALQKCVSLYKEPHTRRLVKNAAKQDYMICLTSLIDMVQSLFPIPHIPGLQELLCEAEQILGELEEESTRKKQ

SEQ ID NO: 61707 - protein, 403 aa, Zea Mays
MPLVAPTFQCSDYYTELLVVYSATEGYMMRCGGAQTEARPAGASATPTFGWSEQAWPGDLLMAAKGMAAGAVVGTEARRAGANGTPKSKRSTLKDEQKRSLYDQVGPDQYEKTASGGGGTGFEGGFGNPFEDIFGGGGGGGGMNDFFRNIFGDRDFRGRDVKVALELSFMEAVQGCSKTVTFQTSVTCEICGGAGVPPGTTPETCLSCRGSGFIFMQTGPFRMQSTCTKCGGSGKTVKEFCKACRGNKVVPGRKSVRLDILPGLDNEDTIKVVRSGGEDPDGRPGDLYVTLEVREDPVFRREKGDIHVDAVLNVTQAILGGTVQVPTLSGDVVLKVKPGTQPGQKVVLRGKGIKTRNSPHYGDQYVHFNVNIPEQRELIEEFAKEEQGEDEKDAKAAAGASGG

SEQ ID NO: 61708 - protein, 79 aa, Zea Mays
MFEHIAMNGSTSCTPGQNIDIEGPDVEGVEVAIGGSPVSVGSMKRGLCTTSVRSPKKRTRSPIVRTMKECGSLCTKPMV

SEQ ID NO: 61709 - protein, 799 aa, Zea Mays
MGSETFDLNEQPHENEGGGLNYVLLQKDCKNICRTKVYDLPIEVPIIWSVTAFVPIKAYQKSDFPKFLLLPYPEDSRQKSEWGKFMRFLSENKRAAIARCGSSTFHILAPEPDECSSFPHAVLLYECGQNGPGDCKHMAGTSGKRVNSNVMNASKRPFKSDFQYGSRNSKPPHFKEEVCDSLLKPKKMETSPKHYDPFVTEHHRLVLESSPCESVEDSPRVLNPVVKKRMASPTKNFIVADPSYLRTLSQTHASWIFGAIAELIDNSRDAGASRLSISIEHLFSKKAQKKIPVLSVIDDGHGMTYPDIMRMISFGHKRPNGHREDQIGRFGIGFKTGAMKLGKDAIVLTQTKSSRSVAFLSQSFNEEKDNLEIPVVAYRKEGQYMEVDLSVQSDATAEYNLNAIKNFSSFNEYFIGEKLGLFGEDTGTQIYIWNLDTWGTDYTLEWNSGKSSENPVHHGRGDILIRSRRVRSRPGQTSNKVLLDYSLQSYLEVMFLNPRMKISVQGSLVKSRPLAKTLNKTSVVSGEIMERTIILTLGRSKVEWDRTNCGIFLYWHGRLIESYKRVGGQKHSTDMGRGVIGVADITNLIDDEDGNSWVLNNKQGFQDCEMYAKLEEWLGRKVDEYWDTKFDSLTLRKGDEHHNTDSDWVQCYSCRKWRMLNAGFNVDNLPEEWFCYMPPFNGKCEIPEQQAGPDIIVIGEKRSGHDEQKKAALQGGTPEEEMRHENHEIQMITQDEFVKNVQDMPEVVHKRKKISSGTPSKPQKNRDDDLEGVSSQTEDDVPLTRLKRLRRGPARTNKR

SEQ ID NO: 61710 - protein, 235 aa, Zea Mays
MIDAMQAVSLISCNIANAVPHLTRPSPHACALTHTHTIYLSTYTLPACLQLQLQPITIYTQLASFTYRKHPDRQDQRQRQRCRQEAGRALHSPTPAETKVMAQLPPRAPGGAAPQDHWSAAGEFLGFAAARRGAHRRSASDSAAFLEALPMEDVIGGDGFDRLDDDQLMSMFSDVDAPAVSAGDAAQLMDVADADADADDDGSAASSRAAADGVAADPKRVKRLVATLLASTFFN

SEQ ID NO: 61711 - protein, 597 aa, Zea Mays
MVGTHSDPGLMVLSFRTIFELIKKDDSKDTFEVSCSYLEVYNEVIYDLLERSSGHLELREDPEHGIIVAGLRSIKVHSADRILELLNIGNSRRKTESTEANATSSRSHAVLEITVKRKQKGQYGNQVLRGKLALVDLAGSERASETNNFGQKLRDGANINRSLLALANCINALGKQNKKGLAYVPYRNSKLTRILKDGLSGNSRTVMVATISPADDQYHHTTNTLKYADRAKEIKTHVHKNIGTLDTHVEDYQRMIDNLQVEVSQLKKELAEKEHQLSVKPTEKTADSELSWLNVLSQETGENVQERINLQKALFELEETNKRNRMELQHLDDSIARHQVKEMDSTILQALTSRRQVILDNIRDNDEAGSGYRKDIEMNESRRRQLQDMIEEAISNNGNKTYLHILSQYRLLGMTNAELQIEMAMRDQVIHNQREALRSLWNILYGTGLNQKQILKLAAKQGLTVEGCPLPSSSPDVTTPPSCQPHRFPSFMPFPGPQSEPYSPSACFFQHGFSTMSLLKNQHETPTICRQEHLSSYYMMSGCSPYSGDGKQWSSGRPTAFFSTPEKPKEAQSQHNKEHSGSHDFSLHRKGSSEYTY

SEQ ID NO: 61712 - protein, 548 aa, Zea Mays
MSSSITYSSALFIGGGSGHEPSHAGFVGPGMLTAAVSGDVFASPPVDSILAAIRAVTGPMGCLLIVKNYTGDRLNFGLAAEQAKSEGYKMEMVIVGDDCALPPPRGIAGRRGLAGTILVHKVAGAAADAGLSLAEVAAEAKHASEVVGTMGVALSVCTLPGQITSDRLGPRQMELGLGIHGEPGVAVVELQPVDVVVEHVLKQILSQETQYLPVTRGCNAVLLVNGLGATPIMELMIAARKAVPELQLVYGIAVDRVYTGTLMTSLDMAGLSITIMKSGESILKRLDAPTKAPAWPVGSEGNRPPAKFPVPLPPSPSMKDDEILAPSQELSKQGCILEAVIEASATEIINLMDSLNEWDSKVGDGDCGSTMYRGATAILEDMKKRYPMNDAAGTINEIGATIRRVMGGTSGILYAILCKAAYASLKQSSTVTANKWADALEASIAAVSKYGGASAGYRTMLDALIPASAVLKQRLEAGDDPVTAFIASSEAASAGAESTKQMQAKAGRSSYIAPDLLASIPDPGAMAAAAWYRAAALAVKNKVHGSKS

SEQ ID NO: 61713 - protein, 250 aa, Zea Mays
MRITFSAHKDLNIKFQSHRSRDYTNPYLPVNQTAIEGIVQENLQPTVGPDGKIKEPESNVLLASIENMQYAVTVDVLHTVFSAFGAVQKIAMFEKNGGMQALIQYPDITTAAVAKQALEGHCIYDGGYYPNAQLQAAAQAPVISSPGVAWQNPASAPAAPFYGSTAASTPVGQPPAWNPNMQAPGFASASTAYPNPPLMANSTPYYPAIGSSSGAPPVSFQASQQRPQYGMPPGAPPHAPPAGQPMYFQK

SEQ ID NO: 61714 - protein, 265 aa, Zea Mays
MRWVEESIRIRRAAEPVELIEAVKKLRKAFTREEKTRKGLPLELKQKVSLEILQRLHDLGEGSNTTEQQEAVEAWRVGKLKDMRSASSKNLSNFGLSSEDSRMLKRALEFNWQRILEDIGLWIPPTIYHIEHDDKPENEPEDEEIIPGPPLPPECNTELHTDYGGTAVRWGLTHHKESAADCCQACIDQAKRARPGALKCNIWVYCPSEYGCYSPDKYEHKHQECWLKQADHPRLNFKDRYPEPYRDSHPTAPVVVPWMSGVITA

SEQ ID NO: 61715 - protein, 984 aa, Zea Mays
MPEAGTQGAHIPLMAKKRLFMFCHVKIACDKSFVLIFWTLPLPWACEQVGPGSLVQAPLDEAVPSNLDALSRCESKTCPSELITPPDDCHVNRSLSFTLQICRVEDITVSGIVRGSIIHIHRARTVTIAKDGTISASELGCKEGIGKGKFLKYGAGGGAGHGGRGGTGIYNGMRSEGGLEYGNADLPCELGSGSGGSALSADNTAGGGLIVIGSMKWPLSRLLVYGSLNSDGESHRGTSGNSNGTFKGGVGGGSGGSILLFLQWFLLEKNSSLSASGGNGGVYGGGGGGGGRIHFHWSYIATGDEYVHIASVNGTIVSSGGSGKNDGHCGEDGTVTGKKCPKGLYGTFCTECPVGTYKNVVGSNSSLCIPCSVDSLPNRAEFIYIRGGVTELPCPYRCISDKYKMPNCYTPLEELMYTFGGPWSFSIILSLTVILLALVLSALRIKIGESDITYRATNAIHNDGCSFPFLLSLAEVPGASRAEETQSHVHRMYFMGPNTFREPWHLPYSPPDAIIGIVYEDAFNRFIDEINLVAAYEWWEGSIHSILSVLAYPCAWSWKQWRRRKKNHRLQEYVKSEYDHSCLRSCRSRALYKGLKVGSTPDLMVAYIDFFLGGDEKRLDVASTIQKRFPMCLIFGGDGSYMSPYYLHSDTLLSNLLGQYVSTAIWNRLVAGLNAQLRTVRQGSVRSTLGPVVSWINSHGNPQLERHGVRVELGWFQSTASAYYQLGIIVAVNENFYKNLRHHEHATEFCERSRKNVAVPLQDFNQANLDQPCTSYAVSRKRLTGGVNGGIINEGTLKSLHYKRDYLFPFSLLLRNSRPLGYAETLQLLICIVLLGDFSITLLMLVQYYWISVGAFLAILLIPPLALLSPFLAGLNALFSRGLKRSSVTRIFALWNITSVVNIIVAIIYGSLYFWLSSLAVSSVHQVYNTKSFKSREDNEWWILPTILFLIKSLQAGLVNWHVANLEIQDYSLFSPDPDRFWAM

SEQ ID NO: 61716 - protein, 148 aa, Zea Mays
MAADTRRPWSETDIVNVVEQRIWHSMEEGHFENLPGKGKPLNLTSNPHADPAEDTLYRILSKNGCAPEWVELNKEIRGMILSWRSALRKAWANRSEDDDSNWSDDSRALQERIRQINDKVFRYNLIVPFGRQLFGLNWDKELDKLKEE

SEQ ID NO: 61717 - protein, 202 aa, Zea Mays
MDSDYVASLLMGMGSSAPALDFAALDAGFLETLCGGGGGLFGVSGVAAGAGCGGVSPEGSSVSDPAWARARGDDNVRKRKAPPTGSAGGKEACPGKAAEAKGPDGKRCRVGGSDSPVKPKVEEVAASDASVELKAQKKGKGKTAKPAVEPPKDYVHVRARRGQATDSHSLAERKREDQPEDEVSAGPSARMQQGSWQGTHAR

SEQ ID NO: 61718 - protein, 105 aa, Zea Mays
MAVTCEDVSLLKRVVDERLPLSKLQRSAMSSLSSSLHSSHHKSWTSSDKAIRSPDKHTLAEPASPVGKDLDGNECTVEVSDGNDSGEGILKRVDSKEDVDGWELC

SEQ ID NO: 61719 - protein, 96 aa, Zea Mays
MKGPEGRGEVEVAVSGIADQSSGKSKKDPGDSFRVLVHRAASAASKLVKHAYESSSANRQMDDELVPLKCCLMSVSLPWDYIAHDLLHKDTPPMDL

SEQ ID NO: 61720 - protein, 65 aa, Zea Mays
MNSLESQEKAHRTTLMNTAQYSMKRRRWSLLKVALFGCRNHHRFQEAFHGEQRHPALQHGQYPVM

SEQ ID NO: 61721 - protein, 1001 aa, Zea Mays
MWRRGAHADAAHHLPTAGPGASSSSTAAASAGAAAARRRRRPGLPCRPSHLFFALLVALFTASLLVVWQLLPIGDGDAAEGDGEAPPRLQGGEAGPMRFSSSSLALRAFDGESRLEAARSGRRLWASLAPVRVALAVGNMNIDAQSLMLATVAKSLVSLGYEVEVLAFTDGKARDIWENICLVNVVNTGALKSVDWSQYNAVLVSSLEGKGVVSILMQEPFRLLPVIWLIHEDTLGQYLRSYAKLHDSIQNVIEDWRTHFNACAYVVFPDSYHPLLYSPLDSGNFLVISGSPVDIWSAKRFGSSHSDETTRKQHGIEKDDVVILVVGSYLFFDDLPWDYVTVMRASATQILDIAKTKNLRVQFVFFCGNGSDAYNSAFQELTSHMGLPDVSIKRFSVTHDIRNLLMFVDVVLYGSLRQEPVFPPLLLLSMSSEIPVVAPNLTVITKYVSDGVHGFLFDSADPSTISSAFIQILGEKKLLDTAYSVALEGKLLSKNMLAHDCIKAHVKLLESVIHFPSYAKLPSSVSKVQERTWLWDPFELKAALENSLLEDESHASTKAVDILREFSQSNQTTYADTNDTSSYDYPRLSDWYDLGEIEIFEDIERREMEEIDERVERPLLSWDEVYKNARKSERLKSEGNERDEGELERTGQPVCIYEIYSGEGAWPFLHHGSLYRGVTLSKGGRRPRSDDVDAVTRLSVLDNPYYRDLLCEFGAIFAIANRVDTVHKLPWIGFQSWRAAGRKVSLSERAEETLEEITSGESNEDVIYYWSPMDMDQTSDFWLTCDSLNAGNCRSLFEDAFRAMYGLPENVLALPPMPNDGDHWSTLHSWVMPTPSFLKFIMFSRIFVDSLHSLNVNSTETTSCFLGASEPERRHCYCRILEVLVNVWAYHSGRKMVYLNPFTGDTSEQHLLDKRNGMWVKFFNFTLLKSMDEDLAEEADDGMHPGNEQWLWPLTGQVFWPGIADREREEKYIKKLDKKLKNKVKLLERQKSGYKQKPLGQ

SEQ ID NO: 61722 - protein, 125 aa, Zea Mays
MLHICNYELGIILIALPPGMSKHASESRHRIEDIALPFVVPPPRYKGSDKPATRLAMREAVAEACVLQGNDVVDLPDDTDEDVPDEDDEQVVELSDCSQQEKEEEKIYAETLWGQVDSSQSLEKD

SEQ ID NO: 61723 - protein, 457 aa, Zea Mays
MVGLAVACALSNMPLTKHLRVAIIDSNPALKSRSYLDKNSIPDSRVSTVTPATISFFKDIGAWEHVQQQRHAFFGKMQVWDYTGLGYTRYNARDVGKEHLGCVVENKVLCNSLLLRLQEELDDIENVIYPTRLVSLTFPLKTRQAGMKPTSREPLSVGHTTEEFHRSHLVKLDLSDGRSLYSKLVIGADGSKSNVRQIAGIKTTSWNYPQSAIICTVEHVVENDCAWQRFLPSGPIALLPIGNNFSNIVWTMSPEESLRHKSMSPEEFVNSVNHALDFGYGPHPHSTALDHYMEQFFSGIGSSAASTKECFEVPPKATRVVSERMAFPLSLMHSHDYVSKRLALVGDAAHTVHPLAGQGVNLGFGDAAALAKVIAEGVSVGSDVGDLTLLQRYEKERKAANVAMAAVLDGFQKMYSVDLGPLNVVRAAAFHGAQYISPLKKNIISYATGDTKWSLFQ

SEQ ID NO: 61724 - protein, 115 aa, Zea Mays
MFVSEQKLKRLLLLEFLSIALKEGVELQTSLNWGDELYDGESNKLQSIGLQSGDAYSPPENWCAERLGSQRPGNLPLHEVLQVYLTTWHANMNINRSRIGEIFELVEEEMKIKLS

SEQ ID NO: 61725 - protein, 217 aa, Zea Mays
MGSKGVALALLLCLSGAAVGAWARPVATKDAAADEKFLWLKKHFGKGGGGLGGGGGGGGGLGGGVGHGFGKGGGLGGGIGHGLGGGYGKGGGLGGGIGHGIGGGYGKGGGFGGGIGHDIGGGIGHGMGGGHGKGGGIGHGMGAGFSKGGGLGGGDGLGGGSGHGMGAGFGKGGGLGGGGGGGGGGGFGKGFGFGFGKGSGFGGGGGGGGGGGIGDHH

SEQ ID NO: 61726 - protein, 132 aa, Zea Mays
MAYAFLVVSPPDMSQCFEEMAAAASNKTSSKPGLNYPDLEEQALQFILDCCESNIEKYTKYLEGGAGSPEVPMNAKQANRTLLLKQLARDLCISERRILYRTQYILRRRLRDMRGGELRALSLFNGLRKLFK

SEQ ID NO: 61727 - protein, 492 aa, Zea Mays
MTTGMDHLCFYKLAVTFIRPFAKFMDMALSKKSSLHLSTKNTIIKKYDDMHGSSMFLQARGDQLAIGKETARRLGMGTNMYPSSALLRQNKDESIASLPIDELIEKADGFAGVFPEHKYEIVKGLQARKHICGMTGDGVNDAPALKKADIGIAVADSTDATRSASDIVLTEPGLSVIISAVLTSRAIFQRMKNYTIYAVSITIRIVLGFMLLALIWKFDFPPFMVLIIAILNDGTIMTISKDRVKPSPQPDSWKLAEIFATGVVLGGYLAMMTVIFFWAAYKTDFFPRLFHVESLEKTAQDDFQKFASAVYLQVSTVSQALIFVTRSRSWSFVERPGFLLVFAFLVAKLIATLIAVYANWAFTAIKGIGWGWAGVIWLYNIVFYFPLDIIKFLIRYALSGRAWNLVLEQRIAFTSKKNFGTEERERKWAHAQRTLHGLQPPEASIFENKTTFNELNQLAEEARRRAEMARLREVSTLKGRMESVVKQKGLDI

SEQ ID NO: 61728 - protein, 530 aa, Zea Mays
MFANDEDSLLGSGSLSGGAINLPGTKRKYDVMASPAKSISSPNPMSPPRFCLSPKGNSFCNSKMAPITPVSTAMTTAKWLRSTVSPLPSKPSGELLRFFSACDKDVTDDIVHRAGIILGAIFTSSSFGEQICTNMRSANRMDAIWTEQRKMEALKLYYRVLESMCRAESQILSGNNLTLLLSNERFHRCMIACSAELVLATHKTVTLMFPAVLEKTGITAFDLSKVIEGFVRHEDTLPRELKRHLNSLEERLLESMSWEKGSSMYNSLIVARPVLSIEINRLGLLAEPMPSLDAIAAHHNISMGGLPPLPFQKQERLQDKDEIRSPKRACTERRHVPVDSNSFRSQVKDSIKLKLPPPLQSAFASPTRPNPAAGGETCAETGIAVFFSKISKLAAIRIRSLCERLQLSQQVLERVYSLVQQILSQQTGLFFNRHIDQIILCSIYGVAKISQLQLSFKEIVFGYRKQPQCKPQVFRSVYVHWPPTSHNGKTGEDHVDIITFYNEVFIPAVKPLLVEVGPGASPKRKEEGKV

SEQ ID NO: 61729 - protein, 171 aa, Zea Mays
MWQSQSSRQSPSPAHIKFPRPGDTARGNATQPDEAKPSKQIKASIRPTRARGARKLSQRDGVQRLVHGGGGARAGGTVPAAPAPGAAAGERGRRPARSVPAPGAAPGAGARAPGDFLFGFFCLPLPEYGRGGGWVALARVPDAVLYTYRRSLSVTSSSSSFSSSMSSSEDD

SEQ ID NO: 61730 - protein, 279 aa, Zea Mays
MVDVEEAIEGQPEVNGVSNQLIKTLNITKDGSSRSIDVLSDSTAQESFLEAVKPSGRINACLAVGKDMLYLYGGMMEVKDREITLDDLYSLNLSKLDEWKCIISASESEWLEISEEEDDDDDDETDDDENEEGDASQTDEDEEESDEDAAKNVSSAVSLLKGESKTMRRKEKRARIEQIRVILGLSDSQRTPVPGESLRDFYKRTNMYWQMAAYEHTQHTGKELRKDGFDLAETRFKELKPILDELAVLEAEQKAEEEASASTSSKRDTKKPKQKSARR

SEQ ID NO: 61731 - protein, 682 aa, Zea Mays
MVKRAVIVTPTSLVSNWESEIIKWLKGRVQVLALCESTRADVLSGIESFLKPLSRLQVLIISYETFRMHSSKFERPGSCDLLICDEAHRLKNDQTLTNKALAALPCTRRILLSGTPMQNDLEEFFSMVNFTNPGVLGDASYFRRYYEAPIICGREPTASAEEKKLGSERSAELSAKVNQFILRRTNALLSNHLPPKIIEVVCCKLTPLQTTLYNHFIHSKNIKRLISEETKQSKILAYITALKKLCNHPKLIYDTIKSNNSGVSGFDDCLHFFPPDLFSGRSGSWTGGGGMWVELSGKMHVLARLLGHLRQKTDDRIVLVSNYTQTLDLFVQLCRERRYPYVRLDGSTSINKRQKLVNQFNDLSRDEFVFLLSSKAGGCGLNLVGGNRLVLFDPDWNPANDKQAAARVWRDGQKKRVYIYRFLSTGTIEEKVYQRQMSKEGLQKVIQQEQADNKMQGNSLSTEDLRDLFIFHEHVRSEIHKNLKCSRCDKDGDPALDGTGFAATGHKASIPGVQDYADIGGFGEISGCLQKMNSTHQQIGRPTEEDLGSWGHHCDPSTVPDTILQCSAGEEVSFVFTNQVDGKLVPVESMVRSAAHQQNGIAATGEKGVQIPNSPSKPGKQSLNGKNLKMGFHLKNSSLKCSTKSRPSPNCLQGLMKTSPFLDQPQIKKLHVASDISDDDFV

SEQ ID NO: 61732 - protein, 267 aa, Zea Mays
MEHRRVKDQESDGVSQKDIENFDKISLSSNTSTSSLSTAGGPKDSSKLKSIVTLALTLLTSSQAILIVWSKRAGKYDYSVTQQIFRLSQIQWAAFILLCAGCTTAQLSPSSDHVLQTPIQGWVMAIVMALLSGFAGVYTEVIIKKNPSRNINAQNFWLYIFGMLFNLVAICVQDFDAVMNKGFFHGYSFITVLMILNHALSGIAVSMVMKYANNIIKVYSTSVAMLLTATVSVFLFGFHLSLAFLLGSTVVSVSVYLHSVGKLQQRN

SEQ ID NO: 61733 - protein, 90 aa, Zea Mays
MYLYKSMQSGLHLLLCDPQKISALINHLALVIFLSLARTCHLCLFLLFIFKCHLHSDVVFLQERGRSQFYIQTRLPPPSQLKTLNLMVSP

SEQ ID NO: 61734 - protein, 345 aa, Zea Mays
MTSMRTSTSGRHGSPSTRRSPGTRTAMFPPRMTAGSAGSRRPARRIRARQLLREQEELLPQEEEEPVEAEESEEESEYETDSEDEQMGMAMVKPVFIPKSQRDTIAERERLEEEERQLEELVKKRLEARKIETRQIVVEEIRKEEHIEKALNEEANIEDVDTDDELNEAEEYESWKNREIARIKRDREERDARLKEKEEIEKVRNMTEEERREWERKNPKPLRQTKQKWKFMQKYYHKGAFFQEGADDVIQSAGKEDIYTRDFSEPTGEDKMDKSILPKVMQVKHFGRSGRTKWTHLVNEDTTDWNAPWSTNGPLRAKYNAKMAGMNAPIAKPKGSKKLKDWDAK

SEQ ID NO: 61735 - protein, 808 aa, Zea Mays
MASQGEPSASASDPKEKKDFSTAILERKKSPNRLVVDEATNDDNSVVALHPDTMERLQLFRGDTVLLKRKDTICIVLADETCEEPKVRMNKVVRQNLRVRLGDVVSVHQCQDVKYGKRVHILPIDDTVEGITGNLFDAFLKPYFLEAYRPLRKGDLFLVRGGMRSVEFKVIETDPAEYCIVAPDTEIFCDGEPIKREDEERLDEVGYDDVGGVRKQMAQIRELVELPLRHPQLFKSIGVKPPKGILLYGPPGSGKTLIARAVANETGAFFFLINGPEIMSKLAGESESNLRKAFEEAEKNAPSIIFIDEIDSIAPKREKTNGEVERRIVSQLLTLMDGLKSRSHVIVMGATNRPNSIDPALRRFGRFDREIDIGVPDEVGRLEVLRIHTKNMKLAEDVNLELISKDTHGYVGADLAALCTEAALQCIREKMDIIDLEDETIDAEILNSMAVTNDHFKTALGTSNPSALRETVVEVPNVSWEDIGGLENVKRELQETVQYPVEHPEKFEKFGMSPSKGVLFYGPPGCGKTLLAKAIANECQANFISVKGPELLTMWFGESEANVREIFDKARQSAPCVLFFDELDSIATQRGSSVGDAGGAADRVLNQLLTEMDGMNAKKTVFIIGATNRPDIIDPALLRPGRLDQLIYIPLPDEQSRLQIFKACLRKSPVAKDVDLNALAKYTQGFSGADITEICQRACKYAIRENIEKDIERERRRKDNPEAMEEDEVDEIAEIRAPHFEESMKYARRSVSDADIRKYQAFAQTLQQSRGFGSEFRFSDQPATAGAAAAADPFASAGAAADDDDLYS

SEQ ID NO: 61736 - protein, 213 aa, Zea Mays
MSSHLAAAASALPLPLPPPAVAAPSRALRALILSRGGAAAVCSSLRRGGTPACLVRRLCSHHSAAAAATALEEARRGRKQLGMTPALYDYLLANVREHPILRELREETAAMRGSQMQVSPAQAQLLSMLVQILGARRCIEVGVFTGYSSLAVALALPESGHLVACERDDRCLEVAKKYYQRAGVAHKPKCYLDLPYNGNNWYYMIESIYAFIL

SEQ ID NO: 61737 - protein, 90 aa, Zea Mays
MDEEDTELLEAMLCRHTDPSMFFMKGMESLKKAAEEPLYDESKGCTKEFTTLRSVLKLLMLKARYGLSDAGFDAFLSIVADMLPKENKVP

SEQ ID NO: 61738 - protein, 922 aa, Zea Mays
MFRTFQLMLMSIIAMTLFFRTKMKHGTVNDGGLYMGALFFGVLMIMFNGFSELALTVFKLPVFFKQRDLLFFPAWSYTIPSWILKVPITFIEVGGYVFLTYYVIGFDPNVGRFFKQYLLLLVVNQMAASLFRFIGGVSRNMIVANVFASFMLLVVMVLGGFILVRDKVKKWWIWGYWISPMMYAQNAISVNEMLGHSWDKILNSTASNETLGVQVLKSRGVFTEAKWYWIGFGAMVGFTILFNALFTVALTYLKPYGNSRPSVSEEELKEKHANIKGEVLDGNHLVSASSHRSTGVNPETDSAIMEDDSALTKRGMILPFVPLSLTFDNIKYSVDMPQEMKAQGVQEDRLELLKGVSGSFRPGVLTALMGVSGAGKTTLMDVLAGRKTGGYIEGDIRISGYPKKQDTFARVSGYCEQNDIHSPQVTVYESLLFSAWLRLPKDVDSNKRKIFIEEVMELVELKPLRNALVGLPGVNGLSTEQRKRLTIAVELVANPSIIFMDEPTSGLDARAAAIVMRTVRNTVDTGRTVVCTIHQPSIDIFEAFDELFLMKRGGEEIYAGPLGHHSSDLIKYFESLHGVSKIKDGYNPATWMLEVTTTSQEQILGVDFSDIYKKSELYQRNKALIKELSQPAPGSTDLHFPSKYAQSSITQCVACLWKQNLSYWRNPPYNTVRFFFTTIIALLLGTIFWDLGGKTYTSQDLMNAMGSMYSAVLFIGVMNCTSVQPVVAVERTVFYRERAAGMYSAFPYAFGQVVIELPYALAQDILYGVIVYSMIGFEWTAAKFFWYLFFGYFTLLYFTFYGMMAVGLTPNYHIAAIVSSAFYAIWNLFSGFIIPRPKVPIWWRWYCWICPVAWTLYGLVVSQFGDVMTPMDDGRAVKVFVEDYFDFKHSWLGWVAAVVVAFAVLFATLFGFAIMKLNFQKR

SEQ ID NO: 61739 - protein, 417 aa, Zea Mays
MAATSPFSSYPPRLHSKTLKPRHSRPLHHKAAPAASAPRPLLLSFPAPARHCGAGLRASAAQKNSADYKFDEDDDDDEEEEYEYDGEEEEWEEEDDEDAMNVEAMEEEARGAAADLAKRLARELHIDDDVREKRRNIRDKTSVSKHIPDNLLPKVAIIGRPNVGKSALFNRLVGGNRAIVVDEPGVTRDRLYGRSYWGDHEFMVIDTGGVITLSKSQAGVMEELAVTTTVGMDGIPLATREAAIARMPSMIEKQAVAAVDEASVILFVVDGQAGLVAADIEISDWLRRNYSDKCILLAVNKCESPRKGQMQALDFWSLGFSPLPISAITGTGTGDLLDLVCSELRKFEVLDAVEEEKNKVPAIAIVGRPNVGKSSILNALVGEDRTIVSPVSGTTRDAIDTEFTTADGENKIITWKA

SEQ ID NO: 61740 - protein, 374 aa, Zea Mays
MSTVFMTQLPRTLRLMEGEQDQGLFPASTFHVAKDPPILFPFMITSPVHVDQLQGQSSYGDQHLGQHVLSESTQQFTDRTMISGSEVFPRRPSPFGQTIQSIDGDMIQPSAYDPYDIVENQRTEGLSGGGWTVSSSSSSPPAKMKIMRKATSEYPEGGAARKPRRRAQAHQDESQLLTMQQQAMGVVVRVCSDCNTTKTPLWRSGPRGPKVNYQSLCNACGIRQRKARRAMVAAAAAAAASNGGAPPQAVSGVATQQQPKPKPARKEKRSDAADRSLPFKKRCKMVVVDHAAGAAAATATPEAAAARSTKDQADHVSGDKQVVAPAAAMRSLDQSEIATPPPSAVSSFHAAFPADEITDAAMLLMTLSCGLVRS

SEQ ID NO: 61741 - protein, 1434 aa, Zea Mays
MLPTPWSSTFPSPATGFLLLLALLPVASGTSVPTLGGFDRGEAAGADAYSILTFHDYTPPPPPVLPPPPAAPAATCAGDLHGVGDLDTQCVVHESVRLGGGVFISGNGSLLILDGVAVTCERPGCVVSANLSGDLLLGNRSRVVAGWVSLAAANITLGEDAVIDTTALGGDPPDQTSGVPTGTYGDGGGHGGRGASCFVKKGQAQEDSWGGDSYAWSALKTPNNYGSKGGSTTVEKDYGGGGGGVVWLFAEEIVMNGTVLADGGDGGTKGGGGSGGSIYLKASTMQGGGKISACGGNGLAGGGGGRVSIDVFSRHDDTQIFVHGGKSSGCLDNAGAAGTLYEAVPKSITVSNNNLSTQTDTVFLDPPYEPLWTNVFVRNCAKVSLPLRWSRIQAQGQILLSGATLTFGLTHYPYSEFELLAEELLMSDSTIKVFGALRMSVKMLLMWNSRMTIDGGRELGVGTSLLEGSNLIVLKEASVIHSNANLGIHGQGVLNLSGQGDTIEAQRLILSLFYNILVGPGAVLRGPLINGSRDEMAPKLNCEDESCPMEIFHPPEDCNLNSSLPFTLQICRVEDIDVSGLVQGTVVNFNRARSVTVQTSGTISATGLGCRGGIGRGKMLSSGFSGGGGHGGKGGDGIYNGGHVEGGSAYGHADLPCELGSGSGNVSGSSTAGGGIIVMGSLEQSLPNLSLSGSIEANGGNFTGLMSHATIGGPGGGSGGTILLFVRTLLLKKDSVLSSVGGVGGNGSGGGGGGRIHFHWFDIPTGDDYIPFATIKGTILARGGVSEGQGFSGENGTITGKDCPKGLYGTFCKECPSGTYKNITGSSKSMCSPCPPNELPRRAVYISVRGGVAEPPCPYKCVSDRYSMPHCFTALEELIYTFGGPWLFGLLLSGLLVLLALVLSIARMKFVGTDELPGPAPTQQSSQIDHSFPFLESLNEVLETNRAEESHCHVHRMYFMGPNTFSEPWHLPHTPPEQISEIVYEDAFNKFVDEINALAAYQWWEGSVFSILCILSFPLAWSWQQWRRRKKLQKLREFVRSEYDHSCLRSCRSRALYEGLKVAATPDLMLGYLDFFLGGDEKRTDLPPRLHQRFPMSLIFGGDGSYMAPFSLHSDRVVTTLISQAVPSSIWHRLVAGLNAQLRLVRRGNLNTSLLPVLKWLESHANPELNTYRVRVDLAWFQTTALGYLQFGLVLHAVGGVVAAELQDGCTSKTDQHSVNQNTCTDSQMGHSRTNDVLRKRITGTILNVDNLRMLGGRRGFFYLLSLILHNTKPVGHQDLVGLVISILLLADFSLVLLTFLQLYSYSMVDVLLVLFILPLGILAPFPAGINALFSHEQRRSAGLARVYALWNITSLVNVVVAFVCGFLHYKSSSKKHPSMQPWSFGGEETSWSLFPIGLVLCKCIQARLVDWHVSILEIQDRAVYSNDPTIFWQ

SEQ ID NO: 61742 - protein, 200 aa, Zea Mays
MASGRLPPALAVASPHPTALSRAGLAARVFAALVKHVFNPLPPALVKKEEEGDADANRRTTLLVRLLRMRGATDATRRTNTQAVPDRRGMALLAGHSDSEPITHHDSEPDQRHARPWPVAVLSEEAAAARRGQQEGDEHQGGDGDEGQRHEDALVDGEQAHLPHGRTRSLGNGGAEGPSAASGQAQERCLDARPCPCYSC

SEQ ID NO: 61743 - protein, 3400 aa, Zea Mays
MFEGVVSQVLYGLLRRYVKGIQKEQLKIGIWKEEILLENVELILEAFDYLQLPFALKNGRIGKLSIRIPWKKLGWDPIIIVIEDVYVCACPREDSEWSSDSLDKRELAGKLAKLNAIELAKFSRRVTDNQTGQSFLSYISAKILDSIQVSMRNVHIVYMDTHNGQGNFVFGLEFTSLSIQTDTQKQSFTISLMTRSRQDEVNKIIEISNVGIYCHQLEEEQDLCHVGALENDHSRDYLVNPFCVTVSVLANKAAKLDGTPQYNMTAELTALALSVDEIQLQQILNLCDYFTICALRTKYGRYRPSQSSLSKRCKGWYRMWWQYAQNSVLADVRRRLKKTSWRYLKQRLNHQLRYVKLYRMKLELLQKGQIVSEDILQELENMDRECDIDDILNYRTIAEQQLQESLVKSSIDTHSPGSPRSDEQLAGASQGWLNWLSLGMLGVGGTADSSSFAGVISEDIIKDIYEGTEFRPVSSAENCLKKENYYSLFVRLSISQIVTTVTSRRFGTKLVDTMFSGLGMECKIWDDAATILAWLDSLRVINPLNKTKILWAEKCSTGDGLGAPVVSIQVDFPKSNERSEASTRVVVQEFNAIYEPEFFVNVLYIYNVFSAFQFQHDRVLSSLNRFNNLGTRLVSKLKYMSANRKKLIWDLRIYHFVIRIPSQNCERKELAMVIDAGDVFIQSKDTIDDISRTQESNSFLDHISKSLPSYFSDDLLLGIQLDELYNQFELGLTGFQVKVLLPDRHNVSSTLIKLDASIALRLCVFLDEPVLKQLEVGFIVSSIDAYLSQTMYSTIVNLPRMKETNLFKNSVFDNTKTHVPKKLALNVSVSLKLAKLGLHVDLDGNFEESSGLIVGIEDIDIRYAICELSDLSLAMKTVNVTFRYWKDKSDSHVLCLSGNLTRCPENSVETCLDLHYRTHKHDDQIHHVYRLILCDVDLHVNPSVIGQIRMFLRKLDSGPSIGSDVESTMIGQSSMKSGAANGILPMFFLSNLCGADGTVFAGVSVDHFPFLVADHSCGYNFGCLGTQNVEAQESLYSKNEHCHDTSGLNGYHASDLTSNTYGKTQRSDCSSGSSNDPKNASRTVLDLSLISVRIHFPESCGTLVTITIPESISTLTYFDASSWDLLLSANNLTLASPWTPPNVNELVWGTASHRNASVLNVRVKKDLPALSTEVCVGIQNVCCVLPSKLLAMFVGFFLLDDWNRIAEQEFLVADNNLEGLRESHDCVTYKFDISDCVVFFPVEEQGLSCLKLEVPHFFCEFIANGSSVEFAKRIPKEFFSSECIVSRRVDVICIYARNASISLLIVSDQTDFMLKLDENVPKRIHSLIEKLDADVWIQVPCKDIPYSQQPTSPTSVMSKISRCNLIAEDLYFINGMETVIGVVDQLISIGNESKMYKGNASQFLDHRSFCEGNPDPNECTNLTISIKDLMILLGQSKAKGLALERIATANMEFDVSAVLVGEKPERIDFDVVSLTLQSPGGYTLISIVSDGPLSPVFFKFTKHHTGQDEILLSVPLFEIWLYLQDWNTIINHSHSYIKTEVNSMPVEHAAALSQFPEMVSSPLIASEFGSPDDFNLVVTCETISGVLHIPIWGKEENHTSNHMGVTPASFPMEVGTHETDDIQYCEPKGCKFVTLTFDTKHFVVMSGDSCINFRCDLERLKVLLEMIQENKGTSVPFVHISKVKSSGYVRQSERNLEHLSVDLQAEYMDVSFSHQIFNFWHNMELKFPAASSASSFYSVAFKAGLRKGSLLLSDGRWSSHGPVIETLLKNLTVQFSQMKDRTEVSAFVDLLVNYNNIDKVMWEPFVEPSRFQLNMLRKCGDCGLDISPSTDVCLSSSKQLNLNISEPLIEALLRLNQMITDSLDPSNGSGIWEDPGILRLNHDDVRTRRYAPYFLSNDTSLPFRFKVYRGAVNSDDIGSFSVIDENSVPAGYAVPIYVEETPDEFFFQHREARSSDHLIEKRMSALSHYMISIEFDGTSGPSKPMSMDLVGIYFFEVNFSSSKKPILGEESLGAFSSNAKGNDGLIVPVVLDVSLQNYSKRIRVYSTVILYNATSMPLELRFDIPFGLASKVIGPIPPNKEIPLPVHLSEAGQIRWHPVGRTYLWSETRSLSSLLSRENRVGFMKSSVCYPSHPSNDPFRCCVSVEEYNVPSSVSTKKKQLCSERLNTQVSGSSTPNTFKQNLTRTHFIRHVKLNTPLLIKNYLPVYISLAIDNGGSARVISLKEVGSASILFVDPSNDLGITIDIQDYRSLNIKFPRAESFSTTAKLNGFKFSITESITFYSNLSNFPLNVMLEKSMDARSGARELYLSVPFLLYNCTDLLLTVTESSSERSGPTLVIPPSFELDGYARHMLEKGGLSLVNPSVQCFTGKMPQIYLMDGHCSSSDISCTRNSESVKKDLDNSVKAYMFAPDGHTPATELSVKLNASPPNNGTETTRRNWSNPFLLVPASGSTNVTIPQSSTSGAFLVAVASIPVSTELFGRTRAIAFRPRYVICNACSNDLFFRQKGTRFSKHLSSGQHSFLHWSDTARDLLVSIRIDGPGWQWSGSFFPDHLGDAQLKMRNSASGLSYMVRVEVQNADLDLNSNRFSGKNNINTGTVLILLSDDKTGFVPYRIDNFSMEKLRIYQQRCESIETIVYPYTSCQYAWDEPCYPHRLTVEIPGERSLGTFNLDILNDDVHVSLPSTSEKAARQFCISIHAEGAIKVLSVLDSNCHNKETNEKDFLGSKEPKVVDHKLELDMNFAEVIKLHLPFIGISLISSCPQELLFASAKEMTVVAMQSLDQQRFTVQIQSMQIDNQFPDSPHPVMLSFEGSHKGKSMNFFKSKDTKLKSANDILSSTSEPVLQFAAAKWRTKDVSFVSYQYINISLAPLRLELEERLVLSMIEFFRSVSSRINIGHLEKSIELSIGGATDMLREYEKISKNISDKLLVQDSELLPSVVPVGAPWQQIHLLARKQKKVYIELFQLTPVKLTFSFTSTPWLNRNEGGSDPSVGFNNATAIQRGLMALLDVEGVPVYLGEIIVENLMASWQSVQDILMRHYSRQILHELYKVLGSAGVIGNPMGFARNVGFGLKDFISASRKGKLQSPVELLNGIAQGSKTLIGSTVYAVSSATSHFSKTAYKGLVAFTYDEQAASKMEERERQLGLHGEGVLNGFLEGLTGLLQSPIRGAEKHGLPGVISGLAMGTAGLVARPMASILEATGRTAQSIRNRSNPHESNYLRVRFPRPVARDRPLFPYSWEEAIGESLLAQADSGRLKEETFVMCKTLKGAGKFLVLTEKLLLLVSSPYLVDLGSPRFIGVPPDPQWSIDTEMHLKSVVHLDRSQEVVNIVGSNGQTSPRDKRGGTRNRVMSSAFVPLFHLSIELPNEEDAEGTVQVLQALIEKGKARRWDKNILHRSNIS

SEQ ID NO: 61744 - protein, 150 aa, Zea Mays
MEEPVPADPPRIFWKSRSSANGRSLQQEPDKDATEETNEQAQEEPMKTDDATDTAAAAAATAEPYPKANLSEKRKALFEPLEPINGKRGAAETLLPPPDFEPASYPKGWLVGKKRKLVNVDVVESMRRIAIQEMNRKAVLLLNMHACIKC

SEQ ID NO: 61745 - protein, 1076 aa, Zea Mays
MPTYDAQASSATLMETLLSQYSFHQKFLGIDSTIFGLSKHLFLVQKDLGLCYIPEISVVLSSLSYSLTGLEFEHEQLAALKLLSFLIDWKYENVLDSKEQTHHVSVELLCVLAVINLTISPSKSVKAVAYHVLSRFSLFVLDLPASHSSEEQDISTSYHISKPALLLPKLLHHLWSKPSSSCFSFMKYIATKASPDSGQSDLEANYWTHQINAYLTALHREKHTLDVRSSKTTSVAISSLISSVASVLVMHPKLGTSAAESLAMLGTSDPRLGMPLFVVILFYSKILCSSGKFSAEISLSLLESLPSLAIHGFVLPLALQWISPMLKRDSNSVLYAMAVRLLCKIWAVTDWAFPNLQVVLDPENFSNFISDREISASIATSIRDVCKQNPDRGVDIILSVSFCIESRDSVVQALGLESLSYLCEADVVDFYTAWKVISKQVLDYYVEPAVAHSLCILLRCGAMDAEAYSVISGNLVRTLWRIGTSKKNNPDPLWDKARGTAFHSLSNYKVSLIQDAIPDFWKLNYEFFTNEHNLAVLKAMEHLQDEIIRYEHICLVSLLTDEPCSHRNRRRVTTDKRTAVHKFEKLLEVFPRAVFKGMLSHHQLPGAALLTLNFTPKDILNEGKPKDLPRVHSAFEQAFVEIAESMYVSRNIVVALLALQSWKSFVSNWMQAVVALLDTKDSSKLNKAMKAANDIFKILCDQVPVSTPQVVVNIALVIGALALIVPPTAHLVVSSVSDFLLKWLLQYEHEHKQWSAALSLGLIFNCFHPTDKKSRLQVINGFLEVISKTESCLVKGACGLALGYVCHGLLTRAHNAVDSEVEAITQLNERASVEDILHALVTLLIQLCPSSCYSLKKLSIYGISSMGGMEENIHSFSDDPWAVAGLVIGLGNSVVALYRLGAYEAVTEVKDVLISWIPNVDSNSALFDEIDSVSLCMGSCLALPSVVAFCQRVELLNDDLDALFNRYTSLASELLNLNKSGIIFQNLLMAICIGAGSFLSSILNDGVHAMEFNGVKGFLDTLRHIYTHPFPPLVHLGGMFGVVNAFGAGAGDLTGVFSKPMTSQIKHEVSFIHLNT

SEQ ID NO: 61746 - protein, 243 aa, Zea Mays
MPDADALGRRSSLSLFLSLHILPLSIFVLLRPAFRRDTHRTFPSGRYPPRASPKSYATSLISPPAPRAPDSQRARRAVRQLPWPSLGACACGSWLLASCCSSYYLFRAVIDNPAAGAELGVRETQGHARDEHVRWDGEGWVRRRRWADGRGGAVAGPQAAAAVDARPARALRRGRHQARRGRQGDAQVRAAADGNERAHLVPLEESPPEIQAWKADQERHGFGRRQRGIRGAGHQFLHTSTSS

SEQ ID NO: 61747 - protein, 609 aa, Zea Mays
MVYNLGQDKADRVSVRALIALFLILSWVVIIVQCFTGSDILRWRSFYATHDMAWKAHYREVFDHGIREALCCLGRAKYLTVLEEDEVYSVARLLGDLVAYRASGTGHLELLAGLALLQKHGNLSELQTDLVEASHELMQEAAFLHPFAEACYTGPLLDFGRNPILFPCAWVYRQGVLTPWARRRRPALDGDNWWRGHAAAFLRFVNIPPKALLKGRVCQSKREAAYFVVVLHDKRTVVIGVRGTETPEDLITDGLCRECAFTMEDLDGLVNSEQLPATTRERVISTFPHYGHGGIVESARELFMQLNGENTSSGRLGFLSTLLGEGSECHGYKVRLVGHSLGGAVATVLGMMLYGKYPSVHVYAYGPLPCVDFVIAEACSHFVTTIICNDEFSSRLSINSILRLRSAAISALSDNSPADTAMIQKLARRILHVNRYHDNGPDDGIIQGYADHTRTADTTVPNERQISHQIPLCNTELDLHNTQNGFFRYNGSSASIDEHLSYEGISSGHDMQIIPLDGADSGFEGHQTSYREIPVEPPEMFLAGLIVHIVRQRRSLFPLWKCWSIQETEPPYKAVLAKRENFRDIVVTPYMFTDHLPWSSSPSLLAKLL

SEQ ID NO: 61748 - protein, 242 aa, Zea Mays
MLKDLTTQVNKLKAEYTSLSEEACELTQEKNELRDEKASLKSEVDNLNNQYQQRMRVLYPWVGMEPSVVMGPPPAYPYPVPVPIPSGAVPMHPQLQTYHFFHSQASGTIQNTCIPYMAYTQPCHPPTDQPSNQLNTPVAHSSSHRSNSPAQDCRSKSSTLQQPSCGVRSSDAGDIATDLELKTPGSSCQSHAEIAYNDSSSDLKTKKHCIKQINDCTLTESSSSSRCSSNGPPDVSNSAIDE

SEQ ID NO: 61749 - protein, 51 aa, Zea Mays
MRPARQVSLACHAIAMAAASTKSREEYLTCAPPTANQSIISEGCPPPRRRR

SEQ ID NO: 61750 - protein, 526 aa, Zea Mays
MALAPSPPALPPNPALPLPWWGRAGRGALLGARARVRAVRAALRPPSQWSVGSWRGRPAQQQPEYPDKADLEDVLRTVGTFPPIVFAGEARTLEERLAEAAVGRAFLLQGGDCAESFKEFNANNIRDTFRVLLQMSVVLMFGGQMPVVKVGRMAGQFAKPRSDGFEERNGLKLPSYRGDNINGDAFNGESRLPDPHRMIRAYSQSAATLNLLRAFATGGYAAMQRVAQWNLDFTENSEQGDRYMELAHRVDEALGFMSAAGLPLDHPIMTTAEFWTSHECLLLPYEQALTREDSTTGLYYDCSAHFLWVGERTRQLDGAHVEFLRGIANPLGIKVSDKMDPAELVRLIDILNPENRAGRITIITRMGPENMRVKLPHLIRAVRGAGQIVTWVTDPMHGNTMKAPCGLKTRSFDRILHGRYGHRRLRHHQPARRPGHPVPVEHRARVLPLHGRSRAGRHHLQAHRARRLPAYQAFSGESVEVIAISVRRGQARVCILQRHPDLVLQHLAHGPWAKYNSLWGIDLSDS

SEQ ID NO: 61751 - protein, 117 aa, Zea Mays
MNQRMPLIYVKLYMYQICRALAYLHNCVGVCHRDIKPQNILVNPHTHQLKLCDFGSAKVLVQGEPNISYICSRYYRAPELIFGATEYTTAIDVWSAGCVLAELLLGQVLQHGMKLSA

SEQ ID NO: 61752 - protein, 836 aa, Zea Mays
MRTSCALPPARPLSSWWSPSGPSAGVAAGIAATDAGAVAAPKEEEKAEYLKDRASLLLLLLQLRKGEEEEASTAAMCELMEELLEHSLEASANPMKVVEYVQKESPLIAVVLKAHMHCEACAEGIRKRILNMKGVQSVEPDLKASEVAVMSKKVRRVEAVVAELECRNSELFGEKGELEEKLVAAKEVLARLTAMTREQEARVFARRRESDLVKEKEAVAKALDAEKAEVARLRLKIEELEKCSGEKDGDIRKMKPAYFANYAHMGEGTQEQALTYSCRHQKEWVIDSGASKHVMGISSSFKAYIPHTHYEFVQIADGSSQRIHGVGSIECTPSLSSSSVLHVPSFPVNLISVSSIIDQFKCTVTFDENTCVFQEKGTGRRIGTGVRRDGLWFIGHEESALRAVAERDVKEILLLHCRLGHISFETLRRLHPAMFKGVDKSRLVCDACELGKHTRSIYPSIGLRSCEPFTMIHSDVWGPCSVTSVNGAKSFVTFIDCCTRMTWIYILKHKNEVFQCFQDFHKLVANQFNARVRIIRTDNGTEYVNNEFRSYISDQGIIHQTTCPGTPPQNGVAQRKNRHLLEVARSLMFRMNVPKYLWSEAVMTATYLINRMPSRILDMKSPAELLLGNQNFRVPPKVFGCVCFVKDHRPMASKLDPQAVKCIFVGYASTQKGYKCWDPIGRRLFVSMDVTFREKEPYYTRKVDLDNFLEDFSPVNGRDWREGENDSGQDDDCGQDSDLVSRTSGGVIVGGMVPPEMREVITTEIVSNDERSGGGDQDDPTVNSQEEIKDDEAVIVGTIPCSIGAEVNKKQGEQRPIVYYRRRAKKQGEQPLPEQT

SEQ ID NO: 61753 - protein, 821 aa, Zea Mays
MTPYDSIANEPAENPLVIVEDLNSSQLSGAKRFSDSTGEMRQSSKKSKRYSEIPQDLYAKIPGNTASFKHHSKATDVFNPGTPNHLLPVLGLCAPNADQVNSYKNSICAPSIKERKRASGDIVKQLSTPADHSNVHRNEAQSASDKAIFPGASEEALRRISNMIPDSYFPFSHIPPISGKGVDPVENPGPSIASFQGNLGLPNFSLEDNAPLKHIKPIPDIFPSLSLGAHKDYIRSSVPELPDGSLLPNFMADITGTSKQKSFMSGLLPGLGLSPGQPIHSAMPDNHKKVLDNIMMRAQYASNKFLKKRSKLDYWSEDELDALWIGVRRHGRGNWDAMLRDPKLKFLNNRTSEELALRWILEEQKIIDEPMSTSTRRSNSAAFPGISDAMMSRALNESNFSKMRMEQPKLQSHLTDIQLGSSDILSTFPHVDAASYINSGEGGPSQIPWQDFKHRSSYAGDFPAGAFDKLEKPDVGPIPPFMPNPFMTDSIGSLPINRKNNSSIPHSEIRSSSRENILSGVSDGQINLLHEMQRRRRVRSGKEPIEMNLNHIDHSNLQLDNTSDLGGLKPNKLPHWLQEAVRAPSSKPPERELPATVSAIAQSVCLLLGEQEPSIPPFLIPGTPLSRPKDPRINSKKKLRKAQQSNSHVEHSKIGSGEGDCVTTPAPPSIEASPALPVDCDDGEPSLNLKSASLSSSAGSKGLDELPPTFKEANQTVDGSEAVAAKSDAPEIGCQVPGSSPLHDKGSESSGSPVKDTPDAGIRLPGSDNSVMAFSALPLVDEAPGTSSRAADTPVPCDGNESKEDVPLDNAESTRKLEPNG

SEQ ID NO: 61754 - protein, 56 aa, Zea Mays
MPLKSLQEDILGLFLISFEVFSCLGVGGLRLPKVLKNVTNNVSQSIIYVQNPSDMG

SEQ ID NO: 61755 - protein, 228 aa, Zea Mays
MANDDPMADEAGVEDAFTQEINHSYVPRYHVLSWMETVEGMVAGVASLPPVYLILNRDLLETGWGWKRLVPYRPGYVELHVFKKYLGDYFDHNREAFLCAEQKPDPFGWIVAEKSALIAAAKSCLKMEKALLRYCASFLTPDDKRLILRIKDQAKQMIQSEGDQSLIVTICLECIAKEAELMYNYLPCDFDTTEEVAVCNKVRRSALNLMLYKGSESAVAAGAMMVCS

SEQ ID NO: 61756 - protein, 1218 aa, Zea Mays
MSIHICKNGYMPGYEVWVHHGWVTRRSRSTGVGLLMAVRGSTYMIRQYIKEPGFNVANEMASINQEIRQIGRMMVISGNILEPPEWILQAQDLACDVQDFTDIYTWLQSKSRRRALAHIGYIAQLKDRISSLREWQQRGGSSSSSSQQERAAALSFSRRSCGPCAPEDVLVGIDQPRKELSDLIFEREDVVHIVQQKPRVVSVVGYSGIGKTALARAVYYDRSVRSAFDDVAWVVASECSHGCDLVSKICQQVKDEQAGNGAVVVPDCYRLKEIMRDKRFLIVIDDLHGAGMWNDIKGVFSETHSGSRIIVTTSIQSVAAACTPEPRYIYRMPSLGNLDSEKLLWMRVGRHASRTPALEHALGNDTLKKCGGLPLALISVANHLCLGKALFEEMDRVLAKCYDSLPDNAHRMCLLSLSTFPQGHVMKRKRLIRRWIAEGLAVVGDCELSAEQVAGNIFDVLIDRNVTEPVLTAGHGSRSKVKACLVLGVIKDFINKTAVSNETVAIIQNDELLLPNRMLVAHRPVRRLLVHGGTTKKSEAVAKAIGLDQGCWLLRVLDLEACQGIDKSILGSICKLVFLKYLSLRGTDVYGIPKKVKKLQCLETLDLRDTRVEELPIQVLMLPRLAHLFGKFELPPQLKHGHRTARRRRSRLQAFFSQRSRLQTLSGFVMVDDSNSFEHMMITIKSLRKVKVWCKNSISSHQERHLASSLQQRLVAGNSNPLESLSIDFGNESINFLNDVGAISALIGSMKLQGRLTSLPSFMTSYDTTLSQLQLSSTGLGIEALSLLQILRRLVSLKLAQDGDGFWGDCFAVKKDGFPSLLRLCIQARELPQLHIHEGGMSSLTSLELLCPMFASRGQSDSDSDSDSDNLSPVAFRYAYAETYSEKRSKQVLSVEKPKAVDPGISFKEPSSETRSEGTEIQEIDSPKTSKEAGPSIGFKEPSSETRSEGTEIQEIDSPKTSKEAGPSIGFKDIILPENTFRRNFSKQVKSRFDLKQHFKGMEYLQCLNELVLHRSVSDEVLDAWTKRASSHINRPKVTRQCTRAALSIGRGPGTAKHEKEGQHRSQLMKNRGSETAIHEEVAEQHSSVETSREEAGLFQEQTSDTSHKEEEEEEGEGEEEEEEEEEEEEEECTSEVGAGKHSSVGTSREEAGLFQEQTSGHKEEEEEYMSEDWALSQPCDMLIGNRMTVRCLGWPDSWRLRSGMISSPMLICRPLGP

SEQ ID NO: 61757 - protein, 365 aa, Zea Mays
MELATVAAAVASAAARPHGPFSSPRAVSASVSWTSLSLAYTSRCLSSTSSRRRLRWLPVTSAAVELREATAGGGDSLRVTKTPQPGSSVKFSVEVPTSIIHECYQSTLQEYAKRVKVPGFRPGKTIPENVLINYVGPQHVQDATIEAILKHTLPQALSSVEERALEDSVRILTQFDDMRNSFSLDNVFRYDVAVDVAPEVRWLSEDKYRNLKVVVEIDEAVDAEKAAEKELQRRHKALGLLRIVADRGLQIGDLVVLDIFAESINNDGSRGEKISSAESTGFHLDTEENSNLVPGFLGSLIGIRAGETRSFPIQFPESFERESLRGVRAQFTVVCKELFYRELPVMDDSLAVKLLPGCTTIDEPF

SEQ ID NO: 61758 - protein, 696 aa, Zea Mays
MANPGGTNPFASPADAASSPWDDLPDDFFLSTSITSPSPSPPPIPPPIPSTSPRHATPHRSTSLPPASTPSAATSASVSVSASFSDPRPRAAPASHQHQHQPQLLHPSHSLPAFPAAASRSPAAAAQVWPPPPGPHHSGSIPEFAAAPASSAHLPPARTAVRADRPPPLDLRPRPPRESQAGAALRVLACCCDASRSEAGAAARLWAAGEAGVRAWDLADAFRSPSQQRWGDESSAPFRESRRTPPALCLAADPARSVVWSGHADGRIMGWTADPGPEAGECLSWEAHRGPVFALAVSSYGDLWSGSEGGAIKVWYAELIQKSLVSQTEEKHKTLLVERSSIDLRDMVSDGGACPLPAVDVKLLLSDNSRSKVWSAGYLSFALWDSRTKGLLKVVNIDGQVDTRFDILSAQDSYSYETKQTLFSPRKEKARSPVGFLQRSRNALLGAADAVRRVAVKAGFGDDTRRIEAFTMSTDGMIWTGSANGSLAQWDGSGNRLQEFLHHSSSVQCIYNFGTRIWVGYMDGNIQLLDLEGNLLGGWIAHSSPILSMAVGGSYIFTLAGHGGIRGWNLASPGPLDNILRSELMEKDSSYKSFEYMKVLVGSWNVGQEKASYESLRAWLKLPSPEVGLVVLGLQEVDMGAGFLAMSAAKETVGLEGSTNGEWWLDVIGQILKVHSFVRVGSRQMAGLLIAGENKS

SEQ ID NO: 61759 - protein, 139 aa, Zea Mays
MRVSSIVHNHGFGDFDRHRFRSPSPMSSPNPRANLPGNGFSPWSGLQERLGFPQGTSMDWQGAPPSPSSHVVKKILRLEVPVDSYPNFNFVGRILGPRGNSLKRVEASTGCRVFIRGKGSIKDSGKVREVSVPFLHSPN

SEQ ID NO: 61760 - protein, 312 aa, Zea Mays
MHHHHHLTCLNAKETLGWMALLSALRQIAGISAGPLSDALKAELYTLVLGTFSLPINVPGTNYSKGLQARKKLVAMLRQMIADRRSSGCARDDMLDALLSGNEGTRAKLSDDQIIDLLITLIYSGYETVSTTSMMAVKYLSDNPKALGQIRKEHLDIRKAKSPEDPLDWNDYKSMTFTKAVIYETLRLATVVNGLLRKTTHDVEMNGYVIPKGWRIYVYTREINYDPFLYPEPMVFNPWRWMETNLESHPHFMLFGGGARMCPGKEVGTVEIATFLHYFVTRYRWEEEGNNTISKFPRVAAPNGLHIRVQDY

SEQ ID NO: 61761 - protein, 135 aa, Zea Mays
MGQFVDDDIRDLPRSPWRRSTPPSPPRTTSTSASSGSASSTATSTSVVVAVGRSDPASVTQTKQPSVPVQTTYLVSRFFMALTLKDQSILVNGDINEGLLRLCHKLHRLRKEYAYTFESTSLSYQCSEVSRILQG

SEQ ID NO: 61762 - protein, 693 aa, Zea Mays
MMSDLRKTRQRVAYAGKAGDARYPNPSYWGKLCFMSTPDGENCGLVKNLAVTAIVSSRVMQPLIESFISCGMSKLNDIPTEHIQRMDKIFLNGNWVGSCENSASFVFRLRCMRRSSLIDPQVEIKRDKHHNEVRVFTDAGRILRPLLVVENLNKIRKPKGRSFSFHELMQQEIIEFIGVEEEEDIQCAWGIRHLFESEGAISSYTHCELDPSFLLGLSCGIIPFANHNFARRVLYQSEKHSQQAIGYSTTNPHIRVDTLSHQLYYPQRPLFKTVIADCLGRSDYASFGRKNDFARPEYFNGQNAIVAVNVHQGFNQEDSLVMNRASLERGMFRTEHLRSYKADVENKDGTKRLKLKEKIDFGKTESKRGRVDNLDDDGLPYVGASLQTNDIVIGKVSESGEDHSIKLKHTEKGMVQKVLLSANDEGKNFAVVTLRQVRTPCLGDKFSSMHGQKGVVGFLESQENFPFTHEGIVPDIVINPHAFPTRQTPGQLLEAALGKGIACKGTMRYATPFTTASVDVIAEQLHRAGYSRWGSENVLNGRTGERVQSLVFMGPTFYQRLIHMSEDKVKFRNTGPVHPLTRQPVADRKRFGGVKFGEMERDCLLAHGSAANLHERLFLLSDFSQMHICQTCERVANVVMRSVPGGKKIRGPYCGFCKSSENIVRINVPYGAKLLYQELFSMGICLKFETQVC

SEQ ID NO: 61763 - protein, 726 aa, Zea Mays
MPTALTVFECPRKVVWLGSGGRQLHLLHNTRSSRSVSVTQTPDSNSFIHLYYYTEAASTASHCRTSRPIASSPPHRAMERQRSSSSSSPYQFLSPKSLLLLSFASSSLLFSFLFALFAIRHGRPLNLPFTTPNTSYSFAMPNTSSSFAMPNTSTAALAPLPPPGNGGGSMGGAVALAAEAGYAVRGHGSGDSVADGARRAVTGDLSARGVGPPMEVEGAVTGGGNGGAPATGKVLEAQEVAGAGNNSTGTSDLAMHAKEKEVTGVGGDADKLGKFPVRKENLAEGSRQHVGWETKTQLNAGSASSSQEVDASMVRPEGAESLTAVNLSMDDEAAMQVRGESVVQDDVVVVGDKRYSSVQAAAYASEQVEQLESSHLSAGNNSSLAAPAPANQNKQDPNLIEEEAVTSKMDSTRSDTKRCDVYDGSWVFDDETYPLYTSDSCPFIDEGFSCGANGRTDQRYMKWRWRPNHCNIPRFDARKMLETLRGKRLVFVGDSINRNQWESMMCLLRTAVPDPGRIHETRGRRITKEKGDYNFKFLDYNCSVEYHVTHFLVHESKARIGQKRMKTLRIDTIHRSSSRWKGADVLVFNTAHWWSHHKTQSGVNYYQEGDHVHPHLDASTAFQRALTTWASWVDSHINPQLTRVFFRSSSPSHFSGGEWNSGGHCRESMLPLNDTRARPVPERNLILEQDRWSPICIWPEDGRFNRVERPAGLQPLVPSWSPRYME

SEQ ID NO: 61764 - protein, 947 aa, Zea Mays
MSSDIRKWFMKPQDKSAAASGAAGKPSGSAAEKKPVLSIPEKKSAPPALASCDHDTSARRKTSKYFGSKAEKDSDVQMADASGGKSAAKRKLQKCNDEVKEDSKPFPAKKMFDDEEDDDFVAPAKKKTPVKPPPSKKLKVESNVEAPAKTTGVDDAEDEDRMDEDAKTPSKGAGRGRGRGGRGGAGAAPGGRGRGGGRGFMNFGERKDPPHKGEKEVPEGAPDCLSGLTFVISGTLDSLEREEATDLIKRYGGRVTGSISKKTSYLLADEDIGGVKSNKAKDLGVPFLTEDGLFDLIRKSKPAKAPVDKRQNNNSSEKLQKSQTKSSPAKVEKRAEASAVGKSIASNSNAASASADKQKPKIVDRGSMQWTEKYRPKVPNDIVGNQSMVKQLHDWLKSWDALFLHSGQKGKGKKQTDSAAKKAVLLSGPPGIGKTTTAKVVSQMLGLQAIEVNASDSRGKADSKIEKGVGGSTSNSIKELINNATLNYSDNRLKHPKAVLVMDEVDGMSAGDRGGVADLIASIKISKIPIICICNDRYSQKLKNLVNYCLMLNFRKPTKQQMGKRLMEIAKKEGIQAQENAMEELAERVHGDIRMALNHLQYMSLSQSVVKYDDIKERLNSSSKDEDISPFTAVDKLFGFNGGRLRMDERMDFGMSDPDLVPLIIQENYINYRPNTIGKDESGVKRMNALARAAESIADGDLVNVQIRRYRQWQLSQAACFASSIVPAALMHGNREILEAGERNFNRFGGWLGKYSTTNKNRRLLEDVHSHILASQQANLDRDALRLDYLTLILRELTDPLKKMSKDEAVQKVVEFMDTYSLSQEDFDTIVEVSKFKGHPSPMDGIQPAVKSALTKAYKQGSSSRVVRAADLINIPGMKKPLKKRVAAILEPVEESLPEENGLASAEDDEDGSSDAENNGACSPFPRNKHKKSGRCLFVWLMCQALG

SEQ ID NO: 61765 - protein, 294 aa, Zea Mays
MAGWCEQAVALLQRPAVAEMAVDVLLCAVPIWAAVMIGLVVGWSWRPRWTGLLFLGLRSRLRILWVPPGLGARRLWFACTALSACSVATKLISSAFRRCRGKHQDRASPDDDAAATRDGGCRADGRTNFEGEHDTVTEKDLEHLLQLLDNKESGDTAWQNLMERRTSNMTYNAWRREPEEGPIMYCSRTIFEDATPELVRDFFWDGDFRLKWDPMLAYCKSLDEFPQNGATIVHWIKKFPFFCSDREYIFGGRIWESGKTYYCVTKVHVHSVLLTDTSTHVMLMLPPLSEKEFI

SEQ ID NO: 61766 - protein, 89 aa, Zea Mays
MNVKSSGELLQEYKGHTCKSFKMDSCLTNDDAFVVGGSEDGYIFFWELVDAPVVARFRAHSSVVTSISYHPTKACMLTSSVDGSIRVWT

SEQ ID NO: 61767 - protein, 708 aa, Zea Mays
MAAFAAPSLSSLILLASPHSAPTLLRLRRAGGRSLELSSRRGGSARLRVVRRAVTEEESEAARGDEEVEEAPEEPVAGRDLVTLAACLVGLLTGVSIVLFNLSVHEIRDVFWDGIPLRGASWLREEPIGEVWQRVIFVPVSGGVIVGGLNALRSQIETNSDAPVSKIKSAFRPFLKAVAASFTLGTGNSLGPEGPSVEIGSAIAKGFGDVFEWDGGKRLSLVAAGSAAGLSSGFNAAVAGCFFAVESVLWPSADSSSLANSTPMVILSSVIASVVSEIGLGSDPAFTVPEYDFRSPTELPLYLLLGVFCGLVSIALSRCTSLAMKAVESLQRTTGLPKAASPALGGLIVGLLALLYPEVLYWGFENVDILLESRPFTSGLSTTILVQLIGVKILATSLCRASGLVGGYYAPSLFIGAATGMAYGKFMKFTFTGPEPLLHVPFLDVASPQAYGLVGMAATLAGVCKVPLTSVLLLFELTQDYRIVLPLLGAVGLSSWIASPQRFSKRIRSKLDSWEDKSSIPQQANDMLTENKEATSMDAADLSLELYKIESSLCVYDANDSNMFKNLTVGEAMKTNYFSVSMTTPLIEALDLMLAEKQPFVMITENNTSARGLLALKNIQDFCKAAKTTRSQAEVKELLISHVCQAGKCKSWSVTPQMPLTTAEKIMDSHDVDHLPVVSEDANLQDRGLLIGFVDRECIAIARRKEER

SEQ ID NO: 61768 - protein, 580 aa, Zea Mays
MPAAVAAAAAAASAGAVLLCLLLNCRPQPALDAQRESERGEDEASPLLSGSGPGSDREEEEPWPDRAPVTCCEAAAVAARTARRTWELTVGRWGLHGLAFGIKRHMKRQGNLQHEYSGNDCLQLKGHQTYTEVSSLLEHLKLCMFFSKKSFSAFLKFGGYKQEDILIHKARARLMQPSFALVCDKRTKCLLLFIRGAISTKERLTAATSAEVPFHHIILSEGKISNVVLGYAHCGMLAGARWIAKLVIPHLHNKMQEFSGYHIKVIGHSMGAGIGAILTYILHEHYEFLSCSCLAFAPPACMTWELAESGKDFITSLVNRNDVVPAFSKVSSESLRSEVMVSSKLDDVQDHFHHGLFATISQRVAFIRSHMLSISHSTGKIADYGSSISEPLLKDTIPPTANGHGVDCSQQQQVVASEETVVVLVNNNDHFTSLKAADSGVTSQEGSDSNAASSDSPQRPPPPADEAPNQNGTGKDKQKEPVSAGCSSSRQLFPPGRIIHMVALPPQQPDPNSDDGTSSGEVVGIYETPRGLYGKIRLAPNMIKEHYMPSYIRTMESLLEQLQKDDDDGSVCTCTAPSDL

SEQ ID NO: 61769 - protein, 55 aa, Zea Mays
MALKSSLSRATSLVGRSLVPTRRLPSLPAHASRLTTPSLTRLMSMVTMLRPSTSF

SEQ ID NO: 61770 - protein, 636 aa, Zea Mays
MELSPLPMLAASRFLSLSPLLAPTCPQRTAPSVRVATQTLEAPEAPKPPRPSPRRSAVAEVKGALDPIAALNRFEEVLQTQDCNIILRHCGDIRRWDDLSKEREMTNAASYSSYFKYLGLSRDPARVLRVYGAIKDRTLRVHVSVCNSVLGCLVKNGRLDSSFKLYDEMIREGLSPDPFTYSTLLAGCMKLKQGYTKAMGLINEMKSRGLQMDIVIYGTLLAICASHNYCEEAEVYFQKMKDEGHSPNLFHYSSLLNAYSENSDYGKAELLMKDLRSSGLTPNKVMLTTLLKVYSKGGLFEKAKGLLTELEASGFAQDEMPYCILIDGLVKGGKIQEANILFNEMKEKGVKSDGYAFSIMISALHRGGHHQESKQLAKEFESENASYDLVMLNTSLRTYCSTNDMESVMRMLKKMDESNISPDNITFNTLIRYFCNAKVCHLAYKTVEDMHAKGHQLNEELCSHVMVQLGKAGFPSEAFSVYNMLRYSKRTVHKSLHEKVLGILVPAELLKAAYIVVKDNADLISPSSLEKFAKSFMVSGNINLINDVMKALNRSGWRISQDIFGRAIKRYIQKPDKKQLLLCLLDWMIGQGYSVDSSSRNLLLKNAQLFGEKQVIAEILSKQQIASRTIGLRHKK

SEQ ID NO: 61771 - protein, 274 aa, Zea Mays
MKFYLGTLTSFFSFFSFDMFYLSIQEHHIQTNHGPVSVAVYGDHDKPALVTYPDIALNHMSCFQGLLFCPEAASLLLHNFCIYHISPPGHELGAAPISPNAPIPSVDDLADQVVDVLDFFGLGSVMCFGVTAGAYILTLFASKYRERVLGLILVSPLCKGPTWTEWLYSKVISNLLYYYGMCGLVKECLLQRYFSKEVQGFSELPESDIVQACRSLLDQRQSMNVWRFVQTMNQYVNISHLYTNDDCAVEKLGGEVTAYLICFELIFRRYDLTE

SEQ ID NO: 61772 - protein, 168 aa, Zea Mays
MDPSAVSFDSGGTRRGGGAQMLLFGGGGSANSNGFFRGVPMAVLGMDDATRVGKRPFFTTHEELLEEEYYDEQAPEKKRRLTAEQVQLLERSFEEENKLEPERKTELARRLGMAPRQVAVWFQNRRARWKTKQLETDYDRLKAAYDALAADHQGLLADNDNLRAQVIV

SEQ ID NO: 61773 - protein, 658 aa, Zea Mays
MSKAPDDHLQATEQEGSVHPSQQAGQQHVNAAYQFSKTELTEGSKNEQPVQVEQLSSHLQQAYPEIQLQQAETDSFQLAEKETGYFGQQSFAGAKVDVAQPSVVQQNVKQTVGQQASSGTQDTRKGPSIPFNMLIPILQAHLDRDKDMQLQTVWAKLRRNEVNKDDFLRVTVNIVGDQMLKQAAHKVFVQMQAQMQRNSQANSSQQSLFSQLSAQQMASSGSAQLHDQKIRPPGPPNQGQKNQVSSSPQAFAPPSGTQPQNSVHYLAHDNPNQNPDAKGTNVVPNQPSRMNTSVPLQTKDKQHQPTQLQQASQQIYGANNPGAQAYPRSITGSLRSPSPVPETQPSMHAPGMAPAKMVPPPTHPMMQHNATAWKMHQNRELKTNAPPPNANMKQNSESVGKVRMAGTGNSSAKGKQGTPNSTPNASGGTKSSKKSGGQKKSLEAAGSMQPSSKKQKKSGAPQEQSIDELNDVTAASGVNIRDNKEIDICREMLDKMGYPKLELGLSAMPKDQLADNLAYNSLKGLILSKALMAQKDAEDESTRIAFENLRSEVISLRNEALEKDKILLSLVERLKSSDARLASLSEVEQKMEKFEKKKEADAKRIADLEYALSIQARLQRFEVEGLEKKLDEITENFNVEQTEREISDTKRLRVQKNV

SEQ ID NO: 61774 - protein, 103 aa, Zea Mays
MESVHRRRRSQSTGAWCYVHGDQCKSWVQRQAPIPQDRWIPSRTRRTFVRKAGRHGRHKPQTCQRFVGFRCSRAAGAEIRRLLLLRLRQFCVQRSYNSTATSS

SEQ ID NO: 61775 - protein, 1413 aa, Zea Mays
MIKSCTCTGRLSSSSAHNLTDTYISMTCKSCTGESTEDRGGPSCSGKLNNMGLELPRPIDLEVKWMTVKKRQRDTRRARASFGEDTSRDGIGSFCLSGCATNQEMAQDAPVSESEKFGVSILGRRFSDPMENVPIKKRRFHMDFSPSPPFTPLLVDPYEKIPGSSSKAVRSYEKHYKLKTQQIEYKVGNKGRFGDDDFSGIDILASAACESEMSGGILDGECSTLAHLPEERKLENTTGSSKLSLLHNMEDTLNIPGTSHCIYDMPLGSSRSAPDMKSLFVATPTILENLVESASAPKVNCSLYSALNNANEIEIVSDAKSTSVAIANSSDNPEKTIGCLKDTVVQTNHANATNAKSTSVAIANSSDNPEKTIGCSQDTVVQTNHANATRDSRLHWDLNVAMEAWGTDCGAVEDPLVATVSDHDDARNDMNKPGTSHHFESRDGSVVDHSVDTHMDDALKHVSANTKDTCDSPADSPSHPSRNLQLLESGYVGSDALAETMDLPDQKNSRFASAMDSHIRSDPEPALIMEHFASASHVEKINGSHPEPVQCDGLSNMSSVNVHIGSNSLQTSELGTTLKPLASILVSEESKNLPTVGTSHKKVTDFGWSDNKLEEASEQSISESKNQELLDVDSETSKKGEHDTGIFYANERTKYAENLIHPEDNHGSSNCDMAHVHEENGAVAMINSKDSLITCANSSTVETYYISDAAPQVPVPSSECHKLECFTDAGSTVDSKSAAHSYQNGCENELGKVISNVRSDQCYETDTSHISKNLAGVEKVYVEEDDSQYEDGELRESGDCYWVDDGYEDVKHANWHYQVSDYKNEEATPGLTSLHTDSVANNVVIPVANDNGPQSRKEDIAVSPVSSKCSWLTNCLDGGSIADGKSQSIHLRGDTNMYGSNPSRVAVRSATTVSQSERCNDALGDMLNIRMKNTGWDMMPEDQKHSQHDARDVTDSSNRCVLSSDAARDDDSLQKKGLLNRDLQGVERQKSFDRPQRNELSRSDDGYGSGSKSGRAMDSHGSHDMYGTSRHVQTSARVEWVESSKRPRSTRHKSPEYYNYGTSGPRNAAEAAVAKMQSSGFVVARDGTLVRAVDAANAGQMPRRMRNPLSSSCHLISGWGSPVDRDEACGMSRGPVHARKASPERHFGANSNRSSRYGSEMEKNHTTDANLSSVHCSLSSRQRGTPTSRASLNLSRAHSRSPSGSRSRSPHDWAPRNRGKIMANGGSTLWKHSRSPPNHMTKGEIGRMASPRRQPGYDDRAMCYSPLSRNNTYSKNASTWVDGRNGSAVDISDDHNKRYSRRSSPLRITSRNDRFDVMDSQGRPRSGEFYRPTQGRLLYGYNRENKHGRNGEDGRECTDRYANNSVKRYDRSGAVKQFRNDTGDKFRTRISAPRSPDLQRGVSPRRFDRSFER

SEQ ID NO: 61776 - protein, 1577 aa, Zea Mays
MDRIRDGRRSGVSGGAGPPPPRRRLRSNGGGGPRDSPRSERRRGERLMLNGGGAGAGRDDADDTSDDSLGDDDEDAEEELAPRYQQQRRSPSTAPPPPSPPQPGGGHHHSSSSSGGGGYHNHHHGQQHQIQRKGGVSHPKSPMVVKAVDEMIGVPVPRKARSASTKRSSHEWPVPGGGTSGGSSGVGDGSQIQRPSSRPISPAPASTAAPRKKLKTLGGGVSSGGLGPAPKQRPSMSPAPSTTPPQPPPSKISKSPSFIQEEIEVAEVLFGLTRQFPCPQKQESNHKLEPRDAPEAKSGNSSPAPSSSGVRPSDSTSLSTIAPKRKRPRLVNYDEDSRPARPELAEPSSNPESPPVARSEAKTTATSAAAESGTSTTPAAAQPETSRESEKAEDRGRNRDSELRPNESDRRDHRLESQAVPPSPLPLPLPEPPVKPDAEAKPVGSEARNGEATATTKIELASDGARHDKRFSIDLMAPPPGKLSDDIDGSSDPDADKKGLDSEMDMLGRGNSEKKASERTRRGLDIDLEDQKVRRIPVDEFAPKKLTLQLDLEKPSLGDEKSPSERRQPQPQPQQLQQQKPSKAEIKHEKSAMPAAVTPPMPIPVGGWLGNFPPFGYLSPVPGLSAAGLHHPMDVKPGSSSGLHHSALLPPPTRSKRCATHCYIAQFIQHQQRVAKMNSFWPPTAAAAAAAAANRPPGPFFGARPFSMGVVPPTDAASMLVNPMQGSYPVRAHTPMQEAKAPMATSPFQGSLSKDKTLGNAAGAESSQRKQPPSHETLQSTPLPNMLQAPAFIFPFNQQHAMVAAANAANRAGDAKSSGAGNTLPPSASAHTLATNSGAAAMNLSFANMQPADAQFLAILQNGYPFQVAAHPGGPPYRGMASPGPAVPFFNGHVYSSPMLHPSQQQGAQSQSHQKTQMPNLPSSSQKHQPQQSQGLLGYAPNTNAAAAASNSQNYSSGNQRPVLLPGLVHRQESDKTGQDCPSSDDKPSHSQKSGYEHNFAVPVHLPNFAMMPAAQPAVSQSEKKLSDHQHHQQQQQPQVSRGQGVRIDLASSQPFVMPFGSIGPPGSTPSGLDFSALAQNHAVFQSHQDAARHGYPQLNFAAAQPVQSTQQKPQHQMTGETKTVAGDSSSTPIAGDSERKKSTSHKYSSDSQQHSLSFTRTESKNYVPPFLTGNTNETSSRTLSLIGTESSNAFMGSKPTNSNTPASTAAAASASISQQQQQHLQMQAQQKHQQHQQLIQHHHLNRPRSAAPSTQNSAGGYQDRINMANFQNMMYPSSAAQGRVQSPQLKASSGRGTPSSTATTTPAATPPNLIMMKNSSLHQQQAKVPMQALYTPGHQSQTSLSSSKVGPSLTNLSTGGGDLSRSSNAPVASGSPSNSVSKSTGGSPPATGNAKGVQQPVQLPSPQQQSAKNSASTSGSRTTPTNHFSMAMPSILGQQPNASPGSNPGSKQHSHTQPASMKQQPFPQGHFFISNTYAPPAPGAGGAAALGLYQKRPGDKTQQQQQQQASHQQSAMSAAGGNNVKALHPSSGGFMHLAAQSAGGMAHTHVSAGQLTFGTMPTPLKPSSDQKPAAGT

SEQ ID NO: 61777 - protein, 114 aa, Zea Mays
MVASSGPPRATAAVRTRPLPLRWQSHDLPLPPLNFKNENQKHTVSGLPIRGFHGGTPLRKKPSGMCLACISFCPIFKIEMNKLSFLSSKICLVLFFSLKFRRGLVLSSEAFCHQ

SEQ ID NO: 61778 - protein, 190 aa, Zea Mays
MPCSLGAYCICMAYLSSSSGARSMLLRGLEQPSISVACTQHLPPIMPMHATRAGRRCLPAARVRVARPCAVAGVAAGATGLRAVPPLPPRRQLRRGRQRQGGVAAAAVRQQGHRRVHPAVHARLRAPQEEGQEPGRRRRRRQGRAGGRRGRTAQEARLISASLHRDLMDQQETKTRRRKRRGKKKSRTTN

SEQ ID NO: 61779 - protein, 99 aa, Zea Mays
MWERIQGRSREPNEETEPPPPAASVPFVPLRGGAVAPTTTSPLSLSPPIAIPRVHDPWNRLDYTARPVTTTATADSLSPTTLCTSALSAAWGLFWRGGS

SEQ ID NO: 61780 - protein, 103 aa, Zea Mays
MLFLAIILYYLFFFMSHSIHFRFRYLSFLACFIRTHVCPVYGDCFMHIINSWMFPVLIYVIRMKLCASSGVFLHVCIINLNNSLPLVRKVELTTQLWLLLAVN

SEQ ID NO: 61781 - protein, 125 aa, Zea Mays
MKCIQSFKWIASRMDEDLHYATDLFYDCENVRSLFGSVAPYVVSQVSSSSLKKAIGFKTEVSYCDALMVLKSWITSKVPFRASMSQMWKFYTLLSEGVADAKIDIKREFMSSPSIFTPLQRPRAI

SEQ ID NO: 61782 - protein, 183 aa, Zea Mays
MKDSTNDRDDSYGGSLENRCRFTAEVMAAVADEVGANRLGVRLSPFADYMDCHDSNPEALALHVIDETLNPLGVLYCHMVEPRMRVNPDDGIMTLEHMLLPFRRAFRGTFIANGGYDREEGNDAIARGRGYADLIAYGRIFLANPDLPMRFAKNAPLNKYDRSTFYTSDPVVGYTDYPFLDQL

SEQ ID NO: 61783 - protein, 114 aa, Zea Mays
MVGPCSACLSSLPPPRLSLSPFVSLPAASPSAALIVHFTSAQSRRLLSPSSSAPVFGDIHRFLRQLHFLVELLLVSLGFLSSSCFLIYLHILIFPALQCEMWKGLPQLDLCIFI

SEQ ID NO: 61784 - protein, 810 aa, Zea Mays
MFGSTNRSLFGQKPSFGGFGSSSSQSSPFGNTFQQTQPTFGSSTFGSSTPPAFGATAPAFGTTTPAFGTTTAPAFGATTSPAFGSTSTSLFGASSAPMFGSSAFGTSATGFGTSGTTAFGVSSTTPGFGSSSTPSFGTSASAFSFGSSPSFGQTAVSSGSTPFGTTPSPFGAPAPAFGSQTAAPTFGQPQFANQAGGTRIKPYSQTPDVDSATSGTQPAAKLDSISAMPEYKEKSHEELRWEDYQRGDKGGPNTSGTQTLAPSFPSPIQHNTFASTSNPFSTNPFSTNNPFAPKPTTTTSSPFNTSFNNASVASSSLFTSSPGTTMFGQPGVSTLPAPASNSPSLFGNINPAPATSSIFATSVTNNPSPFGTGTSLANTQSAPLFSSAFAQPTSSTPAFSSGSLFGSTNPGSLFTSSGPSLFSTPTFQPSAPAQSSNMFSFQPPIQPASTGGLPFFPNTNQALTGQPTSSLSSMVMQSALVSNPFGMLPAMPQMSIGNGGSSPSVQYGISSLPVAEKPLPSRSLSMAVPRHLSQRRIKLLPRKYNPISDGKVPFFADDEESPATPKADAFFIPRENPRNLVIRPIEQWSSRRETGRQYTAKNVTDSNKYEDASIESERGKSAMSPSSRPPAVENDKQHEARAMAQHANGNGTSVERLLPKLPRADYFTEPSIEELAAKERAEPGYCGRVRDFVVGRHDYGSIKFFGETDVRCLDLESIVEFNDREVIVYKDDSKKPPVGEGLNKAAEVTLLNIKCVNKKTGEPCQGARVERYREMLVKKAEEQGAEFVSFDAVKGEWKFRVKHFSAYGLW

SEQ ID NO: 61785 - protein, 54 aa, Zea Mays
MAAPARRRSCISSGGAGAPPSAAASPLLRPPPPAARPVQGHAQGDGLLTTPNPR

SEQ ID NO: 61786 - protein, 108 aa, Zea Mays
MELRRPASSPLVDNYVVPGDVVLDLSEMNNQTIKLGAGLRQECDTIQATSAGKLRQLKPNKYWIENSQKRYIPSVEDTVLGIVVDTKPDYFHLKAVQGETYPSSRLVH

SEQ ID NO: 61787 - protein, 888 aa, Zea Mays
MQFGVAKKIKNGARKIVLEEAEAARVAAFSAFKSLGVEVPQFTAPPLAAIEEYPTHDTIDQAKLNKLASGTHSRDDKNMNTCSDYATPRASTYSLRKDTSPAPSIQMKENAGLSKNVQITRQGASSSLSTEIADGSSRDVAEKGPVHAYNFPGGFDCFLDQWSTASNFFFDVHFIKRSMKPSLNLFEVFGLAVCWEKSPIYYCNFPKDLVTTGNNNIKEMWGNFQRRWEKIADIMKQKSVQKMTWNLKIQIQALKSPYISCQRLERFHLDHKMLDKVEVLNNSYMLLSPVSVYNGLDICLLAWVLWPDEESRAVPNLEKFVKRRLHSQEAAAANRDGRWRNQMHKAAHNGCCRRAAQTRALYTVLKKLLTQNLSVLVETIEAPLVNVLADMELWGIGADMDACLRARHIITKKLKELEKEAYRLAGKNFSLNATADIADILYTHLKLPVPKGCEKGKLHPSTDKQSLDHLRDQHPIIPLIKEHRTLAKLLNGTLWSICSRAQLCTQSQRYIIHGNWLQTSTATGRLSMEEPNLQCVEHVVEFDTGKSDKDYSSISVDDHHKINARDFFIPTKENWLFITADYSQIELRLMAHFSKDHMLVELLKKPDGDVFTMIASRWAEKEEALISSKERENTKRFIYGILYGMGANSLAEQLQCSTEEAAQKIQSFRRFFPGVSSWLHEVVLSCRQKGFVETLLGRRRVLTKITAGNSKEKAKAQRQAVNSICQGSAADIIKVAMIRVHSIITNRTSAADSTDEVTRKFSELGGQCHLILQVHDELVLEVDPCMVAQAGRLLQICMEEAASLLVPLRTKIKVGKTWGSLEPFHPEPCLMQMVNVSWMPMFHDMQGPGRRLNNFQYAPTGDLGDSVWCSSVEPSLLCLQSSVIADRM

SEQ ID NO: 61788 - protein, 250 aa, Zea Mays
MTRRNGCTIYVGNLPGDIREREVDDLFYKGRQCGLRMYGRIVEIDLKIPPRPPGFAFVEFEDARDAEDAIYGRDGYNFDGHRLRVELAHGGRGTSSFDRSSSYSSAGQRGASKRSDYRVMVTGLPSSASWQDLKDHMRRAGDVCFTDVYREAGATIGIADYTNYEDMKHAIRKLDDSEFRNAFSRTYVRVREYDARRSRSRSRGRNRSKSRSRSHSHSYSRSRSCSYSKSRSPRSRSASESKSPVKARYE

SEQ ID NO: 61789 - protein, 856 aa, Zea Mays
MAASAAAAPGSAERQARGGAASAIGNAVFKSGPLFISSKGIGWKSWKKRWFILTRTSLVFFKNDPSTLPQRSGEVNLTLGGIDLNNSGSVVVREDKRLLTVLFPDGRDGRAFTLKAESSKDLFEWKTSLEEALAQAPNAALLMGHNGIFRNDTTDVYEEAIPNWREKRPTKSLVVGRPILLALEDIDGSPSFLEKALCFLEKHGIKVEGILRQAADVEEVDRRLQEYEQGRTEFAPEEDAHVIGDCVKHVLRELPSSPVPASCCTALLEAFRLDIKESRIKSMRAAISETFPEPTRRLLQRILKMMHTVASHTAENRMTPSAVAACMAPLLLRPLLSGECELEDDFDMSDDSAAQLIAAANAANSAQGIVTTLLEEYESIFNDEHFRCSLSPDSQTGDSGSEESTDDETVDIKDNGFHDAENDVDQELDDAERILNGKLSETSACVHADLHDYKEVNGNDSDAELFVEDNTFEPNVNLNDTPLSRLIENGKKPSNLASSHETPLSVGEILSSLDAGVPLPGRAAEYSKDRLSSKPNGIQQHVKRTNLWGRSNARKGQRSELVDPSSEEELAIQRLEVMKNDLQVRIAKEARSNAILQASLERRKQALHERRVALEQNVSRLQEQLQAERDLRAALEIGLSMYSSQFSSSHSMDSKTKAELEEIALAEADVARLKQKVAELHLQLNQQRQHQYGSSVDANDCPPHLPNHLSQNTVQTGFDRTVAFCNQEKQRNEESLPCTSHWRSIKQHVLSQDSSRPFSRKHSSDTSLSDSMEASTSVLAEGGPLLVNIARTTEGVEYGRPPTVPSSTLVELTTRLDFFKERRSQLMEQLHSLDLGHGSASHGFPYKSSSPWNNPR

SEQ ID NO: 61790 - protein, 201 aa, Zea Mays
MIIDNGAYPSPLGYCGYPKSVCTSVNECICHGIPDSRPLEDGDIINIDVTVYLNGYHGDTSATFLCGDVDDEAKKLVKVTRECLDKAISICSPGVEIKQIGRTIQDHADKFKFGVVRQFVGHGVGKVFHAEPVVLHFRNNEWGRMMLNQTFTIEPMLTIGSINPVMWSDDWTAVTEDGSLSAQFEHTILITEDGPEILTQC

SEQ ID NO: 61791 - protein, 476 aa, Zea Mays
MDVGRRLSLARVPAVAALMVMLSLSSSFCVSSSAARAVARPGAAEQLQRHPVVLIPGAGGNQLEARLTEGYEPSSLVCRVWPLVRGRGGWFRLWFDPSVLVAPLTRCFAERMTLSYDADADDYRNAPGVETRVSDFGSTSTLRGGPRPQSQVPKATISIRSAYYICYGEFQVLLTGYMNTLASTLEEAGYEEGRDLFGAPYDFRYGLAGPGHPSQVGSAYLQRLRLLVESACAASGGRPAILVAHSLGGLFALQLLARSPPQWRAAHVRRLVTLSTPWGGSVQEMLTFASGNTLGVPFVDPSLIRDEQRTAESNLWLLPTPSVFGNTTLVLSRAHNRSYSAKNMTQFLRDIGFEEGVEPYRARIRPLVEALPEPGVPLTCLVGTGVDTVESLVYGDRGFDEAPEKVVYGDGDGTVNLASLIGPIKAWSDSPAQVVEVVELPKVSHSGMLSDKSALEQIIRIIDSINLNATSYHHSS

SEQ ID NO: 61792 - protein, 204 aa, Zea Mays
MVEELSVYNGTNEELPILLAILGSVFDVTKGRSHYGPGGGYHHFAGRDASRAFVSGNFTGDGLTDSLQGLSSSEVNSVVDWRKFYFERYIFAGKLIGRYYDSEGNPTKYLKGVEVKAKRGTQLLEKQKSDEAKIPGCNSKWSQQEGGEVWCDAGYPRLVRRPGDIALTGQVSQRCACFQENELDKAGLVVYEGCDYLSQSCKVN

SEQ ID NO: 61793 - protein, 428 aa, Zea Mays
MVIVWTGLSYLHPGKVPSGVPRRLSSPLPWESSSLGHWTTARDLFSVPPAYIFGAILPAFMVAGLYFFDHSVASQLAQQKEYNLKKPSAYHYDILVLGFVVLLCGLLGIPPSNGVLPQSPMHTKSLAVLKRQLLSKKMVDTAKESIGGSATSLEIYGKMEEVFIKMDSEQNTDSVDRELKNFKDAVLQEGDEEGRLAREFDPRKHIEAHLPVRVNEQRLSNLLQSILVGGCVGAMPVIRMIPTSVLWGYFAYMAIDSLPGNQFWERIQLLFITESRRYKVLEGPHASFVESVVPKTVTIFTIFQLVYLLICFGITWIPIAGILFPVPFFLMIVIRQYLLPKFFDPVVLRELDAAEYEELDGVPLEHKLEDEASEVGSCPSRPDAEILDELTTNRGELKHRSSSLREERPIQVTVSTHMVASSAVQPSL

SEQ ID NO: 61794 - protein, 277 aa, Zea Mays
MGSLYGKMILRDLISEHGRSLSQWIHLGGVKAFLDGSLGSSSALFHEPYEGDPDNYGLQMTDLDSLLNRTLESDKSGLQVAIHAIGDKANDILLDMVDKIVDLNGAKDRRFRIEHAQHLAPGAANRFGKHGTIASVQPDHLLDDADHAWSKIGVERSERSSYTFRSLLDGGAQLAFGSDWPISDINPLQAIRSAVFRKPPGWEVPWIPAERLTLDESLKAHTMSAAYACFLDHAVGSLSEGKYADFVVVPSTSWDEFSSDLPGHVLATYVSGRQAYP

SEQ ID NO: 61795 - protein, 91 aa, Zea Mays
MASTCFRAAARVASAASRSAAAYRSAPSAARAVATAAHRISCFSRVPVELGCCAGLSLLPLHSAVASARLTSRLSTASSCRALSQRAAAGT

SEQ ID NO: 61796 - protein, 361 aa, Zea Mays
MKVTVMTGDEQIVTLDVDRDESVENLKALLEVETRVPLRQQQIHFNGKEMQNTEKLSAAGVQDGDLVMMFSTSERPSQDGLRVNPDGTAVNPQAFQQHARGDSQLMAQLLQNDPQLAQAILGDDTTELQNILRSRHQQRTELKRKQEEELALLYADPFDVEAQKKIEAAIRQKGIDENWEAALEHNPEAFARVVMLYVDMEVNGVPLKAFVDSGAQSTIISKSCAERCGLLRLLDQRFRGIAVGVGQSEILGRIHVAPIKIGNIFYPCSFTVLDAPNMEFLFGLDMLRKHQCMIDLKDNVLRVGGGEVSVPFLQEKDIPAHIRNEEKLSKLGSLSQATGESSRTREGTPNALQQTPPVTVN

SEQ ID NO: 61797 - protein, 1353 aa, Zea Mays
MASSQGESVPPWLKSLPLAPEFRPTVAEFADPIAYLLKIEPAAAPFGICKIVPPLPPPPKRTTLGNLSRSFAALHPDDPTPTFPTRHQQLGICPRRPRPALKPVWLSPHRYTLPKFEAKAGASRKALLARLNVPASKQLSPLDVEALFWRSSADRPVVVEYASDMPGSGFAPCAARLTQLPPANVGETAWNMRRVARSPASLLRFVREEVPGVTSPMLYVGMMFSWFAWHVEDHDLHSLNYMHYGAPKTWYGVPRDAALAFVEVVRVHGYGGEVNSLETFAMLGDKTTVMSPEVLVDSGIPCCRLVQSAGEFVVTFPGAYHSGFSHGFNCGEASNIATPEWLIVAKEAAVRRASINRPPMVSHCQLLYELALSLCLRDPSNDVMEPRSCRLKEKKKSEGDQLIKKIFVQNVIEDNKLLGHFLSDGSPCIILPVNYNDGSPLSTLLSKFQSTTDSRISHGQCSKAEAPKDSRRLPMDGADKNRELSSSNKNSLSAFSGKTVPLPPRICIHECANVTGASHAHNAENDKVDMNSAAGLLDQGLLSCVTCGILSFSCVAVIKPRECAAKWLMAADSSLINDRLASSGEHDIDALQGGRTTGGILRSDSEMNGNSIVSDADAAPLNGHSALDLLALAYGDPSDSDEDVMNIKNQVPNVSNELINHTIESQPYTSCNGDYDGTKVSSSSKEREQGPTSHSSKCIGNSNTLNGPKGVRTRNKDLLKMVLSEGFQPKGICSETHKKVQCEPSSSKKTSMEIPCGTDYHVSHNSGTICMDSSRGSTTTTMVNNLVTSVVKPDKDSSRMHVFCLEHAIEVEKQLQAIGGADIFLLCRPEYPRIEVEAKLLAGEMDFEYDWKDILFKEVTIKDREKIQEVVRDEEAIPTNSDWAVKLGINLYYSANLAKSPLYSKQVPYNRVIYEAFGCGSPNDSPVKLKTYSRRQCRAKKIVLAGRWCGKVWMSNQVHPYLADRIKNHEPKEIDETFPSDQKSHAEPVENSSREAASTRKSSSRTIEGKTSKREKEQLEKANAKKPKFTEEDNSKSLEGTAEASTQKIKGRSVLEKTSKKEKAYTKKLKHTEKVSEALKGPSEASFPAPAGMVVRSSSRIANRKIMLKSKMEEEDNGSADRPKSKVEDDKDNPAGRSRAKPLRQKTKVDAKKKTKETRVEKRKAPSPASQKDEEEQSDDVEGRSTTKQRLSLRKKGAKTEGKQRMEKPRFGGSAPPPSSPKRKEEYVCDIEGCSMSFGTEQALSLHKNDICPEKGCCRKFFSHKYLQQHRKVHADDRPLKCPWEGCGMAFKWPWARTEHVRVHTGDRPYVCLEPGCGQTFRFVSDFSRHKRRTGHGASKKAKAKKQGKAAVT

SEQ ID NO: 61798 - protein, 144 aa, Zea Mays
MLPDLFSAAVLKVPFLDICNTMLDPTLPLTVLDYEEFGDPNSPDEFEAISSYSPYDNLAPDVCYPPVLVTASFNDTRVGVWEAAKWVAKVRDVACPSCSQSVILKTNMQSGHFGEGGRFTHCDETAFEYAFLMKALGLDDVAMM

SEQ ID NO: 61799 - protein, 64 aa, Zea Mays
MEYYRFYSYLENYIISVERIKQYMHLPVEPPAIIPDSRPPTSWPQEGRIDLQDLKVRCLFSTVS

SEQ ID NO: 61800 - protein, 645 aa, Zea Mays
MVAGRVKAAMGFQRSPATPKPGASSSSSSSRKAPPPLQLPGSAALPETPRRRSSGSPAPPGSGSKGGGGPFSRYFPRSSAQVQPARASGQPEPPPPPPPPPSCPGPAAAADLARLVEELRERESRLRTELLEHKILKETVAIVPFLETELAAKSSDLGRCRDALSRLEAENASLRAELHAARGSQQRVVQLEKELAEVKRHRRRDSGPDADRHDDDCSSSVSSHNSDSDRSNAPTNAVVPGLLIVPPPAPPPPPPPPPPPSYKSRSYFSASSRASPANSSSSSSTSSAPSTPTYSSDTAASRNRVPELSQLPPIPAPPPPPPPPPPPAMPARGRRSACSSPSTSSGSSGGGCGRGSGPPAPPPPPPPAARRSSRASSPAASGTAPAPAPCVRRVPEVVEFYHSLMRRDSRSRDAAAAAEAGASGGAAAARDMIGEIENRSSHLLAIKSDVERQGDFIRFLIKEVQGAAFVDIEDVVTFVKWLDVELSRLVDERAVLKHFDWPEGKADALREAAFGYRDLKKVESEASSFCDDPRQPCSSALKKMQAVFEKLEHGVYSLVRVRDGAMSRYRGYQIPWEWMQDTGIVSQIKLQSVKLAMKYLRRVSSEIQAIQVGPDEEELVLQGVRFAFRVHQAVSTSIRCAPFRS

SEQ ID NO: 61801 - protein, 221 aa, Zea Mays
MAPCASPSALALSASTRVSILRLPLALRQRAEARVPGAQFRPSTACSWARPLLPELAGAVPRAGARGTGRRTQPLFRPRALTTTSQIASCAFTLGTVAVLPFYTLMVVAPNADITKRTVESGAPYVALGLLYAYLLYLSWTPDTLRAMFASKYWLPELAGIVRMFASEMTVASAWIHLLAVDLFAARSGRCTTTASGTTSRPGTLSRCACSSARLGSWLMC

SEQ ID NO: 61802 - protein, 342 aa, Zea Mays
MANSAPGGMRSFLQAVSTVTEEAPTPLRVVQMEGLAVLKIIKHCEEFAPALVTGQLLGLDVGSVLEVTNCFPFPIREEDDEADADGANYQLEMMRCLREVNVDNNTIGWYQSCLLGSFQTVELIETFMNYQESIRRCVCIVYDPSRSSQGVLALKALKLTDSFMDLYRNNGLTGEKLREKKLSWVDIFEEIPIKVSNSALVSAFMKELEPESPVTQCDLDRLKLSTAPFMERNLEFLIGCMDDLSSEQNKFQYYNRNLSRQQSQQQAWLQKRRQENMARKAAGEEPLPEEDPSNPIFKPIPEPSRLEGYLVTNQISSYCNHINGVAGQNFDRLYLMKALHED

SEQ ID NO: 61803 - protein, 92 aa, Zea Mays
MDAADVWGRSSSSSSSSAAAARRLQARYDLYMGIDDADAGLDEVTEPRGGAESYNCPFCGEDFDFVGLCCHIDDEHAVEAKSGGMMKSVFAI

SEQ ID NO: 61804 - protein, 305 aa, Zea Mays
MAAAGGGREATTSGCGLKRRYAPHDQEEETMNQDQPSKEDRCGRIWSGIDLLKDVTENKHVLPTGLEGIDRLLGGGLRQGQLTEVTGPSSSGKTQVCLHSASHAPVKHTGVVMYLDTSNSFSPSRIATIIDGTNDLSDQKGFDLLSKERLKTVMQSIICESVFDIFGMFEVLHQLEVSLLNEKVIGDGRRICLLIIDSISSLLAPIIGGKYPQGRSMMISLAMILKKLAYEHNLAVLVTNHMVSAGNGAVKPALGESWKSVPHVRLMISREHSSNICTGTVLKHTLLINCQGAKTHTMSIFLAIW

SEQ ID NO: 61805 - protein, 222 aa, Zea Mays
MAVPGGRNGLRDEDDDMAQHAEAFGGVSDDEDVPPHLRALANAAQSGDVTALVAALDNHDGSIDVPVEDGDTLLHLACLYGHLPCVQLLLERGASLECQDEEGAIPLHDACAGGFTELVQYILNFAANKDGCVVRMLNTIDSEGDTPLHHAARGEHLDVVKLLLQAGASPKKENTYGQTPADMADQDTEVRTLLTAKQIEGWERRGPQLRDDGSRGVDGDGG

SEQ ID NO: 61806 - protein, 172 aa, Zea Mays
MASTSMERGVMAPITRRNARLTLHYTGEERTRGTWGRLVFCCCSMARLHGSEAHGRGVGCTASHWFLAARSARSRLAGWRVGGSCRGAAAARGPGRRVSRPAARRGRGWGARPVPWQRTWERETRGRRERRERRRLAGRGRARQAHQPGSGGCERSRGGARFRCWGCWALVG

SEQ ID NO: 61807 - protein, 284 aa, Zea Mays
MRWLSRLLSQAVAARRASAAARSNTSLVKGGSHGFASGGRDGSPEVPREWLRKLWVDELKKQKEAARRWGVGSSLEVAGATEEAPSRSYQYEYSGSNPVEAKLAPLLARANLVIARDIEWANIMFAFEQESRYIIMDPLFPQSPVGFIREKSNIIFRQLLRTRRPFVAEITDAMGNEIFKVRRPFWWINSSIYVEVNDKEIGVVHRRWHLWRRIYDLYLGNMQFAVVENPGFWNWTFNLVDEDDKMLAQIDRNWRGLGFEGLQSVAQPLGTRPSATQPLVNREP

SEQ ID NO: 61808 - protein, 799 aa, Zea Mays
MQCWGDGSPAAAAALPVRGMMYYKKALNLEAFLDMAKREDLMEGYKAAESVNDEQWKIHQRSLFAQCEAVADMKFTYVVSCQQYGNDKRAALANAQDILQLMRNYPSLRVAYIDEVEDRVGDKKMETAYYSTLVKVALTKDSESADPTQNLDQVIYRIKLPGPAILGEGKPENQNHAIIFTRGEGLQTIDMNQDNYLEESLKMRNLLQEFLTEHGVRRPSILGVREHIFTGSVSSLAWFMSNQEHSFVTIGQRLLANPLKVRFHYGHPDVFDRLFHLTTGGVSKASKSINLSEDIFAGYNSTLRGGNVTHHEYVQVGKGRDVGLNQISKFEAKIANGNGEQTLSRDIYRLGHRFDFFRMLSCYFTTVGFYFSTLLTVVTVYVFLYGRLYLALSGLEEGLSQGRLIHNHPLQIALASQSLVQLGFLMALPMMMEIGLERGFGQALSDLIMMNLQLATVFFTFSLGTKTHYYGRMLLHGGAQYRGTGRGFVVFHAKFAENYRLYSRSHFVKGIELMILLIVYQLFGQSYRSTIAYIFITFSMWLLVLTWLFAPFLFNPSGFEWAKIVDDWSDWNKWISNRGGIGVSPDKSWESWWEVEQDHLKYSGTIGRFVEIILAIRFFIYQYGLVYHLHVTHNKSILVYLISWLVIVAVLLVMKTVSVGRRTFSADFQLFFRLIKFLIFVAFIAILIVLIVLLHMTFRDIFVCFLAFLPTGWGILLIAQACKPLARHVGLWGSVRALARAYEIIMGVLLFSPVAILAWFPFVSEFQTRMLFNQAFSRGLQISRILGGQKKERSARNKD

SEQ ID NO: 61809 - protein, 426 aa, Zea Mays
MHQPRARYPPGYGSGGGGGAGRGGGGGNGGGGGNHNYYGRNPQQHHYHQQQQSQHSHRNSSYQQQWLRRDQAPAVAGAASGNAVAKTASQLDAVGSSSQDWKAQLNIPAPDTRYRTEDVTATKGNEFEDYFLKRELLMGIYEKGFERPSPIQEESIPIALTGSDILARAKNGTGKTAAFCIPALEKIDPEKNAIQVVILVPTRELALQTSQVCKELGKYLNIQVMVSTGGTSLKDDIMRLYQPVHLLVGTPGRILDLTRKGICVLKDCSMLVMDEADKLLAPEFQPSVEALIHFLPPSRQLLMFSATFPVTVKEFKDKYLPRPYVINLMDELTLKGITQYYAFVEERQKVHCLNTLFSKLQINQSIIFCNSVNRVELLAKKITELGYSCFYIHAKMLQDHRNRVFHDFRNGACRNLVCTDYHGSFF

SEQ ID NO: 61810 - protein, 228 aa, Zea Mays
MASAVVVDAGDAPEPTVRNLLDQESLKWVFVGGKGGVGKTTCSSILSVLLAGVRSSVLVISTDPAHNLSDAFQQRFTKFPTLVRGFTNLYAMEIDPKVENDDLSNEGMEGFLSELTNAIPGVDEAMSFAEMLKLVQTMDYSVVVFDTAPTGHTLRLLQFPATLEKGLEKMMELKNRFGGLLNQASRLFGLGDELNEDAMLGKLEGMKDVIEQVNRQFKDPAPTDFHFY

SEQ ID NO: 61811 - protein, 165 aa, Zea Mays
MAFVSPTLTPSTTIDLAQQPRRQFTQPRGFPPLRALGMLDVLQRQSRRYAVTLGEALCCPSRWIEPCSSSARAAAPTIYTAPSSTPKFFAPCRRRASRVVSRQKAKPACRHALHESARNLRTRNKVVHNMKSMDRTKVEPVPKLRARKLRLNGRERNQLKGEKAI

SEQ ID NO: 61812 - protein, 145 aa, Zea Mays
MKSNHLLWHKIWHCVICLSVMWVLFVSERTLIGVGFDCNPMIFAADDTGLWTFIRFLDERKAAPSASKASQLSEALGKLYGQSKQGTSSDTVEPSKPRGGAHENCITCIVPLRKGSDGSIKRFSTSGLDGKIVVWDLENHVSIAK

SEQ ID NO: 61813 - protein, 62 aa, Zea Mays
MQVQLPQQLLVCLLHMLEILEPLFSEDRPSKFTVVTWHISVSVPMLPLVPETFYMMCIFLDE

SEQ ID NO: 61814 - protein, 313 aa, Zea Mays
MARALLLLRVAVARYPPLPASPALLQPQPLLRCHAPSQYKSQLRFLSSLSSSVPNSSDAPSDGGGDRDGEEDGAKSGSHVDYLGMSDEELMEQCDMGTFKASGPGGQHCNKRESAVRLKHLPIGIIAQAVEDRSQHKNRASALSRLRTLIALKVRRPINLEDYTPPVELLQILPLKSSVRGNDVGPQIGPNNSKFSPGMQALLDLLFAVEDSVSDAAKILGLSTGALSRLILSDDSLRTAANELRASKGTGAVLRAPDVAGQRAQGLLRRRRGRCSSRRQQPSWRVGEVSGLCNSSTDWIQIIPYMGCLLEFS

SEQ ID NO: 61815 - protein, 812 aa, Zea Mays
MTLASLARALGRSARSSRPRQLGGLRQPPAPPLPPPVHGGEGGAAGFVRSYLTAASSAALGKPSAGKTVDWRYVLASPHFRRLFSDGSKKNYENYYPKGKKEVPKGDGTNKSESKQESNTDEGWNFQDNAMKHMQNFLAPLLILGLMLSSMSSSSADQKEISFQEFKNKLLEPGLVDRIVVSNKSVAKVYIRSSPHPKSQGQDSDIHITTTDAPGKPAPSRCKYYFNIGSVDLFEEKLEEAQEALGIDPHDFVPVTYVAEVNWFQEVMRFAPTALIVGLLYFTGKRMQSGFNIGGGAGKGRGGIFNIGKATVMKMDKNSKNKVFFKDVAGCDEAKQEIMEFVHFLKNPKKYEDLGAKIPKGALLVGPPGTGKTLLAKATAGESGVPFLSISGSDFMEMFVGVGPSRVRNLFQEARQCAPSIVFIDEIDAIGRARGRGGFSGSNDERESTLNQLLVEMDGFGTTSGVVVLAGTNRPDILDKALLRPGRFDRQIAIDKPDIKGRDQIFRIYLKKLKLDNKPSFYSQRLAALTPGFAGADIANVCNEAALIAARSEETQITMQHFESAIDRIIGGLEKKNRVISKLERRTVAYHESGHAVAGWFLEHAEPLLKVTIVPRGTAALGFAQYVPNENLLMTKEQLFDMTCMTLGGRAAEEVLIGKISTGAQNDLEKVTKMTYAQVAVYGFSEKVGLLSFPQKDGGFEMSKPYSNQTASIIDDEVREWVGKAYKKTVELITEHKEQVAQIAELLLEKEVLHQDDLTRVLGERPFKALEPTNYDLFKKGFEDGGDNSQAPAENAELPDDSSPPVGDVVPT

SEQ ID NO: 61816 - protein, 556 aa, Zea Mays
MPTLLSLEVTGDAIEGTTMFASKRYWGGEEGDTMFRWILTNSDGTEKEIEGATSSSYTLKCNDIGFYISVLCKPVRNDGVDGSLVSTEAIGPIIPGPPTCQSLELAGSMVEGGRLTFHAVYTGGLRGSCIQEWFRLHDDGHKDKLTADECLDLDLADIDCRIELMYTPVREDGVHGLPRSVTSDTILPGEPKGVNLILPECFEDNEISPIKTYFGGKEGTGKYTWFRNKEKLDNLEFDLVAESSEVVGETLKYKPSLNDVSSYLILYWVPTRRDGKVGDPLMAISDDPVMAAFPSVSDVHLEQKSSDVYCGLGIYYGGYEGLSLYRWYRESSDGTRLHIDGADSVTYEVTDADYSCRLLFGYTPVRSDGISGEEKLSEPSDVILPELLKIETLNFKGNQVERETLTAAEQIPYSEIQQHIWKNYKKEMKYQWFISNESGGDQSFEPLATQCSRSYKVRFEDIGRCLKCECFVTDVFGRSSELVSAVTAPILPGLKLKSWRLKEEVSTLTYMPFRVPIAEAKKARVKYNGSDRWLEALILSPYLAKLEERMKLMLMM

SEQ ID NO: 61817 - protein, 65 aa, Zea Mays
MCCVEDICDAWFRSCCSVCVYNILRFLAVSMCGHIYIFCCWRGCGNRQSILCYCYLGLVNEFNSI

SEQ ID NO: 61818 - protein, 200 aa, Zea Mays
MGESEKLVANLFQMARENAPSIIFIDEIDSLCGQRGEGNESEASRRIKTELLVQMQGVGHNDDKVLVLAATNTPYALDQAVRRRFDKRIYIPLPDLKARQHMFKVHLGDTPHSLTESDFESLARRTDGFSGSDVAVCVKDVLFEPVRKTQDAMFFFKADGDMWMPCGPKQPGAVQTTMQELASKGLAAKGHFIREGIFWR

SEQ ID NO: 61819 - protein, 137 aa, Zea Mays
MIPTVGFNMRKITKGNVTIKLWDLGGQRRFRTMWERYCRGVSAILYVVDAADRDSIPIAKSELLDLLTKQSLAGIPLLVLGNKIDKSEVLSKQALVDQLGLESIKDREVCCYMISCKDSVNIDIVIDWLIKHSRTAK

SEQ ID NO: 61820 - protein, 468 aa, Zea Mays
MEPAAEDVAAAAPDSWESADIDGPISRLILSARRVSSSPDLADNPDPPQPPPALQPQGPPSVPSAAREDLMAQVDQFLREALEKPRERLSVLRMEQEILKFIGDPRFTEYEFNGLPTSYLRLAAHRLAQHYFLQSIAIPDNSLPDGTGSHIILRKTSSECQLPDVCLADIPVNLPQEENISVAKVAIKQRPQKNLHGMNSSSAHSFRDNHQKSVEERKEEYNKARARIFNNGVSNATDGRSAEEVTSLTTLHRSTSLELNSNNRMGQGAEITLERTLTTTSASSMSNRSKSDKEPAVNRNRQNNRVAIFRDRESERRDPDYDRSYDRYMQRFDPGFGFSGGSYTIRPLYAPAVNYNTEFPQLGSAHQSPVAVEQQPRPIAQHMPVTWSAAQATNAIGYGPDGVMGPYSPGHIRAPVRSSVFMHASQQYAIPSRPGVPFVHPQESMGPFAQVCMRFFILCDSVRSLLPY

SEQ ID NO: 61821 - protein, 549 aa, Zea Mays
MLFGHSVFHVFGIGTRSLGFNIRVQVKKGSSVSEVVVGPENRTVVSKDNFLRVNLIGDFGGYTSIPAFEDFYLVTPRKSAGSGEPQNLGAEYRKWMLLERVRFTDGVECNKIGVGYEAFQNQPNFCASPFESCLNNQLWTFLESDKNRISMSRQPQYVVQGRFQRINQHPDASVHSFSIGVTEVINSNLRIELSADDIEYMYQRSPGNITDISVPAFEVLSQYGTAKVTTKNIGTLEASYTLTFHCSSGISFMEEQYYILKPNEESTRLFYLHASTDQAAKYQCTAILKASDSSELDRQECVFSTTATVLDNGTQIIGSNGYKLGFFDTIKGYLVSFWDFLIDLISGKSCRLNKCRSFFDFSCHAQYRCITWLVMLVLLLFMLPAGAIVLYLLHQKGFFDPVYDWWDDLLGADYRAHRRHKKGRRHHHHHHDHHHHRHHHHHGHSHGHDHHPHSHHHAHQRRKIEPSHHHVLHRQQPGTAAEGHRHKHDPALGVQHREAGHLGHKRRHGKAVVAEDALDLEFRERRPYEVRHAGHLHRDHHHHHHSWEV

SEQ ID NO: 61822 - protein, 147 aa, Zea Mays
MEHIHEPPTIRGDVGFEDVKVQIAQDLQHLQQNAILVHAVNLHQGAVAACGVVDANPWGVDALVEVLVLRIKVGQHLRTEPVRGSFHSCRLVCPILCGGAGAGASDRSTAFLPPSSSLCRNPASACLLARFRCPVTSSPCAHHLMPL

SEQ ID NO: 61823 - protein, 308 aa, Zea Mays
MTRGRRREHYQWNMDIFGVPKVRAEAELLHAIVLLFQRLGITSSDVGIRVSSRKVLQAVLNMYSIPDHLFTQVCVIVDKLGKMTREEIEKELVSTGLSSEAVQGIIDVLSIKSLSKLEEVLGSDVEAVADLKKLFSFAEQYGYADWICFDASVVRGLAYYTGIVFEAFDREGKLRAICGGGRYDRLLSTFGSEDIPACGFGFGDAVIVELLKEKGLLPDMSRQIDDIVFPLDEELEGPASSIASSLRKKGRSVELVEDKRLKWVFKHAERINASRLILVGNSEWERGMVRVKVLSTREEFEVKTSELE

SEQ ID NO: 61824 - protein, 95 aa, Zea Mays
MVLWNHLAYLINYYYNREWGPEAITRTPRPRTSLLAKSVINGEWRFTTQPPDLGASFAVLARLRNCILRASKRRDGTPVATSAVKEDDDGGRDRR

SEQ ID NO: 61825 - protein, 864 aa, Zea Mays
MTVWYDLLQWRNEMYNSVIDAFKDFGQTNPQLHHLGYRDKAWNVNKLAHIARKQGLPEVCVTILDKMYGHATMEVQEAFVKICEQAKAYLEMKGELVSGLNLINNTNLEFFPVKNKAEIFRLRGDFLLKMNECETANQSYSNAITLFKHLPKGWISWGNYCDMGIKYGVSNSRSHLARILYLLSFDGQNEPVGRALDKYLEQLPHWVWLSWIPQLLLSLQRSEAQHCKLVLMKIAQVYPQALYYWLRTYLMERRDVATKTEIGRNMLAQQRMQQAMMANNAANNLPDGSARASNHAGSNMTSDNQSHQASQSVGAAGSHDGGNVQGQDPERSTPEGGTNTSHDQGQQSSTGAEGSQVPLRRNSGHGWVTSAASAFDAAKDIMEALRSKHTNLANELELLLSEIGSRFVTLPEERLLAVVNALLHRCYKYPTATTGEVPQSLKKELSGVCRACFSQDAVNKHVDFVKEYKQDFERDLDPESATTFPATLAELTERLKHWKNILQSNVEDRFPAVLKLEEESKTLRDFHVVDIELPGQYFTDQEIAPDHTVKLDRVGPDIPIVRRHGSSFRRLTLIGSDGSQRHFIVQTSLTPNARSDERMLQLFRVLNKMFDKHKESRRRHLAIHTPIIIPVWSQLNQAVSGQLSPEAIVELRLQAYNEITKNIVNDNIFSQYMHKILPTGNYLWTFKKQFAIQVALSCFMSYMLQIGGRAPNKILFAKNTGKIFQTDFHPAYDPNGMIEFNELVPFRLTRNLQAFFSNFGVEGLIVSAMCSAAQSVVSPKQSQHIWHHLAMFFRDELLSWSWRRPLGIPSVPVAAGMINPSDFQQKVVNNVEHVISRIKSISPHCLAEEEVFLGGINIVSLWCF

SEQ ID NO: 61826 - protein, 83 aa, Zea Mays
MMSLRKYFLTAYMLFRWCNSTTGKNMSWQQGGNKVLLVQEQSAVQLHIIQKEQNYHYHAITHLHKLYLDHIILRRLSSGMILH

SEQ ID NO: 61827 - protein, 62 aa, Zea Mays
MHFLVNTNIFTEICFNECCLMLFPCGNTSVFLFVTTLTCTTTVFTTIDSSSIALIKLHFKIL

SEQ ID NO: 61828 - protein, 297 aa, Zea Mays
MSTLHYLELNDNLLTGFIPPDLGKLTELFELNLANNNLIGPIPENLSSCANLISFNAYGNKLNGTIPRSFHKLESLTYLNLSSNHLSGALPIEVARMRNLDTLDLSCNMITGSIPSAIGKLEHLLRLNLSKNNVAGHIPAEFGNLRSIMEIDLSYNHLSGLIPQEVGMLQNLILLKLESNNITGDVSSLIYCLSLNILNVSYNHLYGTVPTDNNFSRFSPDSFLGNPGLCGYWLHSASCTQLSNAEQMKRSSSAKASMFAAIGVGAVLLVIMLVILVVICWPHNSPVLKDVSVNKPV

SEQ ID NO: 61829 - protein, 249 aa, Zea Mays
MTEMNGVYCSTRPMRISAAIPKKSTGSQLQYSAAKAVYPATAYAMPQLQAVLPDSDPTNTTIFIGNLDPNVIEDELRQICVQFGELIYVKIPVGKGCGFVQYASRASAEEAVQRLHGTMIGQQAVRLSWGRSPASKQDSSAVWSQQADPNQWANTYYGYGYDAYGYAQDPSYAYGAYAGYSQYPQQVEGTVDATSVAGSHPGMEQKEEPYDPMNIPDVDKLNASYMAVHGRAMLGRSLWLKTNPLPQPT

SEQ ID NO: 61830 - protein, 933 aa, Zea Mays
MGSQESEQAKVLPGTDCPQQPPASRTWQRRFDDEGKNVAMFSMTMSDLVELVAVYDLLRKWMDNCYRGVPVGGIGSGSIGRSYRGYFQQFQIFPVTNEEKPVLANQFSAFVSRPNGNKYSTVLSAPTADLLKGVGKAGIGSWDWRLKEDRCTYHALFPRSWTVYDGEPDPEIKITCRQISPFIPHNYRESSFPAAVFTFTVNNSGSSPADVTLLFTWANSVGGKSELTGNHVNSKMTEHDGVRGVLLHHRTAGGQPPVTFAIASRETDGVRVSVCPSFTIASGGPSSSGEPTAAAMWDEIKKHGAFGHAGAGNGNAARAAASKAGSSVGAAVAASTAVPAGATRVVSFSLAWACPEVKFPAGSTYYRRYTRFYGTDADAAAEHLAHDALLEHMNWESQIEEWQKPILHDQRLPEWYPVALFNELYYLNAGGTIWTDGQAPKRAGFASSLTATEPFSIDTLLPVAAGGSAVDGVVRAVASATERSHSAAAFGAALLRGGEDNVGQFLYLEGMEYNMYNTYDVHFYASFALLSLFPRLELSLQRDFARAVLLHDPRPRRTLDGRTVARKVLGAVPHDVGLNDPWVELNAYMLHDAARWKDLNPKFVLQVYRDAVATGDAAFAEAVWPAVYVAMAYMDQFDRDGDGMVENEGVPDQTYDMWSVSGVSAYTGGVWVAALQAAAGMARVVGDRPAEAYFRARRDRAARVYDAELWTGAYFRYDNSGGGGASESIMADQLAGQWYARACGLEPVVEDAKARSALATVLDYNVMRVKGGAIGAVNGMRPDGAVDASSTQSKEVWPGVTYAVAAAMVHEGMTEAAFRTAKGAHDAAWGNDGFGYAFQTPEAWTEDGGYRSLHYMRPLGIWAMQWALSPPELHRDLRTPEARSSEEPSPADAALGQAQFDKVASMLRLPEEQQPKGYLWAIYNLVRQIVLPA

SEQ ID NO: 61831 - protein, 579 aa, Zea Mays
MASAAGAAFAAITLLILVPLTAASDSDHKYQAAEPVTLWVNKVGPYNNPQETYNYYSLPFCHASENHVHKWGGLGEVLGGNELIDSQIDIKFGKNVDKATICSLDLDLVKAKQLSDAIENSYWFEFFIGFVGEADRNNDNKYFLFTHKNIVIRYNGNQIIHVNLTQESPKLIDVNKALDMTYSVKWEPTNITFAHRFDVYLDYPFFEHQIHWFSIFNSFMMVIFLTGLVSMILMRTLRNDYAKYARDDDDIETLERDVNEESGWKLVHGDVFRPPCNLVLLSALVGIGTQLAALILLVILLAIIGMLYIGRGAIVTTFIVCYALTSFISGYVSGALYSRHGGKNWIKAMAMTASLFPFMCFGIGLVLNTIAIFYGSLAAIPFGTMVVVFILWAFISFPLALLGTVVGRNWSGAPNNPCRVKTIPRPIPEKKWYLTPSVIALMGGLLPFGSIFIEMYFVFTSFWNYKVYYVYGFMLLVFLILIIVTICVTIVGTYFLLNAENYHWQWTSFFSAASTAVYVYLYSIYYYHMKTKMSGFFQTSFYFGYTLMFCLGLGTLCGAVGYLGSTLFVRRIYRNIKCD

SEQ ID NO: 61832 - protein, 597 aa, Zea Mays
MGWRSAAAIRTLPPVPPASRPRSGTRRRSRAAPSRRAPPSTWTIVPFASPASDSSTSLERTSGSSQNCPAIEPASGSVNATDAWFGAAVAGIFTALVDRAAAASNATRKYFATAEMDFDPKLYGLAQCAPDLTPAQCQGCLGDLQSRVTAQFLSGRPLGNNAFMVWCSLRYSVSPFYAGRAMLQLPAPPAPPPTSTPTLHSSGRKVNAAGISAGIACVVVLMLILSVFFFIRFRLRIKVKKNDHSLKKIGRAQCTIFDLLTLEEATEHFAEKNKLGKGGFGIVYKGILSDGQEIAVKKLLGRAGSGLDQLQNEVQVLAELQHKNLVGLQGFCSHHNDTLLVYEYIKNGSLDTILFDDREGNALNWEQQYNIIFGIAKGILYLHEDSSMRIIHRDLKANNILLDDNMEPKIADFGLARLLGEGHTHTQTGRVVGTFGYMAPEYASHGSVSPKIDIFSFGVLILEIVTRRSNCSSDDHSTVNLLSDVWDHWKKGTMPQMLHRSLDEFARSQALRCIHIGLLCVQPEPDDRPDISAVVFMLTRDSIELQPPGQPAFFFGRESPSALRLDGQSSYVYHRDGFKLGQGVSVNGVTLSELYPR

SEQ ID NO: 61833 - protein, 93 aa, Zea Mays
MPYISVHSSSRSLGVCSAGHARGAVCPHANAIGINPGVMMCVHPVARTCVMSFVCVQLRFFPSFLLSDEKTARVHCFQLHISSSLNQSMKSGL

SEQ ID NO: 61834 - protein, 117 aa, Zea Mays
MMPSLPTRETWTGGGGPTYPASSSLVSSSSSSKLRSDPPMSDSSPAPGAYYSGPPAAPPPESKPVDGGQVNADVPGYYSSVPAAKSGAGGQGSSAAPKESGFFASCCGCFSGGETAR

SEQ ID NO: 61835 - protein, 1201 aa, Zea Mays
MIIDAIDWLVLSTTEKVRNIYDDLFEVPSKVMQTAITPRDATSSINFYWNSKGSSLGYIPVFHFSEVLQAGAGVVRQFNININGKRFTSHDYYTPRHLESGYVYGTRPYTNQIRYNVSIVKTDTSTLPPIINADEIFIVISTTNVGTDSEDVSAMKAIKAKYQVKKNWMGDPCVAGTFRWDGLTCSYAISDPPKITALNMSFSGLTGDISSAFANLKAVQSFYADNPDLCTNAGDSCQTAPQGKSKLVIYYVAVPMALIVVALAVLLCCLLRRRKTRGLADVSVKPRDKTPTSLASMAADEHRLSSLRLENRRFTYEDLEMITDSFKRVIGRGGFGYVYEGFLEDGTQVAVKMRSQSSNQGAKEFLTEAQILTRIHHKNLVSMVGYCKDGVYMALVYEYMSEGSLQEHIAGKRLTWGQRLRIALESAQGLEYLHRGCNPPLIHRDVKTSNILLNAKLEAKVADFGMSKALDRDTYASTNTLVGTPGYVDPEYHLARGDIEVVVDASMGGNHDVNSVWKAAEVALQCTEQASAQRPTMGDVVAQLLECLDLEKGRSANESFCDGDDSGSATASLSHSSAFVTGRIFGTVPMVETGPATRRALVCVSLSPLSPLPRARLPSAPPWDESAFLAMAASHLPPAATLVKKYPTLLHPFGAKPHAQRLIFRCRATSSEGADDGWASFVDELKRSLQVDPSDAVISNAGAGLTSNNDLVTALPLEPSAGPAAGDATTAAAGAVSELLGVDASGAVATPDRLLSSLLHLDASNPVASVAGGALSRLDALTSGLSDAQRWALFGFLAATWLYLTARPGVLSGAVDMYVLAPLQLALDSVLGRRSLKMSDFVVGERIGEGSFGVVYAGAVVPKNGAVVEERSGKAKTSLQNDDRYKEKVILKKIKVMTVGAKECGDYEEWFNYRVSRAAPESCADFLGSFVADKNKAEFVKGGKWLVWKFEGDRTLANYLSERGFPSNLERLMFGRVLQGLGPLEREALVVKQVMRQLITSLKRIHATGIVHRDIKPSNLVVTRRGQVKLIDFGAATDLRIGKNYVPDRALLDPDYCPPELYVLPEETPEPPPEPIAAILSPILWQLNSPDLFDMYSAGIVLMQMAIPTLRTQSGLKNFNAELRSAGYDLNRWRQSARRRPDLQILDLDSGRGWDLATKLISERGANGGGRLSAAAALRHPYFLLGGDQAAAVLSKFSLSK

SEQ ID NO: 61836 - protein, 318 aa, Zea Mays
MIDSDKHTWQICTCSENSVPLSGIPESQADAQIDTDTGHRQTDVDSTADVLSMSDGDNSCIAKESETGTSASSISNEGPQDNATSRKKFRKVFFKKDKRTKKRDDNFERALLIANTCTKVDVIWQDGTKECGVAATALIPIHSPNEHEFFPEQYVVDKVTNDVGVDDSSEPRRVGLVRGVNAKDRTATVSWFKPPLHPEEPKEIACNEIVSVYELDVHPDYDYCYGDIVVRLPPVKPVIESTNSKEQMELDKTLDSSEGFAASYSAPPDTSADEQLSQKESCLQFTSLSWAGNIVGFQDGEIEVIWGDGSISKMMVPH

SEQ ID NO: 61837 - protein, 693 aa, Zea Mays
MPEIKCGAAEKVKPAASPEAEKPADIAGNISYHAQYSPHFSPFAFGPEQAFYATAESVRDHLIQRWNETYLHFHKTDPKQTYYLSMEYLQGRALTNAVGNLGITGAYAEAVKKFGYELEALAGQEKDAALGNGGLGRLASCFLDSMATLNLPAWGYGLRYRYGLFKQHIAKEGQEEVAEDWLDKFSPWEIPRHDVVFPVRFFGHVEILPDGSRKLVGGEVLKALAYDVPIPGYKTKNAISLRLWEAKATAEDFNLFQFNDGQYESAAQLHARAQQICAVLYPGDATEEGKLLRLKQQFFLCSASLQVNGVAELHSNILKQELFADYVSIWPTKFQNKTNGITPRRWLRFCNPELSEIVTKWLKSDQWTSNLDLLTGLRKFADDEKLHAEWAAAKLSCKKRLAKHVLDVTGVTIDPTSLFDIQIKRIHEYKRQLLNILGAVYRYKKLKGMSAEEKQKVTPRTVMIGGKAFATYTNAKRIVKLVNDVGAVVNNDPEVNKYLKVVFIPNYNVSVAEVLIPGSELSQHISTAGMEASGTSNMKFSLNGCVIIGTLDGANVEIREEVGEDNFFLFGAKADEVAGLRKDRENGLFKPDPRFEEAKQFIRSGAFGSYDYEPLLDSLEGNSGFGRGDYFLVGYDFPSYIDAQDRVDAAYKDKKKWTKMSILNTAGSGKFSSDRTIAQYAKEIWDIKASPVV

SEQ ID NO: 61838 - protein, 201 aa, Zea Mays
MFNLHDVYDANTNKPILVLFVGCLPKFFKGVYLSGGPACRWYFNPTIPEAEPYLTSQSTKRIVLQLPQNLQHPPAMETKPIVEHKSLYELLTVNPYDFPETGFECTITIAEIPAEHKWWFPSCTKCNKATIPHTTGYHCESCNWDGYKFKYKLKFLASDETDIAEMFCFDTVARHIVVAQTCSALILLLLHMGDNVLYQCK

SEQ ID NO: 61839 - protein, 633 aa, Zea Mays
MVCMQLYSKEIESPPGASSATSILSRNLQTHGFDSKKSSEVKDLVWKFCAWRDLMARMHDESLRYVLPDQAIAALAVSLPKGPTEVFAVIAETDLSISSMYPSLSSPSPLVVAHVKELCYLLDDITTSMDSIFKSLLEKYKDPSGLCRLSVYNYNLITHLSLKQTSMFSVAPSGKKLTALPNKKVSRDLFIKKFSCKSPVYHNCRIYASDGRLLCYCDRKKLEWYIQRNLAKLIENSPPAIMLLFEPKGRPEDEDNEFYIQSKKNICVGCGEKSHYIRYRIIPSCYRMHFPEHLKSHRSHDIVLLCVDCHEIAHSAAEKYKRRIAEEFGIPLFVQKIMNSGDISLITNTSVSEDKLNGTGVSPLQLRTAAMALLRHGSTMPLKRCEELMQIVKSYYGGRDVTPEDLEMALLVGMSPHERRRLEKKKGYSFRAQAQTIIRKSSSNTISEDSGHGSENCHALSARFPEVGTGSNGQQEFDETGNQNQLENLTLSQGSSSLPVSMEDTTSDHDTVTLETDTEQQARGACTPGNSHDDKEQSICDNSSQVISKNAEKISLLGHGHHGKQVVELLFSNGGEEFVNQFCQRWRQIFVEAVHPRYLPSGWNINHSGRRDFGDFSVYKPPRKDPQSATARD

SEQ ID NO: 61840 - protein, 389 aa, Zea Mays
MAAAEISAMLDLLVASGETEPPVRRLRSPAARPGLEALAGALAAGQSADPGAARTVLAAARAVVFPVLPASVEQVDPTVVEIVERSLEFCLLHLEKSSYVCDDFGLLNEVACFVESVLLKGTLNKVSSLEPSIINDIIEQWTSVQAETERMSPQGKYFCYLKGFNCSKSEDDLKQFHLALLPEYLQRDYVILENSQSCSAVSPNAMVPLAQHFAVAHLCCMPRLLTLVQKLCQSPALEMVEDVNIGLRLSFAQRILKLVCGLTIEFPPDASDAMMLSSVARCADSLPALFRLRFNFSNHDRVFSVDGVGTILLQILEEFLQVVQNISVCNSDICCTVKACILSSMLEIFSPNIWRYEKSGACLVPPLSYSPHVVQFVLQLFKDTKRWTS

SEQ ID NO: 61841 - protein, 344 aa, Zea Mays
MCRCWWCGPTTTRTRAARGATTTSRSSSGRGPTTGGGRRGSSPAPPWPASPSSSSPLKMGALDVAKVVHGRQGWRLITCMWLHAGVVHLLINMLCLLVVGIRLEQEFGFVRIGLVYLISGFGGSLMSALFIQSSSVSVGASGALFGLIGSMLSELITNWSLYANKVAALLTLLLVILSNLALGLLPRVDNFAHIGGLVSGFLLGFVVFVRPHLDWLTQQQRSGGGGQGQQQAPPPVAAARKRKHRTYQYVLWLAAAALLVAGLTAATVLLFRGYDANQHCPWCHYLSCVPTRRWRCDGSPTTCTATTQENNTLSVVCEGGSNRTYVVAAASQDRIKDLCNQLCT

SEQ ID NO: 61842 - protein, 54 aa, Zea Mays
MSSIRSNRALKSAAPFPHHDTWRSSIGQQQAVHRGEAPPPWTPASSSCSSPRAT

SEQ ID NO: 61843 - protein, 487 aa, Zea Mays
MILILQWQVIVRDIVSKLLIVQFRAHTSPISALCFDPSGTLLVTASVHGQNMNVFRIIPPHGTSEAGQIGTYVHLYKLQRGITNAIIKDISFSDDSDWIMISSSRGTSHLFSISPYCGSTRFRYSDNNPVENDYTVDSSVNHTAHWSQNSATSLSLSQKTLFVSGPPVTLSVVSRIRNGSNVFKGAVHGAAAFATGASTPISGSIIQYALHLSAEQDSGLDFRTSPISYGPERETDTKFVIEALQKWDVCYKRNRRDSAESFAYSDFENGENNKLLLKAMWKGTSIYPFDCSVERQKLSADENRNLYISQSELQTHVVQTPLWSKSRIHFQVMEGETLEADNADVISGEVEVEKVQTHNIESRSKNLIPVFDSLHTSRFQQTRLNAPDNSRCGLLQRQKSGISEDGRLSRRSSCSSLDCMSEGPKSSDDGAFSKYVVDDNSSAVINNPSVKFHAELVNNTGSLKSEAQLGFVNSEEDGGGGEQLPDL

SEQ ID NO: 61844 - protein, 271 aa, Zea Mays
MIYSTMSFGLISEEYQVVNVSLKADAWRTELFAEGVDPRHQTFSYRSRFKKRRRSKNTMEKIRHVHSHIMESGSPEDEAGSEDNFVQGENGTSVANASIDPAQSLHGSNLSPPTVLQFGKTRKLSERSDPRNRQLLQKRQFFHSHRAQPMQLEQVFSDRDSEDEVDDDIADFEDRRMLDDFVDVTKDEKLIMHMWNSFVRKQRVLADGHIPWACEAFSQLHGRQLIQNPALLWGWRFFMIKLWNHNILDARTMNTCNTVLQILQEESTGLK

SEQ ID NO: 61845 - protein, 60 aa, Zea Mays
MVHGPCCSASRFSHLVRYKFIVVVDTDLDHRLVRVSTSLIDTHLEHEEHSGSLKSIGGVS

SEQ ID NO: 61846 - protein, 421 aa, Zea Mays
MPDNTQPMQYGIEEEEVPYTDERITSLCSSVQLLLEQGGNFVVSAPNMAHLCHRFTVGCFVATAQMVTQAQPEFIDLGHGPAPSGFVNHRIRSSGQESCCGCSVRAVEAAACQFGFTTKPLASSLPRPSAQPCPAPSDANSQLRCSFRSSELRNRAKHPSLRRVKPSKLPRFIPFPPPIPRLSPQLRPSVSEAPPPTWPPSAPMALPYLEAVLCFMIFMYIFETYLDIRQHRALKLPTLPKPLLGVISDEKFERSRAYSLDKSYFHFVHEAVTILMDTTILYYRVLPWFWKKSGELVTSVGLSAENEIIHTLAFLAGSMVWSQITDLPFSLYSTFVIEARHGFNKQTIWLFIRDMIKGILLSMILGPPIVAAIIYIVQIGGPYLAIYLWGFMFVLALLMMTIYPIVIAPLFNKFTPVSILF

SEQ ID NO: 61847 - protein, 1412 aa, Zea Mays
MKRGTRDDALMGSQLKRSNVVRSDPSAQPQHMSVPGSASAAAPPPQAGAAPPAQPQQPSGAAFTNQKLTTNDALVYLKAVKDKFQDKREKYEEFLEVMRDFKSERIDTNGVIVRVKTLFNGYPELILGFNAFLPKGYAIKLQEEKKPVDFVEAINFVNKIKNRFQHDEQVYKAFLDILNMYRKDNKSIQDVYHEVAMLFKDHKDLLEEFQHFLPDTSVAPQAVASKGGLVKREDRSSLVPPANKILHNDKRDRVYLSHADRDFSVDRPDVEHDRQRRRLDKDKERKVERDRRDYEREDKDGEHDSRDLELGQRKRKPFSRNIEDNVGAETHQGGPSENHGIHSVSASSYDDKDALKSVYTHEFHFCEKVKEKLEHEAYQEFLKCLHIYSQEIITRSELKNLVNDILQHYPDLMEGFNEFLEHCENIDGFLAGVFNKRPSTRAVKTEDKEKDRDRDREDKDRDREKEREKERERLDKGSTFNSKEGSSHKPSMFSGKEKYNLSKPISELDLSNCQRCTPSYRLLPKNYPMPPASNRTDLGASVLNDHWVSVTSGSEDYSFKHMRKNQYEESLFRCEDDRFELDMLLESVNAATKRVEELIEKMQDNSVKPESPIRIDEHLTPLNLRCIERLYGDHGLDVMDVLRKNASVALPVILTRLKQKQEEWSRCRSDFNKVWAEIYAKNYHKSLDHRSFYFKQQDTKNLSTKSLLTEIKEINEKKRKEDDVLLAIAAGNRRPIVPNMSFEYIDSEIHEDLHKIIKYSCAEVCNSSDQLDKVMRVWTTFLEPVLGVQQKHGSEDPDLVKTKSRTTKLGLANVRESNTIAGIVSKQSNGDESEQDRIARKGEEPSNAILNGRVHGAVSADETLSLITQNIASTERPAENAAAVRTEQHKANLVLTPGMNASRSSHDAVEVAGEGKTGNETLLSAEGGERLGPSLNGTSEGIKGRLNNDGSVPHTSKVEREEGELSPNGDFEEDHFVPFEDGTSKGKEDSTSRPFHGRPGEVVPSSAEAAGENDADADDEGEESAQRSTEDSENASEAGEDASGSESGDGEECSREDHDEEEEDMDHDDQDAKAESEGEAEGTTETHDVEGGISLPLSERFLYSVKPLAKHVPTALHDREFSRVFYGNDSFYVLFRLHQILYERLLSAKTNSFTAEKKWRNSKDTNPPDLYAKFMSALYNLLDGSSDNTKFEDDCRAIIGTQSYVLFTLDKLIYKVVKQLQAIATDEMDNKLLQLYLYEKSRSPGRFFDLVYHENARVLLHDESIYRFECCSSPTRLSIQLMEYGHEKPEVTAVSIEPNFSSYLFSEYLCSTPDKKLSEGVYLGRNKRKYSNNDEPSDSLKAMDGINVVNGLECKISCKTSKVSYVLDTEDFLFRLRKRRKILRGGNVPDRLQISSISAAKVQRFNRFLSKP

SEQ ID NO: 61848 - protein, 126 aa, Zea Mays
MSQVSNNDHQSQGPVKDTMSVELAEQQILLLARQQAQREEELAQSQRHILALQQEIEELERENRLHDQQEAMLKTELRNMERSQKREGIDMTYLKNVILKLLETGEVGALLPVVGTLLQFSPDEWR

SEQ ID NO: 61849 - protein, 851 aa, Zea Mays
MVGLATEGWPKGIYDGLGIITSILLVVLVTASSDYKQSRKFMELDYEKKKIYALVTRDRKTKRVLIHDLVVGDILHLSVGDVVPADGLFISGYCLVIDESSLSGESEPVDVSEEKPFVHAGSKVVDGTAKMLVTAVGMRTEWGKVMDTLSADGVDETPLQVKLNGVATIIGQIGLAFAILTFLVLLVRFLVDKGMHVGLSNWSANDALTIVNYFAIAVTIIVVAVPEGLPLAVTLSLAFAMQKLMNDKALVRHLAACETMGSASCICTDKTGTLTTNHMIVDKVWMGDVSKSVNSDTNMNELKDATAESAVDLLVQGIFVNTAAEIVKGDDGRRSILGTPTEAALLEFGLGLQGDLYGEYNKMARVKIEPFNSVKKKMSVVIQLPNGGLRSFCKGASELILGQCDSFLNSEGNLAPLSEMQKQNVLDIINSFGSEALRTLCIAFKDLGEIPDDQTIPEDGYTLIALFGIKDPVRPGVRDAVMTCMAAGIKVTMVTGDNINTAKAIAKECGILTEDGIAIEGRELHDKSMDELKEILPKIQVMARSLPMDKYKLVTSLKSMYQEVVAVTGDGTNDAPALSESDIGLAMGIAGTEVAKENADVIIMDDNFSTIVNVARWGRAVYLNIQKFVQFQLTVNIVALIVNFISACIIGTAPLTAVQLLWVNMIMDTLGALALATEPPNDEMMNRPPVRRGHGFITQVMWRNILGQALYQLLVLGTLMFNGKRILNIEGPNADRTINTLIFNSFVFCQVFNEINSREMEKINVFRGILKNWVFIGILTTTIIFQVIIVEFLGTFANTVPLSWELWLLSAILGSVSLVISVILKCIPVESRKTDIKPHGYELIPEAPETV

SEQ ID NO: 61850 - protein, 810 aa, Zea Mays
MRFELNEVEARRESYPSTISFLKLINALIVEERNISDKGRRFMGIFKFVYEDVFGPFPQRAYADPLEKWELALACLEHFRMVLSMYDIKDDDIYASVNTLAPSSLERQLPLLELLKDFMSGKVAFRNIMNIILVGVDSIINERTTQTYGIILERTVLLSLEIFILVMERDLALADVFRPLYQPLDVILAQSHRQIVALLEFVRYDYLPQIQQCSIKIMGILSSRIVGLVQLLLKADVGKMVIEDYAACLEFRFDDFQLLVDNICRPAPNITHLLLGFDVNGSIEQTVLKPKSQYSCLKIILDNLEKATKPDINSLLHEFSFQHVGTIGVTPLPKRNSNQSLRISMLHERAWLLKMLALALHISDISSSVYREACMAILYHTFGQCAENFQSTSLIHSHDALTSISDVPAKRNKVLDLLEVLQFRCPDTSTKYPQLLSSLGIESKIEEILRNSATFENGGVYYYSERGDRLIDLDAFREKLLQISQELNSQLTEPEKAGLKESVHHLLKWAWRYNKNLEEQAAQLHMLTGWSQIVEVAVSRRMSLFEDCSQLLFELLDASLNATTSPDCSVKMAYVLTNVSLTCMAKLRDERFICPAGTDSDAVTCLDIISSKQLPNAACNSLLFKLVMATLRNESSEILRRRQYALLLSYFQYCSSILDSDVPPSVLRFLLLEEQDGDDEDITLQKVLKEHNELAHANFSIIRKEAQAIVDLVTKDAFHGSEAGKALSFYVLDALISIDHEKYFLNQLQSRGILRSCLSDVANYLSKGQCLNPQAQRREQSLRSPSLTYKGEEQDCTRDSGLRKAASVSF

SEQ ID NO: 61851 - protein, 412 aa, Zea Mays
MAYTTSPSTSTSTAAAVAWAFAAATCVKLLLVPTYRSTDFDVHRYWLALTHALPVRQWYTDTSSQWTLDYPPFFAYFSRLLSLPAPLVDATLVSIPVRDATPFAHLIYLRLTVAFSDLLLLGSVLLLARDAQRKQRPFLALALVVWSPALLAVDHVHFQYNGFLIGLLLLSLHFLEQGWDLIGGVVFACLLCSKHLFLVAAPVYFMYLFRHYCCGRGVVKGLGRLVLMGSGVAAVFAAAFVPFVYYGQMQQLISRLFPFGRGLCHAYWAPNFWVFYIILDKILAFLLRRLGFNIAIPEASFTGGLVGDSSPFAVLPKVTPIATFLLVILAMAPCLIKAFSNPQPKHIIRWVSYACTCGFMFGWHVHEKASLHFTIPLALIAMDSLNDARHYFLLSIVHATLYSRCCLRTKST

SEQ ID NO: 61852 - protein, 114 aa, Zea Mays
MSAPPHVSYTALPPPPPAPTATSFSQLPPLPDVVGGCRVKAGAKPPGPGANPPDPFAALIVPTLVRVARTSFPPLEIRCLIHFSRVTYLSAGWEGSATDSMVLRSAMTNSIGKF

SEQ ID NO: 61853 - protein, 652 aa, Zea Mays
MAQSTPDPPALVAMTLAELEAAIAALPGKWGALREAFDRLAACSPSPLPFAWEDLDGYISSLQSSVALRFRQVRALEAAGAVPAAAASLVTRGDGKGENQELEEDDELDEDVAVEVEEKVAVEVEEEADEEIQEADSDKICNDEKDGKEAREVEVEKEVAELEKADEDMQEANSDKFCNDEKDGNETREVEVEDEVAELEKKADLEMQEVDYDKICNDEKDEKGGKEEVVEEEGVEEASNIKIGNEIKYEKESREEEQASKVNEQDPDKEMQVVDKDKLNTKGAFKASQDKEKDQDTNMDETVTKMASSVQHKEGEEACDRKQKEAQKQDLHEKVEGTKNAKDQGNRALPRRSDDCTVACAYMDAKRLVKLVCTNTDLKSELHAAFRCAPDAAAVALHVVELFLHNKTFVRTNKVWANCVELVQMVPVFVTKPSADTTEQAKRMAKDWKEMIDSPESCYVLGSLASWGLLYFLISYNIVTEFDMKEIFRLFGNIPFKQKKKSAMLLKGLGLSNRIPELMDYLIGNGQQMDVLCLARVLNMVDKYPPLSLLKGYVEKAKQTAMEISQKNMTRQLRVVIIKELDDLRRAHFLVKKEITNTNLCTSIREEINILLEAGASQRTRRPDARATEWAGREAREETKEAPTGAATGTRK

SEQ ID NO: 61854 - protein, 59 aa, Zea Mays
MVPRSDVGGGGSSNASGVVEIDEDLHSRQLAVYGRETMRQLFASNVLISGLNGLGAEIG

SEQ ID NO: 61855 - protein, 531 aa, Zea Mays
MTWSNLAHEMTAEFRSLCAEEAYLQQELEKLQDMRNKAKLEGELWDERLSGSSGQNSHLVSKATRLWESILARKGQHEVLASGPIEDLIAHREHRYRISGSQLLAAMDMSSSVPHSELLSSKAGETSIILEKQEEFSQLFQEKEEALTRSDDRNGRTQQTVDVAEILRRWTHALQRIHKQSLHLAKANDGEGPELLRSASSGEASTHSDSLTATLAEHRQHLVSIQGLINQLKEAIPAMQQSIDELSEEVNSVSINSMDQLNSRLPLPVQIAGFGTSEESSSEVSEINSKLSSTHLDKPGGSPALKLPPLFSLTPSSSGKGIQTQKRSALARQRSQDITSEQKTLTIPSTKDQMNGSMHENDDYSAHDIRRSVREAALSKPLKNTERPQDKNSDDGSEHFFIPLSISAAKKEMDSVANRCNQRLGLSPQMKFPKSTSYNADTPINKSPILLSELNGHDSISAMSFLDPAGGLAHQSFITDDALDQVFSPLLMESSLFHDADEDLLDAAWRLLWLMFVLLTIRLVACELQPC

SEQ ID NO: 61856 - protein, 849 aa, Zea Mays
MNDQTNEKCPLCLNKMDLTDKQLKPCKCGYEICLWCWHRIIDESGGRCPGCRSVYNKDKILETSARNQILKELCADKSNYQKEQVKSHKQTSAKVQLGQSEPKDPNSIRVIQRKLVYIVGMPTEFASEKLLRQKSFLGQYGKIENIIIDNVGANQQVPDSGRVYVTFAKEVEAIRCIQAVDGYSLDGRPLKATFGVTRYCHIWLSNKDCYKPNCSYVHYKAPAEEICTKDDVSVVCARLQHSMGMSTKCLQHRSGRTLPPPCDCSSRNTTASGISKDICINDDRLLPNGAIKYTSLPSVTTPRDSSLSSGSPPSPASIVLHQRNDHERLHNNQQNLSDLKPQRYIPPGGRNCSSEMTTSVKHMQPIEGAWLHSSSNEHLGSNNDKSQASSQLGNDNSNPKQITSAENGTSDTVQQKPQYADVVSQGQVAPVRRLTVLNRPSIASSDTRPKATGQVVNGTSTSFTKLTLVQKAQGSCITIPRNHPVPQIPEEPAHLFASASVKSHAGVEIMNECSDIKEKIVLGGYKQLPESTVSHRLTASQNMSSGTLPSNLSASYAKTQGSAGSHNLSDLNMKLVAKNRSQLVNQQNAPVSVSNTGIARASFCCSTLNKNASLSDGDSSHNRRWDTIRSGHIVSSHSSDSTMLSRPASAVSSTDVASLHRKERRQACPPGFEKPHLYSGSGKACSGHCSAPDALVQDCGIPDQQDFTSLTTDCLKDDGDVTQNLSMNISSPPSLTDTNRNWSQSHRQFPGTLFGWSNDPQYSFYPGGSSHPRQEAENWDGTSTSYMATATGGYKVFSQGTTSDMRGGMAGTLLQQPIMSTHDRWTDGSSDSGRNCPQVDISYRMYSLF

SEQ ID NO: 61857 - protein, 891 aa, Zea Mays
MSSNQNESGGGGGAGPPLPTAFKSPSTDGKSGSRRSTRFKDEDEYVEVTLDVRDGGGGGDDVAVLAIKDDVRDDTQDAASLLDRPAPGGAGGGLSSKLRAARARLGRIASGKRAAVPLSALLRRDPDRARLDRSVVTALRGLQFLNQAAVTEGWPEVEKRFHRLAVDGFLLRSRFGQCIGMVGSEEFAAQIFDALARRRGITAMVLTKDQVREFWEQLSDPGFDAKLQTFFDMVDKNADGQITEEELKEVLTLTASANKLSKILERVDEYTALIMEELDPDSLGYIEIANLESLLLQPPSQAPTRLVTHSSNISQLISQRLAPARDDGPLRRGARAVLYFAEDNWKRVWVMALWLAINAGLFTWKFLAYRRHPTFDVMGYCVCVAKGGAETTKFNMALILLPVCRNTITWLRSRTRLGAAVPFNDNINFHKVVAGGVAVGVALHAVTHLTCDFPRLLHASAAAYEPMKAYFGQRRIPNYWWFVRGVEGITGVIMVVLMAVAYTLAHPWFRRGKLSEGNPLRRLSGFNMFWYSHHLFVIVYVAFVVHGVCLYINRTWYKQTTWMYLAIPILLYAGERLLRALRSHGLTTVRIEKVALYPGNVIAIHMSKPHGFSYKSGQYIYVNCGEVSPFEWHPFTITSAPGDDYLSMHIRCRGDWTASFRALFAQVCRPPAAGQSGLLRADFASSTAAGGGGKLPKLLIDGPYGAPAQDYRKYDVLLLIGLGIGATPLISIVKDVLNNISDNKDEEQPAEFMTRRVYFYWCTREEGSFEWFRGVMNEVAERDARGDVVELHNHCTSVYEEGDARSALLVMLQALHHAKSGVDVVSGTRVRTHFARPNWRDVFKRVACNHQGQRVGVFYCGDQKVTPELRRLSQDFSHKTTTKFVFHKENF

SEQ ID NO: 61858 - protein, 516 aa, Zea Mays
MFKNIEEGKVYNLVMFVKSPETTDLTVSLTSSNGLQNLASATVTVSGESNWIKVEQKLVAKGTNRTSRLQITTNKKGVVWFDQVSLMPEDTYKGHGFRTELISMILDLKPRFLRFPGGCFVEGGWLRNAFRWRESIGPWEERPGHFGDVWHYWTDDGLGYYEFLQLAEDLGTEPIWVFNNGVSHNDEVDTVAIAPFVKDVLDSIEFARGSANSTWGSVRAAMGHPEPFPVKYVAIGNEDCGKKFYRGNYLKFYNAIRQAYPDIQMISNCDGSSTPLDHPADLYDFHVYNDSKTLFNMKSTFDRTSRSGPKAFVSEYAVWRGDAGRGSLLASLAEAAFLTGLEKNSDIVSMASYAPLFVNDNDQTWNPDAIVFNSWQHYGTPSYWMQTLFRESSGAMFHPTTISSSYSGSLAASAITWQDSENSFLRVKVINFGSDAVTLTISTSGLQASINALGSTATVLTSADVMDENSFSNPTKVVPVKSDLSNAAEQMQVTLAPRSFSSFDLALAQSKLVAEM

SEQ ID NO: 61859 - protein, 593 aa, Zea Mays
MASRAPIPPAPPHLRLHAASLFSQRLPLPRARAPRCRGGRSRLLSALPSPPPSPASRSQGVSTAPIEREPPGLAPTPAPTPAQQPHQDPAIAAEVARLSAARERLRAAHTLHEKLRALDAEPRVAAFFGEESSRGVLGVLEPREVLLLKCLVAAGQEHVLGHELDWYGGDGGHHEHHHRNGVSGGSALRDALYSLAGLVGKWTSEGVVAAKERREEMEVLPRLLKFLDNVEEFYDCIGGIIGHTRSYQIMVLELLSASKDRMHRPSKDKFVDFHVPSGLNLLKDKEYASQAALWGIEGLPELGEIYPIGGAGDRLGLVDSDTGESLPAALLPYCGRSLLEGLIRDLQAREFLHFKIFGGQCITPVAIMTSSVKDNHEHIIAICERLDWFGRGRDNFRLFEQPLVPVVNAKDGKWLISKSLFPVGKPGGHGAIWKLAYDRGVLQWLQNCGRKGATVRQVSNVVAATDLTMMALAGIGLRCNKKLGFASCERRPGATEGVNVLIEKQNLEGLWSYGITCIEYTEFEKYGIPEPTLTNSSQVSFPANTNILYVDLQAVQEVGSRKNASCLPGMVLNLKKAVSYPNHLGFELLLEAG

SEQ ID NO: 61860 - protein, 377 aa, Zea Mays
MHACICMDGRVDRRYRRYCEQMRALAGGFEAVAGERAAAAYTALASRTISRHFRSLRDGVVAQLQAARRALGEKDVAVPGMTRGDTPRLRVLDQCIRQHKALTQAAGMMESHPWRPQRGLPERAVTILRAWLFEHFLHPYPSDVDKHILARQTGLSRSQVSNWFINARVRLWKPMVEEMYVEEMKAEGQDGGGQQQVGVAVANNPNPSSAGHASEAAEDDGRGDSGGGAVVDRKPTRAQLLHDAGSLASVVNIGGGSRAGFGIMDHLDFDAYGGHHAGAVSLTLGLQQHDSHADGGAGGVNIAFGAPPPAHHHGYLFAPTAAAAGHQMGGGVHPGLHHHVQFSGAGAGIDGEAAHGQEHYRGLQGGGGFHLLRDLAG

SEQ ID NO: 61861 - protein, 1284 aa, Zea Mays
MASPGQMTASNLLRTEGFPGNMVKICGLNPARSLGSRRLRMTQHSFHQQHLCCPRLQRVMTHNIRLLSSPGAVASKGFDSPLVEKPDTASDVKIIHLYRIPFLQESETMELLRKVKAKVSANIVDILTEQCFNIQLDNSLTPEKLTMLHWLLAETYEPEKLQTRSFLEDEVSRNSCTVIVEVGPRMTFSTAFSTNAVSICKSLSLVEVTRLERSRRYLLCLEPGSDPLDEGQLKEFTALVHDRMTECIYRNKLTSFQSDVVPEPVCIVPVIERGEEALKEINVKMGLAFDKQDIDYYTHLFRDDIKRNPTTVELFDIAQSNSEHSRHWFFNGKLVIDGETMPTTLFQLVKSPLKANLNNSVIGFKDNSSAIKGFPVNQLRPTIPGFTSPLSIIMRELDILFTAETHNFPCAVAPYPGAETGAGGRIRDTHATGKGSFVVASTAVQRGDAEMAQKLYRVVRACAEMGESNPIISIHDQGAGGNCNVVKEIIYPKGAEIDIRSIVVGDHTLSVLEIWGAEYQEQDALLVKLESRSLLESLCERERVSMAVIGKIDGSGKIVLIDSAAVEYSKLNDLPPPTPVEELELEKVLGDMPQKTFEFRRVSQVTEPLDIAPGVTLLDALKRVLRLPSVCSKRFLTTKVDRCVTGLVAQQQTVGPLQLPLADVAVIAQTYTDLTGGACSIGEQPIKGLLNPKAMARLAVGEALTNLVWAKVTSLADVKASGNWMYAAKLDGEGADMYDAAVALADCMIELGIAIDGGKDSLSMAAQCDGEVIKAPGNLVISTYVTCPDITLTVTPDLKLGEDGILLHIDLAKGNRRLGGSALAQAFDQIGNDCPDIDDVLYLKKVFEAIQELLSQRLISAGHDISDGGLIVCVLEMAFAGNCGFKLDIDLEDRSLIEGLFAEELGLIIEVHSKYLNIVKQKLEIAGISANVIGEVTNSPEIEVFIDGNLHLKEKTSDLRDLWEETSFQLEELQRLKSCVKLEKEGLKCRTSPSWSLSFTPKFTDGKLLTASLKPKVAIIREEGSNGDREMAAAFHAAGFEPWDITMSDLLAGKSSLKEFRGIAFVGGFSYADVLDSAKGWAASIRFNQPLIQQFQDFYHRPDTFSLGVCNGCQLMALLGWVPGSGVGGSLGTGGDMSQPRFIHNESGRFECRFTSVSIGDSPAIMFKGMEGSTLGVWSAHGEGRAFFPDENVLATVVKSNLAPVRYCDDSNNITETYPFNPNGSPLGIAALCSPDGRHLAMMPHPERCFMMWQYPWYPKEWQVEKSGPSPWLRMFQNAREWCS

SEQ ID NO: 61862 - protein, 653 aa, Zea Mays
MEFLYRAVDEPRSRSPPPPAAPVTPGSGSTDGHGSDGPAECVGNSAVTLWQSDLPPPETAEADAYELRRQAEKARIRERILREEAEQLELEMVVRSELREQMLQLLWPTLGRPTRGSETKVVLSPGTITAANSSPPILALEAHQKANALANAPTKRKSPDHAAGTSTPSLAPSSKKQKSTLTCTVCGITANSEKVMQDHLNGKPHKRKLVALPELPKPVPETEQERGLETGEEEAMAMETLRDYKPTKFMMATTAGALNEVIQMDGYLLCELCNVRTSDRVTMMCHIQGSKHISNDQKKHELSSRPSGVAIASADPDVKLALEDYSVELPPTVRRLEGFLLCELCDVKAPSMNGMRQHLSGKKHEKKASTSSSDASVNGSIAIGGKEEAEAQPIDTNHTVVISDDMAAKAKALLANKSLQPKHGDDIGLQETTVAAAKERVATGDDSTATPGTEMMKGSATSAGAQVNNVCDSDSLAMEVDGVLHPLRRVDGFLVCLSCNAKAPSEIVMRSHLSGKKHKRKITLAAAGGNNGLCVLATAGADGAQENIGSKPTKGNVEAESAAAQAKTAANEEAESAPSLEVSQTKNTASTACIIEPAEDGEIAKEAEEEQAAAGTNGGVIQAKETVRADDATSPVKSIKASTVMQQENGRSA

SEQ ID NO: 61863 - protein, 693 aa, Zea Mays
MVVLVRVLVACAKFRCPAANLLLSASTSRVRAQPGGPLLRQRTSKVSLRSIAMSTTQASEAAADKGLPLAVDATMIDEYASQSKLLQEFVKIPTIGKAWIFNSKDDDMSKAVVSIGKSDLLANKRRQFLLNTHISKSPSKSVDFQWSPFPTEISGVSAIVPSPSGEKLLLVRNSEDDSPTKLEIWGPCQLENEIHIAKSVHGSLYTDEWFEGISWNQEETFIAYVAEEPPQPKPVFNDYGFKKEGLSEKDCKSWKGQGDWEETWGETYSKKRIPALFVINISSGEVRPVKQIPRSLSVGQVIWAPSSSYSLVFVAWSSDNGFQGTPRKLGIKYCYNRPCALYAAPDPFGQEAEKSLTEGNKGETTTMIKLTANLSSAFFPRFSPDGKYLVFISAKSAVDSGAHNATNSLHRIEWCTDGKLDGSLGVADVVPIVLCPKDNCFPGLYCFGLLRDPWLTDGQTMIISSVWGSREVILSVNVVSCELSRVSPQDSDYSWNVLAVDKNNILAVSSSLITLPQMYYGIKVSQTESNWEWQGVSTPFPKPSDKISSVLAEHKFSILKIPISNPSDELANGAKLPFEAIFVSHKDSASNPTIVVLHGGPHSVYPSSYSKSLAFLFSQGYNLLVVNYRGSLGFGEEALQSLPGNIGSQDVNDVLTALDLVIKRGLIDPSRVAVVGGSHGGFLTTHLIGQARI

SEQ ID NO: 61864 - protein, 601 aa, Zea Mays
MIKNCGDVVHMVVAERDILHEMVKIVKKRHDYHVKEKILTLIDTWQEVFGGARARYPQYYAAYEELLRAGVVFPQRLNGSVPIITPPQTQPLQNYPSSLHISQQEELELPVSDFPALSLTEIQNARGIMDVLSEMLDALDPGNREGLRQDVIADLVDQCRSYKQRVVQLVNSTSNEELLNQGLSLNDDMQRVLAKHDAIDAGLAVRVEKPKSLQSQIGSSSTRKPDTMEETIQRPSASTTATSQSPFGILALPAPPSSSSKAPAIPASSIDLLSGDDYVKPEPANSLALVPVTEYSAADKNVLAFADMFEQNTANNSNHNLPYSFLSSTSNSTISTSQTYHAPVRPVLPQHSAAYPNGARSNAIVPYDQQAQSNSTGSRNGQTAYGGNHQKQALNYGTGDQNGDIPPAPWGTKRSTNPFDDDQLGGMAVQPKGMQPQPVQPSQHGNKFMSAPPMPRGQPGRMQLQQVPGAQLGALQPTQATLNMQYRGMHPSMQMNHGMGMYSQPTFGGYYGMNQTQLYGVHMSGYGYGQQSGGYYIPNAAYAYTSANELAQRMNDLSVQNGDPNGAAANKQSRPEDALFGDLLSIAKMKQNKPAAGKVGG

SEQ ID NO: 61865 - protein, 574 aa, Zea Mays
MSASVDAASAVAVPAVPPAVEEAGGAVEQARTLIAALNLLSRNLPLPPDVMRAVSSIYHDGGAGDRAGEEEKGGDEEMPAADGAAEGNCSVYAAGGATEGTTLIEELEDAILKNQRTPITYSELAAIREGRFNASIQHRLAELEGLPSTRGEDLQMKCLLELYGLKLLDLQKKVRSDISAEYWLQKKCAYPERQLFDWGMMRIRHPFSMYGIGDSFSVDVDDVHRRKRFTERMSRLEEEGKNQADIRKRKFFAEILNASREHQVQLGTTFKQRKQRNDGVMAWHVRARQRITRQEKSRINLLKTGDQEAYMRMVEESKNERLKMLLDKTNELLEGIGKAVQRQKDAEHVSKPEGGSEVPKGSESEDCSQISGIKSESAEESPSDDDGDLPGPADESKFNAGRRLDFTVHSIEEKVTEQPSALEGGELRPYQLEGLQWMLSLFNNNLNGILADEMGLGKTIQTIALIAYLLEKKEVAGPHLIIAPKAVLPNWSNEFKTWAPSIGTILYDGRPEERRLLRDKNFDGEQFNVLLTHYDLILKDKKFLKKVHWHYLIVDEGHRLKNHECALARTLVSG

SEQ ID NO: 61866 - protein, 128 aa, Zea Mays
MEVPMNTTQSGPHFPVQHRSLSLDIKGNKTDIVINKYEDTFLVIVTQIGCMGTILAAKKDESVFSDPTYNVSVLFGKRDEPLLLACARQLIEHISGSARSLVISLGLKDHSQGTLKDITVAVIENRLW

SEQ ID NO: 61867 - protein, 201 aa, Zea Mays
MGYGEDDLPLVSFQSVSKGYYGECGKRGGYMEITGFSAPVREQIYKVASVNLCSNITGQILASLVMNPPKVGDESYASYKAEKDGILQSLARRAKALEDAFNTLEGFSCNKAEGAMYLFPQIHLPHKAIEAAKAAKKAPDAFYALRLLESTGIVVVPGSGFGQVPGTWHVRCTILPQEDKIPAVITRFKAFHEAFMAEYRD

SEQ ID NO: 61868 - protein, 420 aa, Zea Mays
MGKYEMGRTLGEGHFGKVRLARDAGTGRSFAIKILDRQRILAMKIDEQIKREIATLKLLKHPNVVRLYEVSASKTKIYMVLEYVNGGELFDKIALKGKLTEKEGRKLFQQLIDAVGYCHEKGVCHRDLKPENVLVDAKGNIKVSDFGLSALPQNQRKDGLLHTTCGSPNYIAPEVLLNKGYDGSVSDVWSCGVILYVMLTGSLPFDDQNMVVLYQKILKGNAHIPKWLSQGAQDLLRKILDPNPITRVDVDGIRAHDWFKQGYAPSAPFNDDEEDINVDEEDSLNMTEQNGIQDKIAINQINAFQLIGMSSCLDLSGFFEKEDASERKIRFASNYPPAYLFEKIESIVRKMGFQVHKSNGKVFEINESLYVVELKKSSGDCSLYRKLCETLSEDLGTCKSQQFLKQDSIRQEIGRHNSSF

SEQ ID NO: 61869 - protein, 738 aa, Zea Mays
MAEWNPEKDLLAMVTDDSKVLLHRFNWQRLWTISPGKCITSICWSPDGKIIALGTEDGLILLHDVENGKMLRTTKSHDVAIVSLNWAEDDPLSKSDKDEFLSYEDRTTRFFPPPPVMPRIGGLRSGDTGLADENEEAIPEFSSASCQRFNILCSGGKDGCVCFSVFGIFPVGKINITKIPINVGSSRKSYQLQDASVSKVSLSRNLQKFVILCFGKLVDTDNLSDSCENSGLHCLYLDTSIFFNRKNELHQVSQQASSIQDMVEVVRASVSLISKQWSNAMSLFHEKFSALPNLISTHGVESSSEDEFLSLLFGTRTSPALHHFLASSLGEAGLKRIAKAVDSAGRDIRGIITEHLQPAVEIISFRLAELRGLSRWRSRFQTIGLDGNLIDGVTESIGMLVVQVERFSRVAATVVYLFQNFFAWVLKSVRILLNEPTDQVPAANSELVVIFLKFLLDKDPIKQLLEADERIECDMDTARHVEQLVVFGGFTDTQFLEKSLVNQFNELEDSLKEAFLMPFTAISSQIQCQGLLPLYPVTSSATLSSSCSPTSISFYKDEDSSHEESSYSLTDYVCLKIPDGSLNKVNCIGVIKGSGNCCTTLSMMSLSGFLLHIPDGYECVDLSLYKDNQVVLLLSETSCSDSPGKSWMVMLQIENFSFMPLSGTFPANIYSLQKLVALDLQLDTDYGKVRSIPHTVSTPFAVSASRGVACVFSSRRHALVYILDEDEEAEGDETSDME

SEQ ID NO: 61870 - protein, 959 aa, Zea Mays
MGAIGGDAPVQWDKVDGAEVANGGGGGAAGRLEKILVSVRLRPLSDKEISRGDPAEWECINDTTIISRSTFPDRPTAPTAYSFDRVFRSDCTTKEVYEEGTKAVALSVVSGINSSVFAYGQTSSGKTYTMTGITEYTAADIYDYIAKHEERAFVLKFSAIEIYNEVVRDLLSAENTSLRLWDDAEKGTYVENLTEVTLRDSDHLKELISTCEAQRRTGETYLNENSSRSHQILKLTIESSAHEFLGKDKSTTLVASVNFVDLAGSERASQALSAGTRLKEGCHINRSLLTLGTVIRKLSKVRNGHIPYRDSKLTRILQPSLGGNARTAIICTMSPARSHMEQSRNTLLFASCAKEVVTNAQVNVVMSDKALVKQLQKELARLESELRCPASYSGLEALVREKDNQIRKMDKEIKELKLHRDLAQSRLQDLLKVVGDNHGSKHPLASSARNFTFDVPQPCEDEQSTTSEAISSGQNFRLQGRLTTQRDYRSQQSENDVQFATPLSYSISSPPFSGMPPTNGRNDNSHISDEDSEDLCKEVRCIETNETEENECLESSAVGSNSLQDSNLASSMHGNDNTNRSVNSGRNDASSITLEQHLENVKKPFANPGMDLGSSTRNSSSSKVIGRSRSCRSLMGSTLLEDLEKEVCTPPSRSFMDYPGRPETCQRRVPALNYDAESEALSRAGSMLSEITTTRGGLKENSSAAGDTEFVAGIGEFVAELKEMAQGHNGELAEGTIRSVGLDPIMDILQSPSRWPLEFEKKQQEIIDLWHGCNVSLVHRTYFFLLFKGDPADAIYMEVELRRLSFLKNTYSNGSMGYDMVAGSLSTSLVSSDLLCSAKKLQREREMLCRQMQKRLTIQERESLYTKWGVSLSSKRRRLQVARRLWTETRDLEHVRESASLVARLIGLLEPGKALREMFGLSFAPQQSTRRSHSSWRAEGSCRDYVAIKMDGSSILRLL

SEQ ID NO: 61871 - protein, 104 aa, Zea Mays
MTSPPRVSMEITDDMLKSMEVGLAFRDYNGRISSMDFHSKATNYLVTASDDESIRLYDTQNAVCLKTINSKKYGVELVCFTDNPNIVLYSSKNGWDGKSSFMLI

SEQ ID NO: 61872 - protein, 170 aa, Zea Mays
MTSRADQNDRWASYAGPGGWNDPDMLEVGNGGMSEAEYRSHFSIWALAKAPLLIGCDVRAMSQQTMGILSNSEVIAVNQDSQGAQGKKVQSSNGLEVWAGPLSNNRKAVVLWNRQGYQATITAQWSSIGLASSTAVTARDLWAHSSFSAQGQLSASVPPHDCKMYVLTPN

SEQ ID NO: 61873 - protein, 149 aa, Zea Mays
MDSGGGGGSGAHKAASGSAPSPAPNPTAMLSALMSKRAKLQEELRSIERQVYDMETTYLQETNQFGSVLKGFESFLSSSKNTSKLMNIWLDEMMEESMEQVVLRVEAPLRTGKANRRREGALAGETARDYGRRMTQTWTTKMTTNSSIM

SEQ ID NO: 61874 - protein, 343 aa, Zea Mays
MAPERAAPARTRPPASAPMAARCPTGPPTRAGAPRPPPDGASEARGPPGGVDAVPGCEATMGLGAAMALGDPPADYASIAAVGLFVALMCVGIIVGHLLEENRWMNESITTLFIVLSQDETPFLYSLVFGEGVVNDTTSVVLFNAIQNFDPGNISGAKLLNFISSFLYLFGSSTILGVASGLLSAYTIKKLYFGSPVKSIALSNTILALVLVSRAAFVFPLSFLSNLTKKTPNGKISFRQQVIVWWAGLMRGVVSIALAYNKAFDLMFPRFCGSARHFGRCARHFGRDIIMPNLKSSVTTTASAVEYMDEVLKALPLGEARNEDSRTLQFNYGSFKHKGFLKH

SEQ ID NO: 61875 - protein, 1174 aa, Zea Mays
MGGLVEVRCRCRDLVMRQVTPWPPEVSGSSSKQKQWQDQSNKDGVILVDESPQKKQRKGRKQDAILKEPNASRKRCKTSEAPDGPGSCQQLHISQIEASSPAAAPVIIDVDLMSTPSKAGHANSIDQDISPLKVDLRSEAKIAAEEIRRLSSGKKIHPFFHSRKLNKCASQDQDVINIENMHGLCDSERDPPFYPIHVVYQSEASMPIHWSNWIITDMSSFDTDTAVPLKKSVSYFEGLVKPLTIETNCKRHSNQLSDPILAECTTSGMPFPSFSGKQSEHSCFSDAINVDTQNLLRPGASCQASLLDLNVEPEDPQNGCQPACYLWTDKYRPETVAQVCGNSEHVKFLAEWLKSWDEKGHKIGVANGDTNDNSYQDISDSDYSESASDCENTLLITGPVGCGKSAAVFACAREQGFNVIEVNTSDMRNGAYVRQKFEEATKSHGLEKWSQEEVINPLRDDSLDPDSGTPDRTEYQCLMSCATRVMIDCDQQKSPVGYYSGLKACDEPPKQVANKTLILFEDVDTVFDEDRGFISTILKMAETTKWPIILTSNKKDPSLPNLLDQLVLDFKYPSTSELLSHVAMICKSEGVNVTVPQLKHVIDVCLGDIRRVVMFLQFWYQGHQFTERPKECLCGPFSLDLDAVHSTVPKMLPWEFPCKLSETLCMEVDKTILLAEEKKKQMEISDLEGLQLHVTAPLIKGRTSKTRRAKKSKLKRAHSTEHNDISPSDVGTEKHNIFTVTEVGFFPQPSEVPPMHGQGISDQFHFPVESRETCEIADSFQNPPESNMYGSISQVCDTFMSQDVSCVPESSLILDGTSASISGDEFLSRAVSNGFSAFCEGTYTTSRMVLEDSDCVKNLMAERQKDVEDVVGETSETYMESFRRNEQASCSAAGFQLMDECSRAESIWLLSGKKSNDSCKVELVQDTWNRLRSCRLEFTSEANHNRATSGALKLVSEVSDLISESDLMLFRCYPLTKDTLDPSLTPCDEPVDSSWYSNQVEMGSVYAQHALRILSRNSQKIDGGSVDLSQELFASTAAVSFGKITCSGFRNDYGSTDLSHMKNPTTCIFKRRERHVHLCETLSPVVPPKLLQSLRGPAFVDYLSSISQISKLENLRLSENKVINKRRRSRQARHYLSSGALQLSHEDVVLLEESGCFSSRRERVEVVEQAPVST

SEQ ID NO: 61876 - protein, 586 aa, Zea Mays
MDAPAMFARKQVPDDFGLRNIGEAEDEGAGAQAQAQLHRDEKQHKPAVLKKVKEKVKKIKNTLAGHGHGHDGEHGGGERMGDADAGSDSSEEAEEDAAEREAALEKGGYMEDVEDKPLVMEPEPNPELHGAPMYESARAPAVQDLIAEYDQPAWTPAVQEVEGDGSAPRVRLGDIGGPVVEDPAAPRSTTPTAREGEDIGTTPVVRQFETMSLSDDPTHVGAGKKGAKAEEWKDKAADTVRGADGGGGGGASYTDTLKNAAAGTTEYGKKLASTVYEKVAGVTTAVGVGKRGDERTEATPASNTRTEERGAAPEATDATRGAGYTDKIKSAAAGTTGYGRQLASTVYEKVAGVGTAVAPNLRPQEGSAKAEGAHSEATPVSDTGVEEWKGAPAATDAANGASGPAGYTHKVKSAAAGTTEYGKQLASTVYEKVAGVGTAVAGKVQQATQSPSTATPGADAQQDTDAAATATPGAGGQSKGTTVTGYIAEKLRPGDEDRALSEAISGAVQRRKEDVGGTVAQRVPAPGQVVTKAREAVASLTGGKRVSETVQPTTATGKDVKEVYAAEAPVIHGEEIGGPKLNTNTM

SEQ ID NO: 61877 - protein, 65 aa, Zea Mays
MTGTKDYEQEQCWRANEWMGLERAASGKHKTNPEVLFFKKKAGSSRTDCLYTTLYIYCILIVFMI

SEQ ID NO: 61878 - protein, 111 aa, Zea Mays
MTSPKRAAGREGCGCLAAVARGLRGACFRPAVTADGDGGGSAKGSHVHDAAETRYLNASNRELGDHFQTKRDGENGVDASIEKRTPKLLQFTFQELKSATLNFRPDSILGE

SEQ ID NO: 61879 - protein, 985 aa, Zea Mays
MPASRIPFKRCTAAVPGVGKPGPAASMPPAKRRRDRVVPSRSRDSMPPPAPHVEEGDNRHGEVYNVELLMAEPKVDSFGPVETALWTQARTAPTDADLYRACRNINKRGSCGGAASGSVLTSVSNAASDACAGGNGTIVRVSNAALEGGAGSNGGLEGRPAVVECKPKREGSDKKEDFYWPEDFVLGDVVWARSGKKSPMWPALVIDPLQHAPEVVLNSCVPGALCVMFFGYSANGHGRDYGWVKQGMIFPFVDYLDRFQGQPLYKLRPTKFRAAIEEAFLAERGFFDLDMDGACSPRKFVDKQSDPNGFQEEAASNNEQECQSESQVVGKSALCCDSCGNRLPSKVSKKRKQGGEQVLCRHCEKLLQSKQYCGICKKIWHHTDGGNWVCCDECQIWVHVECDLTCNNMEDLENADYFCPDCKSKCKTVPATEKMNTSHSSECASTSKGKSTPMIAVFCNGEEALYVPEKHMILCQCKACKERMMSLNEWEKHTGSRKKNWKMSIRQKSTGEPLINLLDDIPCGTSKSSKPGIKKGELLQLQANAYSPVCAKWTTERCAVCRWVEDWDYNKIIICNRCQIAVHQECYGARAVQDLTIWLCRACEFSQQKRECCLCPVKGGALKPTDVDGLWVHVTCAWFQPKVSFPVEETMEPAMGIMSIPAEYFKKTCVICKQMHGACTQCYKCSTYYHAMCASRAGYRMELQHYERSGRHITKMVSYCDFHSTPDPDNVLIVKTPEGVFSTKFFVQNGEKQTAARLARKENYQEKVLPPIVSDCLVAKCLTYEMLKYKKEPGEAIAHRIMGPRHHSQDFIDGLNAYMGHKDDQSFSTFKERLGYLQKTENLRVSCGRSGIHGWGLFAARNIQEGQMVIEYRGEQVRQRVADLREARYHREKKDCYLFKISEDVVIDATGKGNIARLINHSCMPSCYARIVTVSGDRSQIILIAKRDVSAGEELTYNYLFDPDESEDCKVPCLCKAPNCRGYMN

SEQ ID NO: 61880 - protein, 1480 aa, Zea Mays
MGNKIARTTQASATEYYLHDLPSTYNLVLLDVVSRGRFLKSVRCKHDEGLLLVKVYFKRTGEPIDLKEHERRLERIRKAFKGIDGSHVWPFQVWLQTDKAAYLLRQYFFNNLHDRLSTRPFLSQIAKKWLAFQLIHAVEQSHSKGICHGDIKCENVLVTSWNWLYLADFASFKPTYIPDDDPSDFSFYFDTGGRRRCYLAPERFYEHGGESQVAADAPLQPSMDIFSLGCVLAELFLEGQPLFELSQLLAYRRGQYDPIHTLEKIQDTGIRDMILHMTQLEPKKRLPCRSYLQKYEIVVFPFYFSKFLHKFFSDIVPLDSDARVEKTQENFEKIHEIMMGSSTIEQIERSTSCEHSEPSGRKGMGGETLYSPGDYRNSTSIGKKNTSVDHQHIVGGINFLLKEVESRSNNTSTKVTKDTEHFVAPSISCASGVQSLQLVNPAGRQIGSGLMSQNNAVSHVKKISKTNLCSLVAAYDDQSDTYSFDIFQQIDTKVSCEGMVLLVSLLCSCIRSVKKPELRRASLILLKFSSTYIDDDRRLQLVLPYVIAMLSDPSAIVRCAALETLCDVLCLVQDFPISDTVIFPEYVLPMLSLLPDDTEESVRVCYASNIHKLALTAYRFLLRSRSIANIRPLDESLVAHRSQSADSPAKRQDIFFRQLAELRKSIYEIVQDLVMGQKQTPNTRRALLQDIGYLCYFFGHKQSNDFLLPILPAFLNDHDEQLRAVFFAQIVYVCYFIGARSVEEYLLPYLEQALSDGMEAILVNALDCLTMMCKSGYLRKRVIVGLLVKVLPLLRYTINWVKQSAVRFVAACSESLGSVDTYVYLSPQLRQFLHREPPSLDSETALLSCLKPPLPKSMFYVPLEDAQDIGNILLKSSGKKEQILHGGRYSGMAQSGSLGNLEDIRRLKGTNISSSVSLDVKDSFSFGKSLYSGFALHASAANSSFYDGLSKGIPSYSFCIDNRGLGETHMVPDSSVYKASIRLPWLEPNRPGMQTRDDHFSSKRRDLSINDSLKSNSSLQGDSISNSDTGGLPFSRSAVNLETGWKPRGILVAHLQEHRFSVNDIAVSNDNTFFVTASDDSSVKIWDTRKLEKDIAFRSRLTYSVGNSRALCTAMVHGTSQVIVGGSNGTLHLFSVDCARSVGSVVERYAGIVGVKRNDIKEGAILSVVNCSPDSFSPTVLFSTEHCGIHKWDTRTNSEFWYFKSSPEEGYISALVVGQCGNWFISGSSRGVLTLWDNRFLLPVNSWNYSIVSPIEKLCLLIPPPSSISSAGRPLVFVAAGCNEVSLWNAENGSCHQMFRTASTDNEAVMSKAPSRPVNKPIIKDIIRARNYKYRIDELNDPPVRRPGIRSLLPLPGGDLLTGGTDLKIRYWDQARPEQSFCIAGPSAKKVRSAKADILEKAAGNDECYDIRSSFGVQVVQEMYKQNTTVSGLTPKTQFAEAAADSAGCHRDAILALASFNLSSQRLISASRDGAVKVWK

SEQ ID NO: 61881 - protein, 307 aa, Zea Mays
MVIDLLGPSLEDVFNQCNRKFSLKTVLMLADQMITRVEYMHTRGFLHRDIKPDNFLVGLGRKANQVYIIDYGLAKKYRDLQTHKHIPYRENKNLTGTARYASVNTHLGVEQSRRDDLESLGYVLMYFLRGSLPWQGLKAGTKKQKYDKISEKKMLTSIEALCKSYPSEFITYFHYCRSLRFEDKPDYSYLKKNFRDLFIREGYQLDYVFDWTVSRQAVDNNRLRLSGKTGGLVGPSVDRAERAAARQDVPDRFTGQAGAFARRTGSGSGQYGEHTKHRTLLDSLMASKMSYSGHGGYQRIYLQSHGD

SEQ ID NO: 61882 - protein, 207 aa, Zea Mays
MESAVKGYKEASGTISGPGAFGKLKFESGIHRVQRVPATEKSGRMHTSAVSVAVLPQADEVDVQLRNEDLRIDTYRSGGSGGQSVNTTDSAVRITHIPTGTVVAIQDERSQHMNKAKALKVLRARLYELERRRLHMDRSKLRSEQIGSGDRSERIRTYNFPQGRVTDHRVGVTHHSIADVMEGESLDMFVDALLLQEEMDAIASFGA

SEQ ID NO: 61883 - protein, 81 aa, Zea Mays
MGLTLKLKLEEASQVHQRLCTRLNLGRTRVGRRVDREGVRGGVLRDYGVFRCLGLGKIQLAGSESNRKLKTSQNKSQMGEY

SEQ ID NO: 61884 - protein, 1066 aa, Zea Mays
MVESGRTSVTEMALRLNAQHRWCITGTPIQRKLDDLFGLLRFLRTNPFDTYRWWVDIIRDPYERGNKVAMNYAHNFFREIMWRSSKIHVSAELQLPPQEECFSWLIFSSIEEYFYKKQHATCMDHAHQIIRSLRNDTNRRESISDSNALLNVYLSNDDIAKLLVPLLKLRQACCHPQVGSSGLCSLQHNPLSMDEILQVLIGKAKIEGEEELRKIVVALNGLAGLAVIEQRNQEAISLYKEALALAHENINDFRVDPLLNLHINYNLAELLRISSEYLQECPLKNPAFEVAISRKRKEIDTVETNVLSVKRNKICENSVLSLTANGLEISEDKNTIGQTCMTRDVDVENVTGCHSSFECFADDCLRKTCNTITEKYLSTFTSRLVVAQKDFNASFTEVLNITKELQSEYMNWWLYALDCIEENNISADDLIKKIDNSSSKSTTGLGSWGISSRVKSIAGLKYAIQADIDSLQSSRQHLMDRLLEVDKTMANPRDEDIEGQRYCPNCYDGTGSLCIQCELDELFQRYESRLFLVKKSNNGSVIDSVEEAHDLLRRKYELNHFFRNRKSKEGPEPDYDNNNPRSARENIQVYRHPSRTETALRVIWNHSKTVLGKQYSTMAKKHLLLFEAMRKEFPQARFLSIAQTQLLRAHDEIKMSISRLQLKEKEDDPSAANIVTREELIPYNVQFTSEKFMSLSSLARVRGQLRYLKGLAVCNKKTHNQHDESLAKAGDAVDTATSCSATGQTVSDFRNEPCPICQEKVFDQKMVFQCGHFVCCKCCLYMTEQTAAQFGKRKQWIMCPTCRQRTDIENIAFVVEKPWDKHEKSIEDLAESTISVQGSYGTKFEAVTRRILRITSTDGTAKVLVFSSWNDVLDVLEHSLAANNISYVRMKGGRKSQAALSQFKGQESNINVDKVNRAACKMQPVQVLLMLIQHGANGLNLLEAQHVILVEPLLNPAAEAQAISRIHRVGQDKSTFVHRFIVKKTIEESIYKLNRSRAVCSTINRKSKNFKDEPVLTLKDVESLFPMAGPDEPLEQADQNYGDSLRSLPPSVAAGLAAERRRLMEQ

SEQ ID NO: 61885 - protein, 355 aa, Zea Mays
MNIVCEVCGDIGYRQLLLCCGDCKRYAVHQYCLDKVVFDATLLEWFCYECLQRRGEVTCVASLEQVSSESPLSHAHFGPLVHQRTTKRVESVTGPYSPSDDCEELFSYPGIESIPSVQEISVDPIKTSSISEHDTIEAAASSERFTECQKASSCREGITVKMAMAPSSYENSGEDIFSENVFLEYVLAYKCYLSKAQKKRVMELIQEIQPEFTVFISIMRRGNVRPPGPFLGINKEYANAHFPDKSTNVTLEMPDKSKKWHPKFYRRDVSRTCMLTGQWLDFVCDNHVQEGDICLLLPTKDEIRCTFMVYVLHETTHSSRGEAGFQMGGPCPGASGVASEIHVEEEPTTGISAKH

SEQ ID NO: 61886 - protein, 416 aa, Zea Mays
MGKPKQQVLSRFFSPKPAPVLSSAAPDPPPPLPPNPKPSAAHPPVSTVASFSPAKRARALSLSPKSPAAKRPNPTPPPSRDAVRRRLLEPLHQEPPRLLDPTGGGKGYTPLEQQVVDLKARHPDVLLMVEVGYRFRFFGEDAAVAAAVLGIVAHPDRSFLTASVPNFRLGFHVRRLVAAGHKVGVVRQTETAAIKAAARGVGGAPFSRGLSAVYTRATIEAAAGELEGGGAAAPEEGSSYLVCIVDKEVEAAGREGLQVKVGLVAIEVSTGEVVHGEFLDSDSRSGLEALLLGLAPVEVILGTPLSFATEKIMMAYVGPTSNVRVERVSCEWFGKDAALAELITLFEKSVNNASRAEDDRKLIETNDDNNNFHGIEGIMAMPELVVQALALSVRYLKGFGMERIICFGSSFRSIFC

SEQ ID NO: 61887 - protein, 181 aa, Zea Mays
MRVCEKVESKGRTTYNEVADELVAEFSDPNINIDSPDPDNSSAQQYDEKNIRRRVYDALNVLMAMEIISKDKKEIQWRGLPKTSMNDIEELKVLLLTEVNGLKGRIDKKNAYLQDLQDQYACLQNLVRRNEQLYGSGDAPSGGVALPFILVQTRPHATVEVEISEDMQHVHFDFNRMIHLY

SEQ ID NO: 61888 - protein, 138 aa, Zea Mays
MFKVYIVGDAIRVVRRFSLPNVDEGDLSNNAGVFRFPRVSCAAASADDADLDPRVAELPPRPLLEILARELRRRLGLRLFNIDMIREHGTRDRFYVIDMNYFPGMQSDILELAQAIFCFGKADPYMYILELLIKESPV

SEQ ID NO: 61889 - protein, 296 aa, Zea Mays
MFYRRKKANKAALLPSSEDSTQLATTSMDKSALSTSQADSSSGVPGITVDKSVEFSYEELFNATEGFSMSNKIGQGGFGAVYYAELRGEKAAIKKMDMQASHEFLAELKVLTHVHHLNLVRLIGFCTESSLFLVYEFIENGNLSQHLRGTGYEPLSWAARVQIALDSARGLEYIHEHTVPVYIHRDIKSANILIDKNYRAKVADFGLTKLTEVGNTSLPTRGIVGTFGYMPPEYARYGDVSPKVDVYAFGVVLYELISAKDAIVRSTESSSDSKGLVYLVINSFTFCSWGKDQWSS

SEQ ID NO: 61890 - protein, 1804 aa, Zea Mays
MSQRGDRGEGHARRPGRSSSFGGHRGGGVGGAGKGGAGSSGQPPLSTNRSFRKPGNGHGGQQRVVNQPDTTGFQPAPAPAPHQTPARPPPAPQNAAVHVPISAPWPQPQGPQVSSSSAASDRPANPPLPKATHAAPRAPPKSSNPPLPQGGSKGEPPKGFNFQFGSINMNGLPQFPARTSSAPPNLDEQKRNQVLVEELKVTPTPVQPTPKQQLLQQHPHPLQKQQHQLPQLSHQPQQPQQQSTRKETVGSSQPNSINPHTTSQLKRDVHPSPSVPNVTSVRPTVQQMPGVQMPIPFHHQPAQVSLQFGGHGAQLQPQVVPSSFQMSMGLTGSSTPQVPQQLYAPTLQHHQLQQQAMMHPGQGMGYVPSVAHQFPQLGSIPMNIASQYPQQQPNKPAAARKAIVKITHPDTHEELKLDKRMDSSGQRAAPSIAQQSQPGVNYAPHLGFFHQPPNSYNQSGMYYSTTASVNQVATGSSGPRYNYPVTQSAQAMTYISPSAAPPVSGQSQYTVKPHPMGLLSEKSGTHVTISAPPAKSDPPKLHAAGDAASSLKKDNEVVSGITVLNKPTLERESNDPLVTVKHSTVISPSLPIHGEKPQTLVTSSPVANSVSPVTGADGKSKEPIQRSGSFKDSKKNVTKKDVRNSYEPPNPTSFVEDKVQTVKVGDGDLQETKKLNNELDLTNSSSAPTVPLAVSTENADSTAVTNTSSRRPSSEGTGEPGVESFTVSAVECDESKRTHKVVKDPSKDNISSDATKHELPKECAVDSTEQASAVTSNTDDSYAAPLVTNQEQLLKGSASEKQAVMNNSSMNSDTSAHFFDGNDVGVTTSGTSEPTAQTSNDEGDSDISPETDLAVYNVPLGSSELQLKSESRANDQQPAAPTVSVRPVSREKPSTKSTAGKKKKKKEMLAKADAAGSSDLYNAYKGPEEKSEVVGTVEGADNSSTVDTTHVLSDELEKDPSTSADDCKKKVELDDWEDAADMSTPKQPSDSGNQASITQVLDSDVTEANSRKKYSRDFLLTLQHHYTGLPFGFQMNEAVNAIMNNLAGKSYVADREPHPSPGRGLDRPTSRDRRGAAMADDRWTRAGVPLSPGRDVHMDLPNGPSVINYRGGPGGNHGVLRNPRSQSSNQYGGGLLAGPMQSVGPQVPRSGSDADRWQQKGLMPSPGTPVQAMHKAERKYVIGKVSDEEEAKQRQLKAILNKLTPQNFEKLFEQVKEVNIDSVATLTGVISQIFDKALMEPTFCEMYANFCFHLAGALPDFSEDNEKITFKRLLLNKCQEEFERGEREEAEADKTEEEGEIKQTKEEREEKRIRARRRMLGNIRLIGELYKKRMLTERIMHECIKKLFGNHDDPDEENIEALCKLMSTIGDMIDHVKAKEHMDAYFSMMQIMSTNQKLSSRVRFMLRDSIDLRRNKWQQRRKVEGPKKIEEVHRDAAQERHAQSSRLGRGPAVSSVPRRAHPMDYGPRGPSASASSSSQQGSIRGMPPHSRGSQDIRHDERHQFDNRTVLPQRVVKDEAITLGPQGGLARGMSIRGQPPVSNTEIPSVIDHRRIVSSSNGYNSAADWTSSSGREDSNSRLPDRTSGRIPASSQSAVTSQRPASQEGRSRSKSYSEDELREKSVLTIREYYSAKDEKEVVLCIEELNAPNFYPFLVSLWVNDSFERKDMERELLAKLLVSLCSGRHNLLSKQQLSDGLSNVLASLEDNLSDAPRATEYLGRLLARFVEESILLLQEVGKLIQESGEEPGYLIQGGIAADILGAVLDSIKSDKGNSFLDEIKTTSSLKLVDFRPQHLKRSKLDAFM

SEQ ID NO: 61891 - protein, 229 aa, Zea Mays
MRLQLEATAKSKQLTEVHGAWLPPWLATHYARYMEVVSGHWNYHGKPAVQNVLHKASEKSAHAKKWAEPHIETAKMKWIPVKEKLVVLKKNAEPYVQKVSTRSVEFYESSRDAVTPHVVKVKEFAHPYYQEAKKFSKPYIDQIAEITKPHVEKVRTTLKPYTKRAVHAYGSFLGSATTYHRQAQATIMDYLHQHGVPKSFATKELVWFLASALLALPVFVIYRLVVETF

SEQ ID NO: 61892 - protein, 610 aa, Zea Mays
MATPCRSRGFERVELRCPRELDPRPSWTLGDVLAELDALDATRRAAPPTPLKQPPDWANGGGEKAFVMRVDDDDEDDTEDEDDGTSGGKSRALVAKGARFSCNDLASSDSEDELDGQVAPYHLMEKRDLAKSILLELEHEHHLKVQEEVRSKLASLEVCHQNEIRRTISAFARLQKYAESRKEIDRRLDVHFQRRIAEVLDKHLSMVQRDHEQKSQIVERRIRDDAALEEAKRKEQAVKEEKLRQERAQQEAEARQKEAAKLAAEARKTAFEAAKKEAAEKEAAEKEAAKLRDAAASQPSPNSQNNTAEGIKVFGDKYALEAESRRHALVQNQVPENIHHSKEFSKYDRQIAKSISKLMPTTDSVRTRASELVKALNGQDCPRPISCCLFANKIISIVKSRNTKDKTFGNLAFACGYVMLLVTNQVPDAMDYLLAEFNRVCIYTVPKHMHALNAQARNRDYYRLIGYQEENGQLESTESYLTYVVAYVKLYAAMIQTEIKGVRHPHGLAEGWKWLAMFLNSLPATTATACALHAFLKMAGFALHKKYGSQFMKILDVISRCFLPALKEQGNKMQAEAVNNLQNYLNDKIYLEEPEGQYLVQQLLSKELFM

SEQ ID NO: 61893 - protein, 71 aa, Zea Mays
MDDSSSQPATIVSGGEERNQRREEDDDEETAAAEAEAGNGSQLMVVPEDGYEWKKYGQKFIKNIQKIREQG

SEQ ID NO: 61894 - protein, 311 aa, Zea Mays
MTILDCIKNWKPRKKEIGRRHEELEKLVMNSTNREKLEAAKEEIAKENRLLDLATLKKKEEDEKFLKLVKEQEQEKENVRKMLYDLEMQLASKQKLELEREQLRGNLEVWKHMGKEDAKSKEMLDKLHEALKEKDEEMDHIDSINQTLIIKQRRTNDELEEAKKELTTDLLNMSSARSIVGVKKMGELDKKAFIVSCKEKTADELSLSILCSKWEDEIRQPEWHPFKVIDVGGQAKEIIREDDEKLQALKAELGVQAHDVVVKALLEMNEYNPSGRYPIPELWNFKEDRRAPMGEAVAYIVKQWKANKRKH

SEQ ID NO: 61895 - protein, 152 aa, Zea Mays
MTDRNHSQSVTSIPFVEGCFTSVNLPLISNSRTPEWPSCKTSALLYCTVIRLQYQQKNIYIQSSGGWRGRKNFTGTALSSLYLPPQVPLTAAASCSEACACTVQNLEGSLELRSRISLNLEQVPLCLRRCLLSWILQNLNSELFQPRCWRRL

SEQ ID NO: 61896 - protein, 1276 aa, Zea Mays
MSSPSDATEITDRIASHRNALKIYSFFLISIVLTAEAGAESCTAAKATAHGRKKNHIYSWNWEAQRGRIMSLVANSLEANLSLLFGPGGTDERYLSFVSKCTFVLCENQNVLKDEDTRNGLCRIIGAIATKHQRISQISASVSHLIHKFDFTVPHLAEAVASAEKKFGDGSLAISLIREIGRADPKEYTRDSVGADNVGRFLVELADRLPKLMSTNIGVLIPHFGGESYKIRNALVGVLGKLAAKAFKDVEGDSNARLRSKQAMLEILIERCRDVSAYTRSRVLQVWSELCEENSISIGLWNEVASVASGRLEDKSAIVRKSALQLLITMLQHNPFGPQLRTATFEATLEKYKEKLQGMEPSNSDKDEAANDSSPGEVIMGQDESVSDSCLASSQDQNDRDATIVDITNLEQIRALVASLEAGLRFSKCITSLMPILVQLLASSSATDVENTILLLMRCRQFQIEGSEAALRKMLPLVFSQDKSIYEAVESAFITLYTRKSPIETAKSLLDLAIDCSIGDLAALESLISSLVSKAEISSSMVSALWDYFCFNINGVRPVQSRGALSILCMAAKSSPSILGNHLQDIIDIGFGRWAKEEPLLARTACLALQRLSEEDKDKLISNNSRVFAALQGLVTSFSIPEKIWYGAADKAISTIYTLHPAPELFATETAKKSLSSVFSVLGTNDVSNGDEAQNGASLSSVSPSKLGRFLFVISHIALNHLVYIENSVRKIQKQKRKNEKSQPTTEDLQPDVSKSLEAQGINAELGLSATIDIAIESLAERAEKEIVCCSSEKNLIGHCGPFLSKLCRNLALLQKFPDLQASAMLALCRLMIIDAEFCEANLQILFTVAESAPSETVRSNCTIALGDLAVRFPNLLDPWTEYIYARLRDPSVSVRKNAVLVISHLILNDMMKVKGYINEMAVRIEDKDERISSLAKLFFHELSKKGSNPIYNLLPDILGRLCNQHLKEETFCNIMQFLINSIKKDKQMEALVDKLCNRFAGVNDVRQWEYISYCLSQLTFTEKGLKKLIDNFKMFEHALSEDSVMNHFRSVISKCKKFAKPELKICIEEFEEKLSKVHQEKKEQEETTKNAEAHRQRIDSLDEFLVTKEVSENSGNSAEDETSEVVDPSVDSSTEHMENTPECSVNTSAENSQTTAPLTESEGGGEEIQSAQPVSKGMSRLRAKKTRDPVVDPSVDRSTEYKGNTPEHSADTSTENSQTSVPLTGTEGGSEEIQSTQPVGKGVSRSRARKTRDPVVEDSAAPVRRATRSTRRQGS

SEQ ID NO: 61897 - protein, 108 aa, Zea Mays
MGPSHFSSTLFDHEEQSAATKLEVVDHDCLKIYRGYALGWRNVTEHRMKTIPRIHPCQKTPSHHGVELSATTVQRCLDFCSHMGVFKLLHLDLETPPCKIDKAVLLQT

SEQ ID NO: 61898 - protein, 142 aa, Zea Mays
MLLDGWLLNLVRICGFVEDSVASWTLTNLLHSPNEKLQVSAADFWDGILSLDEAGEPLVNLGYFPSYSVLKRAMLSYGYLFDTSGTKASISGSTAAGGPDDSLPHNIIAWLRVVSACCKISSQEEQKDILKQTRNKSLQHTT

SEQ ID NO: 61899 - protein, 111 aa, Zea Mays
MSLRPSEREQMRKGNYKQTVDAEESRHRREGQMMDMRKAKCEESLQKKRRDGFPASAAGMPPMVHSTALQQKGMGDVVALHLLGSDLTFLVTGWLSGDGACCPLQRPLRAA

SEQ ID NO: 61900 - protein, 141 aa, Zea Mays
MHCSKKKGFSETVQKAIVDMESMAATPIEDGHHSKSSTEVVSQVLPKSSLFLQNVGLATSNRSSSGNVSAKVQQLESQLDTERQEKDELRDEVQSLKAKTQASDETIAKQSDEIADLKKSIAENNSLLRQILSINRSQVSP

SEQ ID NO: 61901 - protein, 103 aa, Zea Mays
MLEPPTPRVVAIAGDDRASHDRRSDPRVPWPPPPLPKPTTSRATTVATRTGVRRRLPGRLESAAACPPASGAPPSRDPGGVPPPAPGIAATRTPERTTTVAKT

SEQ ID NO: 61902 - protein, 356 aa, Zea Mays
MLSHPRLDRRFSVCDPVSLGGRPSDFDGNFPFMGSPDDHCIEEDTSNGAHFSPFPYGYGVSAPMEENGYHPNTPSRYCLVASKQMVGIFLTIWVRSEIRNDVRNLKVSCVGRGLMGYLGNKGSISISMSLHHTTFCFICCHLTSGEKEGDELRRNSDVMEILRKTRFPQVRGAADVKSPETILEHDRIIWLGDLNYRIALSYCSAKALVEMHSWKQLLEKDQLRIERRCGRVFQGWKEGRIYFPPTYKYSFNSDRYSGVRPKEKRRTPAWCDRILWHGNGLMQLSYVRGESRFSDHRPVYSIFMAEVESIRHRRRNAGYFSSRIEVEELLPNPYSHPAFTASSQMVENNHTAQKLT

SEQ ID NO: 61903 - protein, 1043 aa, Zea Mays
MEAAASSLSTLLSTLRVNGPWTPPGTWESVIPESGAARVSHLGGRPRLQPIYELASVTDDALIHLALHALYGVKTSLDEIEELSALSSSNPADRTSNRVPNVWLRSSSTTSMGSILKSFRSTGLAVFFLCKFVHFYLFQSREMNCASREVHEHEDSGDKDTKQHQPYTLVNQAFAAAVNKVLEGYFCSLNTLLASIRLRRSVGQSGIASKISNGMSCDPTSEVTLLEVYLHTEELRRHVKSLGNICFPKFAGLTLCQEGLNTDANVEFENFPRGTDLLSYLYVHIRDADPVHYGLLKYLFIRSCEPYFNFIKSWIYRASVDDPYEEFLITQTENKGAQGISSDITDDFILFPLKGRNHVSAPCFLKEICHPLLRTGQQLQVLMNLLKYCNLAATEGDVYPSRNIIHMEGVLPWFDTPIESSMNSFTFSKSAIEALTCKRDAMYKLMMEKLQHFFSNVEVIAFDTASNFLHKRTDLVDASVSDAELFYGDSDAVLPCNMAADEKDDSSSNSQESSDKEDPLESSECSSYTSMDDTEVESSTACENLSSSMFSLYCTSTGEAKGSLVTSKLLSSQSSSVDHGINCAIPIECEKDDRLSCKHVLVHPQNTKHTAVPDGSELDYQYSQFSPFDRFMKRASCSFESMNSVGEFLYSDHKRSVGNAVYPLHSESGSTKLSNSKNYEKFVTINQPWNTSIPYNLSLNPILKNAACYHTESDMQQKSKNQSLASFDFESVMDPCEVYCARSPSLLVESVNGAATAGQPSTQPYEQPDCSTKLLQAQTRSQSSLTSSGEMSTGDSLQKNASGGAFWEISLLYNDKSKEKPAMDFSSQFDMPLDIVIDKCIIQEILLQYKYVSSFTMKLLEEGFDLCAHLLALRRYHFMEIADWADSFIASIYQKKWSFVKSEQKRSEIQGLMDLALQRSSCDSDPYKERLFIYMRESPVDSVDASPCGLDLLDDILLGYKAEWPMNIVITVDALKIYAEIFCYLLQVRFAVFSLTEVWRFLKELTQFIGRSSHSRSDVLKKLNFVMKLSFMQPCVVDWSFLI

SEQ ID NO: 61904 - protein, 299 aa, Zea Mays
MAQIIDGKAIAADVRREVAADVAALSSAHGLVPGLAVVIVGSRKDSQTYVNMKRKACAEVGICSIDVDLPEDISETALVAEVHRLNADPAVHEKLSLLSGILVQLPLPKHINEEKILSEISIEKDVDGFHPLNIGKLAMKGREPLFVPCTPKGCMELLSRSGVTVKGKRAVVVGRSNIVGLPVSLLLLKADATVSVVHSRTPDPESIVREADIVIAAAGQAMMIKGDWIKPGAAVIDVGTNSVDDPTRKSGYRLVGDVDFAAASKVAGYLTPVPGGVGPMTVAMLLKNTVDGAKRGIVE

SEQ ID NO: 61905 - protein, 71 aa, Zea Mays
MMVLHNSSWVFTRFVKRGALTWYVICAMMSSIHAGVEFMPARGLYVEVEVAAGCRHAEPLCCCFCIPTGLA

SEQ ID NO: 61906 - protein, 313 aa, Zea Mays
MILESKGVPRLNTPPPVSSKLLTESQEKKIAAPKPIRVSAENITNLDDLMQPWTRSPPKKLEQEHVLAKWQFISDSSSRSNIQLAPLPDSYDLDRGLLLSVQAIQALLENRGYPIIVGIGGPSGSGKTSLAQKMANIIGCEVVSLESYYKPEQVRDYKYDDYSSLDIALLTENIMDIKKRHKAEVPCFDFENFSRKGFKELQVSEESGVVIFEGVYTLHPAIRKFLDLWIAVVGGVHSHLIARIQRDKNRAGFSISQTEIMTTVFPLFQQYIEPHLVHAHLKIQNDFDPVLSPESSLFVLKSKKQENCHVLHV

SEQ ID NO: 61907 - protein, 203 aa, Zea Mays
MPEQTHRSSPNPIPVAIRISGAAMAEKESNGVRVCVTGGAGFIGSWLVRKLLEKGYTVHATLRNTGDEAKAGLLRRLVPGAAERLRLFQADLFDAATFAPAIAGCQFVFLVATPFGLDSAGSQYKSTAEAVVDAVRAILRQCEESRTVKRVIHTASVAAASPLLEEEVSASGVGYRDFIDESCWTSLNVDYPLRSAHFDLTAI

SEQ ID NO: 61908 - protein, 784 aa, Zea Mays
MGCIRVDKITEYLCDPLQRCLKDDDPYVRKTAAICVAKLYDINAELVEDRGFLEALKDLISDNNPMVVANAVAALAEIQDSSVQPIFEITSHTLSKLLTALNECTEWGQVFILDSLSRYKAADAREAENIVERVTPRLQHANCAVVLSAVKIILLQMELITSTDVVRNLCKKMAPPLVTLLSAEPEIQYVALRNINLIVQKRPTILAHEIKVFFCKYNDPIYVKMEKLEIMIKLASDRNIDQVLLEFKEYATEVDVDFVRKAVRAIGRCAIKLERAAERCISVLLELIKIKVNYVVQEAIIVIKDIFRRYPNTYESIIATLCESLDTLDEPEAKASMIWIIGEYAERIDNADELLESFLETFPEEPALVQLQLLTATVKLFLKKPTEGPQQMIQAVLNNATVETDNPDLRDRAYIYWRLLSTDPEAAKDVVLAEKPVISDDSNQLDSSLLDELLANISTLSSVYHKPPESFVSRVKAAPRADDEEFADTAETGYSESPSQGVDGASPSSSAGTSSNVPVKQLAVASPPAMPDLLGDLMGIDNAIVPVDEPAAPSGPPLPVLLPSTTGQGLQISAQLTRRDGQIYYDISFENGTQGVLDGFMIQFNKNTFGLAAGEALQVTPLQPGQSTRTLLQMTPFQNISPGAPNSLLQVAVKNNQQPVWYFNDKIPLHVFFGEDGKMERAGFLEAWKSLPDDNEFTKEFPGSVISSIDATVERLVASNVFFIAKRKNANMDVLYLSAKMPRGIPFLIEVTAVVGVPGVKCAVKTPNREMVPLFFEAMEALTK

SEQ ID NO: 61909 - protein, 223 aa, Zea Mays
MDVDIKINLDVDLERQITAAIDPKLLQHLVNALFRGTLSINDSDLSEPSDAEVDAVGCICAFLHVTFNTFPLERIMTVLAYRTEIVPALWNFIKRCHANRRWPFFSKFASSLPADAPGWLLPMSVFCPIYKHMLKIIDNGEFYEQEKPLSLKDLKSLVLILKQKVSSNPSGLKKLSVENVKIRARVGLSELLTQLQDWNNRLPFTSASDFYSQEATSENFVSQ

SEQ ID NO: 61910 - protein, 154 aa, Zea Mays
MRIRELRDGLEVEDDEREEQGSEVGSGYGEVVAVVRLRAKRAIVGAGARVLFYPTLLYNVLRNRFDGEFRWWDRIDKYVLLGAVPFSSDVLRLKQLGVRGVVTLNEPYETLVPTSLYQAHGINHLKIPTRDYLFAPSLEHICRAVDFIHCNLSW

SEQ ID NO: 61911 - protein, 194 aa, Zea Mays
MFTPLPRHWRHIRSRLTPLAQHPLLLPNPSTSVLRPPQLRRWPPPRTLRRSSASRETSRCSSRHRRSTRARGPSSLRPRRALAPRTPLNHHRRRQPLRPRLFTQYPRRSLSRWSPRRFPPRSSPDPRWSRCRHCSSGRLRQDQMDRCLRSSGTRLHACKKHTRAWTSTSRDGSGWTSPSTSGRSTTIMRGPGRR

SEQ ID NO: 61912 - protein, 104 aa, Zea Mays
MVKDGRQGKVNAKGYYIYEKGAKPKPDPSVKHVIEEYRKQANTMPGGKPVTLMDQDILEMIFFPVVNEACRVMDENVVIRASDLDIASVLGMGFPKYSLNLLFF

SEQ ID NO: 61913 - protein, 201 aa, Zea Mays
MAARRLGSPASRWLRPSALLLLVASALLSAPSPARALRFDLESGHTKCVSDEIKVNAMAVGKYHIVGPDPNSPDAQLPESHRISLRVTSPYGNSMHYAENVQSGHFAFTAAEAGDYLACFWAPDHKPPVTIGFEFDWRSGVSAKDYPSVAKKGKVDEMQDVNRRTNSRMAWLGFLSLGVCLSVAGLQLWHLKTFFERKKLL

SEQ ID NO: 61914 - protein, 156 aa, Zea Mays
MGFLHDACSQSFSFEQKCDELMDSYATLLFAKITEIKPEAFCKQYGLCRGTALFSGVTSDSTCVFCHHLLDEVMSKLKDPDAEFEIIQILIKECNKIEGHVQQCKRLVLQYIPLILVNGEKFLEKNDVCALVQACPATHKKTFSSVLKGALLLSDA

SEQ ID NO: 61915 - protein, 56 aa, Zea Mays
MLLMKGMTFASSVPSRCPSLDQLERMCCLCLSGAQQRRVRSRLHKTCRWNNNDKFH

SEQ ID NO: 61916 - protein, 1424 aa, Zea Mays
MAPKKKQPDSKQRQKPKSSSSSSAATAAPRLQISSENERRLRRLLLNSSAPSPSPANVSEVRGESREQKARRLRGVYDKLALEGFSSAQIEQALSAIPDSATFESALDWLCFNLPGDELPLKFSSAGDSTMSSLTGAEGSVKVLSTAKDNWVPQSREPEEVKVSTEGLEVRIGGRRDENVSLDDGRLSQAAWIRQYMEQQEEEEDANSNDSSTWEDHCLQSFEVVEAKPSRRKSKAAKKNSKHGNLKEQISYPTNSVSSNSETANVEGVQNDLEASEERSESLGNIDEGSDLKKEIPKDIDKTCAKEVDEEVIELDNMFFEDSSAWEAVAPEILKQQQIEKLSHDGYGHLIGNIDDIWKKGDSGKMPKAVLQKFCQKLGWEAPKYNKISERDGKFVYSVNVLRGATGRGKSRKAGGLTIIQLPKLHEEYGSVQEAQSRVAAFALYQFFADLPLRQLLTEPYSSLILRWQEGELSSTSRVLVTEDRRRSGFVDMLLNIDADTIPSSEIENSDTDVISMDSGNTEGSKSVNEKRQTTMTSCMGLKSAERAESAILKKQLEDKRKLPNYLKMLEARASLPIARQRQHFLQLLKENDVVVVSGETGCGKTTQVPQFILDDMIESELGGSCNIVCTQPRRIAAISVAERVSDERCEPSPGSNDSLVGYQVRLDSARNERTKLLFCTTGILLRKLSGNRDLSDVTHVVVDEVHERTILSDFLLIVLKNLVEKRSNQQGRKLKVILMSATVDSSLFARYFGECPVISVEGRTHPVSTHFLEDVYEKMEYCLALDSPASGAYFAQHGEKWKHASSSVNNRRGKKNLVLSSWGDESTLSEGYVNPHYISDYYRSYNERTNQNLKRLNEDVIDFDLLEDLICYIDENCPQGAILVFLPGVAEIDLLIDRLSALVRFGGASSDWILPLHSLLGPSDQRKVFQSPPDNFRKVIIATDIAETSITIDDVVYVVDTGKHKENRYNPHKKMSSIVEDWISRANAKQRRGRAGRVKPGLCFCLYTRHRFENVMRPFQVPEMLRMPLTELCLQIKSLHLDDIKSFLLKAVEPPNEEAISSAVDLLYKVGAFEGHEELSPLGYHLAKLPVDVLIGKMMLYGAIFGCLSPILSVAAFLSYKSPFLSPKDEKQNVEKAKATLLNENLDGSSSVTDNKQSDHLLMVIAYDKWSRILLQNGDKSARQFCHSFYLNSTVMHMIRDMRLQFGTLLADIGLIDLPKDTLRHKVGSRKNNLESWFSNMSLPFNAYARCTSVIKSVMCAGLYPNVAASLEGVDPGALGGRKPSDVLFSKDRPRWYDGRREVHIHPSSVNHSLKAVQYPFLVFLEKVETTKVFLRDTSVVSPYSLLLFGGSMVIQHQTGVVVIDGWLRLSAAAQTAVLFKQLRMTLDAVLKELTRKPEMATFVDNEVVRSIIHLLLEEDKAR

SEQ ID NO: 61917 - protein, 261 aa, Zea Mays
MEKLKESEELLERCLAVKKKILPEDHLQVAYTLVHLARLTLHRVVKDRDVNSDVTAYYLAKAKQFSNDSIRITEGQLNSSRKDQNKINNTSTADTDKSAAIILFQALHVFGLIDIAAKQLLGQGLVLLLRLPLEHLKHGFFKIEAVHIPGTPRPFIWTDTYTIYARYSALQIHFKNKFGKEQDYNSVQDALQKCVSLYKEPHTRRLVKNAAKQDYMICLTSLIDMVQSLFPIPHIPGLQELLCEAEQILGELEEESTRKKQ

SEQ ID NO: 61918 - protein, 252 aa, Zea Mays
MESDTERDVHNSSRSTNPSGHHQRPLRLVKSTAFKREERRKRKDRKRQRHLVDELVRWQPLGAPTPLPAATGSVSPSQAQPDTPWPCDPPPPPDPAEADSWSWGPPAVPSPTPTQPTVDVAGAVPLHPQVVAVRSCRAFFESQFEEDEEEENEGSAARFFSELLGSDAALRGFYEAERDKGHFLCLVCEGSGARLGKRFAGCAALVQHAGSIARTKWRLAHRAFADSVGLLLGWGAGRIAPPPVPPPAALRW

SEQ ID NO: 61919 - protein, 72 aa, Zea Mays
MVYFVLMNMQEWPVDVMEMRAAEASIVHLRMQLLNFCSLCHKIVYLSLYKTCLTSQKIWAASLQLPFSNYLI

SEQ ID NO: 61920 - protein, 102 aa, Zea Mays
MAGGTKQGVHPVPGLRGSERLRLRPLVPAAQQHGRWLVPEPGPRAASHRPALQDRPADEEGFQPRRRRGRHQAVRRLLSRRPFPFTTLRGGSCFRWVLDLAL

SEQ ID NO: 61921 - protein, 185 aa, Zea Mays
MSGVQAMPAAVGVAGLRGSGLVSSSSTGLFAGDCKRKARRPACSAWALRQSRIGSRSRSKRGLGIVCNLAGQYEDSFDDVQRAVRTVLTQLYELNPPSYRWFYNFVAVNKPTDGKHFLRALGKERQELAERVMVTRLHLYGKWIKKCDHAKTYEKISDENLALMRERLMETVIWPTDDSSTEKIG

SEQ ID NO: 61922 - protein, 64 aa, Zea Mays
MFSREDTQNNIDVAIVFIGSKLQSSDISKDKQVDPALADTLKSGAKKSGGCILKEHETTELWSE

SEQ ID NO: 61923 - protein, 78 aa, Zea Mays
MPRLHGIRRVSSSTSVAPGADPQLLVSHVFSSSLPAPALILAISCAMSLCLLVHVSSGACQRFPCSPTAQPLFPRELA

SEQ ID NO: 61924 - protein, 452 aa, Zea Mays
MAADADAAEVERLYELGERLSSAKDKSELAADYEAIIAAVKGQSVKAKQLAAQLIPRFFRSFPALATRAMSAMFDLVDMEELAIRIQAIRGFPLLGKDTEFVSKIADVLGQLLTSEENVERDAVHKALMSLIREDVKNSLQPLFKHVEQGSEIREKIICFLRDKVFPLKAELLKPQAEMERFITDLVKKSVQDVTGSEFELFMGFLRSLSIFGDSAPRESFQELIEIIQAQADLNSQFNVSDIDHIERWISCMYMALPIFMRGASASKFLNYFVKQIVPAFEKIPEEKKLDLLKTIASSSPYATAQDSRQLLPSVVQLLNKYMPGKKVDDINHNYVECLLYTYHHLAHKTPNTTNSLCGYKIVTGQPSDRLGEDFTEHYKDFTERLTGTEETVRAASKRLTQGMADFSKAISSAKTEEEKTKIKGDQQTSTRTMRSYNNILAMAQHRCSIFC

SEQ ID NO: 61925 - protein, 1502 aa, Zea Mays
MTVLGKVPKPINLPSQRLENNGLDPNLELVPKGTHTWGSKAPSTTPNAWSSSSILSSKNDGSSTSSSHFNVRPTSGGGSRPSTAGSESLGSPNAWGANSRPSSASGTFPSSHLPMATNRPQSAETRPGSSQISRFADNASDNVKASIRTIDRSESSSRGPGFTLSTGDFPTLGSEANSQRGHSSKGRPTSSLGKEVSQGEQVKSLATVISPSNNHPVDIMKTEHHAHTGGAPVPATSVPNEGLQQQPYPPNFPMPPLQFDSWRAPPGHPPEGMWHRGPVPGGPYRPVGPPGSFPVEPFGYYGQFPPNSEAAGRQGSGHGGYHTKNDVYHPMPHNSYIMNQPVIPVRPVYQGPVLYDGYYGPQANFNNTNVRDPHFVGGPGILNQFPNQNDRFHPGHPQNRPGKHETVPREQLESDKLHVFHQEHPGSLHDNPDRLGGSREFERNVQPAPPLLPHPDGKQTDMNMRADTRDTFSETERTVVLTKSVPNQRGSVGIDHLSVYENTRSHHRETCDGTLRKKFKEDSSVVLDQHPVIKKNAALIEKIESLNNKARNVYAQNLPEPASSKEFKKHKKTTDVSSNDVISTTCTSDQAVSVSHISAVVQRRPNVTIEGTILGPAHSHLTEFSKAEKLGDSINNHLHRRVDSSRNSYHGPCKDRPANKFGSCGRGESYITNSLPVADLGNDIHHGQQPQIASQLQPVIVPDDMPASLDYESQNKKQDAASNAQNNQRAKMKELAAERAKRMKAEEEERIKNQKAKALAKLEELNRRSSVLQKKSNDTKVETDDAHDKQQIGLDVNAKLDTSTEQHDVVTPDRLTALLPPNDPNHTMVQIQAQSTAQSNALDGGKAHDAHTTSSLVKNTHSNMEHVVQKSISQSHNISMVKTKQGYRKRQVVSEEKISGEKASASVTTDSSVQKNVDVPVDTVTAVVAPHDDPPTQNKKGTRHLRSKKKVDDASVISKHPPVVFNEQNTVKISTEPKTHTGGVIISSSIVPIEGTIVTVGSITVGGLSLTAMNQEHVNSADGTNSTESGLSRPQQARKSGKHQHVLRPVEKPHGNDGVLWAPDMLPLHNEQSDGAMPTAAVADVTQPAGKAINDGENVTRTKRAEMERYVPKPMSKELQQHNPSHDKEAIDKPGAAKSHPAAEPKKTSKGHGGKSNPSWRKRDPDQPAMVAPNSVDQADNSYESKEVQNCTDMNQPVELGKEDTQLKSNVDAAAENSSAPAQTVPLSAGGAKEHSAANRQRRQHFKAQRNEASSYSNESKVREGKNDSVYQSASPVIDSNSSNHKNVPRSDVKNSGIVSHSRAWKPKTNSHPQNSSDGKIAVEGKVDSHGGRLELNMPKGSDTITHQDTSSKPMKRSDGTDEASHSKQENLTQEDGNQKIETGQEQANPAPRRQGQPNARYHRGGGAHRGRGGYDTGRPNHGTNAERWKGGSHLEYQPVGSQNKAGGDFQLSQGMEDRTEGPPASGQAFGERGHSRGLRPAGRFVRRNTASTSTTNSHQHE

SEQ ID NO: 61926 - protein, 65 aa, Zea Mays
MVGERGGMGRRQERQAMMVTFALALLMGIAVYFRIWARQSSDPSFTADDREELRITSCRSGRPNH

SEQ ID NO: 61927 - protein, 1451 aa, Zea Mays
MPSKWQVWGQPDGSIVWLPVSDAPPNPPRPGPLRPAPRHPPLPDEAPIEETLCPDTAGGCRISSMADLLLQAREQLIEGDAMDGLAQSVNTAGLFSTGSGRPLAVSQRAVRRASALVGEEVDEATDNNNKKRKKPFGCDAGLEGELANLHVPFGGGVHKDNFFPMFQSGSGKAVLLNKDSIQKARAVLEENVENAAGAKQPMFHTSTGRSVLVSKSSIDKARAVLGGRMIAHEGDVGGVDGMEQFPVSQAGSGNVEGPGRPANQSLIFQTSSGRPVLISKRYVERSRALLMDEDVKNIRQWDTGCQLPIFQTGLGRPVAVKHSSIKKASTILGDGDVKRSGNGHTGVCTTPFQFETPKSVLMSSSLIINGMTVTPEENTSVREKCFNDDGQLPLFQTGSGRSVTASKGSFKRASSVLEPRNIAKELEDESHLNDGYATSIFKTGLGKSILPTENSRERAQFVLEAKEAVKQVISDIGAGFGENPMFHSGKQQFSPENDTSRPRASTPMEQGKFATKGYEDCGSPLPMFQTGSGKSVLVCESSMQKARAVLEEEEHYKLVKMDKKIAASASPLKTSHARTVNISSTGVSRAATLLGLEENTLSTQFFGHVSDKLGTEITVKRGNPEHMLDVASAHAISSGTHKGFIYPTENPTHMDKHQQFGFSKSSTSYVGEHSIRFSTAGGRSMAISVDALQRAKSLLGDSDLVVSPNGSIGRSLASAIENLPKPTISPKGDVSNLSYGTRAIGYAVPDTPVTKTSANQFHMGREYRPVNEIPKVPKPPSRCLSEGDNASNSKDKTQWHHMPAGPLVDITNYMATCSGNTDCLANGKRIIGGRNSVSPFKRPRSSRFITPIKNNKLSSAGESIVPPMQISPCRTMLSVRYPFQHQRKNYKEYFGGPPCFKYLTEHVTDDVKLMDARRAEKFRFQHMDTGAEEFQKMLLTCGASLSCATKEWVSNHYKWIVWKLASLERCYPTRVAGKFLTVDNVLEELKYRYSLDASLDVALLEQLEKRKLFVGQKLRIWGASLCGWSGPVSFHEVSGVVKLVVHINGTYRARWNDALGFCKHVGLPLAFRCIKVSGGRVPRTLVGITRIYPILYRERLPDGRFVVRSERMERKALELYHQRVSKITEDILFEQQENCDSTDDNEEGATICKMLEHAAEPEFILAGMTPEQLKCFSSYIEKQKIVKQNEVSEKVEKALVVAGLSSRDVTPFLKVRVIGLVNKHSASTSSNKEGLITIWNPTEMQKDNLVEGQAYSVMGLVPSNYCTEIMYLHARGSSTTWKPLASAQTTDFKAIELLKFGEVPISSEFDIAGLILYVGNTYLCNNKKKQWLFLTDGSKFVSGQGCEEQDCLLAVSFSSATTDEDSTLFSYTLSGNTVGFSNLVKRQKDETRQVWVAEATESSSYTLSNEIPRKSHLKEAAVLAERWASRSYHKIQELKERVLCIVGNAGV

SEQ ID NO: 61928 - protein, 465 aa, Zea Mays
MERDFLAAIGKEQQHPRKEKAGGGAEESVCGLGCHACRIPSDGRPAVYARFGRELMREKPRWRVAEPFGQPRVSLVDFELPLPLLLLACWWEGRGCLTDPSLAYFGAAAVPAMDWSFASKPCAAPALMSFRSAAREEPSFPQFSALDGTKNTAPRMLTHQRSFGPDSTQYAALHRAQNGARVVPVSSPFSQSNPMFRVQSSPSLPNSTAFKQPPFAISNAVASSTVGSYGGTRDAVRPRTAQLTIFYAGSVNVFNNVSAEKAQELMFLASRGSSAPVACKPEAPPTLAPAKVTAPEVLLPAKQMLFQKPQHLSPPPSSVPGILQSAALPRSASSSSNLDSPAPKSSVPLAVPPVSQAPPATLIATTTAAAIMPRAVPQARKASLARFLEKRKERVTTAAPYPSAKSPLESSDTFGSGSASANANDKSSCTDIALSSNHEESLCLGGQPRSIISFSEESPSTKLQI

SEQ ID NO: 61929 - protein, 203 aa, Zea Mays
MAEDASHGASSSTVIPADGPESTIEINIKTLDSQVHKLRVDKNAPVSVLKEKVVEATGVPLDQQRLIFRGRVLKDDHLLSEYHLEDGYTLHLVARRAAEAQTSSGASEGNTNANVNVTGNGGLLDDISRSVRDLLGSLGVAMSGGVTNTAFSVPLTSTPEGPNNVPGRTQPMNPAQPGFSVLNHQIQVTQLHPPGAIPRNMIL

SEQ ID NO: 61930 - protein, 115 aa, Zea Mays
MGDGGPLPLNKARLSDLPIKASLPSPFEDATIKAENKQKREAEALAARKKCRLAMKREKKAERMAHAGPGRSISPYTNKEDKTSMASSGSVVLVLVGASAHRAGATAEASSNAPI

SEQ ID NO: 61931 - protein, 114 aa, Zea Mays
MMLEEIWMMLEMCFGVVHLSRIKVHTPLFWFPKLIGTTRNYRVMSNFPTCLAMQSLVYGAKVEAAIAIGFNDFITYALRGIGFYQKDNMEIKKANGNGTLIPEQIFEKTRRSSR

SEQ ID NO: 61932 - protein, 89 aa, Zea Mays
MSTLLVQLHNTVPYLHFRKSIWEHYSKPRGLVGNHYLSPGYDAEVGKCSWTYHSINFDYCLVHPSRKCISIYRLFYLRPDDDEEYLQAL

SEQ ID NO: 61933 - protein, 162 aa, Zea Mays
MTYDQFCKAIGGLQSLKGMAVDESLINYDVLLHVHQCCPDFVELKVSALYVDEEMASVICNSLPRLKKLEIPSCDMSSAAIIRFLDCLEQLEHLDISGYETSAISSPVLEKASRLKVFLWNSKFELGEFMDCSNCGEHNINPQEPCKCMMEHKVMDWLAGPS

SEQ ID NO: 61934 - protein, 52 aa, Zea Mays
MIFRPPGSARRRSAWWRFYLSLSPPLTARYGRRRCRPAVATCSAVWRPRDDL

SEQ ID NO: 61935 - protein, 89 aa, Zea Mays
MVHGGYPRRDAAVRRPKSSSSAVVADRKRKWTAAAKNTSLKNQIRSTERFLHKDLPDDIRVAQEKKLEELKRQQELQNQLVVQRSTVER

SEQ ID NO: 61936 - protein, 183 aa, Zea Mays
MIISFFFQAADTILKEIIFIDASKKLKCGSVDLFVVNSYGSAYQALFMCILLPFLSKLWGVPFHVLPTYIKDGAACFLNMGSISGCEGAPLLPLLFVLVNMGFNISLLNLLKISSAVISSLASTFSVPLSIYAFTLPLPYIGAASSLPPGFVAGAAVLTTGLLLYSLPQAQHYGNSFHNKNDD

SEQ ID NO: 61937 - protein, 163 aa, Zea Mays
MDAGAKVVKKAAAGRRGGGGPKKKPVSRSVKAGLQFPVGRIGRYLKQGRYSQRVGTGAPVYLAAVLEYLAAELLELAGNAARDNKKNRIIPRHVLLAIRNDEELGKLLAGVTIAHGGVLPNINPVLLPKKTAVAAAKEGKEKKSPKKAAAAKSPKKVAASFKV

SEQ ID NO: 61938 - protein, 162 aa, Zea Mays
MAGRSRYDNPFEEGGADEVNPFADQAKRGGSTAQSGYSGGAFYTTQSQRPAPPSTRLSPLPPEPADFYNDFATPVDIPMDTNKDMKTREKELLAKEAELNRREKEIKRREDAAARGGVSEFILVSCWKRRTGPRFSPSFITISATRYLSICKERCTSRSRRS

SEQ ID NO: 61939 - protein, 490 aa, Zea Mays
MQYLELYSNNISGPIPPELGNLTNLVSLDLYLNNFTGGIPDTLGQLSKLRFLRLNNNSLSGQIPKTLTNINTLQVLDLSNNNLSGGVPSSGSFSLFTPISFANNPNLCGPGTTKPCPGAPPFSPPPPYNPPAPTSSKGVSSTGAVAGGVAAGTALLIAVPAIGYALWRRRKPEEQFFDVPAEEDPEVHLGQLKRFSLRELQVATDNFNNRNVLGRGGFGKVYKGRLTDGSLVAVKRLKEERTPGGELQFQTEVELISMAVHRNLLRLRGFCMTPTERLLVYPYMANGSVASRLRERAPNEPPLEWETRARIALGSARGLSYLHDHCDPKIIHRDVKAANILLDEDFEAVVGDFGLAKLMDYKDTHVTTAVRGTIGHIAPEYLSTGKSSEKTDVFGYGIMLLELITGQRAFDLARLANDDDVMLLDWGSPMERPKMSEVARMLEGDGLAERWEQWQKVEVMRQEAELAPRHNDWIVDSTYNLRAVELSGPR

SEQ ID NO: 61940 - protein, 290 aa, Zea Mays
MFGEVGALCDIPQPFTCRTSTLSQLLRIRKIRLTEIMQEHREDSNIILNNLFQKLKLQENLPELNQLDRRFMHKYELFHATREAWLLPQPYLQYTEHKFEDISKKAPAFGGDHGSTKLAAETIQLRVPQQGNSHDHGNFGATDRMASGDDKRNDLHINCETKKGTKEFCIQIKSKDCEAASYWQTSPETVKLGSSHSTLDAITTRENQDTSNIKSSNKRVTIHADPHNATGSLVQNGKLINLPCSLEEIFEIGSQKFPGFHPTKLVSRDYAEIDDVSVIRDGDHLFLLQM

SEQ ID NO: 61941 - protein, 322 aa, Zea Mays
MGNCCRSPAAAAREDVKSSHFPASAGGKKKPHQARNGGGGGAGEKKRLSVLGEEGCDVGAGIEEKYALDRELGRGEFGVTYLCMDRGTRELLACKSISKRKLRTPVDVEDVRREVAIMRHLPKSPTIVSLREACEDDGAVHLVMELCEGGELFDRIVARGHYTERAAAAVTRTILEVVQLCHRHGVIHRDLKPENFLFANKKENSPLKAIDFGLSIFFKPGEKFSEIVGSPYYMAPEVLKRNYGPEIDIWSAGVILYILLCGVPPFWAETEQGVAQAILRGNVDFKREPWPNVSDNAKDLVRQMLQPDPKLRLTAKQVLGYC

SEQ ID NO: 61942 - protein, 889 aa, Zea Mays
MLLNAYLDSFTGPLIEEVHCDVFLSLSGYAHANFIEIVRLDKLNHEKSIYGFVVSMPSKDAKSREIYAPKEGDIVVVSLQKPKHVSDLTKNRSSYNLGSILKSGKEEEEDSDLPPNFCIVRFLSAIPVEVDPETSKPRGPCFAVFLINTTTYDHIWTCLHLVANDHNLAPLQKRGSNTAIVNLVWQYKRRAAEDGSLSFSQLSQSVTQSVDDLGLEKFGLNDSQLHAVADCVLSAIDNRLPSLKLIWGPPGTGKTKTICTILWAMLMKGLRTLTCAPTNTAVLEVASRIVRLVEHLHGSVCFLNDIVLFGSKEKMKIGREDALSMVFLDSRAKRLLPCFMPTTGWMHCLRSLMDHLESPITQYRLHLEKLLKNEKKKESNKGGSRATQGTIIRIPPFKDFFKGYFNKVSNLLRKCVETMYNDHPRSPETGHSFQCMLEVLELIGILQELINCKNDDIWSDEFHDCKIEDDGDPILWSEQLAHVRSNTSKKHKLKLARSLCVRELRYLHKNLELPGYSSKRSVETYLLQRAKCILCTVSSSFRLYNVPMDSSCTDIHSLLKGPETFKLLDMLIVDEAAQLKECETLIPLQLPGIRQAVFVGDEYQLPALVRSKISDGANFGRSVFERLSSLGYGKYLLNVQYRMHPEISRFPVATFYDGKLSDGPNVTSMSYERTFLASKVFGPYSFINVDGGRETTEKHGTSLKNTVEVAAVLRIVQRLFKESVSTGCKLSVGVVSPYNAQVRAICQKVGESYNAHDGFSVKVKSVDGFQGAEEDVLIISTVRSNGAGSVGFLTNLQRTNVALTRAKHCLWIVGNGATLSSSKSVWQKIVKDARDRGCYFEASDDGDLSNAVVKAIIEQDDADNLVRMESLHISRPRSQLQKSGPKNFS

SEQ ID NO: 61943 - protein, 1376 aa, Zea Mays
MPDNTGLEIGLKGSKGAPMPGTEGRVAKDLKKAPASLEESNASRDEDPGGGPALTGKKRKDRRGSADDNRNVTRRVLRSDAMKLRAEAEAPCGAGVEVSKTDSLERKHCDTTVEAEACKSSVLMEVACNGGEANGLVNLDASDVSEESTRCSDNNMGMPGVPATDFSQDGGLAQGSIAESDDKTVKSDEVSAVTHSEQNDSQAGINSYNADEAQDNKVRHGPCQDEVIDSAITNGANTSTDLTKTSPTSGSESVKQDDSKQENNLVHTEGVILHSGDPKVENHSQIEDTCTETEISLTGNGRCAADNHTDRTGYTKQEERGSPVNETNDISAHDIVFTRRGRKSCEAKQGTCEEESRFEKRVTRSATVRQREVSGSLCKTTTNETALGSRGRKGDIIAHYTRKVSSAVSPKGHHAELGECNTSMENQTVKQKVVDRRDSGATKNDNDANDTKNKESEKTEINLKTQPPVGSVSIVNKTTVGAVSVVGQSISGSAITERNDTDHTDSDGVKYENMTLVQKLLLSVGAKIVASKKRVLEAGPDKTTGRSPIALPSMKKTRNTSSDPEIDQPDKSSGEKLIGNNCDLGNKRVLRERQHQNQTYLSSRSSNQSNQNAIKQTQDQSDDDDISSDTSYRRTRSGRRRGAARLAVPKQEDSSDSEEVVVVKKNRRKRKKSVHKHRAGSKLKHTSGSPPKTGRLGRPPLVKSECGCLPLQPGKGKMNVPEGTGALREEKQKISDQIKAMLLDAGWTIDLRPRNGRNYMDSVYIHPSGKGSYWSVTKAYYVFRADMESEQKESSKDHILSKKSVGSPGKRQVSSSSGCTLTDDILSKLKRVVVNKRTTKVEIQRLRQKKEKKNTTNSTRLHLGNERKKRGGCALLVRGSNKESGSTTDGFVPYEWKRTIFSWLIDLNVLSVNTKLNCLDESHSKVLLEGFVTRDGINCSCCSEVISVPEFVTHAGSEVNKPYRNILVDGLDIDLLHCLINAWNMQSDAERQDFFPVSIEGDDPNDDTCGICGDGGNLICCDGCPSTFHMSCLGLEALPTDYWCCSNCSCKFCHEHSSDDAEDTADVDSSLHTCSQCEEQYHGACSPDIDSIATNLSSQTGNLFCQQSCRLLFEELQNLLAVKKDLEPEYSCRVVQRIHEEVPEEVLALDKRVECNSKIAVALSLMDECFLPIVDQRTGINLIRNVVYNCGSNFARLDFRGFYIIILERGDEIIAAASVRIHGTKLAEMPFIGTRNMYRRQGMCRRLVDGIEMILSSLNIEKLIIPAITELVDTWTSKFGFSPLDDSEKQEVKSVSMLVFPGTGLLQKPLLKTSPSEDQCSQGDKTEKSSDVVNEDSLCSGASADPLGSVVKEHGDTSKDADGTCNGDVSQRSPLS

SEQ ID NO: 61944 - protein, 69 aa, Zea Mays
MRAQNSTALFSTRRIITILEGIAILAAVQLIFSEVHESGGLAAMEYVRPESHFLGARLTTCRKLAVGHC

SEQ ID NO: 61945 - protein, 263 aa, Zea Mays
MAFSDGYDNLWGPQHQTLSQDRMALTLLMDRTSGSGFKSKRSYRNGYFGVSIKVQPGYTAGVNTAFYLSNNELYPGRHDEIDMELLGTVPGEPYTLQTNVYVRGTGDGARLVGREMRFHLWFDPAADFHHYAILWNPDQIVFLVDDVPIRRYAAASAPFFPDRQMWAYGSIWDASDWATDGGRYRADYSYQPFLAGFRGFRTAGCEAAAPAQCRPVPASPAGAGLSVQQRDAMRWAQQTSMVYYYCQDYTKDRSLYPECSLAS

SEQ ID NO: 61946 - protein, 157 aa, Zea Mays
MAGSAAYSASATTVVAMAKGNGNSKGVRGGGSAGTNKVTRPPRITSNVKQNLRILKFWKEFERRQTSGPQPATRYRKKKVIKEVLPDDTDFYEDPSSTLHLTNEGLEIASPVILVDGYNVCGYWGKLKKDFMNGRQEIARQTLIDELVSFSAVRGLH

SEQ ID NO: 61947 - protein, 137 aa, Zea Mays
MVQDTKNRLEKERQSFLKALSKTSKECESLLKNEYTKFLATHDKFCKDKVAHIQNFKDLFSKFEDDKEKLLVQYELQRKKEKATLSELEKTFSEKIANAEESLKKMKQDDKSIHILRKSIGSFLSGDPDDQSGQDDD

SEQ ID NO: 61948 - protein, 510 aa, Zea Mays
MRAPMLFSSDYKSFYCQFSDPSYVKKLKLEMLTAIANESNTYEIVTELCEYAGNVDVPIARESIRAVGKIALQQYDVNAIVDRLLQFLEMDKDYVTAETLVLVKDLLRKYPQWSHDCIAVVGNISSKNIQEPKGKAALIWMLGEYSQDMHDAPYILESLVENWDEEHSPEVRLHLLTAVMKCFFKRPPETQKALGDTLAAGLSDTHQDVHDRALFYYRLLQYSPNVAERVVNPPKQAVSVFADTQSSEIKDRIFDEFNSLSVVYQKPSYMFTDKEHRGPFEYSEDLTGLTEDPENVISAQRYQENDNDLLLSTSDKEDNGTRASNGSSTSTYNAPSDLISPSLISSQAPAETSLVNTGGTYSSQSNFSLDDLLGLSVTEAPALPQPTLALNSKPVLDPGTFQRKWGQLALALSQECSLSPQGAVALMNPQSLIRHMQSNHIQCIASGGQPPNYKFFFYAQKDGAAAFFLVECIVNTASAKAQLKIKADDGTAAEAFSSLFQSALSKFGLS

SEQ ID NO: 61949 - protein, 243 aa, Zea Mays
MGTGAVAVAAPDRAKQRRAGGHLWKKALLHFSLCFVMGFFTGFAPSSSSSWKSAAATPQHHPPHRPGDRLAASRVAVDARATLSPPAEAADALSAGATVDLGDDEEDAAQRRLLIVVTTTRSGPGERRRRRGELLRLAHTLRLVRPPVVWVVVEPAADAPATAEVLRGTGVMYRHLAFKPEDNFTTADAEAHVQRNAALAHVEKHRLAGVLHFADAAGVYDVGFFEQIRQIEGKKGRRHCRFS

SEQ ID NO: 61950 - protein, 259 aa, Zea Mays
MAADAAQQGPGVHRRRGGAAPRAWCCSFAGVPDSPDLRPIPSSAASPAAASRKLPPKSPSAASFYGSPTSSRLAGLGGLIDPRRILSPGRVSPIDPDGAVPLPPPTPPPPPPAEFPAAVGTAEQPAPVLASALPSAAAAPQVVSVREEADAHAAGVLDLKLFLRGRDGRCVLMELDSRVLCGCSDFFAAMAPHEDAAATAAGAGAAGKTIEVDGVDNLDAFRAAVELMYDPDPMRGLAAAGVSRAIDVLELDIVSWAAG

SEQ ID NO: 61951 - protein, 73 aa, Zea Mays
MVLFDIPDIRLFWSNDKRFTSQFSEGKLGVKFKPFSKFPPCYKDMSFWINDAFTENNLCEVVRGIAGDLVEEV

SEQ ID NO: 61952 - protein, 121 aa, Zea Mays
MRRDGDLGSELQRRPPPPPPPPPPPHRSPPWPWLGWPPGDLSSLPQTTPPSPRISFSFSPFQTFRSRRCQPPFARRVSRRSSRRILTCLHRAKESRWLCALAPLLGGHHRPSTTQWVPSSH

SEQ ID NO: 61953 - protein, 64 aa, Zea Mays
MPFMLTIDLRTICRGQDSLFLLKSVPFSATELKLTCVASALVQPLFRPCSHIVYSFILCPKVPV

SEQ ID NO: 61954 - protein, 186 aa, Zea Mays
MACKDFHACQWPSDLTNDDEALALYFDKLNDKNHDAIEEVKSSSKHILTFSHFVPRQELCPEKRMLYYPYLPKVIGSDFLERRLRDIHSNREDRAACHVFGHTHFCWDSVVDEIRYVQAPLAYPRERKRRMNGEGWLPFCVYRDGFNPEIYPALWSDYYNKNKREPENTQLAPWVASHYAKYHKFH

SEQ ID NO: 61955 - protein, 664 aa, Zea Mays
MMPSGPPNPMGHGQPVGGAAPSLLRTSSSLLSGGGQPGMGGGGGGMLSSQSPFSSLVSPRTQFGGNGLLGGASLLNRPPFGNGGPMPGPGSMQAVGMQMSTLQQRAGLDGASDFISAEGSDPLSFPSSSQVNLGNQMGSDNLQATSQQQQQQMDAMQDMQQQLPMSYNQQQLPPQHSQQLQQPQATVKLENGGSMISIKPEQQMAQPDQMMRSASGVKLEPQQLQAQMMRSLSSVKMEQQTSDSSAFLQQQQQQQHLLQLTKQIRNCPELVSIGGPNAIANPQAATAAQLTLLQQQRLLHMQQQQQQQILKNLPLQRNQLQQQQQHQQQQQLLRQQSLNMRTPGKSSPYEPGTCAKRLTHYMYHQQNRPQDNNIEYWRNFVNEYFAPNAKKRWCVSLYGSGRQTTGVFPQDVWHCEICNRKPGRGFETTVEVLPRLCQIKYASGTLEELLYIDMPRESQNTSGQIILDYTKAIQESVFEQLRVVREGHLRIVFNPDLKIASWEFCARRHEELVPRRSIIPQVSNLGAAVQKYQAATQNSTSLSAQDMQNNCNSFVACARQLAKALEVPLVNDLGYTKRYVRCLQIAEVVNCMKDLIDHSRQTGSGPIDSLHNLPRRTPSGASTLQPQQQQTEEKQAIPQSSNQSVVHLLHLRLHHQLLGSCKIQ

SEQ ID NO: 61956 - protein, 336 aa, Zea Mays
MAAAAAISLSFHFRFRPPFPSPRTPTRHAPFSLFSPSLLAPCRLRVAPGRPSPSPWRPDVRARAGSTIGAPPALVRPGGAVETDRLPSDVRDRAMEAVDHFGGRVTIGDVASRAGLQLAQAERALQALAADTEGFLEVSEDGEVLYVFPKDYRAKLAGKSFRMRVEPLVDKAKQVGAYLVRVSFGTALIASIVLVYTTIIAILSSSSSDEDGRGRRRRSYGSTIIIPTDMFWYLDADYYRRRRVENENGMNFIESVFSFVFGDGDPNDGLEEKRWKMIGQYISSNGGVVTAEELAPFLDVPPPSEESKDDESFVLPVLLRFQGHPEIDEQVQSSFL

SEQ ID NO: 61957 - protein, 283 aa, Zea Mays
MDPSVRRHMTREKTETILKVLVKQFFIEKEVTSTLVIDSLYSGLKALEYQSKNKKGIPKLTETDARSTPMVLIDQDMFVLADDVILLLERAALDTLPHQPLPTKDDKSSQNRTKDGNSGEEFSKDSIERDDRRLIELGWKTLELFALTHIFSRIEVAHQEAVALKRQEELIREEEAAGLAEIELKAKRSAAEKEKRAKKKQAKQKKNSRRSNKGKSGKSDINKEILMYSSPSAETIIQMRFMLILKTVKVALLIGRQMLQKLKLLCLEVVRCKMTMQGRGPLL

SEQ ID NO: 61958 - protein, 106 aa, Zea Mays
MPAQLAWQVATLALAAGVSLTPCPAAKRRLRLSPSLHVRLSLFSRVAAVALSFALISTPLSTSLVQGAGSQQSSTSKARPACRQAPAARPQGNQPTRQQAHHGWLA

SEQ ID NO: 61959 - protein, 874 aa, Zea Mays
MVALASLSSLCPCGIARRRAASATSSTAFSISCCAVATPSFSGKGPQESRTPRRRLRKTEGATKSLEDSVKRKMEQFYEGADGPPLRVLPIGGLGEIGMNCMLVGNYDRYILIDAGVMFPDYDEFGVQKIIPDTTFIKKWSHKIEAVIITHGHEDHIGALPWVIPALDSTTPIFASSFTMELIKKRLKEFGIFLSSRLKVLRIKKRFQAGPFEVEPIRVTHSIPDCCGLVLRCGDGIIFHTGDWKIDESPVDGKKFDRQALEELSKEGVTLMMSDSTNVLSPGRSISESVVAGSLLRHISEAKGRVITTQFASNIHRIGSIKAAADLTGRKMVFVGMSLRTYLEAAFKDGKAPLDPSTLVKVEDMDAYAPKDLLVVTTGSQGEPRAALNLASYGGSHALKLSKEDVLLYSAKVIPGNETRVMKMMNRLTDLGPKIIMGKDSGLHTSGHAYREELEEVLRIVKPQHFLPVHGELLFLKEHELLGRSTGIRHTTVIKNGEMLGVSHLRNRRVLSNGFVSLGKEDLQLMYSDGDKAFGTSTDLCVDERLRIASDGIIFVSMEIFRPQKEHGLAQSGLKGKFKITTRCLWLDNGRLLDALYKAAHAALSSCPVNCPHSHMERMVAEILRKMVRKYSGKRPDVIAVATENTTAGFSEHLDTKASGNFGPSSATSHLSRSPATSLEGSYKTHPDNPEVDAEEILPETVRTTPDDATTSSNGEALFSSDLHQPKTLEHFWESFKSPTAVKIARIVNGGDKQNFGKIGIMGQDSLIQSAPAPVKSSKRNKWKPEEIKSLIQMRGEMNEKFQSVKGRMVLWKEISDTMLNQGVSRTPAQCKSLWTSLVQKYEESKDTESMKTWPYFSAMDKILSQQGEMATKG

SEQ ID NO: 61960 - protein, 123 aa, Zea Mays
MDEVTEAVNNLNISGVGAAGVAGAEGHKKNRIQRYMQLHNEVELSALGMAIATVVTVAEILKNNGLAVAKSIMTSTVDIKDETRTRPIQKAKIEILLGKTEKFDELMAAAAEEREANGAEEQS

SEQ ID NO: 61961 - protein, 89 aa, Zea Mays
MLDISPTDSTEFWLIQWPKDQIDVLDFHGKELSLKLHSDGNLGNLENSSGKSYEIASFAAQKPDATVFLPSGSETKAGMVKYQLILLIA

SEQ ID NO: 61962 - protein, 806 aa, Zea Mays
MMRKLPRYVGRLFAVLMSMLLDVQDEPAWHAAVSEEEDAGETGSYVFAQECLDRLSIAVGGNTILSVAAELLPSFFSSEDWKRRHAALVTIAQIAEGSAKMMIKNLEQVVGMVLNSFQDPHPRVRWAAINAIGQLSTDLGPELQNQLHHVVLPSLASAMDDVQNPRVQAHAASAILNFSENCRPDILTPYLDVIVGKLLLLLQTGNQMVQEAALTALASAADSSQEHFQKYYDAVMPYLKAILMNATDKSNRMLRAKSMECISLVGMAVGKQKFKDDAKQVMEVLMTLQGSQMEADDPITSYMLQAWARLCKCLGQDFLPYMSVVMPPLLQSAQLKPDVSVTSAGPEDENGESDDEGVETITLGDKRIGIRTSLLEEKATACNMLCCYADELKEGFFPWIDQVTTTLVPLIKFYFHEEVRKAAISAMPELLRSAKLAIEKGQAQGRDKSYLKQLSDYIVPALVEAMHKEPEPQICASILESLNESIQLSGTLLDQNQVRSAVEGVKEVIVASTNRRIERTERARAEDFDSEEEELLREENEQEDEIFDQIGDCLGTLVKTFKTSFIPFFDELSMYLTPMLGKNKSPEERRIAICIFDDVAEHCREAAVRYYDTYLPSLLEACMSENPDVRQAAVYGIGICAECGGSAFRPHTGEALSRLYNVIKHPNALDLDNAMAYDNAVSALGKICRFHRDIIDVSQVIPAWLSCLPIKNDLIEAKLVHEQLCVMLEQSERELLGHNNQYLPKIVSVFAEILCAGKDLATEQTASRMVNLLRQLQATLPPSVLASTWSSLQPQQQLALQSVLSS

SEQ ID NO: 61963 - protein, 231 aa, Zea Mays
MWAPPAASPTGAFPSLRPSRTAVVRVLVTLPAAARPQDQPRRRLCLAVPRPAPEMASAAAEGEGEEEDVVVVEGDTGKKTAVEMDATVRRELAIRRLREEAEEEANEAGTRRRSSRRDFAVFETARGDALFTQSWTPAADDRLKGVVILLHGLNEHSGRYSHFAKLLNDQGLKVYAMDWIGHGGSDGVHGYVSSLDHAVGDLVLFRTYRIVHRYKFQVAVFFSCSIFSIYF

SEQ ID NO: 61964 - protein, 247 aa, Zea Mays
MDAGVEKCGDAAAEGGGDLYAVLGLKKECSDADLKVAYRKLAKKWHPDKCSSSSISVKHMEEAKEKFQEIQGAYSVLSDANKRLLYDVGVYDDEDDEDSMQGMGDFIGEMTQMMSQESFEELQQLFVDMFQSDIDSGFCNGTAKGHQVQGQAKSRTCSPRSPPTTIVKEAEVSSCNGFNKRGSSAMDSGKPPRPVECGAGQSQAGFCFGVSDTPKPRGPNANRKRNGRKQKLFPKHYVTSEDDTAGS

SEQ ID NO: 61965 - protein, 1048 aa, Zea Mays
MSSRPSSSSSRRSSSPFSAGHRRPPTASSSSSSSYFSSGRLIPRSSSSSVSSSFYGGGGGGSTRSTTPSRRSSSVAPALPPSPVPFPSADELVIEDTSRSGDSISVTIRFRPLSEREFQRGDEISWYPDGDRLVRCDYNPPTAYAYDRVFGPSTSTEAVYDVAARPVVKGAMEGINGTVFAYGVTSSGKTHTMHGDQNCPGIIPLAIKDVFSMIQDSPGREFLLRVSYLEIYNEVINDLLDPTGQNLRVREDAQGTYVEGIKEEVVLSPGHALSFIAAGEEHRHVGSNNFNLFSSRSHTIFTLMIESSARGDEYDGAMYSQLNLIDLAGSESSKTETTGLRRREGSYINKSLLTLGTVIGKLSEGRATHIPYRDSKLTRLLQSSLSGHGHVSLICTITPASSNMEETHNTLKFASRAKRVEIYASRNRIIDEKSLIKKYQKEISSLKQELDQLRRGMIGGASREEILSLRQQLEAGQVKMQSRLEEEEEAKAALMSRIQRLTKLILVSTKNNIPALTDGHQSHNSLSEQDLITSQDSSTLVQTEGTTKDPLSSALPDSLDEINQLRSGTGEQSSVTGSATDSMQVGFTASDHMDLLIEQIKMLAGEVAFGTSSLKRLIEQSIDDPEATKDQIENLEREIQQKRRHMRALEKQIMESGEASVANASMMDMQQTITKLTAQCSEKAFDLELKSADNRVLQEQLHQKNLEIYDLQEKVLRVEQQLSAKVDISPEKETDCAQQETIDLKSKLQSKEAEIEKLKYEHLKISEEHCDLINQNHKLSEEAAYAKELASSAAVELKNLAEEVTKLSVLNAKQAKELLVAQEMAHSRVHGRKGRTASRGRDEVGTWSLDLEDMKMELQARRQREAALEAALAEKELLEEEYKKKFDEAKKKELSLENDLAGMWVLVAKLKRGALGISDLNVDDRTVNLADITNSTKENKGGKNFALVEKQASEDSVKSLSSEEHTSPEFEPLLVRLKAKIQEMKEKDIDPLTDKDGNSHVCKVCFESAAAAVLLPCRHFCLCKPCSLACSECPLCRTRIADRIITFT

SEQ ID NO: 61966 - protein, 286 aa, Zea Mays
MEVEEAGGEVENAGKDEAEAEYHSRDFEWEDLKEEERRYLLKEFPELCSSKDHAKVLEVGCGNGSTAVSILRSSERITVFACDCSKDTLEKAYEIISNTKGINIKDRFHPFLMDVSKETFPDWLFCKACQTSLGKAAASLLDPSHHGIREEHPVFLGENQCCAGGMDFITMIFTLSAIPFDIMPTTIEQCVSVLKPGGLLLFRDYGLYDMTMLRFLPHQRVGFREYMRSDGTFSYFFSLDTVRELFRAAGLVELELEYCCVKSVNRKNGKTMRRVWVHGKFKKPPR

SEQ ID NO: 61967 - protein, 59 aa, Zea Mays
MDRMVLSLIHCFVLYVDQPITMASIKLQKKLFVVAKRISNKILVELKFLHQIIFGRLQM

SEQ ID NO: 61968 - protein, 82 aa, Zea Mays
MIPRPPPPALHPVLRLHAADRSRPHSPRLWFTPATIRPSLLNLRSFLLDCDHGDSGIPRHVEGGLLSARLARGGHAGVHIGH

SEQ ID NO: 61969 - protein, 138 aa, Zea Mays
MVLRKDLTNSDVGNIGRIVLPKKDAEPNLPILEDKDGLILEMDDFELPVVWNFKYRYWPNNKSRMYILESTGEFVKRHGLQAKDILIIYRNKKSGRYVARAVKAEDIAPPECECVEAGNPREECGFSVSPSINKKIIT

SEQ ID NO: 61970 - protein, 566 aa, Zea Mays
MKSSVDTELREMVAYIANTLIFILSGVVIADGVLQNNGHFERHGSSWGFLLLLYVFVQISRVIVVGVLYPMLRHFGYGLDLKEAMILVWSGLRGAVALSLSLSVKRTSDSVQPYLKPEVGTMFVFFTGGIVFLTLIFNGSTTQFLLHILGMDKLLPTKLRILKYTRYEMLKKALEAFGELRDDEELGPADWVTVKKYITCLNDLDYEPEHPHDVGDEDDCMHIMNLTDIRVRLLNGVQAAYWGMLEEGRITQVTANILMRSVDEAMDLVSGQTLCDWKGLKSNVQFPNYYRFLQRSRLPRKLVTYFTVERLESGCYICAAFLRAHRIARRQLHDFLGDSEVARTVIDESNAEGEEARKFLEDVRVTFPQVLRVLKTRQVTYSVLTHLSEYIQNLQKTGLLEEKEMVHLDDALQTDLKKLQRNPPIVKMPRVSDLLNTHPLVGALPAAVRDTLLSNTKETLRGQGTTLYREGSRPTGIWLVSIGVVKWTSQRLSRRHSLDPILSHGSTLGLYEVLIGKPYICDMTTDSMVQCFFIETEKIEELLHSDPSIEIFLWQCSGACQAFGPS

SEQ ID NO: 61971 - protein, 406 aa, Zea Mays
MSTASGTRRAPRRQSQDGSADKVVVIIEATSPVVGSRRGPPTPVPGAQNSPIDVEAIEDEVQTVSPSRVPPPRRDRRTRREPITVVDLEVDASQEEEILAAANANCSQWPAPEIDLLERTSNERIYAEMFLPSIGWSSPSRIQPLLAAINSCKIPEFSYDLSWLNHGSHMGKQIQDQKKLLEECLARYLTESARLLDESQVVTEVNVMVQNCVGLELRDSSYYLAPRWVAIFHRIYNWRLAKLSTGKFSEAYVLTQHLYQAPAAAGSNGTTQGLTANTASSDAVDHIMMPAVSTGITLDEIIEISCDLDVVDAQPVTLPPRLPVHVHEEPQALADNNDVHGVDEMYIPRRVELGEVMPIDTDDKLSRLRVELGEVMPIETDDKLSRLLEQCTKLQDRIDETLSIYF

SEQ ID NO: 61972 - protein, 444 aa, Zea Mays
MQTPAMSTSTATTTRAMAPAKPPARRHCCSYLLLLLPSTGHRRSVAAWSAKKKNPWLDPFDDGPDEEFDYQGMFSGGKQEEDPRPPEDPANPYGFLRFPQGYNPELDSLASKMLKDRYPGVLVDVVASPRGKQVYEMCKNVRYANVYDPDDDWPEPAEYTHMLGVLKNRYYDLIVSTRLAGIGHALFLFMSSARDKVGYVYPNVNSVGAGLFLNEMFKAPTNNLADGGYHMYKDMLEWIGRPAKNVPRQPTQPLRVSISKKLRAYVEDKYSRAGVEKGKYVVVHGIASDSVASMTSRGDDDCLLPLEHWAQIAKEISSGDKGLKPLFVIPHDKHREEVEEEVGDDTNILFITTPGQLTCLINDSAGVVATNTAAVQLANARDKPCVALFSSAEKARLFLPYVEDKSSCTVISSMTGKLIDIDINAVKNAVKDLEPAPSFALAQK

SEQ ID NO: 61973 - protein, 189 aa, Zea Mays
MDVNQRVEWMKENSKETYEEAVQCMKTNYYGAKLVTEALLPLLQLSSSGRIVNVSSGFGLLRNFNSEDLRKEFEDIDNLTESRLEELMDKFLEDFKANLVEAHGWPTGGSSAYKVVKAALNAYTRILAKKYPTLRINCLTPGYVKTDMSMHMGVLTLEEGARNPVKVALLPDDGPTGAYFDLNGEASFV

SEQ ID NO: 61974 - protein, 393 aa, Zea Mays
MARLLLSVSVPMSASSSRRIVVPGTARHRGRSGVCVAVPATSTATATQQEFDPAAAPPFGLGDIRAAIPKHCWVKDPWRSMGYVVRDVVLVLGLAAAAARLDSWLVWPLYWAAQGTMFWALFVLGHDCGHGSFSNNPRLNSVVGHILHSSIHQNHGHVDKDESWHPLPERLFKSLDSVVLMLRFRLPFPMLVYPFYLANRSPGKSGSHFHPASDLFQPSESKQVLTSTACWLAMVALLAGLAFLMGPLQMLKLYLVPYWVFVMWLDFVTYLHHHGHNDKLPWYRGKEWTYLRGGLTTLDRDYGWINNIHHDIGTHVIHHLFPQIPHYHLIEATEAAKPVLGNYYREPQKSGPLPLHLLGDLVQSLRRDHYVSDTGDVVYYQTDPTISCSGPFT

SEQ ID NO: 61975 - protein, 1141 aa, Zea Mays
MQGFPGGAPDPQQLQATMLAIEQACSLIQLHMNPSEAEKVITSLHSSLMPYQVCRFILETSQKPNARFQAAGAIGDAAVREWGVLTDDNKRSLIIYCLNYVMEHASSPDGYVQSKVSAVAARLLKRGWVEFSDQEKAAIFFEVEQSIRGIHGPNRQFAAINFLETLVSEFSPSTASAMSLPKEFHEQCEYSLEVQFLKDFYCWAQAAVFNTADKILNSTVTIPDERACSAALRLMFQILSWNFKHTVEHESSDAKINFGLRIDTINLKKFERSLVKPGSMWREILISSGHPTWVLNFYTTLRQKYSYDTLWGDSPIAVSCRQLIVQLCSLAGSVFPNDNGDAQIKHLMLILSAVVLWIEPPDVITASIRNGGSESEFIDGCHALLSIASLTTGSLFDNLLKSIRPYGTVNLLSALTSEAVKSVLNNQSEEETWGIDSLDILLETWNVLLGDVDADKNPISTDGALASSSLFKMIVESHLKAAADSAFEDTDDTEYFHVSVSKRDEQLALYALIARASANTTIPFLAQLFSERFARLNQRNGESDPTQTLEELYWLLLVTSHVLTDSGEGETLLIPEALQAGFPNVIEAAHHPVVTLSWSIINFSRQCLDPGIRAKYFSPRLMEAVIWFLARWVATYLVPLDVSRGKVSREIDNVGTNGSQHSRKLLNSFAWENNQGELVLDFVVLISMLALTTYQGENELQTLTCQKLLATVVRRKHTCTYLVQLRSLAETLASAASCIKDPEASAQYLRDLMGPVAGCLVENASRSDLKSVAQQADVIYMVCCLLERLRGAARATQPRTQKVLFEMAHTVMNPLLTLLEVYKNHSTVVYMILKFVVDFVDGQAVFLDAKETSALVSFCLQLLQIYSSHNIGKVMLSLSSSLRNESQAEKYKDLRALLRLLTNICSKDLVGFLSDCGGEGSPDIAEVIYIGLDIVTPLISLDLLKYPKLSRDYFVLISHLLELYPEKVAHLNSDAFTRIIGSLDFGLRNQDSDVVERCLAAVNALASYNFKERLGGRGRLNSQLMESEGSNGKLQESISSHFLRLLLQILLFEDFRSELAGYAADALLPLLFCEQELYQRLVHELLDKQQNPTVKSRLATAFHNLTSSNNLSSSLDRPNRQRFRKNLLSFMADVSGFMQIK

SEQ ID NO: 61976 - protein, 550 aa, Zea Mays
MANGSGSHCYGYTLLRDPRHNKGLAFSEAERDAHYLRGLLPPALASQELQEKKLMQNLRRYEQPLHRYIAMMDLQERNERLFYKLLIDNVEELLPVVYTPTVGEACQKYGSIYRRPQGLYISLRDKGKILEVLKNWPERSIQVIVVTDGERILGLGDLGCQGMGIPVGKLSLYTALGGVRPSACLPITIDVGTNNEALLKDEFYIGLRQRRATGEEYHELLEEFMTAVKQNYGEKVLTQFEDFANHNAFDLLEKYRESHLVFNDDIQGTASVVLAGLLAALKVVGGTLADHTYLFLGAGEAGTGIAELIALEMSKHTGSPIEECRPKIWLMDSKGLIVASRKDSLQAFKKPWAHEHEPVATLLEAVQSLKPTVLIGTSGKGGTFTKEVVEAMASQNEKPVIFALSNPTSHSECTAEQAYTWTKGRAVFASGSPFDSVELDGKVLVPGQSNNAYIFPGFGLGVVISGAIRVRDDMLLAASEALAEQVTEEHFAKGLIFPPFTNIRAISARIAAKVAAKAYELGLASRLPRPDDLVKYAESCMYTPIYRSYR

SEQ ID NO: 61977 - protein, 131 aa, Zea Mays
MMTTWPPSLPSVVLREIIVQTFGISHQFTPSMMNLSMNGGAKKLDGKSMTMLWRNSYNGMQAKFAARQMPDDWQETSTLLATLEKIESWIFSRIVETIWWQALTPHMQKRVEGSSTPKAGRVLCPTLGDQQ

SEQ ID NO: 61978 - protein, 69 aa, Zea Mays
MLVGKQRTPRHRGGGVISTTLKGCLCSLPSRSLSRPSLFFLVVREGGGRDHGHGGRTLLARSLDSCWCL

SEQ ID NO: 61979 - protein, 255 aa, Zea Mays
MGQCLPRSAAAVALNTFPGLDPPDVTAALAEILPNCVPFGPYHLLLAEDDADTAAPADPHGCLAWLGRQPARGVAYVSFGTVACPRPDELRELAAGLEASAAPFLWSLREDSWTLLPPGFLDRAAGTGSGLVVPWAPQVAVLRHPSVGAFVTHAGWASVLEGVSSGVPMACRPFFGDQRMNARSVAHVWGFGAAFEGAMTSAGVAAAVEELLRGEEGARMRARAKELQALVAEAFGPGGECRKNFDRFVEIVCRA

SEQ ID NO: 61980 - protein, 487 aa, Zea Mays
MIGAIFAPSIVYFALLVYYLPESPRWLASDGKISEARVSLQWLRGKKHDVSGEIAAIVEGVDIISDSTVGAARAQSFSGTSASHTWPRSTFYWQLSDPLVDLLGSVHENMSEGGSRRNSFFPVFNSFSFPEHEHMNEHRDGNSDQQTRETYYAGEANNGDGLRASLLSQAASVEVNDTNTSFTSEGSSSYLRRHGTSVLAQEFMASIHDYDIEEEEEEIHGFALPHQSAPRDMESTGRHPFRHQIVRLSETADMKFKWRVLLQPGIRHALCYGMLIQALQQSTGISGLLRCAPEIFEQSGVASLFSDIGLSPHSTSILMSTLNALLILPCITAAMLLMDVCGRRVIVLATTPVLILSLSVMSMSTLVNMGPFESAVLFHFALTICFWSYVIGLGPIPNILCSEIFPTKARATCASFCSLSFWFGGLLSAYCFPVMLSTIGLGGACGIYALVCCAPLFLVYYRIPETKMLNLELIAELFKLSRQEHVQ

SEQ ID NO: 61981 - protein, 98 aa, Zea Mays
MATVPRIGGALPSVAPVDWTMTSSRGGGGCNNICDLRSTRQRQRPRGRLYIGGTCCWRSLRVRWGSRPTGGSRCRCPRSGVSVSSHVSVLPDRRSIER

SEQ ID NO: 61982 - protein, 260 aa, Zea Mays
MWSPIPGTLMRTSSLPAVIEASGNDDWKKRKEAQSLKRLEVKKKRIERRNSLACNTSKEAAGQSPKEMNANTDKLVSSDETIVSANESHSSGKHLVKGLPPKYQATITSEDSSSAMRKKPNSAFKAITEEQNSSSSVPSSGEAISSVTAPSLPLLSLVPITATLGSREDQSILGRAGARANGMGDVERRMMQEMPGVFTKGLSNGSRVEGFLYKYSKGEVRIVCICHGSFLTPSEFVEHAGAGKVDNPLRHIVVSATPNL

SEQ ID NO: 61983 - protein, 58 aa, Zea Mays
MQRCDRITSRRSCDDAVARDMGAEVVVLRWWQDRKETKKQEPGLFNNVTESLRRGRVR

SEQ ID NO: 61984 - protein, 390 aa, Zea Mays
MGVSGAGKTTLMDVLAGRKTSGYIVGNITISGYPKKQETFARVSGYCEQNDIHSPNVTVYESLAFSAWLRLPADVDSSTRKMFIDEVMELVELLPLKDALVGLPGVSGLSTEQRKRLTIAVELVANPSIIFMDEPTSGLDARAAAIVMRAIRNTVDTGRTVVCTIHQPSIDIFESFDELFLMKRGGEEIYVGPLGMHSCELVKYFEGIEGVNKIKDGYNPSTWMLEVTSTMQEQITGINFSEVYKNSELHRRNKTLIKELSTPPEGSSDLSFPTEYSQAFLTQCLACLWKQSMSYWRNPPYTGVKYFYTTVIALLFGTMFWGVGRKRDSQQDLFNAIGSMYASVIFMGVQNSGSVQPVVSVERTVFYRERAAHMYSPLPYALGQVAHFRQ

SEQ ID NO: 61985 - protein, 152 aa, Zea Mays
MAEKLTPEQVDECKEIFDLFDADEDGRIATGELVTALRSLGQNVDEAEARRFLEDAGVAAGAGDIDLAAFLAVAARKMGARQSEARLAECFDVFDDACSGSIPAEQLRQVMVSHGDRLTEEEADAMLREADPRGEGRVEYKHYVKVLLRDKK

SEQ ID NO: 61986 - protein, 211 aa, Zea Mays
MGTHWNSKVCGGDILILVRVHLYFVLCMVTLRGDFAWYKALNTKTGMKLRFQGPSSLVCSMAITNEMLFAGTGDGRIMAWRFPAKDSNTEPVLILSGHQRPVISLSILARRLYSGSLDKSIKVWIFLQDIAQLAVRSYAHSDTFFNSLYLPGMGPYNSATLSESGNLQVKYAHAEENGLRTLFGMHRVGKTPVLFCSLHNSNCVRLLDLPS

SEQ ID NO: 61987 - protein, 606 aa, Zea Mays
MAQKTKEAEITEQDSLLLTRNLLRIAIYNISYIRGLFHEKYFSDKSVPALEMKIKKLMPMDAESRRLIDWMEKGVYDALQKKYLKTLLFCICEKEEGPMIEEYAFSFSYPNTSTEEVAMNMSRTGSKKGSTTFTSNASEVTPDQMRSSACKMIRTLVSLMRTLDPMPEERTILMKLLYYDDVTPEDYEPPFFKCCADNEAISIWNKNPLKMEVGNVNSKHLVLALKVKSVLDPCDDDNVNSEGDGMTVDNESDHDDDFSDTEVHPPKADHYIIAPNEGKDKDQDTGTISEDDTQDTAHEEELTSQVKEWICSRDSGTINVSDVLSNFPDISMELVEDIMDRLLKDGILSRASKDGYTVNQKADPKTPHIKKEAIMPDVSPTNVTKHNNGDLLYMKALYHALPMDYVTIAKLQGKLDGEASQNTVRKLIDKMVQDGYVKNSANRRLGKAVIHSESTNKRLLEIKKILEVNEGEKMAIDTNTEHPEPEHKDLLRVYEVGDGSTMGCLHSIGSDLTRTRELPELQQNVSMQSGQEASTVGKDSSRTPTSVRELAVPVCSLESGVLGKRIKRSLTGGNEMQSTQDKRSRKASMVKEAILQHVKCQNPQAQ

SEQ ID NO: 61988 - protein, 215 aa, Zea Mays
MLFRIPVWCGVLITGLSTLMLLLLQQYGVRKLEFLIAFLVFLIATCFLVELGYSKPNAPEVVRGLFVPELKGNGATGLAISLLGAMVMPHNLFLHSALVLSRKVPRSVHGIKEACRFYTIESAFALTVAFLINISIISVSGSVCGSGNLNPEDQANCSDLDLNKASFLLKNVLGNWSSKLFAVALLASGQSSTITGTYAGQYVMQVFGTYTLFQF

SEQ ID NO: 61989 - protein, 565 aa, Zea Mays
MIYGDQHDALFFEYFMEKQIMGEFARVLRISKLSRVSLQLLQTMSIMIQNLRNEHSIYYIFSNEHINFLVTYPFDFRIDEMLSYYISFLRAISGKLNKNTISLLVKTKNDEVTSFPLYVEALKFAFHEDSMIRVAIRTLTLNVYHVGDESVNRFVSRTPLSDYFSDMVQHFQKQCIDLDKLVARSSRKGNSSVPISSIEDAIVQIEDTLYYFSDVMSSGIPDLERFITENILRVLVFRFLLPSLQRQSTDLDLSVTTSMYLLCCILHIFKNKDMASTVAAALFHQPDGPDDRKQRTPNGYTSEHDSCKSENHCTTASGIEQSSEEPNSLSSVSWKHLPNNSSRSDCCQGNTPREHLLSYITEGDDSQALGSLCLFATLLQTKELDESMLDALGILPQRKQHKKLLLQALVGEDLAETQLFSSSSSLTDDSICSDFDIYVRKLQDKYGLQCHHPRQMTSKAHRYQVLDALVDLFCRSKVSADVRLVGGWLFRQLLPHGEEEFTAFHLRRLKDSHKDCSSKLSEESGGCWCDMLLPIVKEAWRNCKKGIFATKRIQIYYCTHGFVFI

SEQ ID NO: 61990 - protein, 643 aa, Zea Mays
MEDEADGGGESFVLRSGVRAGLKREFAFAIASQAVLSSSYAPLGRTRRSSRILNPSAASTPSVAGAAVSTSSSSTPDTKPKAKRPRPPDPPPPPPFPPPPDYAPAPGEDHDGAAVGPVLALMAAAGPSPPPTPLTPQPHADADADPAHLANIIIPPESSPRRITRSMLQPKSRLPTAARSPDNAAPLKPKLEPPEEEDGKPVPALRRFTRSLLVKDKDSNDDDLSGTTTASNASSPSPKTNTTSTSRSSNKGNKNTNKIPTNLRELLATGMLEGQPVKYIMRKGKRAVLRGVIKRIGILCSCSSCKGRKVVSPYYFEVHAGSTKKHPSDYIFLENGNNLHDVLRACTNATLDMLEPAIRKAIGPAPQERIFRCKSCKSSFSTLRSGKFALFCDSCLESKGAKNNISSSKVGRSQTSSAKVYKSASPGAKSSSVGRLTRKDKGMHKVVFMSGILPEGTDVGYYVGGKRLLDGYIKELGIYCHCCSTVVSPSQFEGHAGRAARRKPYHNIYMSNGVSLHELSISLLKGQKMSNRQSDDLCSICSDGGQLLLCDTCPRAFHRECVGLSSATKGTWCCRYCENRQQRESCLAYNNNAIAAGRVEGVDALEQIFTRSIRIATTLETGFGGCALCKENLANFSSSNDIC

SEQ ID NO: 61991 - protein, 182 aa, Zea Mays
MGPCWPRKARTHETQEYSRTGHSRRLFVFLPVRVGERRGVSGVRTAAVDSDSVTATRRSPKLPSPQVLVGMASTACFVIVSKNDIPIYEAEVGSAPKKEDLSYHHQFILHAALDVVQDLAWTTNAIFMLLHDSRSEDGIKSFFQEVHELYIKIFLNPLYLPGSRITSSHFDTKVRALARRYL

SEQ ID NO: 61992 - protein, 528 aa, Zea Mays
MSLAKKEEVCSHRLVPRLDEPAVGVPIKKRPFFLSDRSVASAIPLSTKPPSPTNTMPVAATGSGCREEPFFNIANSDRKVITKDSATRTSAPDDELQLQNFLALDLQLPSRQSGKNNNYSSLRKDEKLGQSRSEHYNNVPVANEINASGNSIVGRLPNLDLNIPPDPADSLEGLPKMHESGSGFYHHRTIQHQKAQVTPAAAISTINSGIGRNMCSTLNMSNSYGLSHKSGPADVTLDLQLKPPTRPELGINWKGLAPAPELSLSLFGKPMDEPEFPSTPNALFHSGTAGSSKKVSGEAAATLGSDKAPVEKIVTPVPCNVNPLNTTSATVSGIDQLPSNNLVKKEPEEISQQHIIDGAKKPNPLERQSVGQVIGCAESEKTDSAPQGARKIGFDLNSDIFANSSIHNESDVAAVDAPIPAKTLPDTCHDTSMPAVPEVDKFVKHEESTSATLSPVVETGNGHTTLLVEAKSQRSQGNVASPAVGLSESSSQPTVSTVCKPTAGHIRADEDTRQRSCDTNESCGALPS

SEQ ID NO: 61993 - protein, 338 aa, Zea Mays
MDGSGSWDAIDWNQIEDPRPRRSGQAVKESMDDFLLEDEEVLAQGHGVVLLNNRDAGTLSVTNFRLLFVSQAKKCVIELGTIPLTTIEKLNDDVKLQPLPHLSDKNHPRELLQVIGKDMRIIVFAFIPRTQQKNEVFDALRRYTKPANLWDLYAFSCDPSTIKHDSEPKWRLLREYFRLFRRSLPLQGVEEVSLCNEWWRLTRVNSSYSLCSTYPSELIVPRSISDEDLFQASPFRSGKRLPVISWCDPGSGAVLARSSQPMVGLMMNFRNNADEKLVCALSSRTIDEKGSPRKLYIIDARPRANAIANGAKGGGSESSSNYHKSEQEKNIFAVFNPL

SEQ ID NO: 61994 - protein, 681 aa, Zea Mays
MFDAGSPRPAPHKSNSTSAPSHGYPGSTAPAPVRLPPPKGKGEGNFAHAPNHPNQYHSTSYSPGSALPPAHPPDIPAFRKPKILAPAPSQSLLPPPTNSYCTTPCSDPLTNSPPGMTCLCVLPIKVELRFGIALYTFFTLVPELAQDIASGVFMNQSQVRVMGANAAPDDPEKTIVFIDLVPLGPKFDNATAFSVFERFCNKQVIINHNHFGKYDVLYVLYQGLPPSPPAASMNNGLSNVNGPSLHPLAADVGNYRERKGPVSAMVGNRLESRPISASPSFSSSLVAYKGSAKTFNLVEMERATLGFDESRIIGEGGFGRVYEGILEDGERVAIKVLKRDDQQGTREFLAEVEMLSRLHHRNLVKLIGICTEGHSRCLVYELVPNGSVESHLHGSDKGAAQFDWNARLKIALGAARALAYLHEDSSPRVIHRDFKSSNILLEHDFTPKVSDFGLARTALGEGNEHISTRVMGTFGYLAPEYAMTGHLLVKSDVYSYGVVLLELLTGRKPVDMLRPPGQENLVAWAGSLLTSRDGLESIIDHSLGRSIPFDSIAKVAAIASMCVQPEVDQRPFMGEVVQALKLVCNEGGEFNESTFSQDLHIQDVEVMSRASTDVDVDPTLSAELFTSSARYDAIDAPGSFRRYSSSGPLRVGRTGLNKERGLSTGSSSEHVGLQRFRIDGE

SEQ ID NO: 61995 - protein, 483 aa, Zea Mays
MAAPGSAIKHTFSSLLKQKPPKTSPTKSRGSMAVSMREVDPVFQGAGQKDGLEIWRIEKLQAVPVPKESYGKFFTGDSYIVLKTTALKNGSFRHDIHYWLGKDTSQDEAGTAAIKTVELDAALGGRAVQYREIQGNETEKFLSYFKPCIIPEEGGVASGFRHTEVNEREHKTRLFVCRGKHTVHVKEVPFARASLNHDDIFILDTKSKIFQFNGSNSSIQERAKALEVVQHLKDTNHEGKCEVAAVEDGKLMADADAGEFWGLFGGFAPLPRKTFSELNGKDSTSTSKLLCVNKGQFAPIDCEILKRELLDSTKCYLLDCGSEIYVWMGRETTLEERKRGGSAAEELLREGNRQKSHIIRLMEGFETVTFKSKFDKWPKKADAVVSDESRGKVAALLKRQGFNFKDPAKAAPVKQEPQPQIDCTGNLQVWRVNGSDKTFLSFSEQCKFYSGDCYIFQYTYPGYIGDECLIGTWFGKKSVQVTV

SEQ ID NO: 61996 - protein, 386 aa, Zea Mays
MKRWMLIVDLEEEEDEVVRMRNTPDFFNKIVDSICPTVFGHQEIKRAVLLMLLGGVHKITHEGINLRGDINVCIVGDPSCAKSQFLKYTAGIVPRSVYTSGKSSSAAGLTATVAKEPETGEFCIEAGALMLADNGICCIDEFDKMDIKDQVAIHEAMEQQTISITKAGIQATLNARTSILAAANPTGGRYDKSKPLKYNVALPPAILSRFDLVYIMIDEPDENTDYHIAHHIVRVHQKREEALAPAFSTAQLKRYISFAKSLKPQLSSEAKKVLVESYVTLRRGDSTPGTRVAYRMTVRQLEALIRLSEAIARSHLERVVLPAHVRLAVKLLKTSIISVESSEVDLSDFQDAEDGTNVPSENDAGQPAEEGAAPQQQDAENDQAAG

SEQ ID NO: 61997 - protein, 323 aa, Zea Mays
MMSAGSFLPLFLSLMDLPMLVVALEKVERSSGTLIGSSIATIQKSAAPEMLLALMDEAYTGSAVEEPSGNSGSDDSGPLDLTDPMFLDLLKDENDGIAAKHWISPTISSTLQAAFNSPQSDRLKQSLEMAPRFLTLYFATALRDVNDSLLCALIPVVMSRYAAMFPDKVFSFKVRERLSDFILAAFQRSPNIIAVLKKPITDRLGEAHDNLAKTELALHLCWAIGEHGAGGVGHKDVARELFENLELLLYENLATSRLGLSQEPGSDSMGASSRKSSQARLLCFVVTAIAKLATCHSELLPRARVSLGRSFPNLRQEGLATGL

SEQ ID NO: 61998 - protein, 812 aa, Zea Mays
MAAEQTAEQFRGQARLPHFASPRRYDLRLTPDLPACVFTGSVAVSIGVAAPTRFLVLNAAELDVATGGVSFAPQGSDQVLQPLEVTNVPEDEILIIRFNEVLSIGEGTLTIAFKGTLNDKMHGFYRSVYELNGEKKNMAVTQFEPADARRCFPCWDEPAFKAVFKITLEVPSETIALSNMPVIEEKVLGYFAVPYPLPKMDMVAIPDFAAGAMENYGLVTYRETALLFDEMHSAAANKQRVAVVVAHELAHQWFGNLVTMEWWTHLWLNEGFATWVSYLAADQFFPEWNVWTQFLEESTVGFKLDALAGSHPIEVDINHVDEIDEIFDAISYRKGASVIRMLQNYLGAEVFQNSLAAYIKRFAYSNAKTEDLWAALEEGSGEPVRTLMHSWTKQQGYPVINVKLKDGKFQLEQTQFLSSGSTGVGQWVVPITLCCCSYSRQAKFLFHGKQEDFDLSASGFTDCQKKDGFWIKLNVNQTSFYRVSYDEELAARLRYAIETNKLGAADRYGVLDDAYALCMAGKQKLVSLLHLISVYKDETEYTVLAHIITTSLHIAEMMVIAAPEELVHLKKFLIDFLEPFALKLGWDAKSDEGHLNALLRGTLLTALAELGHEATINEAVRRFNVFLEDRETPLLPPDVRKAAYVALMQTVSKSNKTGYESLLRIYRETDLSQEKVRSLASSPDHDVVREVLNFILSPEVRNQDAIFLLRGVSSGAHEVAWQWLKFQENWDYILGAYSGTLLTYFVNITVSPLATDEHGDEAEEFFKSRTKANIARTVRQSIERVRINAQWVKNIKAEADLGNVLKKLAYKH

SEQ ID NO: 61999 - protein, 193 aa, Zea Mays
MEAGGRRLAAGRVEASPERGRPAAYASAGRPAPARPMRRVQIIYYLCRNGQLEHPHFMELAQHPHQPLRLKDVMDRLTLLRGKGMPALFSWSCKRNYKNGYVWNDLSENDVIYPSDGVEYVLKGSEIFPGCSSSGAVGPAALLVVPPSARRPWMKATEGSGEDASRGGKSRRRSSSSRNSAFGSSFFMCKRKS

SEQ ID NO: 62000 - protein, 865 aa, Zea Mays
MQEASRIMSQGTDGEVAGVVNSHDDKDHVHGTIRRVAEADSEKDEVHGGGQEPIFFQCLDQEQPPDPVHLEDARVEFPSDEDGDGDDVRVSFATADGDRLLEEQAELDLDVEEEQEDTSRYDYVTWMAPEPVSIHERRRRLLQGMGLTSSKDLLRSRNARARLPPDIPRYVPRRQQQLPAAEAPSTTRAAPAVAAALPEFAEHHPNDAVLTRSCSDSRLVVRGGGVRKMQPFRRVCSLPHSLQGSPAHKALSAAARCPLSSAPSKDGGTSKTTAGDTGGGGFRNPNNDREFQANSQLNSAQRSAPLNKDELEQFISHAPLVTQPVRRSQSQPVPGAGTAKGDEKPAEKRRTRWLRNIKLVASAAGLRNDKDGGGGSRSARTPSVTMSKSASTTAAMSSAATGPERLKVHHYGKSSRELTGLYMRQEVRAHEGSIWSIKFSPDGRFLASGGEDSVVRVWEVLDVDASSSAVAHEMEMSTSLPPQPPPASTDGGRSVAAPWLAAQLSRKVRRGRSSKDALPEHVIVPESVFALAEQPSCALEGHQDDVLDLSWSKSQFNPADDGYFISGSLDCKVRIWSVPDRQVVDWSDLNDMVTAACYTPDGQAAIIGSHRGSCRFYKTTDCKLNQEAQIDMSITKKRRSQAKKITGFHFAPGNPSEILVTSADSQIRVFNGISVLQKFKGFKNTSSQISASYTADGRYVVCASEDSNVYVWRRVPGSVGGTGGASISVRAKTWLTSRSYEYFFCRDVSVAVPWPGSPCIPCDASRRVNGNGNSDTPRRQTSSRRDDDVVGAGCVPRGTMSGTMAYHGGQLLQPELSRRESQSSARWHGGAEGGNAWGMVLVTASRGGEIRVYQNFGLPLTNLFH

SEQ ID NO: 62001 - protein, 174 aa, Zea Mays
MALPPGAGAVAPATPFAANPCRLRRASGPPAAALRLGPLFWPWEKVKIGPLSVSPMGFGTWAWGNQLLWGYQESMDNELQDCFNLALRNGINLFDTADSYGTGRLNGQSERLLGKFILEFEGRIKSPDDVVIATKFAAYPWRLTSGQFVSACKYSPDLFVSCLLWKDYNLIGSG

SEQ ID NO: 62002 - protein, 208 aa, Zea Mays
MGYQHPNSEGTMNLHFIFGSWNYSPSPCSFIQKSAVVSRERATQKKYTCRVSVLRQQLPGRGLCLSEGKALFPLPGAGVGEGHRGREPMDSNNLLAAWPVLGPGVAGAVFGAGWWFWVDAVVCSAAAVPFLHYLPGFFASFAALMFNCVNREDIGDGYYSPYDDSEWSGFLGSRCAYGYGAICVDWQCWHPAVRVCVSEWADLLDVPL

SEQ ID NO: 62003 - protein, 321 aa, Zea Mays
MGVRLPVAWSAVLVLLVRAAVAREYAAIFNFGDSLVDAGNLVVDGIPDYLATARLPYGMTHFGYPTGRCSDGRLVVDFIGAGRAAAAAVQGEERDVPPRRQLRDHGRHVAGHALLRGARAGEDGLELGVPAHADPVVPGHEAQAVRAGAGVPGPVPAVAVHRGRVRRERLQLAAVRVPAAGGGARHGAARGGVHRAGRGAAHRGGRRGAGGARGAPHRLLPRLPLHLPQAAGRRLRRPQRLRQGAQHAVVGAQRRAAPQGRGAPRQAPRRAHRVRRLLHAGHPVRPPRREIRYLVYKITEIRPFTHSKKYGGRRRAGASNN

SEQ ID NO: 62004 - protein, 293 aa, Zea Mays
MRQPTSAGGDAGFVRADQIDLKSLDEQLERHLGRRAERGVGLPSGTGSRGGESARLGPEELTPLRRCREDWEIDPTKLVIKGVIARGTFGTVHRGVYDGQDVAVKLLDWGEDGHRSEQEIAALRAAFAQEVVVWHKLEHPNVTKFIGAIMGARDLNIQTEHGHLGMPSNICCVVVEYLPGGALKSFLIKNRRRKLAFKVVVQIALDIARGLCYLHSEKIVHRDVKTENMLLDKTRTVKIADFGVARVEASNPSDMTGETGTLGYMAPEVFGFNHPSVPNSKHAHLEKLSFIYQ

SEQ ID NO: 62005 - protein, 191 aa, Zea Mays
MDSGSDSDGAPEELTAVQGVEKHEEISQVEKDSAIRVTREGKERRKRWAQRRTSSKPDKKAPKEVVEDEGTKQSEETDTMPGMLPTSVIEILAAREKQTFASDSEEENVKQKVQKRKKRMKTAGPETILLKDVRSTQHVKNALDFLEQRKKQVPRSNAVLKNASKALRLLSSKDMVEILWTDVFEWNRSGT

SEQ ID NO: 62006 - protein, 126 aa, Zea Mays
MPSSKNGIMLTKMNEKSVISNGKSGFLEKVASSHLFGSIALLAKSGNLSLTELMLEWSQTSLCFYATSRVDKGLSSELQNQNWRVLSVANECSIEVPGVLNVQRLQQLLLTLATLIKGNYVTHLFW

SEQ ID NO: 62007 - protein, 195 aa, Zea Mays
MAEEPAVVVASSSYEVDLGNLMAYDPSHHVATASREELRQECLRKGTELAQAVADVLFALPPNEDRDGPIIHLPPPTFRLPREKHLPKPKPPTKWELFAKAKGITKRKKNKREWDEQTQSWKRTHGYDRVNDDKDIPIIEAKLTDEPGVDPFAQRRDEKKKRVEKQEKNRLDNLKKAAKSYTACCEGVAHHRNKS

SEQ ID NO: 62008 - protein, 962 aa, Zea Mays
MSTAKVVLEPAFQGAGHKPGTEIWRIEDFKPVALPKSDYGKFYCGDSYIVLQTTCKGGAFIFDIHFWIGKDSSQDEAGTAAIKTVELDSMLGGRAVQHREPQCYESDKFLSYFKPCIIPMEGGFASGFKKPEVDKFETRLYICKGKRAIRVKEVPFSRSSLNHDDVFILDTENKIYQFNGANSNIQERAKALEVIQHLKEEYHDGVCAVAIVDDGKLQAESDSGEFWVLFGGFAPIGKKAISDDDVVLETTSPKLFSISNGQLKLEDAVLTKSILENTKCFLLDCGAELFVWVGRVTQVEDRKAASAAVEKYIIKENRPKTTRITQVIQGYENHTFKSKFESWPVSNTSGSASTEEGRGKVTALLKQKGVDVKGISKTSVPVNDEVPPLLDGGGKLEVWCIDGSAKTALPKEELGKFYSGDCYVVLYTYHSAEKKEEFYLAYWIGKNSVQEDQEAAFQIANTTFNSLKGRPVQGRIYQGKEPPQFVAIFQPMVILKGGTSSGYKKFVEEKGLKDETYCSDGTALIQISGTAVHNNKTLQVDAVATSLSSTDCFVLQAKNSMFIWNGNASSFEQQQWAAKVAEFLKTGVAVKHCKEGTESSIFWSSIGGKQSYTNRNAAPDVVIREPHLYTFSLRNVTLIFHFHFLASIAITSSPFVREAGDDLLTEDMMILDTHCEVFVWMGQCVETKEKQKAFDIGQKYVQHAVAFEGISPDVPLYKVNEGNEPCFFRTYFSWDSARSVGGNKGSGDGGPTQRASALAALSSALNPSSQGKQSDEKPTSSDDSEHTQRASAMAALSSALNPSTKPSSTQTQSHSGQGSQRAAAVAALSNVLTAEGSHSPRHSRSSPTADADKTELVPTSPHQLETGTAEDVRTEPDVSQEQTAKENGGQTTFSYERLISKSTDPVSGINNKRREARLFTIKSKWTYLVDSEFETVFGMTKEEFYEQPRWKQELQKKKADLF

SEQ ID NO: 62009 - protein, 241 aa, Zea Mays
MPQMEGSTDQIAAGWFAKEPASERPVGLPRTGSSSRLNAQAPEFVPRGPPPPAPAVVLPPPPQVIRMFAAPPPPPRGGFFSAPQPRPFEYYAPIGERSGFAAKEQQAPELEAEMLPPAAVKTEPVVDGLDDEVVHKITKQVEYYFSDINLATTEHLMRFITKDSEGFVPISVIAGFKKVKTSVRNNVMLAAALRTSSKLVVSDDGKRVKRQQPFTESDLQELQSRIVVAENLPGSLEKVIF

SEQ ID NO: 62010 - protein, 713 aa, Zea Mays
MTGPLHSSSGHNAAAGGGGKTIEEMYQKKTQLEHILLRPDTYIGSVEKHTQTLWVYEDGAMVNRSVTYVPGLYKIFDEILVNAADNKQRDPKMDALRVEIDVDGCSISVYNNGDGIPVEVHQEEGVYVPEMIFGHLLTSSNYNDNEKKTTGGRNGYGAKLTNIFSTEFVIETADGRRQKKYKQVFSENMGKKSEPQITKCKQGENWTRVTFKPDLAKFNMIHLEDDVVALMRKRVVDMAGTLGKTVKVELDGHRVPIKSFCDYVDLYMKSANCDRPDNFKKIYEQVNDRWEVCVSQSEGQFQQVSFVNRIATIRGGTHVDYVTNQIATHVMAFVNKKNKNANMKLHNVKSHLWVFVNALIDNPAFDSQTKETLTTRQGSFGSKCELSSDFLKKVEKSSVIDNVLSWADFKLSKELKKTDGSKKSRISGIPKLEDANEAGGKDSHKCTLILTEGDSAKALAMSGIAVVGRDYYGVFPLRGKLLNVREANHKQIMDNAEIQNIKQILGLQHGKQYDSTKGLRYGHLMIMTDQDHDGSHIKGLLINFIHSFWPSLLKVPSFLVEFITPIIKATRGQTTKSFYTLPEYEEWRNNLGASASSWTIKYYKGLGTSTAKEGRKYFEDITEHKKDFLWVDDQDGNHIELAFSKKRIADRKQWLTNFQTCSDQYLQWLTALNQARGKFCFAHSRGILLRKLRWLSSLVMCQNTQHTIMVSRV

SEQ ID NO: 62011 - protein, 59 aa, Zea Mays
MTPKSKLPAPHLLLAMAAPCAATAHCTSEPSTPSNLICIRGRYALRRQGSLEDMVVGVT

SEQ ID NO: 62012 - protein, 177 aa, Zea Mays
MTWDDVDAIGTPPPRSDHAAACHADRYLLIFGGGSHATCFNDLHVLDLQTMEWSRPKQQGLTPSPRAGHAGATVGENWYIVGGGNNKSGVSDTLVLNMSTLTWSVVSTAEGRVPLASEGMTLVHSNYNGYDYLISFGGYNGRYSNEVYTLSLKSDFKSTTKEETVSDLGSSNQRLKW

SEQ ID NO: 62013 - protein, 1766 aa, Zea Mays
MNEEIGFQCDNNQGECRAKFSCHLDCFAWVKRDSYLPQGSQGLKAVTKAKLGYDPLEVNPEDMVRFAMEQPQTMASYSVSDAVATYYLYMTYVHPFIFSLATIIPMSPDEVLRKGSGTLCEMLLMVQAFKASVICPNKHQADLEKFYNNRLLESETYIGGHVECLETGVFRSDLPTKFQLEPLAYEQLIGNLDRDLHYVIAVEGKLDIDSVTNYDEVKDAIEQKLVALRDHPIREERPLIYHLDVAAMYPNIILTNRLQPPSIVTDVDCTACDFNRPGKNCLRKLEWVWRGETYMAKKNDYYHIKRQIESELIQSGGIASSKPFLDLSKPEHLLKLKDRLKKYCQKAHKRVVDKPITEVREAGICMRENSFYVDTVRSFRDRRYEYKGLNKTWKGKLAEAKASGNSMKIQEAQDMVVLYDSLQLAHKAGKKLTISYPCVMLNADVARNNTNDQYQTLKDPVNKTYTTHSECSIEFEVDGPYKAMILPASKEEGILIKKRYAVFNEDGTLAELKGFEIKRRGELKLIKVFQAEVFDKFLHGSTLEECYSAVASVANRWLDLLDNQGIDIADSELLDFISESSTMSKSLVDYGEQKSCAVTTAKRLAEFLGDSMVKDKGLHCQYIVAREPQGTPVSERAVPVAIFETDPEIAKHYLRKWFRFSSDANIRSIVDWSYYKQRLSSAIQKIITIPAAMQKISNPVPRVLHPDWLHKKVREKDDRFRQRKLRDIFSPLAKEEGLHNLNRTGDMEDLLISNKDLRKNPSHGLDIDKENNPNGASVGSGLNISKKQQNCMTGLNVPCTSQIQNAASYETVDKGTDYQGWLDAKKRKWKYVREQKKRRRLGAAATFDDPNALLSARHANQLPVNSRNRSTFFQKQELALFRSHWQIIQLASSTVPGHFFAWVVAEGIMFKIPINVPRTFYLNSKAPVTEEFPGRRVKKILPHGRPCFNLIEVVTTEEQFRAEGKKLAAHLAEPDVEGIYETKIPPELNAVLQIGCVCKVDKSAKRRSIQDGWDLAELQMKTTAECSYLEQTFSFFYLYHSLSEGRAVYVFYFPTSFRIHAVIVNPFRNKEISPSFLEKQFGDACQALGSVPENLSFHVDYQTSIDAGSKYAQRMLLEYRQQHSGPVVGIIECPKLQAIKVAIRALDDLPCVTIPSNARDNNYQALGWQATAGRTSMQRCAASTQWFNERISLAKYAHVPLGNFELDWLLFTADVFFSRALRDQQQVLWISDDGIPDLGGTYEGETCFADEVIQPALTYPGAYRRVSVELKIHHLAVNALLKSSQVDEMEGGSIGSFGNDVPPGSNATETDFDDASLCIPAFQVLKQLIQRCISDAVSSGNVFADAILQHLYRWLCSPRSKLHDPALHRLLHNVMKKVFALLLAELRKLGANVIFANFSKIIIDTGKVDLSSAHAYCDSLLRTLQTRDLFEWIELEPLHFWHSLLFMDQYNYGGIQAKTQNVDSSDGDNDIDIVSSWNMAEDLPKDTQDHFVLIVSEFLYIPWKFMKEQVAAQATIRDDTSCTPSVTIMAAENLEGQVIEHLRDKISNYFADKLLRTVSDILHHFKGKSKHESDEPAKSDPHTHKGDAALEFIKHICAVLALDQNVQHDILRMRKNLLKLVRVKEFAPEAQFQDPCASFTLPNVICSYCNDCRDLDLCRDSALQGQEWRCAVPQCGQPYHREQMENALLQVVRQRERLYHLQDLVCVRCRQVKAAHLSEQCSCGGSFRCKEEPSYFLSKMRVFLKVAVSQKFPLLQDCVQWILEAR

SEQ ID NO: 62014 - protein, 308 aa, Zea Mays
MHITVRVGVDEGEGVLKQTNTLPDKPSPATAPATTEQQSNNLPATSSASRLAALQKLPQHFLKFLQTKKSVTKKDVAGINKWRFMKLKEHMQGDTDAENEAYERYTQNVGLLEEAFCPMEEDADVDPEAEATSSSEEERMDLLVSAAKARLKSDNEAANSFRERVATILDQKLKDLRGSQSASEGDEPSGPSLDDRLTPTPMKFSTAQKMGRATELNELLGKLTGARSEDDLKPCRDLAEQLFGKEDGSSVGNSNRVDTETEPGDQESAAAVARRYSVPTLCSRMEVGEDFASEMNDEFCSLTQVAQL

SEQ ID NO: 62015 - protein, 143 aa, Zea Mays
MKQAAAAAAAAQQALLLQQQSQPPLFPVHHPHPGLLAAPQSSFGFIDYHDRRYAALAILSLNGRQLYGQPIKVNWAYTSTPREGTSGHFNIFVGDLCPEVTDATLFAFFSGYSTCSDASVMWDQKTGRSRGFGFVSFRNQQIR

SEQ ID NO: 62016 - protein, 123 aa, Zea Mays
MGWGISRLIGLKAAALLSVACFFQGLGVTLISFPLIYASIIAILVSIASRPSIDLPLLLGKASDGSFPLWSWIIFSPFLLFIHLFVLLRRFVKNEPLYTEVADGVFVGGWPSSVEHLPPAITD

SEQ ID NO: 62017 - protein, 203 aa, Zea Mays
MIWSRAPVFLSPSTMPTPRMWPTAPQASVSARVNPAGSPVCRPESRASSFSPAVALRFADGASPNRPANSISVVVVTMICVRAYAVVSDLVGLFLTYVLIRLHMYTYTYQVGGGADVVAADALRRRPLPAHPHGRQRCHRGPGRGVAPEAVEPGHGGGELGCHVWRLRRRRRTSHLCAAVPSSASAEWCGTGGSGGGAQVRVA

SEQ ID NO: 62018 - protein, 228 aa, Zea Mays
MKTCYGFKRMIKDRPHEWEPGNLNDILVPVQAFHQKNMFEHEIKHDQRFDFTRVPAVLELCHHAGADIPDEILYRSGQMSTTLKTNNQQSAPILPDELRYIGQKTLDAWENLRLGATKLLLVYPSKVCKHCSEVHIGQSGHKARMCGVFKFEGWKGMHKWNKAGVDDLVPQNIVWHRRPHDPPVLVDGGRDYYGHAPAVVELCMQVGAIVPPKYHCMMKTHGLAPPVG

SEQ ID NO: 62019 - protein, 81 aa, Zea Mays
MRAAHVGEGARVSSSAEPGSPVVRGASPRRAGQVRGFGRAGFRPELRIGRTFCHGASSRREPHRLCPDSCEVTNLEEQVGT

SEQ ID NO: 62020 - protein, 219 aa, Zea Mays
MSQAGAFPPGKKITVVFVIGGPGSGKGTQCSKIVRHFGFTHLSAGDLLRQQVQSDTEHGAMIKNLMHEGKLVPSDIIVRLLLTAMLQSGNDRFLVDGFPRNEENRRAYESVIGIEPELVLFIDCPREELERRILHRDQGRDDDNVDTIRKRFQVFHDSTLPVVLYYDRMGKVRRVDGAKSADAVFDDVKAIFTQLLTTQASQGGNASSRRSNPPLCSVL

SEQ ID NO: 62021 - protein, 774 aa, Zea Mays
MQLLESMLSKLVEEFENRLNSQNELVKAALKNGIDNTRSFSKSKVLVETTPNTSGRKMDTADIYCNHKQTKKVASSELALKQYSILQQQSKNVEELKSDLINTRDGMEYMQMKYAEDLNLLGRHLFSLAHAASGYHKVLEENRKLYNQVQDLKGSIRVYCRVRPFLPGQASPSTVASIDEGNITLVIPSKSGKEVRKTFSFNKVFGSSATQDEVFLDTQPLIRSVLDGYNVCIFAYGQTGSGKTYTMSGPKNMTEQTQGVNYRALGDLFKLAEQRKRTFIYDIAVQMIEIYNEQVRDLLVTDGLNKKLEIRNNSQNGLNVPDASLVRVASTMDVMELMNVGHKNRAVGATALNDRSSRSHSCLTVHVKGRDLTSGTILRGCMHLVDLAGSERVDKSEVTGERLKEAQHINKSLSALGDVIASLAQKNSHVPYRNSKLTQLLQDSLGGQAKTLMFVHISPESDAVGETISTLKFAERVSTVELGAAQLNKESGEVRELKAQIAQLKSALAAKDLGSEQIISHDTEAFNIKMPSPGFSIKRQGSCDLLSTQTNFRQPLDAVGNIEARANPTLRQKKPSFDLQDLLTANDSPSWPDSNLRVNFQTGDEREVIGGDWIDKVVVNNNNSVGDWEGDNAALPDFFYQRYHSGMREKQYQRNNTRQKDDHEYEEQRSRFYSTNTDDSDDIDMATSDSSESDALWQQLNVQSMDNSISLSGSKVKKPQIKLRDGSDARTPIHSQIPSASRKVANGSNRSVRQPLSRSDSRRLSSNGRQSGAK

SEQ ID NO: 62022 - protein, 217 aa, Zea Mays
MRGEAVVVAVPVPVPPPSALPVIRPAVPRHPPTVAVAPPPPPVLQLLPASAAASAPRTSSATTTASPSTTTTASHHQAKPHAATTTKLQLSIGPIVTAAAAAAVDCGEDESEAEELRRAVEEKAAADAARERARGEAAAAERALDEARRARQRARADLEKACALRDHAARLLGQVTCHACRHRSLAVAVVRGAAEGHAAGPAVACDSIRGGGLGAGI

SEQ ID NO: 62023 - protein, 358 aa, Zea Mays
MLPCFHAERKEVSRHDNATIQRNALESVSSYEGSMSSEKVPPTPHRIPPSPSRFAPSPQIARVGSVNLSIQQILRATQNFSPSFKLGEGGFGMVYRAVLPDGNVVAVKRAKKDQFAGPRDEFSNEVDLLAKIDHRNLVRLLGFTDKGNERIIITEYVPNGQHGRVLDFNQRLEIAIDVAHALTYLHLYAEKTIIHRDVKSSNILLTDSYRAKVSDFGFARSGPSDTEKTHISTKVKGTAGYLDPEYLRTYQLTPKSDVFSFGILLVEILSARRPVELKRTPEERITIRWTFKKFNEGNTREILDPLLEDHVDDEVLEKLLSLAFQCAAPTRDDRPTMKEVGEQLWEIRKEYGKSVRKV

SEQ ID NO: 62024 - protein, 161 aa, Zea Mays
MAFEKIKVSNPIVEMDGDEMTRVFWQSIKDKLIFPFLDLDIKYYDLGILHRDATDDKVTVEAAEATLKYNVAIKCATITPDETRVKEFNLKHMWKSPNGTIRNIINGTVFREPIICKNVPRLVPGWTKPICIGRHAFGDQYRATDAVLKGPGKLKLVFEEW

SEQ ID NO: 62025 - protein, 354 aa, Zea Mays
MSIVPCDVCVCEFSMDRDPWAKFRRPNSEHPAQSEETRTHQHPGVAGARRPNAMPSPSPAPPPVLPISEHEDEIVAAVDANPVVVVIGETGSGKSTQLSQILHRRGYTRRGAIAVTQPRRVAAVSVSRRVAQELGVPLGDEVGYAIRFEDRTSERTCIKYLTDGILLRESLSNPELKQYSVIILDEAHERSLNTDILLGLMKRLIKDRASDLKVLITSATLDGLKVSKFFSGCPVLNIPGTLFPVEKFYSTDRPTNYIESSLRTAIDIHAKEPPGDVLIFMTGKDDIDKMVSKLEERIRNLEEGSCIDALVLPLHGSLPPELQVRVFAPAPPNCRRFIVATNVAETSLTVDGVV

SEQ ID NO: 62026 - protein, 242 aa, Zea Mays
MADKQLSTIVLKVDLECETCYKKIRKVLRTIQDKMNIETISFDEKSNAVTISGPFDSDMVCNRLCCKAGRVIKEMDVKGNEKDKEGKGDKEDTKSDRAEKGNKDGKAEAETVEFDLDVDGVASAADAKPGKAMAMPPGMTKADLGPLLEKMMAPGATQSVVVPSIWPASAGFVSGYYGCNPGYEAPPSYYGAGAGAVYGGYYGVPVYDSQGWYYGGGARQQPYYPHQQQHCCEDPNAGCSVM

SEQ ID NO: 62027 - protein, 59 aa, Zea Mays
MEDSHPHDGHQAGRLHLGEEEGGARVEGWRCNHLGKKERDWGGCKSGRERGGAAKGVGE

SEQ ID NO: 62028 - protein, 371 aa, Zea Mays
MASALETLCGQSYGAKQYHMLGIYLQRSWIILSACAVVQLPVYLFTEPLLVALGQDPDISAVAGTVALWYIPVLFSFVWAFPLQMYLQAQIKNMIITYLAMLNLGLHLALSWLAAVHLRLGLAGVMGSMVVAMWIPVFGQLAFVFFGGCPLTWTGFSSAAFADLGAIVRLSLSSGVMLCLELWYNTILVLLTGYMKNAEIALDALSICLNINGWEMMISIGFLAATGVRVANELGAGSARRAKFAIYNVVVTSFAIGLVLCRCWCRLARRSRVRQRHVVLPDRHSSWRSPRLRGGASCEGHLDRNAARNAGPDYRASLHNSKDRLGQTGGGRSREAEEMVHGREQKDAGLEGESLSRSFNQLQAWPLWVAD

SEQ ID NO: 62029 - protein, 153 aa, Zea Mays
MYFTVRSYMPSRVKQILPSFCKDMFRILDSLNFNSLIEDGSTMKLKIAKRCLIIFCALVTRHRKHTDNQMPHIVNCAIKISKQSIHLSKLDSLPNRIVSLAFDVISRVLETGPGWRLVSPHFSSLLDSAIFPALALNEKKNGRRILMSICKRI

SEQ ID NO: 62030 - protein, 225 aa, Zea Mays
MRGAKRPLSVVTSWVRRQPPKVKAFLAVVTGMAALVVIRFIVHDHDNLFVAAEAAHALGIGVLIYKLTKEKTCAGLSLKSQDLTALFLAVRLYCSFVMEYDIHTILDSATLVATLFVIYMIRFKLRSTYMVDKDNFALYYVIVEPFTAHYVFALGVARFLSCAHWVLQVLDTRGRLLTALGYGLWPSMVLFSEIVQTFILADFCYYYVKSLVGGQLVLRLPSGVV

SEQ ID NO: 62031 - protein, 511 aa, Zea Mays
MDKERKQGFFAALKEEVVRGLSPSRSRGKSPAPPRSASPARMLIPRRRKAPAAPPPPPPEKVLEQYLGEQLVARSGSLRPGGEALAPLIEGPDAERLAAGDPDAEDSGRREGFGHWVRGHLTRTPSMASSAAGGGGGPGGSSGSFRRSDLRLLLGVMGAPLAPIPSKTAEPLPLLSIKGTPIYILHQYTAASGGYKLLQSVRNAYAMGKVRMVASEFETATRVVKNRGPSGRGAAAVEQGGFVLWQMAPDMWYVELAVGGSKVHAGSNGRLVWRHTPWLGAHAAKGPVRPLRRVLQGLDPLTTAGLFAEARCVGEKKVNGEDCFILKLSADPQTLKLRSEGPAEIIRHVLFGYFSQRTGLMVQMEDSHLTRIQPHAGGDAVYWETTISSALEDYRAVEGVMVAHAGRSAVTLFRFGEAAMSHTKTRMEEAWSIEEVAFNVPGLSVDCFIPPADIRSGSVGEACELPSQPHGERARTGAAVHPSRVAAVERAGTAAGAGGRGEKKVMWRVQV

SEQ ID NO: 62032 - protein, 202 aa, Zea Mays
MIYDAGAGRQDRHNLGMHPPYMIRCCLGMKWRQEDAYRTAADARHESAWGQESISMHRIDRKKSTAWSSRNFKERGGGKTRRWRAELELLVAGSKGSSPDSPLGRSSIEVHLLKSISLPVIHTCDPLPSATRTAVVLVLQIAVAIHKYIRYAPASFCDIHTCPFASGVVRGRGGALPRHNALKTMYEMQLENSYTTFEAKRQ

SEQ ID NO: 62033 - protein, 151 aa, Zea Mays
MDMDRDSVECLSLPDAAMDVDNVDGHPHHGHLGLPLHPAHLPSSGAGRAFPKVNAGGGGAGPAVAGAAGAAGAGGGPPATSVHELLECPVCTNSMFPPIHQCQNGHTLCSTCKARVHNRCPTCRQELGDIRCLALEKVAESLELPLQLQAI

SEQ ID NO: 62034 - protein, 459 aa, Zea Mays
MAAAAILPELGTQVLIPVAAAVGIAFSVLQWVLVSKVRLAPERRADGGGAVKSGPSDYLIEEEEGLNDHNVVVKCAEIQNAISEGATSFLFTEYKQLFLCVAVGLWAGLVIGFITEYYTSNAYSPVQVVADSCRTGAATNVIFGLALGYKSVIIPIFAIAFSIFLSFSLAAMYGVAVAALGMLSTIATGLAIDAYGPISDNAGGIAEMAGMSHRIRERTDALDAAGNTTAAIGKGFAIGSAALVSLALFGAFVSRAAISTVDVLTPKVFIGLIVGAMLPYWFSAMTMKSVGSAALKMVEEVRRQFNTIPGLMEGTTKPDYATCVKISTDASIKEMIPPGALVMLTPLIVGILFGVETLAGVLAGALVSGVQIAISASNTGGAWDNAKKYIEAGASEHARTLGPKGSDPHKAAVIGDTIGDPLKDTSGPSLNILIKLMAVESLVFAPFFAAHGGIIFKWL

SEQ ID NO: 62035 - protein, 868 aa, Zea Mays
MPPPSASASPSASRFAKHWIADVLAGEESVDFSLLKVLVGASSKPLAGAPEATRERVALRSIQEVLSVIAAGGDAAATAGVLSVDGARSCEDGLFRLIREVGSFGELEKDLLPPFSQDIQENICTKKFTLPGISFQLLERVEPWIASMAPQPQMEHNGTEQCVNDQSLRSSHGCVNIEKPVFHTDNAGVQQETMADVVNESETGNLQKDPPAPTFIFHQPCMPESRSYVPPQEDTIDAVGLGARSSERSPIVEGNMSVGSVLASDGCDVPLQGSITEPFFQQDKHDHTVIVGPKSCKRKSPIPSYCAHGDGADGGGSSNQSSKVSIREGPSTHATVTSGFDRISDVLPTDAPESEHLPECITAQDTTISQPDSRKAHLSALQQERGEKVTQDLEDISANIGSVEKDHIHGDLTLPSASVLLSISCNGANQGSKYETNLQPGTATEDMMAFEEQNADKSHLEVSGINKANQALHDDGGVMKNNTVHGGLIVQTAPVSQNCNVTLHDKTSEQENEKNIQKDNCHTYVPGSSQDRGGESAKKTTNELKSGDISSKICVHFNVQDINDTLEDLSQQGLCIKCGEGGQLLECNGCFLAAHSSCFGSSATFEGTNFFYCPVCLYKKATEAYKKAKKTYCETRKNLVAFLGTAQATNQPDKQLNGAQPGAANRDEEPHDEQHSKGCGASKGAHENEVYNLAHQDEEHHQQRKKQKINAIVLQNNNKTPVKDPEKKQQAVNEEARKEGGNDNSSHETGASSPRRCDPPSNQDVEADQDDSLTTSNQSGGSDEIEATSSNDSAKQSSPPWRGMGHNKKGLHEKEPAVSSKSGKGIGKQDQHMHTSRRKKKMHTCKSAIPILLRHLEDANNSVGQKKK

SEQ ID NO: 62036 - protein, 284 aa, Zea Mays
MCELMEELLEHSLEASANPMKVVEYVQKESPLIAVVLKAHMHCEACAEGIRKRILNMKGVQSVEPDLKASEVAVMSKKVRRVEAVVAELECRNSELFGEKGELEEKLVAAKEVLARLTAMTREQEARVFARRRESDLVKEKEAVAKALDAEKAEVARLRLKIEELEKCSGEKDGDIRKMKPAYFANYAHMGEGGVIVGGMVPPEMREVITTEIVSNDERSGGGDQDDPTVNSQEEIKDDEAVIVGTIPCSIGAEVNKKQGEQRPIVYYRRRAKKQGEQPLPEQT

SEQ ID NO: 62037 - protein, 179 aa, Zea Mays
MLKEKLSDLAASAQDECPQITLSGNSTMRRSNFMKLAQITPANRSTLTTKHNFVSTSTKHNLPEDQLSQDTNVDITVDLAIQGHLKEHTFKSLGLKKAKTMDRSKDAVVLDDVSSKLPQNIGSRALARYQCGGPTPESKKSTIATACGKNDGACEKTEGQESNSGPAFLKLVQEKLSPA

SEQ ID NO: 62038 - protein, 532 aa, Zea Mays
MGSSKDLAVGTVAVASLLISSMLGSEVSPTENPVLYLHLAFTATFFAGVFQASLGLLRLGFIVDLLSHATIVGFMAGAATVVCLQQLKGMLGLVHFTTSTDVVSVMESVFSQTHQWRWESVLLGCGFLFFLLVTRFISKRRPKLFWISAAAPLTSVVLGSVLVYLTHAENHGIEVIGYLKKGLNPPSVTSLQFSPPYMMLALKTGIITGVIALAEGIAVGRSFAMFKNYHIDGNKEMIAIGTMNVLGSLTSCYLTTGPFSRSAVNYNAGCRTAMSNVVMSLAVMVTLLFLTPLFHYTPLVVLSAIIVSAMLGLVDFGAALHLWRVDKVDFCVCAGAYLGVVFGSVEVGLVVAVAVSLLRVLLFVARPRTTVLGNIPGTMVYRRMDQYAAAQTVPGVLVLRVDAPVYFANASYLRERISRWIDDEEERTKSQGEMGVRYVVLDMGAIGSIDTSGTSMLDELNKSLDRRGMQIVLANPGSEIMKKLDSSKVLEQIGHEWVFPTVGEAVASCDYVLHSHKPGMAKDSAAAHESMV

SEQ ID NO: 62039 - protein, 316 aa, Zea Mays
MPHLPFLPMMPRLPLPMLPMLSPAELPEEINEVAVDVERDEDESGTFGETFIDYRPPKLSFGFPHPDPVVETSSLSAVQPPEPTYKLTIMKELDETNALSSLQIETIVYACQRHHHHLPTGARAGFFIGDGAGVGKGRTVAGLIWENWQQGRHKALWISIGSDLKYDARRDLDDVGAKCVEVHALNKLPYSKLDSKTFGITDGVVFVTYSSLIASSENRSRLQQLVQWCGSEFDGLLVFDECHKAKNLIPEAGSQPTRTGALEKGGVGALELVAMDMKARGMYVCRTLSYKGANFDILESLLEERMMDIFVSMIAH

SEQ ID NO: 62040 - protein, 214 aa, Zea Mays
MHAKCGNIEQALSAFREIPRPDAYPYTALISGLATHGHENLALSVFERMRAEDIKPHPITFVGVLTACSHAGNVEKGLEYWEAMVQDYGIERHADHYACVIDMLGRAGRIEEAFEMVQTMPMGPHPGALGALLSACKTYDNVEIAEVVANKLFELEPWNTGNYILLSNIYAGKELWEEAERVRSLMRTKLPFKSPGSTWFEDRQREHAKMSIMD

SEQ ID NO: 62041 - protein, 65 aa, Zea Mays
MTRVVVFNLNSSSDTCLAVLRLLVISPIWVMWAKDLKTCQMFDDKPEPEFINIFTSIESRLMLVS

SEQ ID NO: 62042 - protein, 518 aa, Zea Mays
MDKIKYEIREGEQEWVNEGRSRLGLKDKDTKNGPWVAHIRLMKSNHTWHSAPVNNQELLSEMGVFDGELQGSVSGRSVDAHDMLCIAELRKKTASVRRNSAVRHTEEQLVKSLGVKKCISNSKEGKTSPIQELQGKLKGNNNFSRNIVLALSVSRDGQTNLSPDRLVSIGTKRGSSTKVLACKKLAKRRRSKELCNLNSSLDVTRTDQQRGRKEAAEPMKDHPLALECSKSDAQGQLDRTLEDAQNITELSNQENLLPTVSPGFISTSNGKGTNIHDTQFEEEPTATLPIDGSSQCIIDISPLRSCSALERSLPSPPQASFVKRSPVWRVVDAKHVFKELPQQPHFLPLQKYPPTLREGIALGMMVSFSELVKFTMEASIDDSMEWFEDKVRTVSLLEANGFSVQSIQSVLTELIEIKSERARIHGEIGKLSSKLAENTASSSRVGALLDEKDGAAAQLEQELGRIRQESQKMAQEKEKIDAEGVSIKTACSGYEDLCSDAERKFKEVLAQLRRKGAR

SEQ ID NO: 62043 - protein, 309 aa, Zea Mays
MASASLHPASPSHPNPNHSPDADLRSDRPMPDADAVSGGASPTSPEKREEEEEEAPGKEAKPAAAAEEQPTPRKTRLPRACNNKPKPPPPPPSERPRRRAAAASGAGGADETPQCRVVTPLVSEPEAPAELPRWRLRCMWELGSVLNFLHVFRPLLNITGEFTAEDVEAALITPNEILDDVHMPLLKSIPPVTRMAMGRGTWVTVLCRKLKDWWHWVAEGDLPIVASHGTEIETYKTLEPAIRLLILKAICDIRVDKRIFGTSLTVPLSMVMTFLLFVKNGLEGIPLESHTGMKMMRFSGIDCIVKLDE

SEQ ID NO: 62044 - protein, 365 aa, Zea Mays
MVLEYVNGGELFDKIALKGKLTEKEGRKLFQQLIDAVGYCHEKGVYHRDLKPENVLVDAKGNIKVSDFGLSALPQNQQKDGLLHTTCGSPNYIAPEVLLNKGYDGSISDVWSCGVILYVMLTGNLPFDDQNVVVLYQKILKGNAHIPKWLSQGAQDILRKILDPNPVTRIDVDGIRAHDWFKQGYAPAMPFSDDEEDISMDEDSLNITEHNDIQDKIAINQINAFQLIGMSSCLDLSGFFEKEDVSERKIRFASNYSPAYLFEKIESIVRKMGFQVHKSNGKLKVIQDCKGLANSRGQESLLISAEVFEINEYLYVVELKKSSGDCSLYRKLCETLSEDLGTCKSQQFLKQDSIRQDIGRYNSSF

SEQ ID NO: 62045 - protein, 524 aa, Zea Mays
MAPEVMQAQKYDAKADLWSVGVILYQLVTGRPPFNGGNQIQLLKNILRTCEIRFPSDCDLSHGCIDLCRKLLRLNSVEEFVHHPFLSEHAPEKTLSLTQSDIRDGFPRNNSSPTRHSNHSSQEDCMPFPLDDESSGQDEGPVPDSKSLMKSYGFPMGKRLDKTSGQKSPPKHNSLFSRYVLGNNHAPSSQHHGHSGKVTKESKIHEVQGQKVVYPEDSPIIDSLEFVDQEYVFVSGPHLEGSSSSTNASQQLNVPAKYDNSSVSPPKLTFMSAPMPINGLPINRQQLAGTGSFDSHCSPASGTSQGSADISDAMDQPPSDYLTRIRLLEQYASAIAGLVRDEIKGGRHLEAFSIQLIVLATWKQAIHIGNTFVASPARESPSQDIPMKGHIAGASHLPANSKLADDACMQIEKQFLSEVEYAEELASIVGQIADGTEMPDAIEMIFQSALLIGRRGGVDEMFGKAADAMTGYMRAVSMLRFLLVEAPSLALNPPLTLTRSDRNRLRTYIDALNTRLCQMQSQRH

SEQ ID NO: 62046 - protein, 61 aa, Zea Mays
MQWKILIHLLVRLWLRLFDGEGGISLQSHAVVVDSVSGRNAAIFPHTVPVVLTVHKDFSIN

SEQ ID NO: 62047 - protein, 90 aa, Zea Mays
MAGIIIKMLVLCAGWEIARGIVFSSLGSPALCVPVPCFVLFGFSFYASSPVLLQIERIFSSRCVLQIERGYIATQHNTQVHSPYVYPVRL

SEQ ID NO: 62048 - protein, 230 aa, Zea Mays
MQTPTMSTSMATTAPAKPPAPPRQCCRYLLLPSTGHRRSVAAWSAKKKNPWLDPFDDGPDEEFDYQGMFSGGKQEEDPRPPEDPENPYGFLRFPQGYNPELDSLASKVRGDVRRACCVVSGGVYENVLFFPVVQMLKDRYPGVLVDVVASARGKQVYEMCKNVRYANVYDPDDDWPEPAEYTHMLGVLKNRYYDLIISTRLAGIGHALFLFMSSARDKVGYVYPNVNSAD

SEQ ID NO: 62049 - protein, 820 aa, Zea Mays
MDWRKISIAIGTKSSDMVQSLFTLHRTFLSLPEHQATAMGFIALVTGHHNASEKTTTHRGYDHVVRASGKARKHGEKPKSIDGPDLPNCQEAKISGFSDLFQSRYYGVSSELVRYIRNHAVRRRTPRIPAIVSADRSTIDEATPGIENVISSTKRKYEAANNDSAIVPTNKYSPDRVSGFAEAHKAGQDHCLLETIGTGHVATCQQHSKKTRIQQTMEEGQTGVVDHETTMASKEGNKPVDLLNNNQLFIDNISEDDMLVLDVLCSLMNAPSKMPKLEINIPSGSVGKTDSTLSQRREEGHPTIDLSKQGKPVGKSSASKTRKKKYKILDAEVPAVAQNVCGNSLALPETLRVVITDDSSLCTDSGRVGIPEASEDIPAEVPSAQTETKPEVRMSGRTRRKSQMHCKTKHMSCNEGSDNLQAKKLLHCLSSEPLRRWCTYEWFYSAVDYPWFSSNEFVHYLDHAKLSHLSRLTIPEWGTIRSSLGIPRRFSNYFLAVEKENLEDYREKVRKIYAQLSDGSRDFLPADLARPFSIGQQVIVRHPNSRELCDGKVVMMGPDCYKVHFDDPDIGVDIVKDTDCMPVNWLYNRPDNMRSCLSNDAYSILEMDHIPDLTASENEDHAVNGSTVLEGLKSLRLTSDRQPKAESIVNSERPPYRSTSDSPAKSRDCPDNNSAGHYDELESYIAAFAERSLSQARQMVDKAMQANPGGNEDEKVCTSNQVAGCAGPGFEPARGAQLPSDLISNGIATVLSIKSLSDSRHPFANVAGVLDHACSMLRPSCPQNLALYDQIKRDIGIIKTQIFALMPTALGNCSPPVPPM

SEQ ID NO: 62050 - protein, 179 aa, Zea Mays
MQTRRLLLDPAIHEEFTRLKNLVEEKEKKIKELQDNVAAVNFTPSSKLGKMLMAKCRTLQEENEEIGAMASEGKIHELGMKIAVLKSQNNELRNQFDVLYKHMDGVTNDVERSNELVAILQEELEAKELEVTRLKEETLSQKEGTQEAPAPAPAPVEEGDGAGNDLKPASDPLQVKLES

SEQ ID NO: 62051 - protein, 371 aa, Zea Mays
MAAMNGKVLGKCGRNMNSLKRKRENPAAYDADIFHNSELHQHPVNDSAVRFHVDKDRKAKIVCHFNKQVLQSYKNFMSSAPPKRILLRIGAVWKDFPEKIVKLAQADFRAKKTITETGYQNQLFLLDFAHMTFIDTKTGLQRPIAWIDENGNRYFPESFVQDQKIFMKKDFGNGYHDYISVESNGTREMNDQLGTSESSAESSNFGSSTEDVSSPKRARAENNSIIKKYCDMGEAIGENEPCTLLPTACNLLPRQANLGEVSRAQRTIEAVEKLLLQGMGSVIESKDIIGIYRTPLLDDHGQVRYHNHEKHVQVTRCHRGNANVRYAWLPCSKSTVHEMMLNSSLQVHKPPIKCAAYGEGTFLTPANRSDA

SEQ ID NO: 62052 - protein, 117 aa, Zea Mays
MGLLPHRVIPLRPASPSSPRAAAPPSVPPRYLEPLLLLLRRRLPSGQRILLLRLRRPPAGGTSSASSASPHVTQRTSLPKSQEPRRSCHRPPLYVHPLSPDSNSVHPSQFLITFPRP

SEQ ID NO: 62053 - protein, 166 aa, Zea Mays
MSSFGLQVSALIDEKILCMHGGLSPELNKLEQILNLSRPTDVPDTGLLCDLLWSDPSNEATGWAINDRGVSYTFGPDKVSEFLEKHDLDLICRAHQVVEDGYEFFASRQLVTMFSAPNYCGEFDNAGAMMSVDETLMCSFQILKPARKVLGGSTNNKSGFKSSRGW

SEQ ID NO: 62054 - protein, 1081 aa, Zea Mays
MASAEDQAAAAALLGGDPAAFDALLSTLMSSSNADRSAAEAAFHRLRASHPEPLALRLATSLAAPTTPADLRAMAGVLLRKVLSPAPSSDASSNNATPPAPLWPQLSPAGQAALKAHLLSALQSDPPKPIAKKVCDAISELAASLLPENAWPELLPFLFRAASGPDAHNLQESALLIFARLADYIAESLLDHLMTIHNLLASALAHPTSPDVRIAALGAAVNLVQCLPTNSDRDKMQDLLPAMMRALTDCLNSGQEVSAQEALELLVELAGAEPRFLRRQIADVVGAMLQVAEATQLEDGTRHLAVEFVITLAEARERAPGMMRRLPQFVGRLFAVLMQMLLDVEDDPAWHSAETEDEDAGEGNNYGVAQECLDRLSIAIGGNAIVPIASELLPQYLSSAEWQKHHAALITLAQIAEGCAKVMLKNLEQVVSMILNGFQHPHPRVRWAAINAIGQLSTDLGPDLQVHYHQQVLPALANAMDDFQNPRVQAHAASAILNFSENCTPEILTPYLDGIVNKLLVLLQNGKQMVQEGALTALASVADSSQDHFKKYYDAVMPYLKSILMHATDKSNRMLRAKSMECISLVGMAVGKDKFRDDARQVMEVLMALQGAPMETDDPITSYMLQAWARLCKCLGQDFLPYMSVVMPPLLQSAQLKPDVTVTSAESDDDIASDDDSIETITLGDKRIGIRTSVLEEKATACNMLCCYADELKEGFFPWIDQVAPTLVPLLKFYFHEEVRRAAVAAMPELLRSAKLAVEKGQAQGRDESYVKQLSDYIIAALVEALHKEPETEMCSSMLDSLNECMQLSGLLLDEAQVRAIIDEIKNVIIASATRKRERSERTKAEDFDADEGELLKEENEQEEEVFDQVSECLGTLIKTFKGSFLPFFEELSMYITPMLGKDKTPEERRIAICIFDDVAEQCRESALKYYDTYLPFLLEASNDENSDVRQAAVYGVGVCAEFGGHVFRPLVGEALSKLNNVIRHPDARLPDNIMAYDNAVSALGKICQFHRDGIDAAQVVPAWLSCLPIKDDKVEAKVVHGQLCSMVERSDAEILGPHSQYLPKIVSIFAGFVQWNRTCH

SEQ ID NO: 62055 - protein, 167 aa, Zea Mays
MWLSLGGFQEKGPDDSHQYNTHVLIDDTGKVRSSYRKIHLFDVDVPGNMVYKESRFTAAGDTIVAVDSPFGRLGLTVCYDLRFPELYQILRFKHQAQVLLVPSAFTKITGEAHWEILLRARAIETQCYVIAAAQAGKHNEKRESYGDSIIIDPWGTVIARLPEKCGC

SEQ ID NO: 62056 - protein, 182 aa, Zea Mays
MAEDSGAILRHISSVKDMVDKVNEEIEQNIQKTREIESEIVQHSETEKHYLNKESELTKEVSVTEFELNGLIQVAASESDLLKVAEGNLEFQKVAHDVIRKRVSDKMEKFINESMGFQANMLKSSNEDLVLLLNEKSSLEDESAKLKVKINSIHSSSKEYIAEILEEVNTENSAACHSSQEV

SEQ ID NO: 62057 - protein, 261 aa, Zea Mays
MRSNFLGTKFIVHDTRAPHNAGSLVSCERGSRRISSRRVSPKVPTASYPIARVNYELNLLGTRGPRRMNCTMHSIPASTLDPQGMVPEPGQPKQIFVPGSSSFEDSFRSANNTPSSSRFSVADRSLDWSSSRFSETSGLAQQDDDDSDQAKERPLVLCNKEPRWHEQLQCWCLNFHGRVTVASVKNFQLIAAPQLDSEPSQQAQQQTQPSNSSSASDHDKVILQFGKVANDMFTMDYRYPLSAFQAFAICLTSFDSKLACE

SEQ ID NO: 62058 - protein, 175 aa, Zea Mays
MAATSIKVAHLTTLALFSPTPNPFGPKSSKHRARAPPPISISMDPALVDPAHLQALMLACGHSCTLRLSPALSVSAVEPVDLSKLRTALAHSFVVVSVFCGARFFTHDREREGEGQRFLGLEIGLDLQGERRLVGFGRAVSDLGLTASVHDIVVMFSFAVNLPVVANPDCVGRNY

SEQ ID NO: 62059 - protein, 502 aa, Zea Mays
MTLDSYSLNIAFYATARLPSVSVGAQLHSLSVKLGLVSDTFVLNSLINMYSSCSYPTTARQVLDSAPQGACDTVSWNTIISGYLRCGMPNKALQAFGQMVKEPVRLDDVTLLNALVASAKAGKAKVGRLCHSLVVVNGAGINCYMGSSLISMYAKCGLVEDARKVFHGMHERNVVCWTSMISGYTQLGKFKKAVDLFRDMQITGMKADDGTIATVVSSCAQMGALDLGRYVHAYCDVHGLGKELSVKNSLIDMYSKCGDITKAHEIFCGLTKRDVFSWTAMIMGFTVNGLCNEALDLFAQMEGEGKVMPNEVTFLGVLTSCSHGGLVEQGFHHFQRMSMVYNLAPRIEHYGCMVDLLGRAKLLTEAEQFINGMPIAPDVVVWRSLLFACRACGEVGLAEFVAERILELEPKKCAGHVLLSNVYAATSRWVDVNKLRTSMDSCRMSKQPGCSFIEVDGCVHEFFAGDESHLEIDAIYNILLGINELLVAESLYESCDIFLSIK

SEQ ID NO: 62060 - protein, 80 aa, Zea Mays
MVKPCSCITVWTFVNSFLYCIHFFATCSIKYIEVYDSASHVLQKALAFDFAGCSSEKQSHPEILSFCRPRRMSCETRSKG

SEQ ID NO: 62061 - protein, 111 aa, Zea Mays
MLLPHLTRLPKETTHPLLKWRCDICRVEAPTEGHLQQHCAGHKHQSKVATLVVPRTNANSHKARAAAAANPGDVRQYDEKLRLTWVCRFCQSNCTCRSDLESHLRGKRHKA

SEQ ID NO: 62062 - protein, 66 aa, Zea Mays
MCACRASEVGAEACGDRRDPVCPLRAPPADRHRHRPRRVRARLPVPRPAVLLCVDGAVRRASRDEH

SEQ ID NO: 62063 - protein, 82 aa, Zea Mays
MPSDILVVEFGKVQCPWAGHANLRGAEDRPRMIGPCVAGTLGVSLPHAVVELGDTCSLFNDIKLDSVRMLPVLKSGPCLSPE

SEQ ID NO: 62064 - protein, 780 aa, Zea Mays
MEAMTGGKFLQKFRLYETRSKFYLIGRDKSRIHWRVLKIDRLESTELGVDEDPTIYTESECQELLWRIHEGNMLTGGLKFVTKCYGIVGFVKFLGPYYMVIITSRRKIGTICGHEIYSVGKSEMIAISSVTVWPNVAYSRDENRYKRLLCSVDLSKDFFFSYSYNIMRSLQKNITQKNTGQAVYEPMCVWNEFLTRAIRNHLKNTCWTVALVHGFFKQSKLSVSGKDFWLTLIARRSRHFAGTRFLKRGVNEKGRVANDVETEQIVFEDTSDGIPTQMASAVQHRGSIPLVWFQETSRLNIRPDIILKPDVDYKATRLHFENLALRYGNPVIILNLIKTREKKPRESLLRAEFAKAIHYINKSLPDDKRLKFLHMDLSKLSRRKGTNVLALLTKVASDVLDLTEFLHCEISTSTKPDDTSSGERTAAKPHDDRSSSDQTECAAKLAPLLLQKGVLRTNCIDCLDRTNVAQFAYGLAALGRQLHALGLTEAQKIELHDPLADDLMDFYEWMGDTLAIQYGGSAAHNKIFCEQRGQWKAATQSQEFLRTIQRYYNNAYTDHDKQDAINMFLGHFQPQQGKPALWKLDSDQHYNIGRQGTLKEEIGRSFIKRSLSDGNILLENNLPVTSCNNETNNTELLPMQQLDDIREPTDSAPEISICEPNPCSSVNYGRVPGRHSISEERQSYLKRLGYPELHSSNFLDLDLLSSSGNSCDEEVFERSSLINSPMDVVSVESSTSYSEQGHTDEGRDDMDLSRSSSQVSDVRDYSDRFAHWVADGGMLW

SEQ ID NO: 62065 - protein, 825 aa, Zea Mays
MVSCVDDERLDFQDGDLVVFSEVQGMTELNDGKPRTVMCAGPFSFCIEDTSNFGTYTKGGIVTQVKERKILKFKSLRDSIREPGNFPLSDCSKFTRPPLLHFAFIALDKFRKEFGRFPGVACGLDAQRFVEFTASINEATIDYKIEDELDENLLRLFASGSKAVLNPMATMFGGIVSQEAVKACSGKFHPLYRFFYFDSSESLPTHQLDPKDLKPLNSRYDAQISVFGSKLQKKLRDANVFVVGSGALGCEFLKNLALMGVSCSRKGKITITDDDVIEKSNLSRQFLFRDWNIGHPKSTVAATAASAINSCLHIDALQNRACLETEHVFHDAFWEILDVVINALDNVNARMYMDMRCLYFQKPLLESGTLGTKCNTQVVIPHLTENYGTSRDPPEKQAPMCTVHSFPHNIDHCLTWARSEFEGLLEKTPKEVNSFLSNPAQYAASMKKAGDAQARELLEHVCECLEKECCGTFDDCITWARLKFEDYFSNRVKQLTFTFPEDAATSMGAHFWCAPKRFPHPLEFSAADSSHIQFIMSASILRALSFGISIPDWAKDTDNLADAVSKVAVPEFKPKSGVKIETDVKAENISSASVDDAAVIEDLLSRLKACTKKLPPRFQMKPIQFEKDDDTNFHMDLIAGLANMRARNYGIQEVDKLKAKIIAGRIIPAIATSTAMATGLVCLELYKVLARGHPIEDYRNTFANLALPMLTTSEPLPPTVIKHGDMTWTVWDRWSIEGDITVAELLKWLSDKGLSAYSVSCGTSLLYNIMFTRHKDRLSKKIRDVAKEVAKVDIPEYRKHLDVVVACEDDNGKDVDIPLISIYFR

SEQ ID NO: 62066 - protein, 227 aa, Zea Mays
MIFWSIEYVRKMQSYARLPYLQNLNAKSLTRSFVARLRVDDVSAKIMSFSQHGTRAVCILSANGAISNVTLRQSATSGGTVTYEGRFEILSLSGSFLLSENGGQRSRTGGLSVSLAGPDGRVLGGCVAGLLTAASPVQIVVGSFDAGGKKQPKQQQQQQLAPSPAPLNLAPTGVAAGPSSPPSRGTLSLSESSSGAPPSPPHAGASGGHGQQQQQPQPGGFSGLFWK

SEQ ID NO: 62067 - protein, 1046 aa, Zea Mays
MALIQSLLNHTTLETDTVLFKLVTAVPEQQKQPVQSYDTDIFSRHDQKLLKASAFLPTIESPFVPNSFTGKRKSTVGNSPVVQPHVGSRAVHEYQFLPEQPSDTYERASPHYYDTPVEASNSRIPSLTSGSQLLHGSEEAAPSYAFQGHTSGSSLLPPSSRPQVFPVAPTDYEMTQFNSNLSSVPVEGQFDTSQVAAFEDPPVSSERRAYHDEDTSRVERKRKHNEEAKIAKEVEAHERRIRKELEKQDFLNRKREEQRHKEMERLERERRKEEERLLRERQREEERFQREQRRENERMEKFLQKQSRREEKQRQKEQLRKEKEAARQKAANERAAARRIARDYMELVEDERLELMELAAQNKGLPSMLYLDSDTLQQLDSFRGMVSQFPPATVKMKLPFSIKPWTGSEDNIGKLLMVWKFLITFTDVLGLCPVTLDEFVQSLHDYDSRLLGELHVALLKSIIKDIEDVARTPSIALGVNPGGGHPQIVEGAYSWGFDIRSWQRHLNLLTWPEILRQFALSAGSGPQLKKRTVEDSHYHYDNEGHDGENVILALRNGTAAVNAVAKMKERGYTNRRRSRHRLTPGTVKFAAFHVLSLEGSNGLTILDVAEKIQKSGLRDLTTSKTPEASIAAALSRDAKLFERTAPSTYCLKSPYRKDPADSEAVLSAAREKIRAFQNVLSDSEAEKEADEAERDDDSDCDDADDDPDGDDVNIEVEEDKDPLLAVKAQDEVPSTTTVIGIKTKLDSVGNALNSSSSFTKSAKGAPLPYLGRSSAADTSNDSPLGGPSANHEVTPGDSENTQIDESNQIEPWVCALAEGDYCDLSVEERLNALVALVGVATEGNSIRGVLEERLELANALKKQMWAEVQLDKRRFKEEFASRVQYNSGMSFKPDIYQENNMTEITSTRACDAYKENDGHVGTINNCEMLDQHSQGNAGGITYDRNVVGQEIHATPDTSYVQQYAYADKTRSQLKSYIGHRAEQLYVYRSLPLGQDRRRNRYWQFTTSASPNDPGSGRIFFESEDGCWRVIDSEDGTCARERRQQTA

SEQ ID NO: 62068 - protein, 116 aa, Zea Mays
MPSSPTTRSQRWSWIRSPLGHPPRQPVADVPDGKLQQSSSTKTSSRAKFNLPNPNLFYIASQIAAMEPDLVAAGASSSPPPSPVSATSPPWQMRVEQVELIKSFRIRVCQGACHKR

SEQ ID NO: 62069 - protein, 425 aa, Zea Mays
MKAPSLLVQCFPGLLPSKATSCVPIVSEKDLQLPSPAVEIIPSKSVHPYKYAGEKVDVQGLNIFKGKVSVADMIVISPSEVASSKYDGTLKYWESSITLVDILKNEIRDGQLSFRGKRVLELGCGYGLSGIFACLKGASTVHFQDINAETIRCRTIPNVLANLEQAQDRQNRPSESPVTPSRQLLAPNVHFYAGEWDELPTILSVVQPPAAPTNLSFSEDDFMDGCSSHDGSSVVGHDYCPRRSRKLSGSRAWERASETDQADSGYDVILISDVPYAANSLKKLYALISKCLRPPYGVLYVASKKNLVGSNGGARQLRALMEEEGVLGGHFLTEVAIPVVPTVRVVITFTKFVPLIEPEEFFTPMSSPSLLASSGSGSIMAKPNTQKSSYLKWVSKNSRPEAVNLSQVADNGDPFLSIQYILSIT

SEQ ID NO: 62070 - protein, 258 aa, Zea Mays
MSQIQSFSRNNCALLAVLCGKYAENRTPAARSGLEAKRPRPAYPFPELSSAGRLEVHTLFNPTPEQFLEAQRVVQPNFLYIQGQQLEDEKEIGSLVWGDADVSDPQVYLEVPIGEKLAQAVHSKGIPYVIYWRNSFSSYAASHFRHALMSAIQSSVSHTWDAFQLAHASFRLYCVRNNHVQSVKLGPRLLGDAPKINISPPETEMVDEEGSSEVTPAIKIYDEEINMKLLLCGVPCTLDPCLLGSLEDGLNALLNIEV

SEQ ID NO: 62071 - protein, 579 aa, Zea Mays
MSTDVVVIVAVFILIGLFCMQHYGTDKVGWLFAPLVLLWFILIGSVGLVNIRKYNSSVLKAYNPVYIFRYFRRGKSEIWTSLGGVMLSITGTEALYADLCHFPVLAIQFAFTLVVFPCLLLAYTGQAAYIIDNKDHVVDAFYRSIPEAIYWPAFIIATLAAVVASQATISATYSIIKQALALGCFPRVNVVHTSKKFLGQIYIPDINWVLMILCIAVTAGFKNQSQIGNAYGTAVVIVMLVTTFLMVPVMLLVWKSHWILVVIFLVLSLTVELPYFTACINKVDQGGWVPLVIAITFFVIMHVWHFCTVKRYEFEMHSKVSMAWILGLGPSLGLVRVPGIGFVYTELASGVPHIFSHFVTNLPAIHSVVVFVCVKYLPVYTVPAEERFIMKRIGPKNYHMFRCVARYGYKDIHKKDDNFEKMLLDRLLIFVRLESMMDGYSDSEDLTVMEHKAKRSTRSLQLIEKAGGNNTMSSTGDLSYSSSQDSIVLAKSPLTGNSLTRYSSQTPGDELEFLNRSKDAGVVHFLGNTVVQARRDSGILKKVAVNYVYAFLRKMCRENSVIFNVPHESLLNVGQIYYI

SEQ ID NO: 62072 - protein, 356 aa, Zea Mays
MRSDGESLRGGGSTMARASPSVPTRRSSTRVVSGRKDYLEIPWAELRSMVEPSFAERSLIYHKDYLSDATIVTSSAVNITEHAVLTADGHSLPYDYLIIATGHALASPASRAERIKEFQRDNGKIESSESVLIIGGGPTGVELAGEIVVDYPGKRVTLIHRGPRLLEFIGDKASKKCLDWLTSKKVDVLLQQSVELGSLSDTEKVYKTSGGETVTADCHFVCIGKPLSSSWLHDTILKESLDSKGRVMVEKDLRVKGFNNIFAIGDITDIPEIKQGYLAQKHALLVAKNLKLLTKGLPNSKLATYSTGYPLALVSLGRKEGLAQFPLLTLSGCLPGMIKSGDLFVSKTRKQMGLNG

SEQ ID NO: 62073 - protein, 474 aa, Zea Mays
MATSSTLLLTFPTLDPRTGEVIARVAEGDSEDIDRAVAAARRAFDEGPWPRMTAYERCRVLLRFADLIERHAEEVAALETWDNGKTLAQAAGAEVPMVARCVRYYAGWADKIHGLVAPADGAHHVQVLHEPVGVAGQIIPWNFPLLMFAWKVGPALACGNTVVLKTAEQTPLSALYVANLLHEAGLPEGVLNVVSGFGPTAGAALCSHMGVDKLAFTGSTGTGQIVLELAARSNLKPVTLELGGKSPFIVMDDADVDQAVELAHQAVFFNQGQCCCAGSRTFVHERVYDEFVEKSKARALKRVVGDPFRDGVEQGPQIDGEQFNKILRYVQSGVDSGATLVAGGDRVGDRGFYIQPTVFADAKDEMKIAREEIFGPVQTILKFSGVEEVIRRANATPYGLAAGVFTRSLDAANTLSRALRAGTVWVNCYDVFDATIPFGGYKMSGVGREKGIYALRNYLQTKAVVTPIKNPAWL

SEQ ID NO: 62074 - protein, 57 aa, Zea Mays
MRSEGGRTHAPPSVPRTGTPNCTGCLPSKASGSADGFLRSSVPVPCPRRCRDGVGRQ

SEQ ID NO: 62075 - protein, 235 aa, Zea Mays
MLVFEYLPNASVSGHLYDTGKETMTRLEFKQRLSIAIGAAKGLSHLHSLAPPLIHRDFKTSNVLVDENFIAKVSDAGIHRLLRGPDGGAVAALASRGVFQDPEVHSSAQAQLSETESSDVYSFGVFLLELVTGREAAGLMPPGSSKDSLAQWMEARFASNELVDPRLGGSFTSEGMAEVVGLASSCLSPSARRRPRMRLVAAELDRILEKEMALTTVMGDGGTAIVTLGSQLFTS

SEQ ID NO: 62076 - protein, 167 aa, Zea Mays
MLYLVKNLLQYYIFEYVDAPAYQILKNLNIISTGVLYRIILKKKSDHVLQTPIRGWVMAIVMALLSGFAGVYTEVIIKKNPSRNINAQNFWLYIFGMLFNLVAICVQDFDAVMNKGFFHGEVYMSTTIIWIKNISKMLPAQTMMQEELLPSLKMQKSECLLTNLKTP

SEQ ID NO: 62077 - protein, 225 aa, Zea Mays
MANDGDDGQSQDYLFKIVLIGDSSVGKSNLLARFARNEFYPNSKSTIGVEFQTQKLVIDGKEIKAQIWDTAGQERFRAVTSAYYRGAVGALLVYDISRRQTFDSVGRWLNELHNHSDMNVVTILVGNKTDLKHAREVSTAEGQALAEAQGLFFMETSALDSSNVAAAFQTVVKEIYSILSRKVFQSLEQKKRDLQHTKQEGVSVTRAEEKRAAVAKQRESRGAAG

SEQ ID NO: 62078 - protein, 259 aa, Zea Mays
MIQPVLDHIGDEGLKAVSFSCPDLQELRVYPSVVAPRGTVTEEGLVALSSCRKLQHVLFSCVRMTNTALMTIARYCPRLTSFRLCIRKPRSADAVTGQPLDEGFGAIVRSCRGLRRLAMSGLLTDSVFLYIGMYAEKLEMLSVTFAGDTDDGMVYVLNGCRNLKKLVIKESPFGDAALLAGAHRYESMRSLWMSSCQITLGGCKALAATMPNINVEVIGGASFGAMDGGVSGARKVDMLYLYRTLAGPRCDTPGFVSIL

SEQ ID NO: 62079 - protein, 746 aa, Zea Mays
MSASEFRIPYQQVSSSQPVENVNQFKTCRCGEGDPNSTSETGDSPPASCPNCQVLKSGHLLLSSKGIGWTSWKKRWFILTRASLVFFRSDPNVPPPRGAEPIVTLGGIDLNSSGSVAVKEERKLLTVFFPDGRDGRTFTLKAETTEDLNEWRNALESALAQAPSVANTMGQNPIFSTDVAAEPAEAPAEQSEDSSVIGRPAEFALVDADGSPSFLEKALKFIEDHGVKVEGILRQSADVEEVKRRIQDYEKGKNEFSPEEDAHVIGDCIKDLEEGSCSSDAYTESEDDDVDKEYSTDNDINDDDDGSYDSGEDDIEEDLDYSDDSEHDSKINTNVKDGKVKNNISETAEVAQAKGASHMETNSQSNQKQESCGPNGSKDRILRSTSRSSSSREKSMEKSCSSAHRGKRTLWGRTSARKDLSTEEIECCSDDESLIEKLESNKVDLQSKIAKEAKENAILQSSLEKRKEELHERRLALEKEVENLREQLQKERSLRTSLESGVMNLRRGQVSLPSTTDSKTKADLEEVATAESDIINLKQEVSDLRGQVSGQQLCCESCNKRLLNTDRLGGPESSSVAASPTIGSDSASGMVKKEQKTFQGDIEQSRKQTAQDSPSSTDKPGHEAVGGSSQRAPQRRQSIAREGQDGWSSSSSNSKWNLAQKQYSNSPLIRGLHGSSRLEDFGGSIPPAASSALVKLTNRLNFLKERRALLASEMQSLDLGRPPAAAAAPSAKSPTPKGHERKKSRD

SEQ ID NO: 62080 - protein, 530 aa, Zea Mays
MDEDDNDDGDDEEKQIRILQETTGMPREAFDGKKRKQPSELHLQHGDGDGPVTIHDLLDNVQGKPGYSKIRKRLQQQEKKPMVVLAPLPKVERDKIERSVTFQKSKNELTKWEGIVKSNREAPVLYFENDTNLGVNTVAAIASEFKPRTEFEKKIAEITQSTEIIEAHKNDGAKILELNKIDAEDVREHQNRLAKMRSLLFRHEMKAKRMKKIKSRTYHRMLKKDKLKAASADFEADPEAVTDHARKQEFKRAEERMTLKHKNTSQWAKRILKRGLSVQDEGTRAAIAAQLQQNTLLTRKMNSMKDDSSSEESSDDDDDESDSEAKILNRGKEKILKALEEDNEIPNSGVFSLPFMERAMKKREEATYEEARQALEEYDDSLKKLEDNNTEQNEDKVKVSGKRTFGPTKNTHEELVKRKKLQDTENSSDSEYDSEPAQPLSNNEVTMKHDDTQFGSALLDDEPQNDIYRNFTDIIKNPGPKTTFEVGMLAGDSWKKGSHSGILRSRATKERTTAMPMTLPINPKYRFLLL

SEQ ID NO: 62081 - protein, 358 aa, Zea Mays
MKQSPSQNQSPKTPSRSAPEPWLVAAAAASASDDSCVNDVDSFARTVAAVKSKAASCARPDMLASVLSHYAAKWLPDVAPPTSSSASGRFLPPESPTATWLKKRLLLESLVAALPPDPAAGGGGCCAAAVADDGITCDFLLKLLRAGSMVGADAALLRDLEARAARRLDQATLGAVMIPAFGHGGEHAPALLLDVPLVLRLVRGFLKEGGGSKAGGGAALVGGGGAAAARVARLVDAYLAEAALEAGLRPAEFEELARAVPAHARPADDALYRAVDTYLKVQCNALQAQVDRLGSERRRRGGGGGGFFKWSAFWFGGGMGADVARVDDSESGMERRTPPKGKKSATATPNAKWRKSTS

SEQ ID NO: 62082 - protein, 69 aa, Zea Mays
MQLELQINQNFALRLEYPTVILGVGRNTFEHNIQQTKHVLHFVSKYYVSLQKQTLFWICYMISMYYYVM

SEQ ID NO: 62083 - protein, 483 aa, Zea Mays
MPPTGVQVGSTFKGVGDPTTPMWASSEGCERLTIAEAMSSDDMPGIPALPVSWKDGETILQLIGGDVAPENWQGGDGAAAYRFGPGPAVLNLTYTGNETMVTIQNVISVIEGGEEPERYVILGNHRDAWTFGAVDPNSGTASLLELAQRLSELQKKGWRPRRTIILCNWDAEEYGLTGSTEWVEENRAMLTSRTVAYLNVDSAVAGHGFYASATPQLDELLKEASKQVQNPDNGTQSLYDLWMSSNSSPLIGRLGGGSSDYSAFVQHIGIPSVDMAIGSDYPVYHSLYDDFIWMEKFGDPLFQRHVAAASMWGLVALRLSDEEILPFNYSNYATELENGALGISERVQGMPVSLSPLHKSIKEFRKAVAKVDSELKALQTWKIWSPWRNNPLKVRDINDRLMMTERAFTDREGLSGRPWYKHLIYAPSLHNDYGAEVYPGIGDAIERVKKTNTSESLQSIQHEIYRVSRVINQAALVLSGGLT

SEQ ID NO: 62084 - protein, 51 aa, Zea Mays
MACGMCSASTVERATGFCFFEAQDTKDLPKNWQVPDVLFLLILHPSQSTSE

SEQ ID NO: 62085 - protein, 141 aa, Zea Mays
MLGTYAYTADSRRHPGYLSRQIHSSTCQQPRVAGDRAPVVGSSTASGGDSSPPAIQLPQPRLSHHTPRRGTVRTYFTLPPDHPFEPVPLLPFPQHLLPRAAPNVWPPQICIPMLTPMQTQPHDARCTANTLPTSFHCDGSG

SEQ ID NO: 62086 - protein, 582 aa, Zea Mays
MKTALRTAGCGDKGAIWTCVAAPLPPPQGLNATAAAAAWDGEAGQFLPWKKVEDAGCEDALTSAVSALSPEGLPSVDFGAAELGWWLDGTCANATAGGQCARNATCQDIETSRGTRGHRCACVVAGMSGDGYAAGDGCYYVAERSAKKIVLVVAAGVAASVAAATGALLLCWLQCRRRKAGRSASERLAAMRLLSEAATSSGVPVYSYGEIARATNSFSHTHRLGTGAYGTVYVGKLPGTGSAPALVAIKRLRRRHHHDEDEDAAAEAALLLNEIKLISSVSHPNLVRLLGCCLDGGEQVLVYEYVPNGTLSQHLHSAGASTGGRGALTWRARLGVAVETAGAIAHLHGMRPPIFHRDVKSSNILLDAALRPKLADFGLSRAVDRLEAARSHVSTAPQGTPGYVDPEYHQNFHLSDKSDVYSFGVVLLELVTAMKVVDFDRPPAEVNLASLALDRIGKGQVAEIVDPALLGAGEDWVMGSVRHVSELAFRCLAFQKDVRPSMREVAAELQRIRSAAPDGADPEEPAGSRLRPVSMMDIQIDVSLGGPDTAAKKAASPVSVQEVWVSDRSSPSTNGSMPRFAA

SEQ ID NO: 62087 - protein, 51 aa, Zea Mays
MLRGGLLTGEQSTSLGRQSSSVGRITSKSETSKLLRTQVFSRRKNYWAGAR

SEQ ID NO: 62088 - protein, 123 aa, Zea Mays
MMPVFLPRYPELCKVPTNPRWCPYAKGSPREGQALRSSNSVKSRGPSPRASGAPLPAPLGRSPSSPLSSFRPKRRGPRFLRYTVATVTQTRLSRSRKTLAPLGTITTARARAEGCVVLQNSPN

SEQ ID NO: 62089 - protein, 364 aa, Zea Mays
MVIRETFNQSQGINVTGMCEDFLQLAIGQECSLCLSLELSGQNNNAGTVGQQDHMDTNYPGNLAVATVNGKESSNKDVRGFPNPKSLEIYLLHMFHEILRKLREKSRHVVRYQSSAQAAPDDCGLLSHFCMTVAHRIFSNKVHLELESVVSRVPYLHLRSLPTWHSRTSSWSLCLKVPQPILATGRVTKPSDYHELKYKSRSQFSTKVILKDGQISLMGEGSPSIVGSLTGKPSDSRLINSYNCDLEDLPMMLLQQVASQVIHWLHDEAMILGMNVTRDFLCLYFDLGQGETLGLLAHVDPDDTYGCISWYLTVEHPMEEGKMSAGSPESEKRRFLGYLSLEVLYSTLMDLIKLCSTSDQIRAS

SEQ ID NO: 62090 - protein, 854 aa, Zea Mays
MSSLQLLQLTERGRNLLSSRRRTLAIVSGAVLAGGALAYAQSGRWKKHQEANSCSDANSHSSNNGRTSQNGIDGKLVKTRKKKSGLKSLHFLAAILLKKIGPNGTNYLIGLILTAVLRTAVGHRLAKVQGYLFRSAFLRRIPTFTRLIIENLLLCFLQSTLYQTSKYLTGSLGLRFKKILTDLVHADYFENMVYYKISHVDHRITNPEQRIASDIPKFCSELSDLVQDDLAAIVEGLIYIWRLCSYASPKYVLWILAYVIGAGGTIRKFSPAFGKLKSTEQQLEGEYRQLHSRLRTHAESVAFYGGENREASHIKQRFRALVKHLNVVLHENWWFGMIQDFLLKYLGATVGVILIIEPFFAGNLKPESSTLGRAEMLSNLRYHTSVIISLFQSLGTISISSRRLNILSGYANRIHELLDVSRELSGGRDRLITQNSSDGNYISEANYIEFSDVKVVTPSGNVLVDNLNLHLESGSNLLITGPNGSGKSSLFRVLGGLWPMVSGHIVKPGVGSNLNKEIFYVPQRPYTAVGTLRDQLIYPLTADQETEPLSYGGMVDLLKNVDLEYLLERYPLDKEVNWGDELSLGEQQRLGMARLFYHKPKFAILDECTSAVTTDMEERFCKRVRAMGTSCITISHRPALVAFHEIVLSLDGEGGWDIQDNRNGSFSPEVEFDVLKASESDRKSDALTVQRAFITSTKGNASMKPKKHSYSTEVIASSPSMEIEHTVQSSIVTQLQCSPRPLPVRVAAMSQILVPKLFDKQGGQLLAVVLLVFSRTWISDRIASLNGTSVKYVLEQDKAAFIRLAGTSVLQSAANSIVSPSLRNLTSRIALGWRIRMTNHLLQYYLKRNAFYKV

SEQ ID NO: 62091 - protein, 694 aa, Zea Mays
MARLFRESRRDSSHSSSSNGFLPPAAASSPSSASAIPSPFPDLGVALSAADLREAAYEVLVAASRTTGGKPLTYIPQSSSVATGPPVSPASSASSASSASLQRSLTSAAASKMKKALGLRSSASSKGVGSPGSGGKAAPPRRPATVGELMRVQMRISEPADARIRRGLLRIAASQRMEEADSKRSSRNPTPVLSILAKDIGDLATKEKNIYSPILKTWHPLASGVAVATLHSCYGNELKQFVAGLTELTPDTVQVLKSADKLEKDLVNIAVEDSVDSDDGGKSLIREMPPYEAENAIANLVKVWIKDRVDRLKGWVDRNLKQETWNPGANRDNFAPSSVEMLRVIGETLDAFFQLPIPMHPALLPDLTAGLDRSLQLYVAKAKSGCGTRNSFMPQLPPLTRCEVGSKLLFKKKEKPQNLQVRVSQNGAANGNDPLGLPQLCVRLNTLQYIRGELENIEKKIKTSLRNVESAQADVTDGLDIKFELCQAACLEGIQQICETTAYKVMFYDLGHVLWDTLYVGDTASNRVEVLLRELDPVLETISGMVHNKVRNRAITALMKATFDGFLLVLLAGGPLRAFTRQDSQIIEDDFRALRDLYLADGDGLPEELVDKASSQVKNVLPLFRADSESLIERFRRMMVESNRSASKNRLPLPPTTGHWSPNEPNTVLRVLCYRSDETATKFLKKTYNLPKKI

SEQ ID NO: 62092 - protein, 524 aa, Zea Mays
MGSGSSKATTSSSSPTAAEAGGEVKRPNGSGKGRRGRSLLPLPSSSCFRGSTTPCEGDAAAAAVDFEGGETASLTSLTHTVKSHEDVLAMPKSHPSEGEAPPSSDSERDQDDDVLQNAATSTSTAANQLPNPSRRSRPRFGVNFGLSRAVSLGSSVACSILSSGLPPSANPGEGRGDVHDSSETGISQQGSAPTSGIDSTLDMLRDSVTAQARAAHQARRNLIESEDASFRSSYRRMGSHEPFEGSVRFSRTLSVGRLRDRVLRRPPFSDGLFTPSLLYDRAVWPSGNASARQDSAVMQRTNSDRSSEPRSDPSTSDMYNSSSERQASNGDLLERRSAFLERRRRIRSQVRALQRLGSRFENLSGHERSCILSGQHRTGNCNCRTGSRQGNPDEETSTRASISRIVMLAEALFEVLDEIHHQSAALSSSRPSFSSIGSVPAPREIVERLPSKVYRKPLKYQSEEAAQCYICLVEYEEGDCLRILPCHHEFHLTCVDKWLKEIHRVCPLCRGDVCRSDAPIGKTS

SEQ ID NO: 62093 - protein, 139 aa, Zea Mays
MHQRKAEMARQSQAFIALPGGYGTMEELLEMITWCQLGIHDKPVGLLNVDGYYDPLLALFEKGAAEGFISTDCSQIFVSAPTASELLTKMEQYTRVHQEVAPATSWEISELGYGRGGDAGAATPPAAAAGGAEEGKGGS

SEQ ID NO: 62094 - protein, 1331 aa, Zea Mays
MEAEVSAPADLKAPDKTTVHGDDKENIPNGNANLQVKEADNDEDDGTRSDGFELIDVKQNFDSARVEEEMAAPRSTTVDTSPVTEESETQEDKTTAHEEQSVATNTRHLESSMLNQQTEQLEKLTMRIEELESENDKLVKDLTEAENKQSLHYSCLQEAQCSLAMKDKELAEVTESLKDLGSELGTSKKRIQEIEAELDSSADKLCKLEELKDERSLHAAQEAKRASELDKMLELAQSNMKEMEKHIGSLQEEVKGYQDKAADHQQIEESLRNTISELKVVQEALELSKSQVENLKQKLASQDTDFSKLTEELNLHCSSEESLKEKSLKLETELTTVLEELQAKGGLDKLKDENKTLQGSLVDLNSKLSEKDSILHQAEDELSKAQLVLLEALSQKEELELNLNSLSEQHGKSKAFGENANQKILDLEAQIQAMHAAEQALKFELKEAEASVQAAEKKGSDLEQQLSEIENKFVKSSEEIELLKERIQQEAAVSAERGMQLQETVTSVEGYKEKIIELQSSLGSSVSKNQLLEQEVMELTDKCSEHQEQAHSVRQRSLELEDLLHTSKTHAEGVYSRTQELEQELNNTYEMFKGVEEELEQYRSKASQLSDDLEAYQTKAASLEAVVEAASEKEKEFMESLSQITEEKKKTESRNAEIEAQLQEALEAVGQKEAESRNLNEKLVALESEIESSMHVNEALKQEINAKLVMVDELQEKCSFISSEKEEVAEKLSIHEEKLEHLTEEHSRGLELLSVAESRNKETESQLREVLEKLAQKEAEVTDLTEKLALLEAENEKMTCLNEALKEVDAKLVMFDELQERFSSTLAEKEEAAEKLAVHERTISQLTEVHTRTLELHSVAESKNEEIGAQFLEALETISQKEGEVKESSSQKIKILEEQLAETHSKVEHFLTEKESLVQETSSLNKEFEVHQNKLNDLQLALAAALAEKEAAFEEIHSLCKTLDGMIEHKAELEIQVSSTIQEHEELKSKYQNTMEEKQMLSDKYETAKKELEDAIAKLEEEMNVDKSEKESHISKLERQITLSEIKYMEEIKTMQVETTEKNEALTAKMQEHTDLQHEKHELEQQLLEVRKELDGAYHTIVNQEEQASLREIKWDTFRIYSEDRLEAEQQRAEELELQVAALKQQLQEAEVHYKQKEEQVSLREVQWEGDQNHSLNELKSQRQYATDLEKQIEDLTQKLRSADAHYKQKATEERDKLAEITTEFSKLTHKVSKSVELEKKVQDLEQKLQLAYSKSDEQATDVLESRSREFSLDSLSSLVKQQDRTQAADKASPSPTLQEVQEPSGTMAFKFILGVALLSVLAGVFLGKRY

SEQ ID NO: 62095 - protein, 77 aa, Zea Mays
MLLKSVLLLAMMKDQFANYVVQKVLEICDDQNRELILSRIKVHLNALKRYTYGKHIVARVEKLIAAGERRIGAPSSC

SEQ ID NO: 62096 - protein, 518 aa, Zea Mays
MDPEQTFLRVHARLSGTLSQLLTPRIRLVLEYLYLAGAVALFCLLVVMHTNFVQQPGCSSEFSGIEFGEAQLVQIKIISGGLWSSRGASYIMDLQNLGRSAEKILEVNGDKFNILASKFWSTWVGPGARRSLPDLKAAGEGSVHHPLSAKESFKAAVTFLFRKWYLRAVSFWKNIKQLSENTLQLMVRSNWNDFLHIIKDLQLPSMDHLISTIVQWFERRSKAFEPTYLYGVEKGYFLLSEGAKTRHGVRTINITISARNPCFGNRWQQLLINSIVGYDTILTNSLVNSPGHGYLYNFQTKELYDLSYGHEPPEGPTRFGDYFVTKCGVLLMSLFVFFTTTMSVSFTLRETQSRMLRFTVQLQHHARHHLPTFQLIFVHVIESLVFVPIMIGILFFLFEFYDDQLLAFLVLTLVWLCELFTMISVRTSISMQFFPRFFLLYFLVFHIYFFSYTYGFSYLAFSATAAFMQHLILYFWNRFEVPALQRFMRSRAHIHQQTEMFVIMVKITPIHLEMEMIR

SEQ ID NO: 62097 - protein, 364 aa, Zea Mays
MVTMRCDISTCSSSHVSLLVSGSAQTCFDDQLLESHIKNEIIEKSQLVRALSNSEDKLPSSEPLTSMSTACGASTFEVWMSLPKWAAQHLAPDISYRSLVALGIGCINGTPVASFERRDADRLLFFCTSQCKDLANENGPYFHLPRWSASLTKDRTKVGSESKQNLLGANGVLEDKKHMMEGPSSWSAVKAKLKPATMRPIPHSRKQQMHPFMGFPETSLHETSIVKPSLPAAPTVKHNSVSSATTTHRKSTSGPSHTPSVIQLNPLPMKKHGCDRLPIQVCSEEDFLKDVMQFLIQRGHNRLVPHGGLAEFPDAILNAKRLDLYNLYKEVVSRGGFYVGNGINWKGQVFSKMRNHTATNRMTV

SEQ ID NO: 62098 - protein, 745 aa, Zea Mays
MASAKSSRSRPAGHSGVFPVGSAAAVGSGGGGGDGGVQLADKLKIFKTDNFDPDAYVQSKCQTMNEKEIRHLCSYLQDLKKASAEEMRRSVYANYAAFIRTSKEISDLEGELLSIRNLLNTQAALIHGLSEGVQIDSLTSGPEGSAEDDISKVEDQEPSEIQKWSADFPDMLDVLLAERRVDEALDALDEAERVAVDAKRKQTLTAAEVSALKRSISDNRQRLADQLAEAACQSSTRGIELRAAASALKRLGDGPRAHSLLLSAHNQRLQCNMQTIHPSSTSYGGAYTAALAQQVMSFALLVKRHVLSSCAAAGGLRAAAECVQISLGHCFLLEARGLSVSSVLLKQFKPSLVQALDANLRRIEESTAALAAADNWILTYPLTGIRPLTRSSAANLALQPKLSSSAHRFNSMVQDFFEDIAPLLSLQLGGSSMDGITQIFNSYVNLLISALPGSMDDEANLDGLGNKIVRMAETEEQQLALLANASLLAEELLPRAAMKLSSINQSMDDLHKRGTDKQNRVPEQREWKRKLQRMVDRLRDNFCRQHALELIFTDEGDTHLSAEMYISMDNTVEEPEWVPSPIFQELYVKLNRMASIAAEMFVGRERFATLLMMRLTETVILWLSEDQAFWEEIEQGAKPLGPLGLQQFYLDMQFVIIFGQGRFLSRHVHQVILDVIDRAMAAFSATGMNPDSVLPGDDWFMDVSQEVVSMISGRGRVANGDREVNSPTASVSAHSISSFKSHGSS

SEQ ID NO: 62099 - protein, 401 aa, Zea Mays
MAAAADSASDQNPKDAERHVLTAESDADFSEEDYDEDGEEEYEEEEELDGPAAAAAERERMQSVLRRLSSDPVGIRVHDVIIKGNTKTQDELIEAEVAELLRAAPTVQDLLRAASVATARLHDLDIFDAVKITLDAGPPELPGTTNVVIEVVEVANPLTGTAGVYSKPEARSWSLEGSLKLKNLFGYGDIWDASGSFGWDQTTEVGVGVCLPRFKSIPTPLMARASLSSQDWLKFSSYKERLLGLSFGLLSTRNHDLSYNLAWRTLTDPSRVSSKAIRRQLGHNLLSALKYTYKIDKRDSHLRPTKGYAFQSTSQVGGLWNSKGLRYFRQEFDVRGAVPLGFYSAALNVGVGAGVILPLAGGFMNSTSSVPERFYLGDIQRRWNPWPRIPYCWKPCETVGG

SEQ ID NO: 62100 - protein, 861 aa, Zea Mays
MSQTNWEADKMLDVYIYDYFVKRNLQATAKAFQAEGKVSSDPVAIDAPGGFLFEWWSVFWDIFIARTNEKHSDVAASYIETQLIKAREQQHQQPPQQQQQQQQIQMQQMLLHRAAQQQQQQQRRDGSLLNGTASGFSGNDPLIRQNPANANSMAAKMYEERLKLPPQRDSLDEASIKLQQRYGENVGQVIDPNQALLKAAAAGQSSGQILHGTASGLSGTPQQVQARSPQQPPTAEQNIRTEINPVLTPRAAGTEGSLIGIQGSNQAGNNLTLKGWPLTGLDHFRSGILQQKPFMQSPQQFQQLQFLTPQQQQQLLLHAQQNLSSSMSSDVDTRRLRMLLNNRNVVLGQDGQTNSGGDVIPNIGSPGQSGGSRNDIDILIKKKFALLQQQQQQQSHSQQQQLQQPALSGQQSQSSNQLLHQHGKPGVGSLPIDGNLPNSFGFPEQGSKKRKKPVSSSGRANSSGTANTAGPSPSSAPSTPSTHTPGDAMSIPQLQYNGGPSKPLMMFGSDGTGSLTSPANPLGDVERLLEDGSLDENVESFLSQDDMDPRETMGRCMDSSKAGLGFTEVAKARASTNKVVCCHFSLDGKLLATGGHDKKVVLWFTDVLKRKSALEEHSSLITDVRFSPGMTRLATSSFDKTVRVWDADNPDYSLRTFTGHSASVMSLDFHPNKEDIVCSCDSDGEVRCWSINNGSCVTCVRVFNGGATRLRFQPRQGKYLAAASEKGISILDAETLQVCRTPLQGHVQIIQSVCWDAAGNYLASVSEDSVRVWSFTSGNYIECIHELICSGNKFHSCVFHPNYPNLLIIGCYESLELWDIREKNTVTISNAHDGMVAALAASSASGLVASVSHDQLVKLWR

SEQ ID NO: 62101 - protein, 850 aa, Zea Mays
MRSQLNASFSPPPSLRRALPSATPRALRFHAFPWRFRAPQHHGRGAGARCATNLPAPGSHGVGVLASERRADDGDTTVKNADAPSTSTATQGNLNMAAIVSIAFCFLHRIVSGRMQSMMNLFPWMSNGIASLPFACISDPTRKPMPLKLDLTLPPLPDFGWNFSRLYYRFNSQLDRNIALSIITLLITCFSFVIVGGLLFHKFRKQQQSLEDCFWEAWACLCSSSTHLRQKTRVERVIGFFLAIWGILFYSRLLSAMTEQFRNQMHKVREGAQVQVIEDDHIIICGVNSHLMSILNQLNKYHESSIRLGLATARKQKILLLSDLPRKQIDKLADSLAKDLNHIDVFTKSCSLSMSTSFERAAAHKAKSIIILPAQHERYEVDTDAFVSLLALQPCKQIAPVPIIVEASNATTCELLKSITGLNVQPVEMVASKLFVQCSRQKDLLKIYKHLLNQHKNVFNLFRRPELEGMKYMDVRRKIHDAVVCGIFRSGKIHFHPSEEELLKETDKLLLIAPVRGMKRPQYRALSVRKETQTLSRNSEPREGQGSFNMATTMDNETRLNNIVKRPLKSLSKSSDYMLGPKECVLIVGWRPKVTEMIREYDNYLGPGSTVEILSETPIKERSSIINPLLQSQLKNVKVTHRVGCPLNYDTLKETIINVRESAKSDKEVPLSIVVISDRDWFVGDAAQADKQLAYTLLLAENICQKHGVMVENLVSEIVDMGLGKQISKIRPSLSFIGAEEIMSRVTAQVAESSELNEVWKDILNAEGDEIYIKEIGLYMKEGEKISFLELSERAVLRREVAIGYIKDGKQHINPINKSEPLSLEMNDSLIVISEFEGEQPIMMGGETSG

SEQ ID NO: 62102 - protein, 596 aa, Zea Mays
MSKTESRKLSDDYEVAEVLGRGGFSIVRRGVSKSEGKAAQQVAIKTLRRLGPATTTGGSTLPPQQGSNKGGGLVPTWKQVSSISDALLTNEILVMRRIVEAVAPHPNVIALHDVYEDARGVHLVLELCSGGELFDRIVGRDRHYSEFDAAGVVRQIARGLQALHGAGVVHRDLKPENCLFADRGEASTLKIMDFGLSSVEDFSDPVVTLFGSIDYVSPEALSRQDVSAASDMWSVGVILYILLSGCPPFHAPTNREKQQRILQGEFSFQDHTWKTISSSAKELISSLLSVEPYKRPTASDLLGHPWVIGDCAKQDLMDAEVVTKLQRFNARRKLRAAAIASVLSSKVALRTKRLRNLLGRHDLSSEELDNLRAHFARICADGENATLAEFEQVLRAMRLEALVPLAPRVFDLFDNNRDGTVDMREILCGLSSLRNSRGDDALRLCFQMYDADRSGCISKDELASMLRVRSPVRPSPSCAARGVPSGRHHGAREAGRGVRRDGRQRRRQGELRGVQGGHAEGQRPPGRRPLVPPAAAAAIARRGERFQLVQLHSHENAPLITVPFESFNQSPACAVVRSGRLAVGNYGSWESLDGSC

SEQ ID NO: 62103 - protein, 377 aa, Zea Mays
MAARRQHRRGFPLVPLLLSLLAAAAYGRLISDGGPSAQLLSVIRLSGSSPAAGAAAKAEEKCEQSYGFLPCTTTVLGNLFLVLTYGYLMYKAATYLSAGSELLLEIMGPGLVGGLLLPILGALPDALLVLVSGLSGSKEEAQSQVLIGMGLLAGSTVFLLTLLWGTCVVVGKCDLGPNREAVDVTDTKGFSLTGTGITTDVQTSYAARIMGLSVIPFIIAQFPKMLKTHHGQRLAMLLALIVSFLLVLSYCLYQVFQPWIQRRKLAYAKHKHVISGILRHAQMQSLGRLLNDDGTPNDDVIRKCVPLNILLLHNHGCSARSTWTRANPCPVLSCTPSSSVSTSRRLTLTGRMRWTRSWTTSTRPATMSLSRRSLCRG

SEQ ID NO: 62104 - protein, 937 aa, Zea Mays
MYGQGGSFNPHYRHGPPPPQQQAGVTGSFPQQPVPPPRPPYPQHPGVRPPAGPYQHGVLPHQNQPYPFAQHGRMHQMPMLPPQQRGYGSMPMPGSLPPQQAMHQAPPQYPPLPPPPPRPPGFVHDNSCGAEAEAKEGASEGGRFAKTLEAATQLIVSDDSDMDMDGDEDSPSKQPLTPETSLPVTVECTGNVNVSKFSDVSTEDNAKTADATEDNAKTAHATEDGGSTFQLIQGYGSDDSANEADAGPGSANTLVTLPEDNLHGHLSDSNTEFDYQKHVNAKGNVNTPHGTEQNGKAENYHLKVESNPVKHGTDVLGHLAKEDTSGSEIEGGQSSKRHGRIQKKRTRSISPQGRSGSPVGANKSSPSQSSSPGKQSRPPFAKRLHSADDGNDSEGRVVQQEGLSLTSKLDSSSNDLIGKVGDAAAVGVALGQHCHSDNLISEHSQLMAAGATHKMQMPCPPSESLSDLNVSSSAGGPILTNQPAAGVPYVSVETTKSSMTSKHLQSHPQSLSPPEHMPSSNMIQLPGQPSFATSEFPQMQFHHKVVAPANEFLQNQMRSYPPQDVSHPRPFDFHHHTLPPAVPSNQQPSTIPVENAPVPHHNRWPEYSGGVGLSYSSHRPPYGQHQPPGNLDSGSNLVYPSFQRYPSNLPVSNNIGPLSDADLTKSSIKPHYNPFASTFDKTDPSLDIGPPVSPNAVGSVSTTAEHMNTLSPFGRSRAHAHGNSAEPVPNRQKLLHQEFASGAPYDPLVDSIEPSSSSINKVDLRKEKNWSAADRRDASKFMNLEVDSENMHGLGVVAESEVEGLGEVAADTETGVVENASPEFLGGKDWNSDIPVDFDNDQTLDKNKKGKDSRSMKLFKSAIADFVKEVLKPSWRQGNMSKEAFKTIVRKTVDKVSGSVPSSHIPKTPAKIKHYVQSSQRKVTKLVMGYVDKYVKP

SEQ ID NO: 62105 - protein, 377 aa, Zea Mays
MVCLCFLWRRRPARDQTSSYSVNQSEIESIDSLLLDISMLRAATDNFAESNRLGEGGFGTVYKGVLPDNQEIAVKRLSQSSGQGIQELKNELVLVAKLQHKNLVRLVGVCLQEYEKLLVYEYMPNKSIDTILFDSEKSKELDWGKRVKIIDGIARGLQYLHEDSQLKIIHRDLKASNVLLNSDYTPKISDFGLARLFGGDQSREVTNRVVGTYGYMSPEYAMRGHYSIKSDVFSFGVLILEILTGRSSSGSFNIEQSVDLLSLVWEHWTMGTIVEIMDPSLRGKAPAEQMLKNVHIGLLCVQDNPVDRPKMSTVNIMLSSGTMPLQSPLKPAFFIPKSGYYSTVHSESYPIASRSVDNGKPGAISPNEVSITELEPR

SEQ ID NO: 62106 - protein, 174 aa, Zea Mays
MDMDRDSVECLSLPDAAMDVDNVDGHPHHGHLGLPLHPAHLPSSGAGRAFPKVNAGGGGAGPAVAGAAGAAGAGGGPPATSVHELLECPVCTNSMFPPIHQCQNGHTLCSTCKARVHNRCPTCRQELGDIRYSIVLGSTSACTSRHSSSEWLQSIWLSSDSWVMRMKQGTIHIA

SEQ ID NO: 62107 - protein, 549 aa, Zea Mays
MERARRHASRALLRRLLAAAAASPAASPATSSRGISTLSPPPPAAGKQQRRCCPPPRGAHQHAQARAVSVSALQPSDTFPRRHNSATPAEQEAMASACGFGGVDALVDATVPPAIRAPPMRFPGRFDAGFTESQMLDHMRRLASMNRDFKSFIGMGYYGTHVPAVVLRNLMENPAWYTQYTPYQAEIAQGRLESLLNYQTMVADLTGLPMSNASLLDEATAAAEAMAMCSAILRGKKRTFLIASNCHPQTIDVCRTRSDGFGIRVVVADAKDLDYGGGDVCGVLVQYPGTEGEVLDYAEFVRDAHAHGVKVVMATDLLALTALRPPGEIGADIAVGSAQRFGVPMGYGGPHAAFLATSQEYKRLMPGRIIGVSVDSTGRPALRMAMQTREQHIRRDKATSNICTAQALLANMAAMYAVYHGPAGLKAIADRVHGLAGTFAHGLKKLGTVTVQDLPFFDTVRVTCSDARAIAKEAVKNEMNLRVVDANTITVAFDETSTLEDVDKLFKVFNNGKSASFTAESIAPEVSSSIPSSLARESPYLTHPVFNIA

SEQ ID NO: 62108 - protein, 539 aa, Zea Mays
MKRLVYMHPSCYSCIRVNTLKSSTDAVMHKLLDLVCKNELSAVINGLEVVELNGGDQSQEGCSLVHKCPYAGLENVLFVQGSGPHVLHYGSQPDQAVKEVVVSRKCAESVLRGAQVYVPGVLACSSHVEKGDKVAVSVAIEQPVKEDGWAVGITRGTVLQGLQSDAHYEERKGLYIGQGTAAMSRSAIFRVPHGIAVEMTERVYKLPSFNDVLEGEIFLQNLPSVVTARVLDPQSGERILDMCAAPGGKTTAIAILMRDEGEVVALDRSHNKVMDILKLASEMDLSCIKAYKLDALKSVRKTDEARSLGMADNHSEAIETPTEDPCHATVGGRSTSVDEDSSTTTVVFSDNKNLNSKRYISKAELRKNLRQMKNGPGRNNCSGGRVEKSKGFCPNSFDRVLLDAPCSALGLRPRLFAGEETLESLKKHSKYQRKMFDQAVKLVRPGGVIVYSTCTINPGENEALVRYALDTYKFLSLVSQYPKVGGPGIVGSCELFNKTYTEEWLREDEADLVQRFDPSSSVDTIGFFIAKFDVGEKDE

SEQ ID NO: 62109 - protein, 734 aa, Zea Mays
MDSKSSSLVQLEVGLVDIFVNLCRFEWQTGHRELATGLFQAQMEFSLFAPPLYLTTSSKQRLFEHFWNSGGARIGEDGALGWSEWLAKDEESRQKLSMQENSQETETGGWSGWFDPSLGNTETNDLSNKSLEPSLTDGNDAEDLDAEDSPAQDDVESLLKKLGIDVDAESNSEVKDAETWNRWASMELSRDNQQWMPLHENYVGSIHCGDAPSGEDNDQLSRVILFEDVTEFLFSLSSEEARFSLMCQFIDFYGGKISRWTSTNSPSWLDRILSLENITDDILEDLGAVSDVVNKNQSSYSCKYKLESLLGSMCDLSQRPGLMKFLKNAILLLLGVFPRNHILEEAVLVTTQMFTPQENSSSIQTNASRALAKSMLKKDRQDFLLCGIYGRTEAMNGNIEQARKIFDMALLSTEATSEDLRKKVPILYLWYAEMEITVSASRNNSDSMHRAVYILSCLGSNLKYSPFVGPISRLQVLRARQGFKEQIRSSRSAFSCGAINKESVALICSASLFESMTTGCYSGLEVIEETFPMTFSESNNLECEDLWVYYIKMLQKNLNQLNLSRVWPSISRGVHKYPYNPKSYSATLTLSYLYSVSNNLRLTLDKCSQRDPSVITLLFALSFEWGKAGSDNRIHSLFERALADDKLQKSVLLWRCYLAYEAEIVCNSSAARRVFFRAIHACPWSKRLWLDGFQKLGSVLTLKELSDLQEVMRDKELNIRTDIYEILLEEETNT

SEQ ID NO: 62110 - protein, 109 aa, Zea Mays
MALPELGQDKGYLSETIFSSIFISFVLWTFHPFIYHSKRFYTVLIWRRVLAFLVASQFLRIITFYSTQLPGPNYHCREGSKLATLPPPNSVLEVLLINCLLSSLLGSWL

SEQ ID NO: 62111 - protein, 246 aa, Zea Mays
MATALSCKALAVAALLSVVSVVTYGARAQQQPSHNASDSESSQDRSLLSYSSGWLPAKATWYGAPTGAGPDDNGGACGFKGTNQYPFSSMTSCGNEPIFKDGKGCGSCYQIRCLRSNHPACSGVPQTVIITDMNYYPVAKYHFDLSGTAFGAMHGSNPMYLAVLIEHANMDGDVVQADIMQNNSGYWEPLHESWGAVWRIDPSRPLCGPFSVRITNESGKQLVAQNVIPANYIADVDYRSFVQYTN

SEQ ID NO: 62112 - protein, 377 aa, Zea Mays
MVTVSVDGSVLDRIAKIMTYLRLGSSGKVLKKKKKERDIKGKNNLASGDCDESVKPSKINGSTQKHQSDMPPPPARPPQNNNFTGKEKQPVPVARADDDDIFVGDGVDYTVPNEEMSQSPVSDMDESPHNHQKQSNFIEPMYGPVPPSEPAQAWQQPNGYDAVQAQMAAAGYQGDWSSYVYAEQQLGYPEQYVQQSTQEYDVLADPSISQDPRFMTQADKDRGLGSVFKRDDQRLNQLREKDERERDPNFISDSYSECYPGYQEYNNEIAGSDDEDDLSKMDMGGRAKGRLHRWDFETEEEWAKYNDQKEAMPKAAFQFGVKMQDGRKTRKQNKDQKLTNDLHKINKILARKKGEKDGAEDGGHYDDDLPSSKKQRG

SEQ ID NO: 62113 - protein, 142 aa, Zea Mays
MKCLWKTMYYPLCSQSLLSEELIWIRMPLEPSSQNPSMQIAVIRHVVSGILLHNTIYDVVPLSSKGTITGMLTASDFVLILRKLQRNIQVIGNEEPISAWKEAKLQFYGGPDGAVMQRTPLIHTGNIDLRAKKEAQLGMLPV

SEQ ID NO: 62114 - protein, 137 aa, Zea Mays
MAPNHNFVDPERIEHGSPLRLPGHPVNGQPMDLEGWSGIQTEHMGVLQASSMGWNGAPVLAATPVVKKVMRLDVPVDKYPNYNFVGRLLGPRGNSLKRVEASTQCRVYIRGRGSVKDSVKSFQQIWLMCVLIKLCPS

SEQ ID NO: 62115 - protein, 630 aa, Zea Mays
MLILAVFMFIFSTSLDGKIKAWLYDNVGSRVDYEAPGKWCTTLLYSADGTRLFSCGTSKEGDSYLVQWNENDGSIKRTYSGFRKRSAGVAGVVQFDIAQNHILAAGEDNKIKFWDVDNNNMLICTDAEGGLPALPRLRFNKEGNLLAVTTVDNGFKILANADGLRNLRALGSRPPFEAFRLQYEDASMKVSGAPVVATISPNIGRMDHLDRNSPAKPSPMLTGGDTASRSIDIKARISEEKSDKAKASELMEVLNPQQCRVATMPETPDQARKVVRLLYTNSGVGLLALGSNAIQRLWKWSRNEQNPSGKATASVVPHHWQPNSGLVMTNDTSDTNPEEAIPCIALSKNDSYVMSACGGKVSLFTMMTFKVLTTFMPPPPASTFLAFHPQDNNIIAIGMEDSTIHIYDVRVDKVKTELKGHQKRITGLAFSTNLGVLVSSGADAQLCVWTNDTWEKKRTVSIQMLAGKAPSGNTRVQFSSDQNHLLVVQETQLAIYDASKMERIYQWIPQDTLSASISHASYSCNSQLVFSAFIDGNIGVFDAENLRLRCRIAQSVINSNPHVHPLVVAAHPHEPNQFAVGLSDGFVKVLEPLESEGKWGTPAPVTNGTPNGKTPASSTTSNPATDQIQR

SEQ ID NO: 62116 - protein, 140 aa, Zea Mays
MPNLSASWLFQRAMSVRPHVNVSPTFINELLFANFQSMQKLGDSVLRPFLQFGPLVKTLGLVMITRPQILPSIFKQVGLGVILEWSGHFMMLGYYTFLSTYIDPILRSWVESLPPRDKYQWKRYLEAWRYGAGLDYRQGE

SEQ ID NO: 62117 - protein, 1545 aa, Zea Mays
MCSDMSGQRHHHATSRENAPEDNGYHRTPHGADHLEQSQAADTDNKHINHLSTDDNVPSSASGHKHGAISRHPSTSSVDDRSIKSGDDSDGAESTSGRSSNTEISFMNNDTIWIPPQAADKEDEAQSFATSIAYDDDDDDYSDGIKWGQSSFPSPGKQHDADTSNHREEREKAMLEAMNGQLKVLVSRFLASAGIPSSNEEGSDSWLDIVTSLSWEAALLIKPDGSMGKEMDPGSYIKVKCVASGTRRQSEVIKGLVFKKNTAHKHMPTNCHNPRLLLLKGVLGHSDIGLSSFSSMDQEKDLLERAIGKMMEICSPNVVLVEKTVSRNIQELLLKEVLDKPKLKQCDYFHIEKFIEEHNNASEGGKMPSKTLMFLEGFPRPLGCTILLKGANSEELKKVKQVMHFTVFAAYHLILETSFFEDQRVFLNDKSTPKEISVTATEGASPTAYDVAALSENGDAFSSVSSSSANDLEQGTSIRPNNAERLTSLVQGPLRKLFTDMLRHQNIYLPVTSLQEANDISKEVRAESSQETVINGFHRPEIEESVVSIENGDSINDAQKQEIAQAIMPRGSSANDKDAESSVMGDNGAHSTSIIIKEKYVDDDQADDALDSHSILILMSSQCPEKQVICEQSHLTRIKYYGSFDVSLGRYLQDILQNQKLSCSSCGEPPESHMYSYTHRNGNLTVLVKHLVPQHHLPGESEGKVWMWTRCSRCDHEHGVSKPTPRVLISAEARNLSFGKFLELSFSSHSAARRLSICGHLVNRDCLRFFGLGSKVAMFRYSSVEIYTTCKPQPTLQFVNPIRQDWFEGQRRNVHAKGMALFSGVARFLQNLKNEHPDAITLAIHCGLAFPVKDFTELEELLIKEKAQFESSVDKATDQNGVPTSSVHELLNINWYYQDLLLELYIWDRRLHQLFYCKSVKLESVSNYKNLADTVDGICGDKFGVDKKIDEFTYDETTAALGVASTTEPASNKLDHQSGDAAASLLDESQEAGHSEIPCNGGSKAEKSSIAHGQIKVDGTTKTGNDPCFEISNDKKVQVNLTVADPISMEQERCSTLQQFKYPYWDDRERWIWNSISESQLAYRNDIQIGYLEKFELINNYLPHYLPPLFEQHDDADSPHFAVGPGGNILCIMEDEISSIIARALAISDERRHLIDLKFENGMDYSKGEHAKAMEKSYSFLSENSFTSSPWSSTDSEASLSSLSSFSSFSSDDFSGYDSSSLLSSMHPEMTVNGKITLKGKYSVTVVYDNQFFALRKKCCPSELAYITSLSRCKKWNAQGGKSKAYFAKTTDDRFIIKQIKKTEFDSFIKFAPDYFRHVYHSLDTGSQTCLAKILGIYQVKQIRHGKEVKIDLMVMENLLFGHNISRIYDLKGVTFSRRVTDSNDHDTVYLDQNYVEDMGFSPIYIGGRTKHLLQRAIWNDTSFLTSVNVMDYSLLVGVDKEKHELVFGIIDYLRQYTWDKQLETWVKTSLVVPKNVSPTVISPKEYKKRFRKFMAKYFLSVPDTWSSDNSSNPCKSFGQSNHKLAEVHNGDSLLQHPNEAEGCV

SEQ ID NO: 62118 - protein, 179 aa, Zea Mays
MGGCCCCCCSARASDSDRAPVRIYHRQNPEEHAPLSSAFDGPSPTSAIVAVDTNLDTPSLDTYRAPPAPLPYDVCFTVSENPDVEKSGIKIKTDGQQSPKVDEFESCEKGAPEDKADEEEDVCPICLEGLRILELICGYTFSWVKHEMDCISELGSLNKCCCCEVSLIDVICVPYPFLV

SEQ ID NO: 62119 - protein, 72 aa, Zea Mays
MSKRYQDIHYIDTFGLIEVKNVNAVTVLREQYVGIVHLLIGNHIALYDITFVSSKNTYKVYKCHRDNFVICT

SEQ ID NO: 62120 - protein, 55 aa, Zea Mays
MTFHWRRKSFCFAHCFDFCHKETNNLVDMPSRRDYNLALFVVDLRLIISSCSSFS

SEQ ID NO: 62121 - protein, 89 aa, Zea Mays
MNERFPDATSEELDVSDATCIICREEMATAKKLLDGHLFHVHCLRETGEQAEEEVPLRLLHGSFSSTGRILSTGTVPCCLPQCARVIVY

SEQ ID NO: 62122 - protein, 192 aa, Zea Mays
MVTATTSPLFSLSSLRASLPSPTRFHTSLSLRALSPRARLSAALPFASPLGGYGTWAATSISSAGRLRRRGLEVVCEATTGRRPDSVKKRERQNDKHRIRNHARKAEMRTRMKKVLRALEKLRKKPDAQPEEIIEIEKLIAEAYKAIDKTVKVGAMHRNTANHRKSRLARRKKAIEILRGWYVPNAEPVAAT

SEQ ID NO: 62123 - protein, 127 aa, Zea Mays
MAMGNSQREQMWTRSPSGRRERRPMARVAAAAEVVTAPRLFATGRSAITRWSGHATVTDSRMLPPSAAAAPTAAGAPAPAAVLAAAPPESDEPILLRRICSIARVSSFSSSFLGLGFGLLRPVLRVM

SEQ ID NO: 62124 - protein, 154 aa, Zea Mays
MAITTTVSNERNRGKEKRKGSCSINTETNGRRFPGAWARCAGARARSVGLLDGAGTRKARLRAGTSGARCGWATQLAQTQVQGRARGLRTRRESRVLGVAWLGRLPGSVAARRRPRLVGREKQGRESNRRRLLREWRERTEGEGVWEAAAGKNP

SEQ ID NO: 62125 - protein, 55 aa, Zea Mays
MRRFGKSLTMILMIFRGLSGGVFAAIHRLESSCTALLVDTLSVNKMLYSFFLLTL

SEQ ID NO: 62126 - protein, 1735 aa, Zea Mays
MAEVHLGLPGPWAADYREMADHYTTKIGGVPDWPTGDMGFKPETLQCSLCGTKLCLVAQVHAPVAKLNIEERIIYVLVCPTPECGPKPQSWKVLRVQKCHNVMQTEGGGDELGQPNGPSSTSLPEEQNDKNKIPETNDDDFDLDALAEALEQAATLASNSKKKNKSKHANAPVKRPVLKEQACDLSIPVLPCFYIHYNKELYGGKGAVGSSSSELVLDKEIMDAANDEEEKWEGEKYEYDRAIGADRTFLKFKKRLDAYPQQCFRYSYGGKPLLATTKLQDPGTCRLCGSPRQYELQLMSPLSYFLHEAGDGSSNYAPSSWTWLTVIIYTCPKQQGNKVLPLLFVPRSGDFCFNRTSPDTDGQQHEGTGCVSRGVISVIQRNAGLTGVGKVQGVHQEFAFLMAVGRGCNKGAESRTTFCKAHGGGRRCQELGCTKSVAGKTEFCIAHGGGRWCGIKECSSAARGKSGFCLKHGEGKRWRIEGCTRGAEGHSGLCISHGGGRRCQHPNCELQKDSALPSNSSDSEPEAMELDDNGAGKSHSIEGNRDSPIDTDEGQPSMDVDIKGKSSLNDDVNGKSSSEPFSNPPINMSVESLEKFCKEASRSFFDEVGLISHQINSYNEFVSHGLQELFDSLGEVIVEPGYDPSKKGSGSWKHAIIKFGRVKLEKPVFWTGKDEVSVDFKPWHARLQNMTYASRLRVEVTIQVYSLEKSDKSKTGNDGFVQKRNFMNETHWIFIGLLPVMVKSNLCLLHSLKESECLFDAGGYFLVKGMEKVFIAQELRCLRRLWISDRPCWTISFMSEMKRRRIYIKLVESTRSEDFSGSKIISISFLYATMPVWLLFFALGISSDKEAFDVIDMQDCDASVINTISATIKESDELCGGFRKSDKARQYVDELVKSSKFPPVESFDDYIAKFLFPGISGNRNKALFLGYMVKCLLMAFTGKRKCDNKDDFRNKRLDLPGELLGRELRAHLRQAERRMVKAIQRDLNSDRELQDLERYIDASIVTNGLNRAFSTGSWCHPYKRAERCSGIVATLRRTNPLQMMSDLRKTRQRVAYAGKAGDARYPNPSYWGKLCFMSTPDGENCGLVKNLAVTSIVSSKVVQPLIESFISCGMNKLNDIPTEHIQRMDKIFLNGNWLGSCSDSASFVFRLRCMRRSSLIDPQVEIKRDKHYKEVRLFSDAGRILRPLLVVENLNKIRKPKGRSFSFQELMQQEIIEFIGVEEEEDIQCAWGIRHLFESEGAISSYTHCELDPSFILGLSCGIIPFANHNFARRVLYQSEKHSQQAIGYSTSNPRIRVDTLSHQLYYPQRPLFKTVIADCLGRSDCTTFGRKDDFTRPEYFNGQNAIVAVNVHQGFNQEDSLVMNRASLERGMFRTEHLRSYKADVENKDGTKRLKLKEKIDFGKTESKRGRVDNLDDDGLPYIGASLQTNDIVIGKVSESGEDHSIKLKHTEKGMVQKVLLSANDEGKNFAVVTLRQVRTPCLGDKFSSMHGQKGVVGFLESQENFPFTHDGIVPDIVINPHAFPTRQTPGQLLEAALGKGIACKGTMRYATPFTTASVDVIAEQLHKAGYSRWGAENVLNGRTGERMKSLVFMGPTFYQRLIHMSEDKVKYRNTGPVHPLTRQPVADRKRFGGVKFGEMERDCLLAHGSAANLHERLFMLSDFSQMHICQTCERVANVVMRSVPGGKKIRGPYCGFCKSSENIVRINVPYGAKLLYQELFSMGICLKFETEVC

SEQ ID NO: 62127 - protein, 365 aa, Zea Mays
MSTLPWNVLIVLSLSASTWEIRTLYTSGSSSPKCVVTLMLEIAPSFWGRWKRRHSNFDKSIPFALLSQVAGIREYFAANPALTSELPSTVVKSKASETLIIQSEHEDSELGDEFYDALTRGESFEDGDSDDDDDATTPKARKVKLKNVSWAIAGLALKTTKALVETSELVTNSSPVTVDPSHFHGTLHRAKTQNDQNSWSAPGGEKFMIRGKTYLTDYHKVVGGDPLLELLAVDWFKVNERFDSVALHPKSLVQSEAAKKLPFILVINLQVPAKPNYNLVMYYAAERPVNKDSLLGRFIDGTDAYRDARFKLIPSIVEGYWMVKRAVGTKACLLGKAVTCNYLRQDNFLEMLTSVHHPLPGALLV

SEQ ID NO: 62128 - protein, 294 aa, Zea Mays
MHMMRRLKSIASGRSSVSDPGGDSGSKRPKFEQDGAGDIVIEPHLTEAKPVRIDQESSSSSNRDAEASTSTSMKPVKTEEPVADLLPKELNDMTISDDKADDHNDKEGEGVTLDGNGAETGQIIVTTIGGHNGKPKQKVSYMAERVVGTGSFGIVFQAKCLETGETVAIKKVLQDKRYKNRELQTMQLLDHPNVVQLKHHFFSTTQRGEVYLNLVLEFVSETVYRVAKYYNRMNQRVPILYVKLYAYQMCRALAYIHRVVGVCHRDIKPQNLLVNPHTHQLKICDFGSAKKLGS

SEQ ID NO: 62129 - protein, 71 aa, Zea Mays
MAAQPALKASFRGELNAVSFLDSSRGPFGQHKGPCFVAEGPAERKQLRLKLLERNAEGTIHEASVLQHVRR

SEQ ID NO: 62130 - protein, 1116 aa, Zea Mays
MECNKEEASRAKDLALVKLQEADYAGAKRIALKAQKLFSGLENISQLLTVCEVHCCAAIKINGETDWYSVLQVETTADDILLKKQYRKLALLLHPDKNKFVGAEAAFKLIGEAHMILTDKVKRSRHDSKRNPVIPKSAPKKRGRPSKETDYVAKRANKENTDAVYSTFWTICTTCGTKYQYPYSLLMKVLLCQVCSKSFFAYDLSKKPFVRVDASNPWSGIGMRHKMFPNQQHNYQSVPTQQNPVTGRQTPVPDQKQQPRNVSGKQTPGINQQQRSQKFPFSSRPKNVVNSHPWGGFGRQQEMCPLSQPTHVSDQKPYYQRAPGQQNPVNGHQTLVTDHQQHSLNTQQQSTNPPCNPGSKNVVNSQGAAFQNSNATANSNLTDEAGACNREKITRPSFNDEDRTKSQVANSDKVHLVNKQMKGNKVATGSSHPVAINGSQVARKDVLTAACADKTSGQHPCIASQQRNSVIVEDGSDGCGKVSDHLPNSSTKKRIRKDHSSYTAGKSDHTTENEVAEANSQHKYSIPSKEKITNEKEVISGLNLDVLQGTKRKQQTSSGSGSDAAAKSVNHSIPCNVTVSCPDPDFYDFEKNRDADRFTVDQIWAVYDDLEGMPRYYARIKQVYSPNFMLQFTWLEYDPLCDAEKEWSSKELPVACGNFRVGRTLLTEDTKMFSHVVSWTKGRKRNRYEIYPKKGEVWALFRGWDINWVSDSDDHRHHDYDIVEITSDFAMGLGTYVIPLVKIKGFVSLFVRSSSEAPFLIPSGNTLSFSHSIPFHRLVENGRQHIPTGALELDTASLPSDLEKAFTPVNLDNSFMSTGSGSTPCNVSSTSSCEVPVGKTEQTQDGTGTGVKDGVEKLNQNTKVEQDNGSEASTIDDCGDGWNDSSPPGSPAGFHYPDTEFCSFTSLRSFDKFKKGQVWALYCDTDKFPKYYGLVKSVDSEDCTVHIRWLEHCPREQVEEHLAQDGLSIGCGLFEVSRQSETYDCTEVFSHSVEVTGKGKRYEILPCAGQVWAVYKDWSRTWSFEDYSRCEYLLVEVMEVSDGDITVSCLTKAEGFSTVFMQEQNGKSRRIARSDLTMFSHQVPAYRLTDETGDLCGYWELDPASLPEVLLVRKTK

SEQ ID NO: 62131 - protein, 222 aa, Zea Mays
MSMTLCPINQRSDQKRVEAPLPISVCIATEKKTLALLGTCIAREAHGRPGSVFANQNQRIRSAQARSMRLEIPSPPSSSGRQTFPQATRQCPPLASLRHRQRKPRRILSIALRAQGGKSTAIARYMTIPVRTNCTWTFHPALVIKSDFHPDSWLAILSIIVCTWSLVSFLMARSRPKYLQGNCEISQGSKLCSKVKSCSPHLIGHTLLFWILVRNLEASPKI

SEQ ID NO: 62132 - protein, 583 aa, Zea Mays
MDGEQAARWAAAQEGVPVGADLVAAALRQLRFLAAVDRRRWLYDEGPLLDRAIRRYKACWLPLLDKHTKGVVVDGPLVVPLDCEWIWHCHRLNPVQYIRDCKKVYGRILNNNNVESSTQTKSTLESEKVWKELYPEEPFELLFTRTFDTAVDVNPAGAEEDITYDLVSAVKRQSSFYYQVGTPTMHDPRFLQEALARYKAFLYLIKMNQEKGLQRFRVPTYDVDLLWHTHQLHPITYRNDMVKLLGKVLEHDDTDADRSEGKKLDVGFTETTEQFESTFGVRYWKAGCMYRGNVPSPVTSTPQTFSAEVGTGSYICKAQKDLNALDVTVVELYLQIVDIKNLPSAVQKENVYVRFAKNQSDMFISDGGRLDISTVTGKNTGVCLQCEPTGELILAVMVDQLSKKPEPIGKVSFPLHDLTGPDSKLSFEKWFELKAHGGHAASPPVSLRVAASATVPSSAQKVFTMVRMEPFSLKSCLLPHSIKDQNTGSWTRFVNDCGTELIRLQIREHKAKNSMAVVRELVGVLKSTKKQIQLAEFKENKWTLKDSNLPISHGTDGSLLDLKDQALSGKETGIRAQMLQRSL

SEQ ID NO: 62133 - protein, 713 aa, Zea Mays
MDTERGAGSEQGSPDSEMGDGDNDSVGYGAEMEVDAGSGSAGASAPASSASASASVSASAYAARAGAYDGVDPFEGMEFDDEEEAWTFYNVYAHRVGFSTRISVMHRSRRNGSVMSRQFVCAKEGFRTYRGKNEVSRGDAVDAGDDDSGRGRRTRAVTRVGCKAMIRVKKQDNGRWSVTKLETAHNHPLVPANQAHCLRPHKPLSECGKQRPFGGHRNGSLPLAIEPPPPPLTPPVPHTSIAQVVPEYVSDGIGHDTRVILDYVKRMQAEDPAFFYAMQFVEGRPVGNVFWADSRARTAYKDFGDAIILDDYCKRSKHELLLSAALKVFPLTRLQFCKWHIMNEAQDKLSYLLDVFPSFHEDFINCINMSETINEFEASWKALISKVSSQKSEWIDLMYSCRHQWVPVYLRDTFFGDVSLKLQCSSRSSLFEGYISAKTDSQSFIQQYEKALDCCYEKEVKEEFETKYSLPDMKTSSPIEKQGAELYTRSMFLKFQQELVGASVYTADMVKEEGDASIYTVTRSEGSEKSVTVQFSSSGSSATCSCHMFEYFGIVCRHILTVFGIRGVSALPSHYFVKRWTKNALDRSSGKNVDEVSRVAEPKEEQRSSAEDDEQSPTWRYNSLCREALRYAEEGASSLEVYIVAMQALQEAANRVNMAKRGIGQVAPLAVMPIAAQPPESFARNQEISSNKQKKRKRNSNSSRENVTPNQLI

SEQ ID NO: 62134 - protein, 683 aa, Zea Mays
MDVDSRMTTESDSDSDAAAAAARGGNAGGSGSGSETSSSSAPSTPGTPGTPAAAPNPAPVGAVGPRPAPGYTAVNAVIEKKEDGPGCRCGHTLTAVPAVGEEGAPGYIGPRLILFGGATALEGNSATPPSSAGSAGIRLAGATADVHCYDVSLNKWSRLTPLGEPPSPRAAHVATAVGTMVVIQGGIGPAGLSAEDLHVLDLTQQRPRWHRVVVQGPGPGPRYGHVMALVGQRFLLTIGGNDGKRPLADVWALDTAAKPYEWRKLEPEGEGPPPCMYATASARSDGLLLLCGGRDANSVPLSSAYGLAKHRDGRWEWAIAPGVSPSPRYQHAAVFVNARLHVSGGALGGGRMVEDSSSVAVLDTAAGVWCDTKSVVTTPRTGRFSADAAGGDAAVELTRRCRHAAAAVNDLIFIYGGLRGGVLLDDLLVAEDLAAAETTNAANHAAANAAATNLQAGRTPGKYAYNEQTRQTITESGPDGAVVLGTPVAPPVNGDMYTDISPENAVLQGQRRLSKGVDYLVEASAAEAEAISATLAAVKARQVNGEMEQLPDKEQSPDSTSTSKHSSLIKLDSALSNNLAAPPGVRLHHRAVVVAAETGGALGGMVRQLSIDQFENEGRRVSYGTPENATAARKLLDRQMSINSVPKKIFVTVPREYFQANQVFCSLKHLLKYLEIYTDNLEI

SEQ ID NO: 62135 - protein, 298 aa, Zea Mays
MAIQVTSLKCGGVVLGTAIHHAAADASSAFHFFQTWSAFCKHGDRAAVAVELPCHDRTLLRARSPPTVHPDALLTLLPRLTLSDPEGSLATEVFTISSDQLASLKHLCGGASTFCAVSALLWQCACVARRLPPDSQVRMLFPADLRRRMRPPLPSHYFGNAVFRLCATGRAGDIGTVALGSVAARIKGAIDRMDDELVRSAIDYYEYETAEVNKRRTPTGTLPQTDLNITSWLGRSQYDADFGWGTPQFMSRADSDRGGFVHLINDEGGGTATGDVRVLVTVGAENIKELGRLLYAKL

SEQ ID NO: 62136 - protein, 893 aa, Zea Mays
MDPDDEALKVARAPPQQRRGISYSQPLSRDAASARRAAPRNHSLDDEHILPTSHSINYPLHHDPSGMVPMGYHPPLPPHQRHPSASYSSNTRRSAGGVSEDSMTLERSMSEYGGGNGSLPEFVGAGGGKGIFRVPLRAAMHPGRPPPLEVRPHPLRETQAGSFLRSLAAEPHRRQLWAGTESGIRVWSLDEVFAEWGAGARRGDEESAPFREGMPAPPALCVVVDRANRLLWTGHKDGRIRSWRMDLDAAATAPAPPAAGAGDGGGSSHGGGSNNAPVFREALTWQAYGRTPVLSMVITSYGEIWSGSECGTIKAWPYDAIAKSLSLSPEERHMAALLVERAYIDLRNHCTVGNVCSLPASDVKYMLADHSRAKVWTVTSMTFALWDARTRELLKVFGMDGQFESAKLETPVMPEQPMEEEVNPNPKAKPSKKDKSQGSLNFFQKSRNALIGAADAVRRVATKGTFVEDNRRTGAVAQVTDGTIWSGCTNGAIIQWDGNGNRVQEFQHHTSSVQCIKALGERVWVGYASGMIQVMDAEGNIIAGWTGHSCPVIRMAIGCSYIYTLAHHGGIRGWPLTSPGPLDDIIRTELSNKELSYTRMEKINIMVGSWNVAQGKASAESLRSWLGSVASDVGLVVVGLQEVEMGAGFLAISAAKETVGLEGSANGQWWIDNIGKALDEGTSFHRVGSRQLAALLIAAWARKSLKPYVGDVEAAAVPCGLGRAIGNKGGVGLRIRVYDRKMCFVSNHFAAHLEAVSRRNADFDHIYRTMAFNKPHGSTASATSVQLHRTVNVNGNQVEEVRPDLAEADMIVFLGDFNYRLYGITYDEARDMVSQRSFDWLREKDQLRAEMKAGKVFQGMREAVINFPPTYKFQKHQPGLGVLKTVCQLPCRL

SEQ ID NO: 62137 - protein, 498 aa, Zea Mays
MDLVAEGHMQEARSFFHTFREDHEVMHSRDLQKLEGVLSPSHLEEMELARSFRKNKFKIKLCEYSYELLLQYLQKTQALVVLGVINEHITFEVSPGQPSLISDDADVVALIGTSKDLAKQINQKEVHWGLLEDSVEERMEKALAESDKIEAESKDADAEDNKKRNAEGGKQGASLKKAKKDKLVGATGKSVRTETSMVSVAPRVKPELTLPATPVEVEQSILEDLRNRAQLNSVALPSVSFYTFLNTHNGLNCSSISHDGSLVVGGFSDSSVKVWDMSKMGQPAKISRSQGENGPSQGERISTLDEGKRTYTLFQGHSGPVYSAAFSPFGDFLLSSSSDSTIRLWSTKLNANLVCYKGHNYPVWDVQFSPVGHYFASASHDRTARIWSMDKIQPLRIMAGHLSDVDCVQWHVNCNYIATGSSDKTVRLWDVQTGECIRMFIGHRSMVLSLAMSPDGRYMASGDEDGTIMIWDLSTGRCVSPLLGHSSCVWTLAFRVAI

SEQ ID NO: 62138 - protein, 95 aa, Zea Mays
MAMHFGEITTAFPGGGGIAGASTARTTPAASPYQCRMMIAWPQACVAAYHVAYAENPQNPQLGTLIPEHLRELQAMAADQDRPRVIHFSDDIDNS

SEQ ID NO: 62139 - protein, 115 aa, Zea Mays
MCDLLWSDPDDRCGWGISPRGAGYTFGQDIAQQFNHTNGLSLISRAHQLVMEGFNWCQDKNVVTVFSAPNYCYRCGNMAAILEIGENMDQNFLQFNPAPRQIEPDTTRKTPDYFL

SEQ ID NO: 62140 - protein, 169 aa, Zea Mays
MPPGSPTRRRRGRPDPDPMAPAVPRDAGDGLPRQHVRGRPLVRLAGRPQPARHPLPARRRRAILRQRVEQRHLLLLHAGAPHLPLRRRRGRHPPPGLAPPRGRLPRPPRRRRIRLPRLGQGRLHHLLRGRQHQATRQVGLLHRSLGLLCCLFTKSQHRSRLQLLEAKFT

SEQ ID NO: 62141 - protein, 634 aa, Zea Mays
MTHETTAVSVSRCYWTALSALTSTDALIRMLGPAVAFPKAADPDDDPTKWQPENSAEHLACETKDGAPEEGKGKQPPRPRPFRSTSTRAQRSRRRMRMRMGKGPSSRAGSRHRQFRARAMTRVDDLQEVFSGLQSARKDSRSADAAVLEAQLQQMLREWRSELSDPSPASSLQLVVAEEEDDATSKMVEQQQQQPPPPLPANRSQGHAHVVCQGMKPEPREEAVDVAVDQPQLLSQGVLPNGAATASAMFHDQLYYVNQELTVEDFLYDDDYKIDLSGSNLDVINNLEGIVQLEYPDHNLPQGLAPNAYLDMNSCGQSAGAVFLHMPDLLTTMTSAPSAFLKPKCALWDCPRPAIGSERWHNYCSMYHADLAVQEEGPPGTMPVIRPRGIDLKDGPLFAALSAKVQGKNVGVPICEGAATAKSPWNAPELFDLYIFEGESIREWLFFDKPRRAFDSGNRKQRSLPDYNGRGWHESRKQVMKDFGGLKRSYYMDPQPSNGYEWHLYEYEINDCDAFALYRLEFKSSDAKKIAKSKLGCNPLNEIQQQMDRLSADSPVDTKRTARSRTEPNPIDVNTNIYSVPNTTVQTDVPNAYQPGSQVDQMTYLNGSVVYGPHLPYGYSTERSDFYWNSNDGT

SEQ ID NO: 62142 - protein, 314 aa, Zea Mays
MGDRVGVKYNSINEAEEHKGGHGIPKVSMIPLIFLIFYEVSGGPFGIEDSVKAAGPLLAILGFLLFALIWSVPEALITAEMGTMFPENGGYVVWVSSALGPFWGFQQGWAKWLSGVIDNALYPVLFLDYVKSSVPALGGGLPRTLAVLILTVALTYMNYRGLTFFAKRSHYGTPLIGILFSAFGVILLSWMSFQEIIAAENYLYCFGMILEFIAFIKLRVYHPNASRPYKIPLGTIGAILMIIPPGLLIIVVMALASYKVMVVSILAMVFGFVLQPCLVYVEKKRWLRFSISADLPDLPDVQEIAEDDAVPLVV

SEQ ID NO: 62143 - protein, 69 aa, Zea Mays
MGAWEFSRLRPRTVRIRSVLCYHTNITGGRRGVVMCFFGALTAHLIFVVDLGIGGFLIYVVGTILLISM

SEQ ID NO: 62144 - protein, 1414 aa, Zea Mays
MSLFRKFFYKKPPDGLLLITDNVYVFDHCFSLKEVEGDHFDAHIRGIAADLLENFRDHSFMISNFGTKEEESPIYHILSEYGMTVLDYPGHYEGCPLLTMEMIHCILKSSESWLSLGQHNLLLMHCQRGSWPILAFMLAALLIYLGHYSDEEKVLDMVYKQSSLELLEMISPLNPMPSQMRYLRYISTRNVMPEWPPADRALTLDCVILRMVPNFHGQGGFRPIFRIYGPDHLMPPDQTPKVLFSTPKKSNLVRFYSQADELVKIDLQCHVQGDIVLECIHLYEDLDREEMVFRIMFNTAFIRSNILMLNRDHIDMLWNAKDQFPKDFRFEVIFSDMDIVTSHVTTEPVIHQEKQGLGVEEFAKVLDIFNHLDWLDGKKDTVPHTTQLKISAITDEPETFFDTREELESESSSGEIYSSSVVLKVGNELDMLVSTKPRHIPQDSSSANVQSKSQTTVQSPSRMRRTALLSPSKVKVSKTSASPMELSSSTIMPQQSSSPVQPRRVMSDSAVKFLSEITESASGEMSCSQTPVEHEPSSLMENNPAPTASLLPLCTPPPLPPPPPTVSLLPVPTKLPINTSTSTINISLRATVRSSPPSEPSVPPKDLLRTEELGKSQEPSYETRGKLQTDSTTGSNDFILSPAASSSLDEELSNARASLPTDLPAVPQNPDTRPFAIQATRSETMPPPPPPPPPPPSKSGMTLFPLTHGEEVKITIEKVVPHQPPHPPAAAASFSSSNPDAVSVILAPQKRARSPPPPPLPPPPGLAKPPFSSLRSRSSPEVSLSQPQFLDNKDSATMEYPDTPSLTPTFSQSVTRVQTLHVPPPPPPPSRTPPVPPPPPRTPPVPPPPPPSSRTPPVPSPPPGTPHVPPPPPHSSQTPPTPPPPPPSSQSFPSLSRRNRVAAPHPPPPPAPLSSRVTSAPSVPPSPPLPPPKLAVANNTSQKSPTIRPPPPPPGPLHKLTKGSVANSNPPPHPAFSFGAKDRSTARSKSPRSLRANQASKRTPLKPLHWVKVSRATQGSLWAETQKSDEISRTPEIDISELESLFSVTMPNMEAKRQRQQQHPSVATKQEKVHLIELQRAKNCEIMLRNIKMPLPDLMGLVVALDDSVVDGDQVDYLIKFCPTKEEMELLKSYTGKKENLGNCEQFFMEMMKVPRVESKLRILSFKIKFVTQVADLKSNLNTINLVAEEVRSSVKLKRVMQTILSLGNALNQGTARGAAVGFRLDSLLKLSDIRARNNRMTLMHYLCKVLSDKLPEVLDFSRDLANLEPASKIQLKELAEEMQAITKGLEKVEQELATAEKDPSETEIFYRKLNLFLDDAQAEGRSLASLYSSAGKSADSLAHYFGEDPVRCPFEQVVSTLLSFTKTFERAHAENVKQMELEKKRAQAEAEKEKAKLTAHKKRESLELGISGR

SEQ ID NO: 62145 - protein, 269 aa, Zea Mays
MTENKLAYIQNETLSKECIRNLTVTKDMKQPIFVYYELGNFYQNHRRYVKSRNDAQLRDASKANQTSACEPEKTTANGQPIVPCGLIAWSLFNDTYNFTRGNENLTVDKKDISWKSDREHKFGKDVYPSNFQNGALKGGATLDPKIPLISIDFLFMWKKTVWLSEQEDLIVWMRTAALPTFRKLYGRIYIDLKENDTITVTLNNNYNTYSFGGKKKLVLSTATWLGGKNDFLGFAYLIVGGLCIFLAFAFTLLYFVKPSRTVNVMLAVK

SEQ ID NO: 62146 - protein, 81 aa, Zea Mays
MAQGPAPLRLPLRVGSPSAVVRTPAGSRSERSCSDSGWPPSLGAAAPNPTSRAANVVFSDHLSIPREVTSHLKNHPGNWNL

SEQ ID NO: 62147 - protein, 274 aa, Zea Mays
MASEGNKDVPHEALTVDHSSISGSKRKRGRPRKYEYPVNELPQKVQPIQSAPPLLHCTQDGSSLASHASGGGAHGNWSAQPRNSANASLQAIPISVAPINPEMRTSARQDAELVIPQSSVSAVPIKFVCPASVPCKQLANQNEFTGNKSVDEVQKDSESPNVTKESPVKAEKPNIALVDVVAKDSLGEGQQLNDQVTDVVRDFSGQTQNVDVTMSDEIKIASGARDKPNSANCEQQSSKEPSDITEQSEQLKTETDVQKGVDASDDIHPAHDEQ

SEQ ID NO: 62148 - protein, 61 aa, Zea Mays
MAYKPAKSLLRRFPRNHLLPAQYVGIRWRSLPQRLVAISSATRASNRPSRFRRNALLAGRG

SEQ ID NO: 62149 - protein, 94 aa, Zea Mays
MGIKQMYWEGWIPSSPNDMCYGGDLRRTALLRSVQMKVQSPHPCDVHEREQGRSNVHADELQQDQKEAVGVQLDQRPLSCPKSTQDAKCQSSIH

SEQ ID NO: 62150 - protein, 785 aa, Zea Mays
MAGKDGVSLKSVSYGARLRRSCDASLREAGSMRDPFLKHRVKKFDLSSLDWIDEIPDCPVFSPSTQEFEDPLVYLSKIAPVAAKYGICKIISPVSASVPAGTVLMKELGGIKFTTRVQPLRLAEWTKDDKFAFFMSGRKYTFREFEKMANKEFVRRYSSAACLPSRYMEEEFWHEIAFGKMESVEYACDIDGSAFSSSSHDQLGRSKWNLKRFSRLPNSTLRLLRAAVPGITDPMLYIGMLFSMFAWHVEDHYLYSINYHHCGAPKTWYGIPGSAASDFEKVVREHVYDHEILSGEGESAAFDVLLGKTTIFPPNILLDHHVPVYRAIQKPGEFVVTFPRAYHSGFSHGFNCGEAVNFATGEWFPLGAVASQHYALLKRIPVLPYEELLCKEATFCANEFSLFEHGNVTLTGGTHIQSYMKGPFVQLMRFQHRVRWLLVKMGARTCYKADIDATVLCGICKRDCYVAHIMCNCRADAICLCHEEEISKCSCNCDRVVFVRKDIFELEEISKKFEEIGILDEVGKQMSQNDGYNMHPYLSNGIDHNAKYFPYCKILIDTSPELRTFSEVDVLGYDLNKPYPTLSTITSAHGPHEYSTQSDECTSSKQRTYSSSCPENGTLSVYPLCTSDQAFSTDKLAAQDTDDSDCEVFRVKRRSSIVMEKRCSEDLTITLTENQALRRLKKACSDDRQENATESHCLDFISGNTDNFINRSKQKMNVDQLDAKNVEDEVAFGQKSIGCSYLSPSVDLGPKRLKIRGPSFPSTVSEVEISYRFQEDIDLASQHTQ

SEQ ID NO: 62151 - protein, 675 aa, Zea Mays
MENNWLTENTMQQLYCDMCQKFLADRLVEGTCPNKVCNASARGDQCETCSTLLNPTELIDPKCKVCKNTPRIRDTDHLFLELPLLRDKLVNYINETSVAGLWSQNAIQATNAWLKEGLKPRCITRDLKWGVPVPHEKYKDKVFYVWFDAPIGYVSITASYTPEWEKWWKNPDNVELFQFMGKDNVPFHTIMFPSTLLGTGEKWTMMKTISVTEYLNYEAGKFSKSKGIGVFGNDAKDTNIPPEVWRYYLLMNRPEVSDTLFTWADLQAKLNSELLNNLGNFINRVLSFIAKEAGAGYDSVVPDAPNAGEHTLTKILAEKTSKWVEQYLDAMEKVKLKQGLKSAMGISSDGNAYLQESQFWKLYKEDPAACAIVMKTSVGLVYLLACLLSPFMPSFSDEVLRQLNLSPEENLSLSEEKGEIAKAKSPWDFVPAGHRIGKPAPLFKELKDEDVALHREKYAGSQAERSSKAAADAEANKVANQLKGTKLSDGGTKKGPKKQSGGSKSKTADADITVAKLDIRVGLIRKAEKHPDADSLYVEEIDVGEDTPRTVVSGLVKFIPLEEMQNRKVCVLCNLKPVAMRGIKSHAMVLAASNEDHTKVELVEPPESAAVGERVTFAGYSGEPEASLSGKSKTWEKLAAELHSNGELVACYKDVPFTTSAGICKVKTIANGEIR

SEQ ID NO: 62152 - protein, 125 aa, Zea Mays
MKIKKAPHILVIHLKRFKYIEQLGRYKKLSYRVVFPMELKLSNTSDDVDTEYSLFAVVVHVGSGPNHGHYVSLVKSHNHWLFFDDENVEMVEEQTLQTFFGSSHEYSGNTDHGYILFYEGLGGKS

SEQ ID NO: 62153 - protein, 543 aa, Zea Mays
MQSGTVVTRDNFLVLQTLIGATVVNSPLLPGLRQLCLWDPRGWAVALLLHVGFSEPVFYLAHRALHRAPLFARYHAAHHSSGVTQPLTAGFGTPLEVLLLTLVMGAPLAGAFLVGAGSIGLVYVHALAFDYLRAMGYSNVEVVSPRVFEAFPLLRYILYTPSYLSLHHRERCRNFCLFMPALDLAGGTLDERAWALQRAAYDGGPGGGALGTPEFVFLAHVVDMMSSMHVPFALRSLSSTPFANHFILLPFWPVAFGFMLLMWCCSKTFVVSFYYLRGHLHQTWSVPRYGFQYFLPAAKKGINQQIELAILRADRMGVKVLSLAALNKNEALNGGGTLFVNKHPDLRVRVVHGNTLTAAVILNEIPSNVREVFLTGATSKLGRAIALYLCRKKIRVLMFTVSSERFVKIQREAPPEYQQYLVQVTKYQAAQNCKTWIVGKWLSPREQRWAPSGTHFHQFVVPPIIGFRRDCTYGKLAAMRLPKDVQGLSSCEYTMERGVVHACHAGGVVHFLEGWGHHEVGAIDVDRIDVVWKAALKHGLAPV

SEQ ID NO: 62154 - protein, 158 aa, Zea Mays
MAGRGGGSKSSLYAALGVASDCSDAELRSAYRKLAMKWHPDKCAGAGSSGGGADAAKARFQKIQGAYAVLSDPNKRILYDVGAYDGEGDDDGAGEILGDILEAMSQAGPAADNGKGESLEDLQRQFEELFLRPSPSSFSPVGILLTRLCFLSVASLAS

SEQ ID NO: 62155 - protein, 249 aa, Zea Mays
MVDDLHSIGCKAIWMLDPGIKKEEGYFVYDSGSKSDVWIQKADGSPFVGEVWPGDCVFPDYTSEKTRAWWASLVKDFISIGVDGIWNDMNEPAVFKTTTKTMPESNIHRGDADIGGVQNHSYYHNVYGMLMARSTYKGMEMGNAAKRPFVLTRAGFIGSQRYAATWTGDNLSNWEHLHMSLPMVLQLGLSGQPLSGPDIGGFAGNATPKLFGRWMGVGALFPFSRGHTETGSIDHEPWSFGKEARYVHR

SEQ ID NO: 62156 - protein, 548 aa, Zea Mays
MEESDAAEGVAVQLIDGEGEFAAAAAERFMAAAGVAGCGLSYAVVSIMGPQSSGKSTLLNQLFGTNFREMDAFRGRSQTTKGIWIARCVGVEPCTVVLDLEGTDGRERGEDDTAFEKQSSLFALAISDIVLINMWCHDIGREQAANKPLLKTVFQVMMRLFSPRKTTLLFVIRDKTRTPLEHLEPVLREDIQKIWNSVAKPEAHKDTPISEFFNVQVTALSSFEEKEEQFREQVQQLRQRFSNSIAPGGLAGDRRGVVPASGFLFSSQQIWKVIRENKDLDLPAHKVMVATVRCDEIANEKFGCITSDTEWLDVESAVQSGPVPGFGKKLSNIVEVHLQEYDKEAFYFDEAVRKGKRQHLESRILNLVQPAFQKMLTHLRMKALEKFKAGLNSSLESGKEFAISARDNTECSLKDFEQGCADAIIKQANWDCSKILEKVRRDIEDHALSIRERKLSELTTHAKEKLRKALAEPVESLFDAADQTTWTSIRNIYKRETEAILPEFLKTICGFEMEYAQAEEMVSKLRDYARSVVQSKAKEESSKVHNSV

SEQ ID NO: 62157 - protein, 821 aa, Zea Mays
MDLSDDFLHMIFSFLDQKDLCRAGVTCKQWRSASVHDDFWKCLKFENTSVSLENFVNICRHYQSVTELNLHGVINAETLVLEAIMFLRHLKTLTMGKGQLGESFFQALAECPLLTALTVNDASLGSGIQEVTVNHDGLRELHILKCRALRISVRCSQLQILSLRRTGMAHVSLNCPQLLELDFQSCHKLSDNAIRQAATACPLLAKLDMSSCSCVTDETLRDIASSCPSLSVLDASNCPNISFESVRLPMLIDLRLLSCEGITSASMAAIAYSRLLEALQLDNCSLLTSVSLDLPHLKNISLVHLRKFADLNLRSPVLSYIKVSRCSALHRVSITSTTLQKLVLQKQESLSSLSLQCHNLIDVDLTECESLTNAVCEVFSDGGGCPMLRSLILDNCENLSIVELNSSSLSCLSLAGCRSMTLLRLSCPNLQHVNLDGCDHLQSAAFCPVGLESLNLGICPKLSVLHIEAPNMSILELKGCGVLSKASINCPRLTSLDASFCRQLVDDSLTCMSEACPMIEHLILSSCLSIGIDGLSSLHCLHKLTLLDLSYTFLDNLKPVFNSCLQLKVLKLSACKYLSDSSLDALYREGALPLLVELDLSYSSIGQNAIEDLLACCTNLVNVNLNGCTNFQELVCGSDDSSCVDMPVDFCAPSSAIKSEEIRSGFDMSQSFNVKLELTGGAESLIAPRLSNLQLLRQEAAPRSLNWTPVLQEWNPDAAGSSQGVERALGGQSISSLGFHDMFGGILDDPQAGGSMEVGWGKLNEEDEDRDLQNTNIKSGQALSLELLYIVPKHCRYIARHGILGARGNDILFFQSIHVAE

SEQ ID NO: 62158 - protein, 1135 aa, Zea Mays
MIVGPTKVLFMDEISTGLDSSTTFQIVKCLQQIVHLGEATILMSLLQPAPETFDLFDDIILLSEGQIVYQGPREHVLEFFESCGFSCPERKGTADFLQEVTSRKDQEQYWADKQRPYRYISVPEFAQRFQRFHVGLQLENHLSLPFDKSRSHQAALVFSKHSVSTTELLKASFDKEWLLIKRNSFVYIFKTLQLIIVALVASTVFLRTHMHTRNLDDGFVYIGALLFTLIVNMFNGFAELSLAITRLPVFFKHRDLLFYPAWVFTLPNVILRIPFSIIESIVWVLVTYYTIGFSPEADRFFKHLLLVFLIQQMAGGLFRAIAGLCRSMIIAHTGGALSLLLFFVLGGFLLPKAFIPKWWIWGYWISPLMYGYNALAVNEFYSPRWMNKFVLDQNGVPKRLGIAMLEGANIFVDKNWYWIGAAGLLGFTIFFNVLFTLSLMYLNPLGKPQAIISEETAKEAEGNGHAKGTIRNGSTKSKDGSHDKEMKEMRLNARLSSSSSNGVSRVMSIGSNEAALSRGMVLPFNPLAMSFDNVNYYVDMPAEMKQQGVQDDRLQLLREVTGSFRPGVLTALMGVSGAGKTTLMDVLAGRKTGGYIEGDIRIAGYPKNQATFARISGYCEQNDIHSPQVTVRESLIYSAFLRLPEKIGDKEITDDIKIQFVDEVMELVELNNLSDAIVGLPGITGLSTEQRKRLTIAVELVANPSIIFMDEPTSGLDARAAAIVMRTVRNTVDTGRTVVCTIHQPSIDIFEAFDELLLLKRGGQVIYSGKLGRNSQKMVEYFEAIPGVPKIKDKYNPATWMLEVSSVAAEVRLKMDFAEYYKTSDLNMQNKVLVNQLSQPEPGTSDLYFPTEYSQSTVGQFKACLWKQWLTYWRSPDYNLVRFSFTLLVALLLGSIFWRIGTNMGDSTTLRMVIGSMYTAVMFVGINNCSTVQPIVSIERTVFYRERAAGMYSAMPYAIAQVVIEIPYVFVQTTYYTLIVYAMMSFQWTAAKFFWFFFISYFSFLYFTYYGMMTVSISPNHEVASIFAAAFYSLFNLFSGFFIPRPRIPRWWIWYYWICPLAWTVYGLIVTQYGDLQDPITVPGESNQTISYYITHHFGYHRDFMPVVAPVLVLFAVFFAFMYAVCIKKLNFQQR

SEQ ID NO: 62159 - protein, 113 aa, Zea Mays
MEIMEMIQRGERPDDIQDINDDPPNPDQPISEPRMAPKPKPWEKQGQGSLACDLKSLPRESDVLRSEVQHDDGTNQVTESADGANQADSLLQAGVAAGSESPGVPDDAASSLE

SEQ ID NO: 62160 - protein, 242 aa, Zea Mays
MAPEKPRKEQEEEEDELMLEDGGIEESPRRSFEDCGDSDEEDDDNDEERDGDGVGSPRSFQSHKWPQSYRETTDTYTIAASPSFGYLGPSTSKYSLLDLGRSGLGSDLKLPLLSDKADGKQDSVKTLPKTLGSIRDERVSFQLQHTGELYITQGCNVTQTVFNGINVLAGVGLLSTPFTIHEAGWTGLAVLVCFAIVCCYTGILLKHCFESKDGISSYPDIGEAAFGRIGRLLISVSFGVFR

SEQ ID NO: 62161 - protein, 75 aa, Zea Mays
MSVLRSLWQAHWLHKNQLRQDEVFPWLEESIVALENGFTDFLEQLGSAGWDQDLIILKVPKEPVLVLEHLEDQEV

SEQ ID NO: 62162 - protein, 109 aa, Zea Mays
MSRTDLKLVGSFADMILIPDTRVPDKRRTSALFILTNPGQLNFYDGGSLFSVQNSKEGNPLPEAQKFPVAIPTLDPNITVTGLYSLTESEFPNISVKVHYAQIWIFYSI

SEQ ID NO: 62163 - protein, 1301 aa, Zea Mays
MPGAGVKPPAPPVEAATGLPPRRLTPSRVSAKRSWPPGCGRFPAPLPAPASPAAAGPEVNGVDGAFTIVGGRADDEAAPAVISPSAQNGCPDKVEEAVAAATVSPLPENGAPPRPQGSDKVEEAAATVSPLPENGAPPRQQGSDKVEEAVAAATVSPLPQNGAPPRQQGSDKVEEVADPAAVSPVAQSCGLPHQEDDKVDDLSAVLPAARSSALPHALPQSGPERARQDGDGGENGEVQLVGGAVKLSSDGQQGDRVVQVAGPTLEVLGSCTTVGASSMQNGGEGDGLLVAAEKGCGGSSDMGQEVAANDFTEIENKTGTGELQGKENGIAGSRTKRWSSESSLNPLPKRRAVSAVRKFPPGCGRTIVTTADSGVLEVSPIRSFAPSFGMSAVNTTGSGDREWLPSEATPVNNGDALVAIPVLVLGESAFPTSAIEASNKKVESKKIVDEGHSKAHNRVQVRDDFAGTKQDGDQRNVVSKATQRNVSDEKMNGKFSAHKGEQVAQEMVDHKMKNELESSLQRSNLRTPLSNPIDVKVKRLDSGKMNAGLLGNARSSAGGKMQSKTLSAKKEVSSNMNTKQNKFAHKLKSDDTSKGNLHLSARESKLGTHVAINQIEEPNQIIVQALMAPDNCPWTRGRKSFASASKSLVPRNKLKGKDGSASKSLVRMNKIKEKDTTRKDILARKVTSNESINDETMDDNETRGREPIDSTSKWLVPVNKLDATPNDIPVGKVVSCDSSNDEAMDDNDGIILEDDDNSRALVVYGQKQEMCLTVLPVVPSGSHHKQSRDHDIDARSKVRKLLQLFQATYRKLTQVEEQGKRKVGRIDIEAAKALKNDPIYKKLGAVVGNFPGVEVGDEFHFRVELSIIGLHGPLQAGIATSKVNGINVAISIVASGGYPDELSSSDELIYTGSGGKAGGNKEGDDQKLERGNLALKNCIETKTPVRVIHGFKGQNRSEIGHSKGKQTSIFIYDGLYEVLECWQEGPKGERVFKYKLQRIAGQPELALHAVKATRKSKVREGLCLPDISQGRERIPICVINTIDDMKPAPFKYITEVIYPDWYEKEPPKGCNCTNGCSDSITCACAVKNGGEIMFNFNGAIVEARPLIYECGPSCRCPPTCHNRVSQHGVKIPLEIFKTGKTGWGVRSLSSISSGSFICEYTGELLEDEEAEKRENDEYLFDIGHNYHDKELWEGLKSVVGLGSATSSSETMEGFTIDASECGNVGRFINHSCSPNLYAQNVLWDHDDMRMPHVMFFAVENIPPLQELTYHYNYKIGEVYINGEEKVKHCYCGASDCCGRLY

SEQ ID NO: 62164 - protein, 63 aa, Zea Mays
MQLPQLVKLSLGPAFNSWDSKLMFGQDKDITTLYILHTFILSNNMLLCKCYNFKLRTDYALVY

SEQ ID NO: 62165 - protein, 562 aa, Zea Mays
MAMPSSTTAALSRLVDRTRVPDPTLQRHAVGAVFRHLLSLPAPLPAAAHDATSALLASPHPAVAAHAAASIARLTATRPDLLPSDVALPLLIAPLAASPSPLLASCLVKAVSALATCALRSGSRFPAHDHPFIQALASGADGARAELMRQAAGMVADRVDWVVKFLRPFVMFSVVRKGDAAFARDLIGALAAAAVAAGKASVAIPVLKMLQDSMLHFGRGDDQEVRLWLSSAECLVDAYVVLLRKLAHGQMPTYDAQASSATLMETLLSQYSFHQKFLGIDSTIFGLSKHLFLVQKDLGLCYIPEISVVLSSLSYSLTGLEFEHEQLAALKLLSFLIDWKYENVLDSKEQTHHVSVELLCVLAVINLTISPSKSVKAVAYHVLSRFSLFVLDLPASHSSEEQDISTSYHISKPALLLPKLLHHLWSKPSSSCFSFMKYIATKASPDSGQSDLEANYWTHQINAYLTALHREKHTLDVRSSKTTSVAISSLISSVASVLVMHPKLGTSAAESLAMLGTSDPRLGMPLFVVILFYSKILCSSGKFSAEISEQAPIHQRIQVQEA

SEQ ID NO: 62166 - protein, 69 aa, Zea Mays
MLHTKACSEARSRSHNRPLLVKWWIFSWSAGSRKACTVRAGYWKVPLVRAGYWKVPFVITLLFAEMYAA

SEQ ID NO: 62167 - protein, 465 aa, Zea Mays
MDRKDVGILAMDIYFPPSCVQQEALEAHDGASKGKYTIGLGQDCMAFCSEVEDVISMSLTVVNSLLKKYKIDPKLIGRLEVGSETVIDKSKSIKTWLMQIFEESGNSDIEGVDSSNACYGGTAALLNCVNWVESNSWDGRYGLVVCTDSAVYAEGPARPTGGAAAIAMLIGPNAPISFESKYRASHMAHVYDFYKPDLVVDGKLSQTCYLMALDSCYRQFCNKYEKIAGKQFSICDAEYFVFHSPYNKLVQKSFARLYYNDFLRNCSSVDDDAKEKLQSFSNLTGEESYQSRDLEKASQQVAKHLHDIKVQPSTLLPKQIGNMYTASLYAALASVLYNKHDSLNGQRIVMFSYGSGLTSTMFSLRLNNGQHPFSLSNIASVLDVTEKLQSRHETLPEKFVETLKLMEHRYGAKDFETSRDTSLLQPGTFYLTKVDSMYRRFYSQKLSEETGGGKTKCCNGLANGH

SEQ ID NO: 62168 - protein, 268 aa, Zea Mays
MPSPLGGRIQFGPGKAGMPSASLARRLLSTISSPAIPSRSTSTSASNSNSCGFSTRRARKKRSCVSWTVSAATPADMATNSALAKLAPLEAILFDIDGTLCDSDPIHFCAFRELLQQAGFNGGVPITEEFYSANISGGHNDDLARSLFPGMDHQKAMRFMDDKEAMFRKLAPGQLKPVDGLQELCGWMEGRDLKRAAVTNAPRANAELMLSLLGLTDFFPVLVIGSECDRAKPFPDPYLKALQLIGASPQHTFIFEVEVEPAAANAQG

SEQ ID NO: 62169 - protein, 109 aa, Zea Mays
MGRLFLMHLDGNVYSCKHCKTHLGVASDIISKAFQCKHGKAYLFHKVVNVTSGVKEDRMMITGMHTVSDIFCVGCGSIVGWKYDAAHEKGQRYKEGKFILERLVHRLYC

SEQ ID NO: 62170 - protein, 179 aa, Zea Mays
MYAQLSNMFLDLFGDAKSIRKASTRHTTLFSCKRSILPSKKRKADDAVVSDRDKFAKTGSVQSATGTDPNASNPPVWPATSETSGHQWGASYAQLHILHMELMTTAIKCHSLLLKQLPMALILQHTLFRPIHNKATHNLQQFRQHQCQQWYQHLHRRQLTLSNLRQLLNLIMEQPTTDK

SEQ ID NO: 62171 - protein, 61 aa, Zea Mays
MQTSRRRCTRERRSSDVAFETREGRACCAPAPSSAARGGRSGEGPRGLLQDMRVGTSDAHD

SEQ ID NO: 62172 - protein, 270 aa, Zea Mays
MATLSWWMEWSVENVREAFFSYFGENQHVRLPSTPVIPVDDPKVPLLHTCLHRFKGTLGGRERHRTCFSLRCIIASGDEDLIDRFRIDATFHRFTEILGSWSHGYYFKEEAIGLLFSLLTEKYKLPQSRIYASYFSGDMSSCLSSDDESRNTLQKYIGAERILPSMSKVDFWMPGETGPCGPCIGFFLDCSDNNDGVDSVRNITDGKLVEICRLVFVEFDRQADGVLEPFQAKHVLTGINLECLAAILQKKESHYDLDVYAYVIRQVYCV

SEQ ID NO: 62173 - protein, 160 aa, Zea Mays
MRHHQACSRAHQVKVHQFLLKSRFRTFNKDHANLFFVPSYVKCVRMTGALSDKEINQTYVKVLSQMPYFRRSGGRDHIFVFPSGAGAHLFRSWAIFLNRSIILTPEGDRTDKRGTSAFNTWKDIIIPGNVDDSMGKAGRLQLVELAKQYPDKLESPELKL

SEQ ID NO: 62174 - protein, 334 aa, Zea Mays
MASAEIPNSSPDATNPAAAAATATATATGPDISSSPPLPPRKRRLSPSSSPTRSASRSRSPRSRSPRGRRSRSRSRSRSRSRSRSPQYPPDGKRQRHNDLTVEACRDFLRDRCTRSDLECRYAHPHNSASVDRDNKVTACADSLRNNCFRGMTCRYYHPPPQIQEQLLRSIGMEDPNVKTICRDFTRGKCSRSANECRFLHHSSVEDAAIVCQDFLRGQCNRIACRYSHVVAHPVPPMSHVPMPYPEMLYMPPPPPPPLGVPMMGPPPSPFADNKNRVEVCRDFLKNMCNRESCRFLHPGTHTAAASANVEVCRDFKRGECNRPACRFLHPYTS

SEQ ID NO: 62175 - protein, 384 aa, Zea Mays
MVFLLKGRFIFGPDARSLFVTMFLIVAPVSIFCPLVAKELMDKFSYGLGLPVMIAAVLFTAYDLSLLLLTSGRDPGIIPRNAHPPEPEGFDDNAEVGANQTPPVRLPRVKDVVVNGITVKIKYCDTCMLYRPPRCSHCSICNNCVERFDHHCPWVGQCIGLRNYRFFYMFVFSTTLLCLYVFGFCWVFVVKIRNAEQITIWKAMTKTPASVALIIYTFIAVWFVGGLSVFHLYLMSTNQTTYENFRYRYDQRANPYNRGIMVNIKQILFTTIPPSKNNFCGRVQQEHGLRPRPTNGFMSPNMGRAVGDIEMGRKPVAWDEPRMAAEIGDLGAGLSNLLEDKDGRFRSASPDLSRDALAVGGGLEEEGSSAMNAGRSSWGVEAGR

SEQ ID NO: 62176 - protein, 253 aa, Zea Mays
MSITSDEAGKEIVKCMNMAKDGIHAVLMVFSATSRFSREDASTVETIKVFFGERIVDHMILVFTYGDLVGESKLKKMLNNAPEYLQNVVELCQNRVVVFDNVTEDRRLQAQQLDKLLDVVDSVCAKNGGKPFSDQMFTSIKEVHDREKEVHTSGYSDEQISELKKEIHRTRDEQLAHITNMVEEKLNCTVEKLQQQLMEEQNARLEAEKVAYEARLKSEAEIQKLKESLKKAQMENDEFRRMAQSQGSKCAIL

SEQ ID NO: 62177 - protein, 203 aa, Zea Mays
MRKAGFQANDYYLKELIVEWCEGVLSSRSDNQDFYNLDLQPETERKESFNLFLEKVVTVLQKDTDQNQIVDVRGLSKVEARIVVLSVLRKIKEQYLLGRVVQDDVVIITGHEKTSTTEAETTTSAVDVVQAIVTVLTDDLGLEVLIGPGSCPPVSSKPKAPTKSRSNLEQISKEFTRRPQGMIKIPINSLNHWLRKKAVRIAE

SEQ ID NO: 62178 - protein, 109 aa, Zea Mays
MEEQRQESTKSDDENKANDGDPSSNETEPSNGKTDINDTPMDESQATDEDGRDSGKNGGGTDLNLNLGLKDPDGDNEVETSEKHVAANNPQTENRSKRKSVTPDLEMTM

SEQ ID NO: 62179 - protein, 365 aa, Zea Mays
MLPCFLASPSEAIGTDGSGTTTCGAGGSVSNSIAPSTTTNTFAGLFASATTSTTSHSTSLRDLIGVDPTFLCLAIGAPSLFPQTSASNSGTFALLPPAPHMSATALLQKATEAGATQSSSSFLKEFGLASSSSSSSSQPSSKQVPQGRVGAADTSAEPPWPYRSNQQVDMERRQSHQRREMESCSQQWHPSSTQQTEMERRHRNHHQEREMESSSQQWHRHHRNDRQMGSESYRSNQQMQMESSSHQWLQHRSSEQMVGRRHHLERVESRGMLLSGGGLGLGLAYESGKSGLPDLMTGPSPSPSPLLGPKPATLDFLGLGIGGTMVGSTGLPALVAGGELDMGSSAQVPAPWDDAQRKANGRTIL

SEQ ID NO: 62180 - protein, 338 aa, Zea Mays
MSPEHAKVARNVPGVHVQVGRMVFPLDDGRLGELHFPGMGGTDFGPSAQSTIRRKLSNKYEWSILDAPETEGWNAEYCTEEHGPTNCISGAKNIAADTESNDLSNNPPSRRRKVEEKQHYLNVNRYQQSDETESYNFLSRTIDLNFHMRVMHADRSLFLIADNGLTFEYLNSNGVWLWLRHEHVTAMKGTLGSYNGSLYLVDVHGNLHIRERNGDELLWINCTAMKKGRQVASGSPWDGIPGLLRRVTTDDALFFVNKRGRLLQFTVALRKFKWKDCHSPPDTKIAFIVDQEVFRRNIIFVGRPCGHRRCPWPAPCSWCPSTGGWWSTTSAHRTGGSG

SEQ ID NO: 62181 - protein, 265 aa, Zea Mays
MPRLSCKFADPDSAVSSAPVARRVRSDTMSCGSDVCRDGGSSSGSEEFRRPRPSKVAADDSVAPARSSDAAAPASWIDRKLLVDPKMLFVGDKIGEGAHGKVYKGKYGDQIVAIKVLNRGSTPEEKATLEARFIREVNMMCKVKHENLVKFIGACKEPLMVIVSELLPGMSLKSYLHSIRPSQLDTHTAISYALDIAHAMDCLHANGIIHRDLKPDNLLLTANRKKLKLTDFGLAREETVTEMMTAETGTYRWMAPEVVNTIFLH

SEQ ID NO: 62182 - protein, 437 aa, Zea Mays
MWWKPLTLAATHGNMSFSLISAADALLGSSASKYSALDCQRPELLNKRKVQGKILLCGYSFNYISGTASIKKVSQTARSLGAAGFVVAVENSYPGTKFDPVPVSIPGILITDVSKTEDLIDYYNSSTVRDWAGRATAFKATAGIADGLAPTLYNSAPQVALFSSRGPDVKDFSFQDADVLKPDILAPGNLIWAAWAPNGTDESNYAGEGFAMVSGTSMAAPHIAGIAALIKQKNPKWSPSAIKSALMTTANTLDKGSHPLRAQQYTASEMMTLSRATPFDCGSGAVNPKGALDPGLVLDASHEDYITFLCSIPDVNQSEVSNIAGSACNSNSKGQRPFDLNIPSIAVSQLRGTVVVKRTVTSVSDETETYTIMTRMPPEVALEVTPPAVTVVPGASREITVTLTARSVTGTYSFGEIAMKGDRGHLVRIPVVAMGFK

SEQ ID NO: 62183 - protein, 73 aa, Zea Mays
MLIILLPFCMCINGQWLVFQCKIFYKNCIWSFARFPGALFQSPTIIIITRLWCVYLNGFHWLQLRCMVLKSAD

SEQ ID NO: 62184 - protein, 244 aa, Zea Mays
MHDINLQLLGDHQRQNAVTAACAALCLCSQGWDISDASIQAGLEETQLPGRSQFLTAEEASALGFDSASTVLIDGAHTEESAKALSGVIKTVRPEGPLALVVGMASDKEHLAFAEQLLSGQTPDVVLLTEASVAGGTSRAMPASSLKEVWIAAARDRGIEYVDIGGVSGAETPEHISDLLDCSPSSNSGRKPMVIGCQDVAPFSSNLIVAASQLLESRGTAPGLICVTGSLHLVGAVLQQMGRH

SEQ ID NO: 62185 - protein, 362 aa, Zea Mays
MDQIATPDETAHASAPSVHKLFDAKLGHHSVMDGTLASTSQSSNIKTQLIRSSSLSRSISVNLEKRSPESDPESPQSHVSHPKFAEPMFSNSSTFCTSLFSSSSTTEPCRQMGTLPFLPHPPKCEQQVSAGHSSSSSLLLSGDTGLDVAEQSDDLNDLLNLSGDASDGSFHGENNALAFDEQMEFQFLSEQLEIAITDNEKNPHLDDIYGTPPQLSSLPVSSCSNQNLGSPVKVQLSSSQSSSSSATANKSRLRWTLELHERFVEAVKKLEGPEKATPKGVLKLMKVEGLTIYHVKSHLQYRLAKYIPEPKDDKKASSEDKKAQLGKGSIDSSKNKNLQVAEALRMQIEVQKQLHEQLEVGP

SEQ ID NO: 62186 - protein, 385 aa, Zea Mays
MALQLRRLLPHGYAQRHRAVIHALSLLPPPPAMLQFEVFQRYSSSPWPFSPFRPCKMCGVAFRSNSTRKISSRNNFGVALQPKSSAFITPRLFGSYSSVCFRATASCGIALKANNIGNSRPFSTTYSKKIRFLVKNKISFSNLNMRRKDGSVAHSLLHRSEKCQSTLATCSTIVDEASTSTSNNSKSVTDAKTDTAKRKSSRGSKKEVDGDMKEKEVHTNKKRIFARTRKAATKTSDNISTNQENKKTDNCKLKRGADSFKEKKVNNRAKSKAEVSAASSVPEICMQSSIDGSVIEKKPLVPLYPPRAKSVVVVESATKAKVIQKYLGDMYEVLPSYGHVRDLAGRSKSVRPDDDFSMVWEVPAAAWTHLKSIKVALQRKFNSCI

SEQ ID NO: 62187 - protein, 161 aa, Zea Mays
MLYVEGKIPTVGPLSILASLNEPDFVELALHEYKSATNMTEQFAALAALSQNPGQVRDDALLDFYNKWQHEYLVVSKLFALQATSEIPGNVANVQKLLSHPAFDLRNPNKVYSLIGGFCGSPVNFHAKDGSGYKFLGEIVLQLDKINPQVNAKYLFSWVFT

SEQ ID NO: 62188 - protein, 523 aa, Zea Mays
MSTAPARRARPPLPLQNGAEGDDEREEEVDEEEVGDDEAEEEEDDDDEEEPRLKYQRLGGSVPAILSTDAAAAIAVADRMVALGTHNGTLHILDFQGNQVKEIAAHTATINDISFDADGEYIGSCSDDGTVAINSLFTDEKLKFEYHRPMKAIALDPNYARNYRRFATGGLAGQVLVLTKKSWGGYHKKVLRDGEGPIHSMKWRADLLAWANDAGVKVHDMRTDKGIAFIERPKGIHRPEFLLPHLVWQDDTVLVVGWGTSVKIAAIRTDLSQGLNGLQRTITTASSEKYVDIVGSFQTGYHISGVAPFGDLLVVLAYIPDEDEKEKTFSTSVTSRQGTAQRPEIHLVSWKNDELTTDALPIHGYEHYKAKDYALAHAPFSGSSNAGGQWAAGDEPLYYIVSPKDIVVAKPRDAEDHIAWLLQHGCHEKALAAVEAGQGRTELLDEVGSRYLDHLIIERKYAEAAQRCPKLLRGSPSAWERWVFHFAHLRQLPVLVPYIPTENPQLSDTAYEPHRSYLPLSHS

SEQ ID NO: 62189 - protein, 1196 aa, Zea Mays
MGLIVVLIRTLGMLRSRFESLPEAFNERLIPSDANKSKGLRAAFSSRPKASGDERQKEKRAARFAQMWNVIITSFREEDLIDNREMDLLLVPYCKDRELDIFQWPPFLLASKIPIALDMAADSGGKDRDLTKRIKSDPYFSFAIRECYASFKNIINTLVFGQREKDVLAQIFAVVDQHIEDETLIKDLNMRNLPALSKKFVELLELLQKNKEEDLGQVVILFQDMLEVVTRDIMEEQDQLGTLLESAHGANSRKHEGITPLDQQDQLFAKAIKFPVDESIAWTEKIKRLHLLLTVKESAMDVPTNLDARRRISFFANSLFMDMPNAPKVRNMLAFSILTPYYKEDVLFSLQNLEEPNEDGVSILFYLQKIYPDEWKNFLERVGCKNEEGLREDEELEEKLRLWASYRGQTLTRTVRGMMYYRKALELQAFLDMAEDDDLMEGYRATEVMPEDSQLMTQCKAIADMKFTYVVSCQQYGIQKRSNEPCAHDILRLMTEYPSLRVAYIDEVEAPSQDRNKKIEKVYYSVLVKASVTKPDEPGQSLDQVIYKIKLPGNAILGEGKPENQNHAIIFTRGECLQTIDMNQEHYMEEALKMRNLLQEFEKKHGVRYPSILGVREHIFTGSVSSLAWFMSNQETSFVTIGQRVLANPLRVRFHYGHPDIFDRLFHITRGGVSKASKIINLSEDIFAGFNSTLREGNVTHHEYMQVGKGRDVGLNQISLFEAKIANGNGEQTLSRDIYRLGHRFDFFRMLSCYYTTIGFYFSTMITVWTVYVFLYGRLYLVLSGLDEALATGRRFVHNAPLQVALASESFVQLGFLMALPMMMEIGLERGFRTALSDFILMQLQLASVFFTFSLGTKTHYYGRTLLHGGAEYRATGRGFVVFHAKFADNYRLYSRSHFVKGIELMILLVVYEIFSQPYRGAVTYIFITVSMWFMVGTWLFAPFLFNPSGFEWQKIVDDWTDWHKWISNRGGIGVAPEKSWESWWEKEQEPLRYSGKRGTVVEILLALRFFIYQYGLVYHLNITKKITKDNQSVLVYCFSWVVIFVILLVMKTVSVGRRRFSAEFQLVFRLIKGLIFITFTAIVVILIAIPGMTVLDIFVCILAFMPTGWGLLLIAQAIRPVIHKTGLWGSIKALARGYEILMGLLLFTPIAFLAWFPFVSEFQTRMLFNQAFSRGLQISRILGGHKKDRGTRNKE

SEQ ID NO: 62190 - protein, 427 aa, Zea Mays
MSGRTRRKSQMHCKTKHMSCNEGSDNLQAKKLLHCLSSEPLRRWCTYEWFYSAVDYPWFSSNEFVHYLDHAKLSHLSRLTIPEWGTIRSSLGIPRRFSNYFLAVEKENLEDYREKVRKIYAQLSDGSRDFLPADLARPFSIGQQVIVRHPNSRELCDGKVVMMGPDCYKVHFDDPDIGVDIVKDTDCMPVNWLYNRPDNMRSCLSNDAYSILEMDHIPDLTASENEDHAVNGSTVLEGLKSLRLTSDRQPKAESIVNSERPPYRSTSDSPAKSRDCPDNNSAGHYDELESYIAAFAERSLSQARQMVDKAMQANPGGNEDEKVCTSNQVAGCAGPGFEPARGAQLPSDLISNGIATVLSIKSLSDSRHPFANVAGVLDHACSMLRPSCPQNLALYDQIKRDIGIIKTQIFALMPTALGNCSPPVPPM

SEQ ID NO: 62191 - protein, 631 aa, Zea Mays
MYVELWCEEQFNRLVLGPPEFSNEELLPPHVDLLVAAFTRINEPDSIYGLTLSNEIASQLIRYEHEGDWSSALEYYDLLVRSMPKEHLGTLTGSVLTGPSTVSSRAEDTMLNWKMHKGLMRSLQKTGCSHVLDVYCEGLSHQKGCLQQDAEFIDIQYEAAWRAGNWDFSFFVPYSSWSSTRSRSSCLFNENLHSCLRALQNGDSEEFHAKLCQTKMDLVLALSNTSKESTKYIHSTILKLQILDHATMVWDLRWNLNPNQTSKSPVTKEFSHISTVPKGIQLELLDKEWNLIMFQAERNLDLFEPFLAFRRALLKILGCEEHLVKHLFQSASALRKGLRFSLAAAALYELKELCFHRDESTMTNTYLLARLEDAKLLRAQGQHDMAISLGKYILQKLSDKKNLSDVYRLVGKWLAETRSSNSRTIIEDYLRPSIDLSEFEKSTDKRYMSRQCRTHFHLAHYTYSLFRSYEERLSSNEWQAALRLRKYKTRELEILIKRLRSSSKGVKTDYSVKIQELQKQLALDREEAEKIQDDHDNFLNLALQGYQRSIVVGGKYDLQVVFRLVSLWFSLFSRDQVVKAMLKTTKEVQTYKFIPLVYQIASRLGSTKDAQGSFNFQIERTVHVREALSTR

SEQ ID NO: 62192 - protein, 281 aa, Zea Mays
MAVTVVRDVETGLDASTSDRDGDAGDNPSWFTPKRLLVMFCIINMLNYIDRGAIASNGVNGTRKSCSGGTCTSGSGIQGDFDLNNLEDGTLSSAFMVGLLVSSLIFACLVKRYNPFRLIGVGLLVWTIATAGCGVSFDFWSITICRMFVGVGEASFISLAAPFIDDNAPVAQKTAWLGMFYMCIPTGIALGYVYGGLVGKYLNWRVAFWGESILMVPFVILGFVIKPLDLKGFAHNTGKEYGQMLNPEVQDQINNNGTKNVLPSRIEDLSGKVQFLPCSHD

SEQ ID NO: 62193 - protein, 197 aa, Zea Mays
MAILAVASPFKTLNPSPPDHSRTRRRLPSSILHLPLPVPRCRRLRCSAKYSEAAAPSASTTTPRPSEIPWSKDICNSVRLIGTVGTDVELRQLPSGSAVARGRLAVWKSATETTWVTLQFWDDMAIVSSEHVKKGDRIFVAGRLVSDTVDEGPEKRHVYYKLAVQQLNFIESQPVRLYESDASQDAPEEPKVSRLQA

SEQ ID NO: 62194 - protein, 1057 aa, Zea Mays
MVRSKEAPKKKPKDPLLTPPSKPRGGFLDEGCPWNRGGAAMSPAPASVPSYMRGTSSSDAKAERRGRPAATVSASASPARWRPAASVSASASPAPRRRPAVRVLTKGKVLFAEEEPCSGSGMGRATCSSTMKDTKFPEALDLAPGSTDAEGPAALRVCPYTYCSLNGHVHAPAVPLRSFLASRRRLIKTQQSMKLKGVSAFRKKSEERTSGGSGSGGGAKIAPLIDEEAVGDFFVEVYGGPRVSSDMSCSDMSLDEMDATVRRMEFVVFDRCGADEDGEKGKDLAVCDDGEPEPRPVLQQKHGAFGDSLSECSGVHIDNDFVEELPWLKYHGYEYDDSLDDEILEEQRIGEQEVVGAEFSVEQEAEQGTSGRSSDEYKEDAADEENTTNLVRDQEILSDQGVACRVEACEELGGRDEDNILEASAGQGKAEEKLSDDIYKSEIPDQEITARTCATLEGSFEEDISSDQEANDDDEDECHVKSDGESEDTEEQDLEDQQSMPDDVSKMEISEDTISGDGCKEDFSEEVTSAAVLADDVFEQYEKTVDDVHEQDSSPAKAQMELGNPTSKKEDTSEETAILQQINQDSNVDTQRELEIRASILEESGIAQQSNLDGDKMEPEIIVCKLEDVSEESGACTESNLHDNTEYVIDDAEMRQEITLCKREDASKETGIDQETLEDDSSTCGIVDDRNNLEINNCKSEDVSIESVGTQEADHNDNFANFSNDVQGTAEDHDSHLIDDAQNDIQIPGGKSEDTCKEFDTMKETDQSDSSANVRYDAEETVEDDDSVCVSDDAQNDLKNTKCKLEDASKESSTAREAERSDSSANVIADSQNGSELTTNELAVITISNDKENESMLFTCNSEDGFKESIIGQQADHDDSSAYISYDDQNECEVTACHSEGAQGESNVVQEECTDAKEPSIDDICGAFSGMNLKGDVYFDPAESATCPRNKLIISRRRRTPEEEEYLRGFNPRAPNFLPLELDPDAEKVDLKHQMMGERKNAEEWMIDYALRRAVTNLAPARKKKVELLVQAFETVLPHDEDDKKNVSPSRPVQACN

SEQ ID NO: 62195 - protein, 522 aa, Zea Mays
MDVRRLGGRIAAALRALGAGGSLSLPIPAWITNALAMISLVLSSCDLLRLCSDRDRRLRFSLGGREFVTVVCQLASIVYLFSLCGTGIPSADPETPARRDQGAGSPDQTRAADAPETLHGGDEEIVAAVVSGALPSHHLESRLGDCRRAASLRREALRRMTGRGVDGLPLDGMDYQAILGQCCEMPIGYVQLPVGVAGPLLLDGKQYHVPMATTEGCLVASVNRGCRAIAASGGAVSVLLRDAMSRAPVVKLPSIKRAAELKAFVETITNFEILSAVFNRSSRFGKLQGIQCALAGRNLYMRFTCSTGDAMGMNMVSKGVEDVLGYLQNDFPDMDLISLSGLVLPFCYSKEKLVLHSFNKTVQEKNIRQLNTIYHCHLFLLVIATARLSPAGNYCSDKKAAAVNWIEGRGKSVVCEATVKGGVVQSVLKTSVQKLIELNIVKNLAGSAVAGALGGFNAHASNIVTALFIATGQDPAQNVESSQCITMMEAVNDGSDLHVSVTMPSIEALLGAALVLLHRLHV

SEQ ID NO: 62196 - protein, 185 aa, Zea Mays
MLLNQEIRRISNLLSNFGLRGNERSPPIASPNHMHPLPRVPNFCGNSFGPWNEMHPERNGLPRGAMGWQGAVQNHSSYIVKKIVRLEVPTDAYPNFNFIGRLLGPRGHSLKRVEATTGCRVFIRGKGSVKDPVKEEQLKGRPGYEHLGDPTHILIEAELPADVIDARLAQAQEILEELLKPVVYI

SEQ ID NO: 62197 - protein, 86 aa, Zea Mays
MVSKQTRRLLVLAAVAVCLHLPAASVATDVDYCSKKEYPVKVSGVQIVPDPVEPGKPATFKISASTGIVLDLLVAASVFAGVTCRW

SEQ ID NO: 62198 - protein, 326 aa, Zea Mays
MTTDPNGNGNGNDKPMLVSIRTKGQRDSTLPSIAEPEPLPPRHNYRHHRRRPKAHSMCVCTMLRNQARFLREWIIYHSRIGVERWFIYDNNSDDGIEQVLGTMDPSTHNVTRHLWPWTKSQEAGFAHCALRARESCEWVGFIDVDEFLHFPGNQTTLPDILRSYSNRPRVGELRTACHSFGPSGRTRIPKQGVTTGYTCRLAAPERHKSIVRPDALNPSLVNVVHHFHLREGARYVNVGQGAMLVNHYKYQVWEVFKDKFSGRVATYVADWRDEENVGSRDRAPGLGTRPVEPEDWPRRFCEVYDTGLKDFVQKAFADPATGSLPW

SEQ ID NO: 62199 - protein, 64 aa, Zea Mays
MEGVAIGRKLDLLLLDGYDSLLAKLRHMFKASITYRDGDWMMVGDVPWELFLGSVKKLRICKNR

SEQ ID NO: 62200 - protein, 147 aa, Zea Mays
MVEASGSEAGSHQTRSSRTNAGEGGDVRRGGGGAGGGGGGGGEAARRVTARAGPAPAAARRGALAAGAVALPAQGWRRRGGALHRARAVRGAGRAPQELRRLPRLQQASQGLLAPRVAVPRWLSSISVPSSISLPHFCPPVRNYCLL

SEQ ID NO: 62201 - protein, 57 aa, Zea Mays
MRELLNGIATCILLHISRRQIAPKTVTFGWEKIENTLLLLTRKMTNKLIKSTSYPKA

SEQ ID NO: 62202 - protein, 182 aa, Zea Mays
MGEAADRERPPWRCTVAVQAALCLALYAAFSLGEPQLIPRGGVDALGRGARGGGVAFLSVAGGARGPIDQERLLRQMETTAKLYEVKFVLDVTQLGADDPLWQNGSMYFQALNIPWYSTSSHGRTVGNFLKKVKMPYDQVLDIIGLGTWPLQEPLHGGRISTSYKGQIKWLDRLLALTESNW

SEQ ID NO: 62203 - protein, 645 aa, Zea Mays
MEGEGDASGSDEVVQLEDAVELLVEHLVVPVLPRGQVDREEALSPEAQEAVARQVHATVLLYNYYHRKQFPQLEFANPERFSMSASLSVTNKNLLMYLNQAQNRLGNGVGAGLSVTDKAIVDACDIAEALDPTKDSPEMTTWPISKVAVLLLNRTKKECVLEHGSETKGVWSMFEKEITTALGGSLSSDMPVQGSSNKSVGLPSEPYVLQQIAYSEVELKTGMKHTNLRFIEEHRVYSLSKKGTATMLFLLHYDQTVDSKLKEMPLDALIERMSGPIFQSGPYPTTTSVVEYYHLLPYKEVLLNVLNRDWPLCSSLSVPKEQVFQNGKSSFPSEIEESLKEQEANSNSKTKMKKMPTDVSTPKKNKQVVKAVRDSGTNESSTSKNKKGSNTNCKRTSEACKTKVATYAEHGDGQSPTKDLQASAQMDKSRTEKNTKSRNVPQNIFLTPDVGPVNNDHALKSQKEKVTDKSGGITGNMNVQKYATLQLLWKMRDDTLHEHFMLGDRCAEYEMDIQTILTETEMTPKVMSILKKYENSWKAMKVANPISSGEGCQTMNIKRKKLKEAILLRNRCQELDDICRESNWILPRYRVLPSVTGDMYQASVHLMGPDFNLSVDGDVRVTPHEARDSAASNMLSQLQQKAREG

SEQ ID NO: 62204 - protein, 209 aa, Zea Mays
MDEVASFAQLPFKEVDIAVPEIFVGGLLGSMLIFLFSAWACSAVGKTAQEVVKEVRRQFIERPGIMDYKEKPDYGRCVAIVASASLREMIKPGALAIISPMAVGVVFRILGHYTGQPLLGAKVVASMLMFATVAGILMALFLNTAGGAWDNAKKYIETGALGGKGSESHKAAVTGDTVGDPFKDTAGPSLHVLIKMLATITLVMAPIFL

SEQ ID NO: 62205 - protein, 76 aa, Zea Mays
MRVAGVSTGKKKQLRFHPHVIFPARLVEPTAKLARPPRPLGERGGRLAGLAGWLWRQDRARQRDARLCPGLVLGKS

SEQ ID NO: 62206 - protein, 633 aa, Zea Mays
MTVDELKLQARASGGHGAKDQFPVGMRVLAVDDDPTCLKILENLLLRCQYHGMPRSSRSPLSLSSPGNDNDDSGKKLQVVSAEGDNGGVNRNKRISRKGRDDNGDDGDDSDDNSNENGDSSSQKKPRVVWSVELHRKFVAAVNQLGIDKAVPKKILDLMNVENITRENVASHLQKYRLYLKRLSADASRQANLTAAFGGRNPAYVNMGLDAFRQYNAYGRYRPVPTTNHSQPNNLLARMNSPAFGMHGLLPSQPLQIGHNQNNLSTSLGNVGGMNNGNLIRGAHMPLQDTSKCFPTGPSGNSFANISNSTQLVTTNNLPLQSLEPSNQQHLGRLHSSADPFNSFVGEPPQFADLGRCNTTWPTAVSSSNVQEIGQKDRIVNRPKLEPLSSFTEASSQIPLLGSEMQSHQVASLASNGLPMPFTQEAVPFAYGSSTNSREMLNNNLALSNSGVNSTLPNLRIDGSVVPGQTLGGSNSGGCVVPPLQDGRIDHQAVSSHLNYNNELMGTGRLQRGLSGGLDDIVVDMFRPTMASPSLMGTGNWSSKFQFSTSSLPSCEIFRICGCGGVRRLIGPKLFIVARLHHKCPLHLVFQFSDQVPVSRPNINYVVFATLTRMAMFSSQVLTVAIVIYTAWL

SEQ ID NO: 62207 - protein, 149 aa, Zea Mays
MARRRRGSAWRATRRRSRLTASSRSSAARHSTSSRASPPSSASPSSPGPHTPRSASTAAASSSSAPRSLRRTLSLTPPRLPLLRRMRKRTTTMGTASTNTSIEVCRPKRKNGDNFLRTYLFMCFCYKVLGHTFVGAQCDPDILCVSNWS

SEQ ID NO: 62208 - protein, 115 aa, Zea Mays
MAAKKVVLKLDLHDNRDKQKVLKAVSTLHGTPLLSPALLPSTVTVMEAARLQEHRLHRGGHEGVQADGGRAGGPRRRRGQAAQGRLRRHRLRRPGHGGEKERRRQEGGGRRQEGR

SEQ ID NO: 62209 - protein, 327 aa, Zea Mays
MIQQFVPNIRSGSFADIGPRRYMEDEHIRIDDLSAHLGSMLVCPLPSAFYGVFDGHGGPDAAAYMKRHAMRFLFEESEFPQASQVDEVYLESVESCVRRAFLQADLALADDLDISRSSGTTALTALVFGRQLVVANTGDCRAVLCRKGVAMEMSRDHRANHVEERERVAASGGYIEDGYLNGVLSVTRALGDWDMKAPGASASAALIAEPEFRRATLGEDDEFLVMGCDGIWDVMTSQHAVSLVRRGLRQHDDPARCARELVMEAKRLETADNLTVVVVCFAPEMGSPFTPQQQQEEELPARPRSCKKGLSTEALCSLRSWLDTDHR

SEQ ID NO: 62210 - protein, 443 aa, Zea Mays
MGDFNVALVIVAAVVSVLVLLVSVYLLVNYQHPDDVNQAYFPKLVVVLGLTVAVLSILMLPADVANRQACRKAVYNGACSLTLPMRTLWLVVYIVDAVLVFLVIPFAMFYYEGDQDKSVGKRLRTALIWVVASAVVCGLVLGILYGLVGKVDFTVRHLSSSVQTFPNSFSGFSSGQPCISPLTRQCAASTAPANSQTTWTMRATFPEYVVALTTIVGSVLFTIFGGVGIACLPLGLIFSFVRRPKAVITRSQYIKEATELGKKARELKKAAEALHQEERSGNKGRKWRKNVKAVEKELLLLEDDMKALEEMYPQGEQAEATWAFTVLGYIGKLIFGVVGLIVSIAWVAHIVIYLLIDPPLSSFLNEVFIKLDGVWGLLGTAAFAFFCFYLLIAVIAGEMMLGLKLVFITIHPMKWGGTLMNSFLFNVGLILLCSISFYLERQS

SEQ ID NO: 62211 - protein, 130 aa, Zea Mays
MLGGKRHSLGMSFYEPTVVGNVSNDMLLFREEVFGPVAPLIPFKTEEEAVHMANDTNAGLAAYIFTKSIPRSWRVSESLEYGLVGVNEGIISTEVAPFGGVKQSGLGREGSKYGIDEYLELKYICMGNLG

SEQ ID NO: 62212 - protein, 534 aa, Zea Mays
MADEALDQPPDAAPSPSLAPATPPAPATSSPAALLRPRREAFEHGLLPIPKLIFPEGMLAQTLAQLKEKLAASVPDGRVRAAALAEALQIPQEQAALALGTLAAVLPAEDPVLGDGAMDGAAADIRDVLLFLYIQSYKRLVPRSAHKDSPAVADVWPSTSAFDGYLSALSPIQLVRSNSRRFMPSQADEEIHQLSFLQKHMANILTLLADSVEGEGDDSLVLTMETFEHLGFLVQFSEGTSLSQAATFFANSDPDMPAVPVPAAQVLDWMSQNIAFSLEYSSERSVAKESNQQTMSDLDVTMAEANTSHSRNSTPSANPAYYRNVTFVEGFSKTSVVKHASDVKGNSIKVLNCHDSVIYILAPLKYATVYGCSDATVVLGAVGKVVKVEHCERVHIIAAAKRICIANCRECIFYLGVNHQPLVLGDNHKLQVAPFNTCYPQLQDHMMQVGVDPSVNKWDQPFVLGVVDPHDSLSHPAGVADVKAESATCLDPDLFTSFLIPSWFGDEGQEPINCNPFPLPEIYEAFQSKKISKR

SEQ ID NO: 62213 - protein, 136 aa, Zea Mays
MASGGGGGLGAAGAGGRMPTWRERENNKRRERRRRAIAAKIFAGLRAHGGYKLPKHCDNNEVLKALCNEAGWVVEPDGTTYRQLAGSSLQGFFFSSIFLMGGWVGLGVARGRCAKGTGCQSGRLDRARVVWGGWSD

SEQ ID NO: 62214 - protein, 459 aa, Zea Mays
MAHRGHLDGLTGQAPALMRHGSFAAGSLSSRSPLQSSSTLEMLENKLAMQTTEVEKLITENQRLASSHVVLRQDIVDTEKEMQMIRTHLGEVQTETDLQIRDLLERIRLMEVDIHSGNVVNKELHQMHMEAKRLITERQMLTLEIEDVTKELQKLSASGDNKSLPELLSELDRLRKEHHNLRSQFEFEKNTNVKQVEQMRTMEMNLITMTKQAEKLRVDVANAERRAQAAAAQAAAHAAGAQVTASQPGTAQATTVSAAAATDSYAGAYTSYPPAYQQGAQAGAYQQGAQAGVYQQGAQAGAYQQGAQAGAYQQGGQDGAYQQGAQAGAYQQGAQAGAYQQGAQAGAYQQGAQAGAYNYAYDAGTAYAYAGYSGYPVAGYAQSAVPNYSYAAPPQPTSSGAATNAAGGQYGAVGSAGYPTGQVQPSSGTANAAQAPPPPPPPAAPYPPSTYDQTRGAQR

SEQ ID NO: 62215 - protein, 728 aa, Zea Mays
MACKVFDLAPDEVCIWDYYGRTKHSLMDSLDKTLDDANIQMDQNILVEVTTDASGSLDGLVKRNNFFESDAPKSGLPDENFAANNYASRSYSSSLTPSIYLRSPNGDLDNVHGSSGMITRGSPLGLTGLLNLGNTCYMNSAIQCLVHTPQFTKYFCEDYHREINRQNPLGNVGELALAFGELLRKLWAPGGRAPVSPRPFKMKLSRFASQFSGYNQHDSQELLAFLLDGLHEDLNRVKHRPYINSGDADGRSDEEVADEYWANHIARNNSIIVDVCQGQYKSTLVCPVCGKVSVTFDPFMYLSLPLQFASTRSVTAVVFSCDGSVPPTPFTVNVPKQGRCRDLLQALGAACSLKNGEKLLIAEIRNHKIYRFIDDPVLQLSTISDDDHLAVYKLPKLEKRVNYIQFVHRHEDLDHGNNNSLTSWKPYGVPLLAQISRNEIVTGFDIHELVHKMLVPVLRNPDSLHLAVQSSVSTRTHSYHTDSSKCQLLLVDDSNTVIEKSNDAIRIPQSSLATVFFINWPKADLKKIDTHHLEYLPEVFMYAPPAKRTRGEALSLYACLDAFLREEPLVPEDMWYCPRCKEQRQASKKLDLWRLPEVLVIHLKRFSFSRSTKQKLETFVNFPIHDLDLTNYIANKKTSERQIYELYAVSNHYGNMASGHYTAHIKLVDENRWYNFDDSHVASIDEDEVKTAAAYVLFYRRVREQDIARGTSNGSQLYAKRSHGYSHR

SEQ ID NO: 62216 - protein, 53 aa, Zea Mays
MDESVYKELVERAKEEGYDVSKLRKTAHPDPPPESEQSPRDGGMWWVKSIFGK

SEQ ID NO: 62217 - protein, 1166 aa, Zea Mays
MPPRVQPANMYIPWCSSWIVFVDVRADYGICFATVVPNLLPYAISHLGKKMEGTINACIAGFALLSYVLGLLVSQPQIPLTMNVIFPKISGESAYSLMALLGANIMAHNFYIHSSVVQGQKKSSAVGLGALFHDHLFSILFIFTGIFMVNYVLMNSAAAESTNTLLITFQDVVELMNQIFVNPLAPTIFLVVLLFSSHIISLTSAIGSQVISHHLFGINLPLSGHRLLLKVFAIVPTLYWAKVAGAEGIYQLLIICQIIQAMLLPSSVVPLFRVASSRSIMGAHRVSLHLEILVFLAFLLMLFSNIIFVAEMLFGDSGWMNNLKGYTGSPVVLPYTVLVLVALISVAFSLYLAVTPLRSGSHEAESHEWSVHSQRELLNTSQEREDVKVDNVTYEEDQRSDVVPSPRDVPDSHPELALDYIDTSDTAVESDHDSQQSTAYASTAPETCSSPSFTREESKSVVAVNWPEPLEKVPTSTVMEESTVENVVSRITTERDVLVETDVVSGKDKEDIRTLESEKSIVDSTPYVSDDGPPSLTFSRGKGSDAGNGSGSLSRLSGLGRAARRQLAATLDEFWGHLFDYHGKLTQEASTKKFGILLGIDLRTPSTSVRTDKQAAEILKSPLVRDSMRGAAFLSSSVDMMSPKNETSNLELAYGLQRGPGMGLSSWSQGMQLPNTQLQSSSNSLLEQSARLNSNFSSSYSDNNQFYQPATIHGYQLTSYLKQMNASPSLYSSMPLDPQRLPKSSVSAVPNYADSMMHARNHNLLASLGGTTTQLPATSRVGSMMPERSYYDPSSVDGNENAGSPAYSKKYHSSPDMSGIIAASRAALLNEAKLGAAIGPQSYLSRLAAERSQYASSTARPAAPLAFDELSPPKLQSDIFSAQSSMRPSARSLWAKQPFEQLFGMSSAELSKGDFNLPGRSGGVAKDDFSYKESETKLLQSLRLCIMKLLKLEGSGWLFKQNGGCDEDLIDRVAAAEKLLMQGTAENQLLLHGGDLQQHSSDQAGIQYMRTLPNCGEDCVWRASLVVSFGVWCVRRVLDMSLVESRPELWGKYTYVLNRLQGILDPAFSKPRGALTICTCLQKDTRVRNSPPHSGLTAMGPVPTPIRGAFTTAGVVLEMIKDVEAAVSGRKGRSGTAAGDVAFPKGKENLASVLKRYKRRLASKGQ

SEQ ID NO: 62218 - protein, 344 aa, Zea Mays
MEEAKRLHARLLRRGERRLQPLLLRVLAAGELRYAARLLGSCPASPPSAPLHNRLLHALAAARHPLLLPCFARAHRLRVLTPLSFTLLLSSATATAAACAHALLAKSGHAAAAPGDPFLASALVSSYARAGLLAESRRAFDELPAGAGAGAAAARNAMLSAYARGGRVGDAERLFAGMPDRSVVSWTAMVSGYAQNGRHEEAVRTFLDMWDGAGVRPNELTVSSVLPACAALGALALGRKVERYARGRGMLRNVYVANALVEMYAKCGSIRRAWKVFRGMGTRRDLCSWNSMIMAFAVHGLWTEALALFHKLRGQNQMALHLLESFWPVLMEAWWMKASCSSTR

SEQ ID NO: 62219 - protein, 473 aa, Zea Mays
MNADFGAPKELAGGLQQRRALYQPRLPPCLQGPTVRAEYGDATTTIDPTCAQAVAQAFPHTFGQPLVSFVAPAAGAGAVEERHPIRVGVVFSGRQSPGGHNVVWGLHDALKAYNPQSLLYGFVGGTEGLFANKTLEITDDVLASYKNQGGFDLLGRSIDQIRTTKQVNAAMTTCHSLNLDGLVIIGGVTSNSDAAQLAETLIQNNCKTKVVGVPVSLNGDLKNQFVETTVGFDTVCKVNSQLVSNVCLDAISAGKYYYFVRLMGRKASHVAFECALQSHPNMLILGEEVALSKLTLMEIISKICDGVQARAELGKYHGVLVIPEGLIESIPEMYALIQEINILHNSNVPVAEMSSQLSPWAAALFQFLPPFIRRELLLHQESDNSAQLSQVCDSECPTTTQSKLNVIIGVIVSYCFQIDTEQLLAHLVETEMIKRTKEGRYKGRKFSSVCHFFGYQARGSTPSNFDCDYAYLD

SEQ ID NO: 62220 - protein, 369 aa, Zea Mays
MEAMEELSELAESMRQAASLLADDDPSDAAAPRRPTTFLNAVALGNVSSGKSAVLNSLIGHPVLPTGENGATRAPIVVDLQRDPGLSSKSIVLQIDSKSQQVSASALRHSLQDRLSKGTSGGSGRGRADEIYLKLRTSTAPSLKLIDLPGIDQRAVDDSMINEYAGHNDAILLVVIPAMQAADVASSRALRLAKDIDSDGTRTVGVISKVDQADGDAKVIACVQALLSNKGPKNLPEIDWVALIGQSVAIASAQSAGSENSLETAWRAEAESLKNILTGAPQNKLGRIALVDTIAKQIRKRMKVRVPNLLSGLQGKSQMVQDELARLGESMVQSPEGTRAVALELCREFEDKFLAHITSGIWLENCCKF

SEQ ID NO: 62221 - protein, 1555 aa, Zea Mays
MKMCMPLLLPASGVIHFVMPEGQAMKANDLIARLDLDDPSSVRRAEPFHGSFPKLGPPTAISGKVHQKFAASVNSAHMILAGYEHNINEVVQDLLNCLDNPELPFLQWQELMSVLATRLPKDLRNELDGKYKEYELNPDFCKSKDFPARLLRGVIEANLAYCSEKDRVTNERLVEPLMSLVKSYEGGRESHARVVVKSLFEEYLSVEELFNDNLQSDVIERLRLQHAKDLEKVVYIVFSHQGVRSKNKLILRLMEALVYPNPSAYRDQLIRFSALNHTSYSELALKASQLLEHTKLSELRTSIARSLSELEMFTEEGERLSTPRRKMAINERMEDLVCAPLAAEDALVALFDHSDPTLQRRVVETYIRRLYQPYLVSGSIRMQWHRAGLIALWEFSEEHLKQRSGQDVPLQQVENPIEKSWGVMVVIKSLQFVATAIDVALKETSQYGIGVRSVSNSNHVHSNQSNMLHIALVGINNQMSTLQDSGDEDQTQERVNKLFKILKDNTITSHLNGASVKVVSCIIQRDEGRPPMRHSFQWSVDKLYYEEDPMLRHVEPPLSTFLELEKVNLEGYNEVKYTPSRDRQWHIYTLIKNKKDQRLNDQRMFLRTIVRQPSATNSFLTGNIDNEVGHTQASSSFTSNSILRSLMGALEEIELHAHSETVRSGHSHMYLCLLREQQLHELIPFSRMTGKIDKDEGTVCTLLKHMVLNLYEHVGVRMHRLSVCQWEVKLWLVCDGQASGAWRVVVTNVTGHTCTIDIYREVEDPTTHQLLYHSATTSAGPLHGVALNEPYKPLDAIDLKRYAARKNETTYCYDFPLAFETALKRSWKSSSYGVSEANEHNRFYAEVKELIFADSVGAWGTPLVSVERPPGINDIGIVAWNMKLSTPEFPRGREIIVVANDVTFKAGSFGPREDAFFDAVTNLACERKLPLIYLAATAGARLGVAEEIKSCFHVGWSDYESPERGFQYIYLTTQDYSRLSSSVIAHELQLKNGETRWVVDTIVGKEDGLGCENLHGSGAIASAYSKAYKETFTLTFVTGRAVGIGAYLARLGMRCIQRLDQPIILTGFSALNKLLGREVYSSHMQLGGPKIMATNGVVHQTVSDDLEGVSAILKWLSYVPPYVGGPLPIMKPLDPPERPVTYLPENACDALAAICGIQDGEGRWLGGMFDRESFVETLEGWAKTVITGRAKLGGIPVGVIAVETQTVMQVIPADPGQLDSAERVVPQAGQVWFPDSATKTAQALLDFNREELPLFILANWRGFSGGQRDLFEGILQAGSTIVENLRTYKQPAFVYIPMGGELRGGAWVVVDSKINPDHIEMYAERTAKGNVLEPEGLVEIKFRPKELEDCMLRLDPELIGLNTRLKEMKKQNASISEMETIRRSMTIRMKQLMPIYTQVATRFAELHDTSARMAAKGVIGKVVDWKESRAFFYRRLRRRVAEDALAKEVKEAAGEQLSHRSALDCIKKWYLASKGTEGDGEMWNDDESFFAWKDDPKNYENYLEELKAERVSNWFSHLAESSDVKALPNGLSLLLNKMNPLKREQVIDGLRQLLG

SEQ ID NO: 62222 - protein, 576 aa, Zea Mays
MTSKWHIGMESPTHSKVQTPKCRNQCHVEVEQPFSSSCIACMKLYEKLKADIEAAKNDETISGSWSKDKRQNHDAYVEIIEDGDGVEEIPALVYVAREKRRAWPHHFKAGALNALLRVSGVVSNAPYVLVLDCDMACNSRASALDAMCFLLDRRPPPDSLAFVQFPQLFHNLSHKDIYANELRYIFGTRWFGLDGVRGPPLSGSGFYVRRDALYGATPTADFMPDATAVAELKTRFGHSDRLVASLRSPGVPPEAEAMMSLAALASCAYEAGTAWGAGVGFMYQSVVEDYFTGFQRFFARGWTSAYCYPEPRPAFLGSVPTNLNDVLVQNKRWMSGMLAVGVSRRHSPLACRPLLRASLLQAMAYAYFGFAALCAVPVLCYATLPQLCLLRGVPLFPCPAATAAAFASSLLQHMAEVCVSRRGRLDLRTWWNEQRFWVLNALTAQLFGCVSAAQELLGARALDFDLTSKAAVDGSLYQDGVFDFTGCSALLLPATTLSVLNAAAIVAGTWKMSSSSSSSSGGFHFAPQLFLMCYGAALSYPLLEGMFLRRDPARVPPRITALSVALAAVLLAAMLG

SEQ ID NO: 62223 - protein, 1087 aa, Zea Mays
MTRLWSNVLVERYAKVLVPLLWSRVQVTGQIRLLTKGSICFGLSENPISEFELVAEELLMSDSVIKVYGAFRMYVKVLLMWDSNIQIDGGAKDVVLASMLEARNLVVLRHGSVISSNTDLMVYGQGLLNLSGPGDGIKAKRLFLSLFYNIEVGPGSLVQAPLDEAVPSNLDALSRCESKTCPSELITPPDDCHVNRSLSFTLQICRVEDITVSGIVRGSIIHIHRARTVTIAKDGTISASELGCKEGIGKGKFLKYGAGGGAGHGGRGGTGIYNGMRSEGGLEYGNADLPCELGSGSGGSALSADNTAGGGLIVIGSMKWPLSRLLVYGSLNSDGESHRGTSGNSNGTFKGGVGGGSGGSILLFLQWFLLEKNSSLSASGGNGGVYGGGGGGGGRIHFHWSYIATGDEYVHIASVNGTIVSSGGSGKNDGHCGEDGTVTGKKCPKGLYGTFCTECPVGTYKNVVGSNSSLCIPCSVDSLPNRAEFIYIRGGVTELPCPYRCISDKYKMPNCYTPLEELMYTFGGPWSFSIILSLTVILLALVLSALRIKIGESDITYRATNAIHNDGCSFPFLLSLAEVPGASRAEETQSHVHRMYFMGPNTFREPWHLPYSPPDAIIGIVYEDAFNRFIDEINLVAAYEWWEGSIHSILSVLAYPCAWSWKQWRRRKKNHRLQEYVKSEYDHSCLRSCRSRALYKGLKVGSTPDLMVAYIDFFLGGDEKRLDVASTIQKRFPMCLIFGGDGSYMSPYYLHSDTLLSNLLGQYVSTAIWNRLVAGLNAQLRTVRQGSVRSTLGPVVSWINSHGNPQLERHGVRVELGWFQSTASAYYQLGIIVAVNENFYKNLRHHEHATEFCERSRKNVAVPLQDFNQANLDQPCTSYAVSRKRLTGGVNGGIINEGTLKSLHYKRDYLFPFSLLLRNSRPLGYAETLQLLICIVLLGDFSITLLMLVQYYWISVGAFLAILLIPPLALLSPFLAGLNALFSRGLKRSSVTRIFALWNITSVVNIIVAIIYGSLYFWLSSLAVSSVHQVYNTKSFKSREDNEWWILPTILFLIKSLQAGLVNWHVANLEIQDYSLFSPDPDRFWAM

SEQ ID NO: 62224 - protein, 260 aa, Zea Mays
MHVAPDNKQNNWCMNPPQNQWLVPVMSPSEGLVYKPFAGPCPPVGNLLTPFYANCAPSRLPSTPYGVPIPHQPQHMVPPGAPAMHMNYFPPFSMPVMNPGTPASAVEQGSHAAAPQPHGHMDQQSLISCNMSHPSGVWRFLASRDSEPQASSATSPFDRLQVQGDGSAPLSFFPTASAPNVQPPPSSGGRDRDQQNHVIRVVPRNAQTASVPKAQPQPSSGGRDQKNHVIRVVPHNAQTASESAAWIFRSIQMERNQNDS

SEQ ID NO: 62225 - protein, 156 aa, Zea Mays
MAECKDDDSGRRSPSSSMDSSTHPPALSTASSASRRPPERRDQLSPDLQLGLSLSPASSALLVAETNNSIVPSTPRNQALPDWPPIKPFLRSALTASARRRRTLFVKVYMEGVPIGRKLDMLLLDGYSSLLAKLCHMFKASITSGSSREGRACSHL

SEQ ID NO: 62226 - protein, 196 aa, Zea Mays
MEAEKKPPAVSDVGAWAMNVVSSVSLIMANKQLMSSSGYAFAFATTLTGFHFTVTALVGWISNATGYSVSKHVPLWELVWFSLVANTSITGMNLSLMLNSVGFYQISKLSMIPVVCLMEWVLNSKHYTTKVISAVIVVAAGVGICTVTDVEVNAKGFICACVAVFCTSLQQIAARHCYWKPELCNSALNYSNTDQW

SEQ ID NO: 62227 - protein, 365 aa, Zea Mays
MEGRIKKDQGLFQQYEASHLSRCGVLYVGASTSPIVVFVFCICTLSLFFSLYLTKWVLAKDEGPPEMSEISDAIRDGAEGFFKTQYGTISKMAFILAFVILGIYLFRTTTPQQEASGLGRATLAYITVASFLLGALCSGIAGFVGMWVSVRANVRVSSAARRSAREALQIAVRAGGFSAIVVVCMAVFGVAILYSTFYVWLGVDSPGSMKVTDLPLLLVGYGFGASFVALFAQLGGGIYTKAADVGADLVGKVEQGIPEDDPRNPAVIADLVGDNVGDCAARGADLFESIAAEIISAMILGGTMAQRCKIEDPSGFILFPLVVHSFDLVVSSVGILSIRGTRDSGLISPIEDPMAIMQKGYSVTI

SEQ ID NO: 62228 - protein, 374 aa, Zea Mays
MGRDGEQTRRRSRKRSRDASPSSSDSDSFDSPSSPSSSPERRSRSSKRNRSSSSHRHSRKKSDRSRRSRDEDRRRRRRRGQERKRHGGDGGRSSDSQSSEEDRAEEAREIVRDILIELPAIAEELRQLLQIIDSGESIDISGISDKLLVKRLKKLFRSLRLKESASGAYLLPSKNVPTLDIVGSLLLASSKLADNKSGKPVSPNREALQQANFDVQNKDKDYIVSEEPKIVDVEEEPPKRRIIGPAMPSRELLAAAAEMTEALRCRDAELEANDDLLIGPPPPAVVAEAASANEAERFEEVTRILAADTNSPYEVLGVNWKMSTDNMKKRYWKLSLLVHPDKCPHPSAQEAFVKLNNAFKDLQDPDKVREFSTH

SEQ ID NO: 62229 - protein, 400 aa, Zea Mays
MKAIKVRAMMDSKSTVARGPVACSNPKTLVARGPVACSNSIAKKTLTDALSSKVKIKFSVRSSAHTSSKDILVQAAGSKEGSLNHSVPTGNKEASSNCTIPIAKEAKISRAREIERCSGSIGKQSWSCNDTSTSPLASSVQGEESYLHDEPLSPSRALRAAMLRSRFAGTIVKAQQKALLDHGKNIDPVKLQLEKERLEKRQQEEKARIEAQVKAAEAAAQQKFEEEMRMKRKQEREAARLALRMMKKTVDIDNSDFLKELENFSKTWQANPPGKLIVDFISGDLPPGLGSPLERLGLFMKEDFEDEVEQEMEDRVSPSMDVDIRKDFQEDLGHEMQDSASPVTVIGTKNDVQGVAGHEMEDSGSPATVIDTKKEETEHEMVDSVSPLMDVDTEEGEISC

SEQ ID NO: 62230 - protein, 373 aa, Zea Mays
MASPTVASPTRASPADIPTAAPSSAPRPRRLASAPPAVYASASSSPASAYSGDQLSAPDASSPLLASRSEEYRLLFRLPPDEVLVQDFNCALQENILLQGHMYLFLHHICFYSNIFGYETKKTIPLQEVTDVRKAKTAAIFSNAIEIVAGSRRHFFGSFLSRDEAYQIIVDGWEQHVSNARLLLERQETKSASSSEENGYVLLEGAKEPKQDEDSSPLDRSVNSTAVSSGSADGGDSNINISRRFSNVEENGLEDNIITLNPFNLEPVDDTPSVPESYTSVTESKFQVPVEVLFNLLLSDGAFGFLDDFHKNCGDKEFSCSKWRTDEQGGLVRDVSFLHPIKIYLGAKFGTCQEVQKLRLYKNRASGMLNKIA

SEQ ID NO: 62231 - protein, 309 aa, Zea Mays
MNLPTKFQQQTGLLCSELVVIFLKFLLDKDPIKQLLEADERIECDMDTARHVEQLVVFGGFTDTQFLEKSLVNQFNELEDSLKEAFLMPFTAISSQIQCQGLLPLYPVTSSATLSSSCSPTSISFYKDEDSSHEESSYSLTDYVCLKIPDGSLNKVNCIGVIKGSGNCCTTLSMMSLSGFLLHIPDGYECVDLSLYKDNQVVLLLSETSCSDSPGKSWMVMLQIENFSFMPLSGTFPANIYSLQKLVALDLQLDTDYGKVRSIPHTVSTPFAVSASRGVACVFSSRRHALVYILDEDEEAEGDETSDME

SEQ ID NO: 62232 - protein, 449 aa, Zea Mays
MAGRYHQDQGGDGGASMEVVSTPNQELALTNCAYVSPADLRRFPNGLALVADAWVFTLRDHNAVASGRIALNAIQRRQAKVSAGDSVTVSSFVPPDDFKLALLTLDLDYAKARANRNDELDAVVLAQQLRKRFLNQVMTSGQRVPFEFYGTNYVFTVNQALLEGQESSTPLDRGFLSSDTYIIFEAAPNSGIKVINQKEAASSKLFKHKEFNLEKLGIGGLSAEFTDIFRRAFASRVFPPHVVSKLGIKHVKGILLYGPPGTGKTLMARQIGKLLNGKDPKIVNGPEVLSKFVGETEKNVRDLFADAENEQRTRGDQSDLHVIIFDEIDAICKSRGSTRDGTGVHDSIVNQLLTKIDGVEALNNVLLIGMTNRKDLLDEALLRPGRLEVHIEINLPDENGRLQILQIHTNKMKENSFLSPDINLQELGTLRQGSRESLATQNQIPSSPM

SEQ ID NO: 62233 - protein, 99 aa, Zea Mays
MAGRYGMQSSGWPFGNGNPNQFLGVPKDWRNGDWFCSCGSHNYSSRTQCKECGAPVPSSIPSTTMKATSDASSSIYAMLYTVLNIWQVVHWWTHLQVRA

SEQ ID NO: 62234 - protein, 4211 aa, Zea Mays
MFEGHVLYLLRKYLGEYVEGLSVEALRISVWKGDVVLKDLKLKAEALNSLGFPVTVKAGFVGTITLKVPWKCLGKEPVIVLIDRLFVLAHPAPDGQTLKEEDRQKLFEAKLQQIEAAEAATLEATNRNSRGGPAPGGNSWLYNLISTIIGNLKVTISNVHIRYEDSVSNSGHPFASGFTLSKLAAVTVDEDGNETFDAGVALDKLRKSVELHRLGIYHDSDSNPWKLNKNWEALNRTEWSEIFQDGIEDGSQSSIWAVNRNYLVSPINGTLKYKRLGKNERGDPDTPLEKASLVLSDVSLTVTEAQYYDGIKLLEAFSRFRTRVDVSHLRPVVPVKEDRRAWWRYAVLAGLRQRKLCYWFSWERTRRLCQLRRRYVQLYATLLQQAAKVDISEIREIEKILDMKVIILWRLLGHAKVETVKSKGTLYRKGASKKRWWPFAWNTTGLPSEEATHPESQLDEEEQLTKEEWQAINKLLSYQPDEDMSFPLEKVSPNVIQFMMDVSIGQAGARIINIDGTEVLCGRFHQLQVVTKLYPKSTCCDVTLKYCGLSSPEGSLAQSVVSEGKSHALDVSFVRAPIGMDLDWQLIAKISPCHVTVLKESYERFMEFIKRSNAVSPTVTMETATALQLKLEKVTRRAQEQLQLVLEEQSRFGLDIDLDAPKVRIPLNANQPLLGNEYFVLDFGHFTLHTRDGKHDEERQSLYSGFYITGRDMAAFLICDLAQNIYSIPENLDQDTLLGHTFDDNQFCSLLDRCGMSVIIEQIKVPHPNYPSTRVAFQVPNLDIHFSPKRYCKIVELLGVLLHMKGNNNEYSNNHESGSLAPWYPADLAGDARTLVWRGIGYSQAEWHTCYVVLSGMYLYILESEFSANYQSMASRQVFEVPPTSVGGSPYSIGVCSRGGDTHKALELTSTLVIEFRNEIEKAMWMKALVQATYRASAPPDVNILGDPVSPPPESSTPRLNSLGLVDLVVNGSVIETKLSLYGKLDRKSSDSQELLMLELLGNGGKVNVVQSSRGLSVKTKLHSLKIMDELQGRLSMTSKYLVCSVINESVGATSSDTLDKGGDLSIFPVDEDPFMDALTDFTPDQNSNPDDCQIPNFISDANEYNEIGSKDGSCFDGDEQNAKPTEIFYEAQDSNVADFVVLTFLSRSPDSCLYDGIDSQMSIRMSALEFYCNRPTLVALIEFGFDLSTVNSVPKCSLDVAPAIETVKPTGKEEGAPTIVKGLLGYGKRRTIFNIKMDVDRVSMFLNKEDGSQLAMFVQEKFLFDLKVHPSSFSIDGMLGNMRFCDMSLGPEHRWGWLCDIRKPGVESLIKFTFQSYSIDDEDFEGHNYSLTGQLSAVRIVFLYRFIQEFTSYFMELGTPHTEEAIKFIDKVGGFEWLIQKYEMDGASAIKLDLSLETPIIIVPKNSQSEDYIQFDLGQLKVRNEFSWHGGKETDPSAVRLDVLHAEINGINMAVGVNGTLGKCMIRDGRGINIEVRRSLRDVFKKVPILSMKFQIGLLHGVMSDKEYNVAISCISTNLSDTPNLPPSFRENMNRTKESIRLLADKVNLSNHLLLSRTVVVMTVEIQYALLELRNGPDAESPLAELAVEGLWVSYRTTSMLEMDLYLSILKFSIHDIRPDTKSEMRLMLGSCSETANLCVDDSSTDAGVSNLTMLILDYRSRSSFQSFVIRIQQPRILVVLDFLLPVVEYFVPSLGSITGREESLDPKNDPLMRADDIILTEHVFLQKEDFIQLSPVRQLIVDGCDIDEFIYDGCGGTVSLCEEFDKKGQVYSGIIIIIGCGKRLRFKNVKIENGALLRRCVYLNMGSSYSISSEDDVEVSVLESSFTNDEDCLNLEEHKKRNLQNAIDGPTNQILNFTFEAQVVSPEFTFYDSSKLSMDDSLHIEKLLRAKMDFSFMYASKEKDIWARSVIKDLTIEAGSGLLVLEPVDVSWKYTSVNEKTNIVLVSTDVCIHLSLSVASLMLKLQNQTLAALQFGNISPLISCTNFKRIWSSPKGDLPGYNLTFWRPQAPSNYVILGDCVSSRSVPPSQVVVAISNTYGRVRKPLGFRLIHVLPGSLDLIDSCQSTEENECSIWIPVPPPGYLALGCVVNIGRLPPSNHVVYCLRSDLATSATFSDCIHTLSPAAGIISEFSIWRVDNVIASFCAHNSIEQPTKTEALNLHHVLLRNPNCYIVKDLSADSSIQNDQSSDQLNHRKSLSGWDVLRTLSRPSNYCMSTPHFERIWWDKGNDTKKPFSIWRPLPRFGFASVGDCITEGFEPPTLGILFKCDTVVSEKPVQFTKVTQIDRKGLEEIFFWYPVPPPGYASLGCIVTKTDEMPSKDSICCPKLSLVSQANMSEDPISMSSSSKGPCCWSIWKVENQGCTFLARPDVKKPSAQLAYRIADHAKPKARENITAELKLGCLSVGILDSSCGMVTPLFDTTIANINLATHGRFETLNAVLICSIAASTFNRHLEAWEPFVEPFDGIFKFETYDTSEHPPSKVGKRIRVAATSPLNANLSSANLELLIETLVSWRRQIDLENKSSTKSEGTIENMKKADDSSYSALNEDDFQRVVFENKLGCDVYLKKKMEDSEITIELLQHESKVSLLLPPPRFSDKLNVLSNSTESRYYVVVQIFESKGLPIIDDGNGHSYFCALRLLIGSHASDQHKVFPQSARTRCVKPVETTELLTHCAKWNEHFIFEVPEQASANLEIEVTNLASKAGKGEVIGSLSMPIGRGATMLKRAPSMRMIQHVSDVKRVLTCPLTKKGQIPNFEDRKKGGVLVLSSCYVERSTHSYFQRLKDSINNVESDFCIGLSPDGPWESFTAALPVTVLPKSLNNNRFAFEVTMRNGKKHATLRGLAVIANDADIKLEVSICPVNMLDNSMLNTRLASSTSVIDEVFENQWYRPIAGWGHNPSIGHRKDLKQWSTKDCSYSSKAFFEPGLPSGWRWTSPWKIERLNFVDNDGWAYAADFQNLNWPSSSWRSSKSPHDFVRRRRWVRSRQQSQEQSAEIPRKVLATVSPHSSTALPWTSMIRDMDLCLQVRPYSEKSEESYSWSQICSLGSESIPKQQHSSLSRQSTVKQSVVSSRNSVLKLAELEKKDVLSYCHPPVSTERYFWFSVGIDASVVHTDLNVPVYDWRISFNSILRLENKLPYEAEYAIWEISTKSNMVEKQHGIVPSGGSVFIYSADIRKPIYLTLFLQNGWILEKDAVLIMDLLSLEHVSSFWMVQKQSQRRLRVSVEHDLGASDAAPKTLRLFVPYWIKNHSSIPLCYRIVEGESTESTEADSLSRPDSLSRVSKSSKFSLKYSSKSLVRRGTMSHRNMQVLEDIEDCSTDYVMLSPQDYLNRSAGMRSESRDNNFSPARVAISMAVGGCTQYSVGVSLFELENKEHVDIKTFASDGSYYWFSVQLKMASDRTKVVNLLPRALLINRIGRTIFLSEYHDETEEPLQPYEPPKVFQWRSEFGSELLKLRLEGYQWSTPFSINANGVMCVLMNSTTGNDQAFVRVNVRSGTKSSRHEVVFQLDCWSSPYRVENRSMFLPIRFRQFGGDDHSWRNLLPNSSASFFLEDLSRRHLLEVLVDGTDPMNSMTYDINVVMDHQPLTNSDALKKALRVTVLKEGKLNVIQIIDWLPDNRNRGQITERMLSPIFQPSEVDYGQSSPDLDSEFHVTLELTELGISVIDHMPEEVLYLSVQQLLLAYSSGIGSGVNRLKMRMHWIQVDNQLPFVPMPVLFCPQKIENQSDYIFKFSMTVQTNNSLDFCVYPYVGVQVPENCVFFVNIHEPIIWRLHEMIQHLKFDRIYSNQPSAVSVDPILKIGLLNISEIRFRVSMAMSPSQRPRGVFGFWSSLMTALGNMEHMPVRIAQRYREELCMRQSALMNSAISNIQKDLLSQPLQLLSGVDILGNASSALSNMSKGIAALSMDKKFIQGRMRQDSKGVEDFGDVIRDGGGALAKGIFRGVTGILTKPIEGAKSSGVEGFVQGVGKGIIGAAAQPVSGVLDLLSKTTEGANAVKMKISSAIMAEEQLLRRRLPRAIGGNSLLYPYDGHKATGQAILHLAECATFLGQIDIFKIRGKFASTDAYEDHFLLPKGKIFLITHRRVLLLQLPMMTQRKFNPTKDPCSVIWDVLWDDLVTVEMTHGKKDPPDSWPSKLILYLKAKPSNSKEIVRLVKCNRGSDQASIIYSAIDKAYKAYGPNSLKEFLRWKVPRPYAPRNSSGRSIQDLSFG

SEQ ID NO: 62235 - protein, 52 aa, Zea Mays
MATVAAAIPHRRGHGVVVPLRAVDWVSYVSIPGEVTSHLKSKLVPANSSVRQ

SEQ ID NO: 62236 - protein, 560 aa, Zea Mays
MAAAGTQLGRLLGGLWFLAALLGRPGATAAAAGQPAAPAVAAVDGRRAVAATGEDFVCATLDWWPPDKCDYGTCAWGRAGLLNLDLSNKVLLNAVRAFSPPLLLRLGGSLQDKVMYGYGAGRPCAPFVRNASEMHGFSQGCLPLRRWDDLNAFFRRSGAKVVFGLNALNGRVPLPDGSMGGPWDYTNAASLIRYTANKGYRIHGWELGNELSGTGVGARVGADQYAADVIALKALVDDVYRSEPSKPLVVAPGGFFDQAWFTELVVKTGPDLLSVVTHHVYNLGPGRDTHLIDKILDPSTLDGMVSTFSDLQRLLKSTGTSAVAWVGEAGGAYNSGRHLVTDAFVFSFWFLDQLGMAARFDTKSYCRQSLVGGNYGLLNTTTFQPNPDYYSALLWHRLMGTKVLAVTFSGTNKIRAYAHCARDSPGITLLLINLSGNATARVSVTAQGAAAAHAHRHRHDARKHGGGRKFRHVHVPGFAGGGEAAAGAVRHEYHLTPKDGDLTSQVVMLNGRALATDAAGNIPALEAVEVDAARPIAVTPYSIVFARVPHFSAPACRVDR

SEQ ID NO: 62237 - protein, 861 aa, Zea Mays
MTSLLFRYNSLIRKLEEHFGNGADINTDATKMQAPAPPTLPSSKDRRRSLHGAPESESGGILSSDAEDNKGHGRRQSQSCSKSPKPRREKERRHKDGHHSSSSKDHYPKNRSRASPYSRHQSEAHSRDHLRSGERGDDTNGSDRESNDQNGKSGRHTTGTQENERERSSSHGIHDRHGDRHNDRHGSQERYRDDRTYRDKIDSLEATWKHRERSRSHSRSDLRESTRLRDQSRESERRIGSSMHRDHGSKRDTSKHRESDRVNSAYERERGRDAGDREWHRVKGSETHRAKEGRDKVSDSDRYRDSTRSKYSVSDGYKERTRSGEKGRDVDRKNRKFEEMKENYLKEEDEEKYQEKIEQQLAMQEEEDPEKIKEEARRRKEAIMAKYRQQQSQKQDMEAKPSSNDEEVRAMDGNVTMHQKDDNGSSSTGNDKAENKHDSSEVFDGKTDFSVGKSPAQNDTSTSTGAFTDERTIDVSGLGEGSPKSERSADMFCDDIFGESPAGVRKSGKGDGLHVERNALHDNWDDADGYYTYRFGELLDGHYEIIAAHGKGVFSKVVRAKDLKASKDDPEEVAIKIIRNKETMYKAGKQEVSILEKLASVDREDKRHCVRFISSFMYRNHLCLVFESLNMNLREVLKKFGRNIGLKLTAVRAYSKQLFIALKHLKNCKVLHCDIKPDNMLVNEAKNVLKLCDFGNAMLAGMNEVTPYLVSRFYRAPEIILGLAYDHPLDMWSVGCCLYELYTGKVLFPGPSNNAMLRLHMELKGPFPKKMLRKGAFTMQHFDQDLNFHATEEDPVTKTAVRRLILNIKPKDVGFLILNSPGEDPKMLSSFKDLLDKMFILDPEKRITVSQALSHPFITGK

SEQ ID NO: 62238 - protein, 397 aa, Zea Mays
MIRAAAKNHKDVLIVVDHNDYPALLEYLKGKRDDQQFPRMLAWKAMQHVASYDSAVSEWLWKQSNKGEMFPPSFTVPLELKSTLRYGENPHQSAAFYADKSLSLVGAGGIATAIQHHGKEMSYNNYLDADAAWNCVSEFDSPTCVVVKHTNPCGVASRKDILEAYRLAVRGDAVSAFGGIVAFNTTIDEDLAKEIREFRSPTDGETRMFYEIVVAPGYTEKGLEVLRGKSKALRILEAKRSGKGMLSLRQVSGGWLAQESDDLTPEEITFTTKSERSPQENELADAKFAWLCAKHVKSNAIVIAKNNCMLGMGSGQPNRRESVRIAFRKAGEEAKGAALASDAFFPFAWNDAVEEACQNGIGIIAQPGGSKKDEDAVACCNKYGVSLVLTGVRHFKH

SEQ ID NO: 62239 - protein, 959 aa, Zea Mays
MDTVLQRLLDELTHMEARLTCVLAGRCGEQSARARTPSSDDGSTPSYLAPTSEAVDKLRQDLNPCCVYRDSIQHHRVEDPSAEEDLQPQAEVVESFESESAPPPIVYDCYDEPNHDEIAEVLALLEYNEGTSSATVLVDYTTTSMSPTKCSTMDFSDADSARTCDVTDVPIVHSALKAFVKMLNGGSEHPQEVTQTSIARLMDSSRSWIFTELGQPTYCPETFPEVPFERPTPPIIFFDEEHIFEEESSSSTTATPRNPSDPKQAGGDLDSIATAALSASEEIPQSLLVIDLERATSKCIRTHAVNDVPAVHSIIKGLQLERIGLAGSAPDLDTLTTARHCGSELSCQLGSNKRDVSLRVGCDQSYEWVDPETLDRSFVVLDNACATHEVFEVLPLSFPAAWVNVGKLPTTLCWKIPWPPPVLWVNLHAGGRYITSLLEECQLVFTIFFGGVCSLAKIQWPYMVLEYLANLHVIHGKIHMHPVQVCVRSYAVMPSAKGLVAETHLHFIGTYRGVVSTAFCTEIVESADAYIFAGSIFKDYSSVGYSFLLKKAKAIIVQPERVGVGNGLSFRCLMMKEYWTEIAKKVKKNTTTYENYKRNFVPEGQALESEPNEPLRVNVLFKYIQKMMTVNSVVMAETDDSWFNCHKLKLPESCGYQFQMQYGLIGWSMGALLGYAQVCYDHDIIMDAAGFGDELVVISLGADCQIIASYHRWPFGQTGTGHFSPIGGYQVRQDMVLILDVARFIPLQFFWEAMNTTNDSTLRGSMLISRKVAESSLLYTVSCRDENWKIMPKFCVEDLPSLLKAGIGACVGLVTSGLSVVSSGQGNFSVFVWDPGDSGLVTSSLSAVSSDQGKFSVFVWDPGDRGLVTYGLRVVSIARVTAIMSGTYARGAATTSSPKMRQTQFRWRAEERHDAFNNDANPQIKLILHRQRLGGKPYFKEWGMLDILGVVDELWVMWA

SEQ ID NO: 62240 - protein, 463 aa, Zea Mays
MECHSWYALKSRRSVAIAGAGFEDAAEGASDLGDTMSLARKQKVVKETVEMEEEQEFVWKSNLLPYKDDDAFVLPESSKEEYASTSGDTAPSGKMDPRIERSGSNGTSKVPRLGSMLGTASMAGFGKAVEILDTLGCLMTTLSSDGGFVSRTKTKGCKISILAFEVANTILKGASIMQSLSEDTVTYFKQVVLPSEGVQNLVSSEMSELMRIAANDKREELKIFSQEIVRFGNRCKDPQWHNLDRYFVKLESESAPQKQLKETAIAEMQKLMNLVQRTTDLYHELHALDRFEQEYRSRLNGKGNTDRFEKGDNIQIVRLELKTQSSYVKSLKKRSLWSKTLEEVVEKLVEVVHYLHVEIDNAFGPSDGGGVVVNAEPTVSCQRLGPAGLALHYANIIIQIYSIVSRSGYVPANSRDALYQGLPPRIKSALPNELRTTSAPQVVNTSREFNNRQNNNNNNLHTL

SEQ ID NO: 62241 - protein, 977 aa, Zea Mays
MSARIKEMVRVATARLGGEQVGAGGVSSSGIARRESTARLGGGGTSLRRQPQPMAPSVRTVCCNDREANAPVGYKGNSVSTTKYSILTFLPKGLFEQFRRVANLYFLMISILSTTPISPVHPVTNVVPLSLVLLVSLIKEAFEDWKRFQNDMSINNAHVDVLQGQCWESTPWKRLQVGDIVRTANLDGETNLKIRKALEKTWDYVIPEKASEFKGEVQCEQPNNSLYTFTGNLIMDKQTIPLSPNQLLLRGCSLRNTEYIVGVVIFTGHETKVMMNSMNVPSKRSTLEKKLDKLILALFATLFTMCVIGAIGSGIFINEKYFYLGLRGHVEDQFNPKNRFVVTILTMFTLITLYSTIIPISLYVSIEMIKFIQCTQFINNDLHMYHAESNTPALARTSNLNEELGQVEYIFSDKTGTLTRNLMEFFKCSIGGEMYGTGITEIEKGGAERAGIRIDDDEGKRSANAVHEKGFNFDDARIMRGAWRNEPNPEACKEFFRCLAICHTVLPEGEETPEKISYQAASPDEAALVSAAKNFGFFFYRRTPTTVMVRESHVERMGSIQDVPYEILNVLEFNSTRKRQSVVCRFTNGRLVLYCKGADNVVYERLADGNHDMKKISREHLEQFGSAGLRTLCLAYRDLSREQYESWNEKFVQAKSSLRDRDKKLDEVAELIEKDLILVGCTAIEDKLQEGVPTCIETLSAAGIKIWVLTGDKMETAINIAYACSLVNNDTKQFIISSETGAIREAEDRGDPVEIARVIKDSVKQNLKRFHEEARHSLISTPERKLALIIDGRCLMYALDPTLRVDLLGLSLSCHSVICCRVSPLQKAQVTSLVRKGAEKITLSIGDGANDVSMIQAAHVGIGISGQEGMQAVMASDFAIAQFRFLTDLLLVHGRWSYLRLCKVITYFFYKNLTFTLTQFWFTFQTGFSGQRFYDDWFQSLYNVIFTALPVIIVGLFDKVGLFLLVYGVVSCNCTKL

SEQ ID NO: 62242 - protein, 106 aa, Zea Mays
MTMKQSRFKRICVFCGSSQGKKASYHDAAVELGNQLVARSIDLVYGGGSIGLMGLVSQAVYGGGRHVIGVIPKTLMTPEEGMARWRSCWRSSRGRSWASTTSRSGC

SEQ ID NO: 62243 - protein, 634 aa, Zea Mays
MRIGIDKKRAAKSKLSKGISSDEESNEGQHKGRRNKSSKRRRKKRYFYSESDSSSESETESSDSESDSDTYSSDSSDVSSSSDDRRRRRKRHSKKNKRKRSRRKHDQRRERRRRKRDRKSKQKSKRIKGDSEAESSSDSSSEDARSKRHRHGRKSKASSQVFEENIAAVSALKDATSPQQKSGIPNSPAQDVSPLQNGENYTNGVNESKIERNAAVMPVLTGNQSKSRSQSMSVNHSMSKSMSISPRRSPMKRSITTTKRSVSRSPVHHNRSGSPVGAPQKSVSRSSARRQSISRSPARSLSKSPPRDASRSPHISRTPVKAHRRSISRSSARSMEQRSLSRSLERIHVRKSVSPRPPLAKPKSITRTPVTSPLRSVSRSPARISRSPLRPSRRSPMRSPRRNIHRSLSRSPARILRSVSRSPVRGGRPRRNISRSPSPLRRALTPPNNGRSRSRSDSPDGSPKRIRRGRGFTQRYSFARQYRSPSADRLHRYGGRNDRDRYMGYRGFRHRSPPRRYRSPSRGRVSSPRYRRRSRSASRSPVHRGRRGGYNKSPVRSRSPPARKRSPSDRARSVSRSHLSRSVSKSPPVHHPSPLDSPSLERASDGKSRSPSPSGGGKKGLVSYGDGTPDSAGK

SEQ ID NO: 62244 - protein, 203 aa, Zea Mays
MFAGGSETTATTAEWAMSLLLSHPDVLKKAQAEIDASVGHSRLLGADDLPRLGYLHCIVSETLRLYPVVPTLVPHESTVDCTVGGHRVPSGTMLLVNVYAIHRDPAIWADPAAFRPERFEDGRADGLFVMPFGMGRRKCPGEALALRTLGLVLGTLIQCFDWDTVGGAEVDMAEGGGITLPRAVPLEAICKPRHAMLGVLKGL

SEQ ID NO: 62245 - protein, 831 aa, Zea Mays
MEAARFGARSSHLYGSGLGELDLNRRESRVFGWDLNEWSWDSQRFTATPVPVEAANGSGLNSSPSSSEEAGEEMAKNGGLGGDTDKRKRAVVIDDDDDDETEDQDTVVNGGGSLSLIIGGSAAGAGAMENGDVNEDERNGKKIRVQGGGSSGPACQVEGCGADLTAAKDYHRRHKVCEMHAKATTAVVGNTVQRFCQQCSRFHLLQEFDEGKRSCRRRLAGHNKRRRKTRPDTASCGTASIEDKISNYLLLSLIGICANLNSDNVQHSNGQELLSTLLKNLGSVAKSLEPKELCKLLEAYQSLQNGSNAGTSGTANATEEAAGPSNSKLPFVNGSHCGHASSSVVPVQSKATIVVTPEPASCKLKDFDLNDTCNDMEGFEDGQEGSPTPAFKTADSPNCASWMQQDSTQSPPQTSGNSDSTSTQSLSSSNGDAQCRTDKIVFKLFDKVPSDLPPVLRSQILGWLSSSPTDIESHIRPGCIILTIYLRLVESAWQELSENMSLHLDKLLSSSTDNFWASGLVFVMVRRRLAFMLNGQIMLDRPLAPSSHHYCKILCVKPVAAPYSATINFRVEGSNLLSTSSRLICSFEGRCIFQEDTDSVAENDEYEDRAIECLSFCCSVPGPRGRGFIEVEDSGFSNGFFPFIIAEKDICFEVSELESIFESSSIEHADANDNAREQALEFLNELGWLLHRANRMSKENVTDTSVATFSMWRFRNLGVFAMEREWCAVIKMLLDFLFIGLVDVGSRSPEEVVLSENLLHAAVRRKSVNMVRFLLRYRPNKNSKGTAQTYLFRPDALGPSMITPLHIAAATSDAEDVLDVLTDDPGLVFYF

SEQ ID NO: 62246 - protein, 457 aa, Zea Mays
MNVSEIEGARREGGKGDNIWDVFTDDKERVLDRSNAEIAVDHYHRYKEDIELMASLGFSAYRFSISWARIFPDGLGEKVNEQGVAFYNDLINFMISKGIEPYATLYHWDLPNNLQKTLGGWISDKIVEYFALYAEACFANFGDRVKRWITINEPLQTAINGYGIGIFAPGGCQGETARCYLAAHHQILAHAAAVDVYRRKFKAAQSGEVGLVVDCEWAEPFSEKLEDQIAAQRRIDFQLGWYLDPIYFGDYPESMRQRLGSDLPTFSEKDKKFIKNKIDFIGLNHYTSRLIAHHQNPDDVYFYKVQQMERVEKWSSGESIGERAASEWLVIVPWGLHKLLNYIVKKYNNPVIYVTENGMDDEDDQSATIDQVLNDTKRVGYFKGYLNSVAQAIKDGADVRGYFAWSFLDNFEWAMGYTKRFGIVYVDYKDGLSRHPKASALWFSRLLKGEAAENSYS

SEQ ID NO: 62247 - protein, 1007 aa, Zea Mays
MGSVDGRGVEGIHEANRRAQLIGWMNALLPEFSLPPDSSSEELRELLSDGVVLCRLVNTLIPGVLEGSWEGYAPSDQRLGNVKKFLSVVSDMGLPGFSLKDLDEGLMSSVVECLLVLRGSVDPRLGDDIPPDVTRTPLRKQWGVQEMDKPQVPAAALGKRSPAEDMRNGVADSKTHQKTSVFSGQKVREVFQLKRGSYSDLTAAKISEMMHSNSLDNAPTQSLISVVNGILDESIERKKGEIPHRVVYLLRKVVQEIEHRLCIQAEHIRSQNVTIKTREQKYCSKIKALEMLVNGTNEENQMAINRLQIVKNEKSQIEEKKELCEKDVQRLMKEKEYSKSIIMNLTKDMEAMNRLHEQQLEQIGRKAKEMEEQLTTRVKEVEYLLLQSNKKVEELEIASRLKSQLWDQKENIFQSYMDNQQLVIKDIRILSQSYENDMYALQMQWRNEISNLGSGLKCLVDAAENYHKVLTENQKLFNEVQELKGNIRVYCRVRPFLSGQDKKSTTIDYMGENGELLISNPFKQGKDGHRMFKFNKVFTPFASQAEVFSDIQPLIRSVLDGFNVCIFAYGQTGSGKTYTMSGPTTSKQDWGVNYRALNDLFDISLSRRNAFSYEVGVQMVEIYNEQVRDLLSNDIAQRRLGIWNTSQPNGLVVPDASLHSVKSTSDVLDLMEIGQANRAVGSTALNERSSRSHSILTVHVRGMDLKNGSTSRGCLHLIDLAGSERVEKSEVTGDRLKEAQYINKSLSALGDVIFALSQKSAHVPYRNSKLTQVLQSSLGGQAKTLMFVQINPDVESYSETISTLKFAERVSGVELGAARSNKEGKDIKELLEQVASLKDTILRKDMEIEQIQVIKDKVKSPNLLLDRNVPGLTKTTANQPSQLLSGERMLKSSDRVLSDRQSYGEVNVDPNHHVMDTAPVSIDEAGYENNASDDGLSGETENDNSAAEMTAERLHRFPSRISRFTLTKNGQPSMSRSNPKDAKTPSNTKAPSSRLTGGSSARSKRRQ

SEQ ID NO: 62248 - protein, 772 aa, Zea Mays
MLMSEIFIVLQPYGTVNLLSALTSEAVKSVLNNQSEEETWGIDSLDILLETWNVLLGDVDADKNPISTDGALASSSLFKMIVESHLKAAADSAFEDTDDTEYFHVSVSKRDEQLALYALIARASANTTIPFLAQLFSERFARLNQRNGESDPTQTLEELYWLLLVTSHVLTDSGEGETLLIPEALQAGFPNVIEAAHHPVVTLSWSIINFSRQCLDPGIRAKYFSPRLMEAVIWFLARWVATYLVPLDVSRGKVSREIDNVGTNGSQHSRKLLNSFAWENNQGELVLDFVVLISMLALTTYQGENELQTLTCQKLLATVVRRKHTCTYLVQLDSWRDLTRAFASGRSLLSLSGRLQRSLAETLASAASCIKDPEASAQYLRDLMGPVAGCLVENASRSDLKSVAQQADVIYMVCCLLERLRGAARATQPRTQKVLFEMAHTVMNPLLTLLEVYKNHSTVVYMILKFVVDFVDGQAVFLDAKETSALVSFCLQLLQIYSSHNIGKVMLSLSSSLRNESQAEKYKDLRALLRLLTNICSKDLVGFLSDCGGEGSPDIAEVIYIGLDIVTPLISLDLLKYPKLSRDYFVLISHLLELYPEKVAHLNSDAFTRIIGSLDFGLRNQDSDVVERCLAAVNALASYNFKERLGGRGRLNSQLMESEGSNGKLQESISSHFLRLLLQILLFEDFRSELAGYAADALLPLLFCEQELYQRLVHELLDKQQNPTVKSRLATAFHNLTSSNNLSSSLDRPNRQRFRKNLLSFMADVSGFMQIK

SEQ ID NO: 62249 - protein, 538 aa, Zea Mays
MIKELEEQLNGSQNAMASLKVELQRANTELELTRKTLADERMNSLPTSNNVYYSNKNVSPCSKIHPQGGNILLKNKKNADNSDDTCLVLITEENEAVDKLEDKDRRSPDLPSFMKRNKKPKFCHNGCTQRIHALKQQTQSTDAFLKQNQKQATAFNSHSKARKKNAAKNSCHTRSVTEQILQTKFLGKFKRKRGRRNRPSYKHDNSSEHGEAEYKLSDRSESDGNGCLLLLQALEQDLSPPKLSTEHDGEALTDLKEDFEMSGGDAELSRCTAFSELVNVLAVNSVQIKRRKRTKTVRVLEVDFSDTKSVPEPANTQLRTSSKSMSGNQSVSEMTENRSDTPIRNSSPFLKCATANLMHQIAAGNGQFDPEIGSAVSLQSTKSETTDYGNLVVDQQELITPNNNTTSLKEVNEDGSCSLASPKADASTPVQALEKYDISVGSSLNKEEHTKASCGASIQAEGARQIKYTFNRRKRKGMSIDSTPQRAVPEESSDLCSPTNKQKLHPDCVEQDHLIDSPQGHSQLVQVAEQLILLSEHM

SEQ ID NO: 62250 - protein, 506 aa, Zea Mays
MEGCQLLVGCRMEMEEEAFFDSREELTASPAPSPGPALPWSGSLDSVCQRRERFMRSMGLECCPAPLQADAVATVGDVDKEEEAVPEFGRSWSQSDENDCSMSSWSTEETKSLEDGVSDDNSVSGSSRDDASSKVSRSFSSLSFIQRLMSRSGKLSGVPKAVERRRNGWLRRLGLRSGILDHGGDEASTSSSESEQNRGGRYERVKVRSYRKRSKELSAVYQGQVIKGHDGAILAMKFSPDGQFLATGGEDGVVRVWGVAQSEDCKIPMDDPSCVYLKAHRQSGLGPVDADNEKKCKVKGVKQSADSACVVIPTVVFQISKQPLHEFRGHSGDVLSLSWSNNKHLLSASTDKSVRLWEIGSANCITVFPHSNFVTCVQLNPTNENQFISGSIDGKIRVWDIPRCSVIDWVDIRDIITAVCYRPDGKGAVVGTITGNCRFYDASDNLLRFETQVALSGKKKSSLKRITAFEFSPSNPSKLMVTSADSKDSVLGLASPWQHSLLMGSI

SEQ ID NO: 62251 - protein, 158 aa, Zea Mays
MRLLQAEELFRKVLEVGSKNKAARLLGLDVGSKYVGVAISDEKNRVAMPLSVLCRTKTNINLMADDFKTLVSMYSIAGFVVGYPFKIYGQPCASAIQVSLAGELCKTGKLDDLPYAYWDENFTSKCVEALLHPLNLKDLDDAKTMTDKFAAVCILQVF

SEQ ID NO: 62252 - protein, 1006 aa, Zea Mays
MDTQMSERRSIYAENTFDAAREILYQVEYGYKHANVFYFDGWDGIGASAALKEAAKRLKSSASKFDSVLHLDCSLWKSRRALQKAIAEEIKLPHSVMAILSQHDKEDDFNGVEEGARNEVREIIKHTYTKLATVKRLVVVFHNGSGSFIDLSEFGIPLNRNFKGDVLLWTMQGRFRPYVSYTIKEKDPNMVYLYVDPDTVQLDDTSLWGIVNEEAKEVAQYTGTIDHMAVVACILYTWKLKDMGNIDWDTHASNYWVCDGIIQGSSSSEAWDWKVGDALQRNMHLGWISRSYMDYFFSSSAIEMQMQHYLPRPPAICCTSEIISVPAEATSFFLQPKYGDEESQLLASMFKHSASNLRVLHLSGCTFRFASPPFLCCSNLRFLLLHRCKDDGTSITPTEGKELDDQSGAWRACFGKLQVMDLSYTKWWWLLSQRMNIMANLRELNAKGIKNLSTSHLRGCGRLVKLRVEDGSVDGQRLILENSVALELAVLVNHAKDEGATYISFRGCAQLRSILLGGLFCCLHELDLSCTSVETVDLREVEAQRLKRLILLGCQKLRAILWPPRSSSILETLDVFCVSTTPSTASGQEWPHLCKWEEKRKEATSASTAESSSLDRNWYICVRDARLLRSLDVFYTYENNRCSIGWPARVEFTTPPASGDLVAAQGVNILQQSIHVVDVYARDMITHNQLIHDEDATAGDEDGEGAIHWMWDCPTTRTMHGHGLYIHVQAEDDEQEGELNIGGTWSMPPRFICTSADVMHVHDCLSITSGISLSYITSWDLLNWCRVERCPMLRSVFTAFSEGKENDISSDSWLIFQNLTTFWASHLPMAKHIWNWSPRAYPSAYSFQQLQFLHLDYCPRVIFVLPLDSNMSLPQLETLEIICCGDLREIFRPQDPRLENQEEVVKHFPKLRRIHLHNLPTLRSICGRMMSSPMLETINVTGCLALRRLPAVGGRLGQPPTVVCEKDWWNALEWDGLEAKHHPSLFRPKHSCHYRKPKLLRGSVLR

SEQ ID NO: 62253 - protein, 77 aa, Zea Mays
MSGIQNALSASPVELNGRFVHVEERRPNCGFPRGRRGRGRADFSRDQAGGRYDGEYATRSKGIGHQKKTGRQYDSYY

SEQ ID NO: 62254 - protein, 343 aa, Zea Mays
MVGDFSEDNRSGINHSLHRISAIRNRKAQIIGLTCRVGRAISGSAEMIRDLVVSGGSILVIGPPGVGKTTLIREIARILADEGKKRVIIVDTSNEIGGDGDVPHSGIGRARRMQVPKVTMQHNVMIEAVENHMPEVIVIDEIGTELEAMAATTIAQRGVQLVGTAHGVTIESIIKNPCLQMLVGGIESVTLGDEEAKKRKVQKTILERKGPPTFLCAVEMISKTECRVHHRLDATVDAILAGKPPKFEARKMHNKSTEFEMPLVIPDREYEIESLPLYQEVMVTRSLSSDGNFSDDFAASRQTKSKSMPSEDNFGDNFVYTRKAKGNKPVHGKSLVQVYTYQM

SEQ ID NO: 62255 - protein, 392 aa, Zea Mays
MGCFQSKVAGPLPPNDAAALPADKPADPEAANGGADGEGDGDDKEAVKRAVPVFREFALAELRAATKGFSADLIVSESGEKAPNAVYRGRLDGGRLIAVKRFSRLSWPDPQQFLAEAAGVGKVRHKRLVNLIGCCAEGDERLLVAEYMPNDTLSKHLFHWDKQPLPWEMRLRVAYFIAQALDHCNAENRKIYHDLNAYRVLFDEEGDPRLSSFGLMKNSRDGKSYSTNLAYTPPEFLRTGRVIPESVIYSYGTVLLDLLSGKHIPPSHALDLIRGKNILLLMDSSLEGQYANEDASKLVDLASKCLQFESRDRPNIKYLLSSVGPLQNQKEVASHVFMGITKATSVLPTICSPLRKACTGMDLSAVHDILLKTGYKDDEGAENEVTNSQIYI

SEQ ID NO: 62256 - protein, 1207 aa, Zea Mays
MAAPLHSSSGHNAAAGGGAKTIEEMYQKKTQLEHILLRPDTYIGSVEKHTQALWIYEDGAMVNRSVTYVPGLYKIFDEILVNAADNKQRDPKMDALRVEIDVDSCCISVYNNGDGIPVEVHQEEGVYVPEMILGHLLTSSNYNDNEKKTTGGRNGYGAKLTNIFSTEFVIETADGRRQKKYKQVFYENMGKKSEPQITKCKQGENWTRVTFKPDLAKFNMTHLEDDVVALMRKRVVDMAGTLGKTVKVELDGQRVPIKSFCDYVDLYMKSANCDRPDNFKRIYEQVNDRWEVCVSQSEGQFQQVSFVNRIATIRGGSHVDYVTNQIANHVVAIVNKKNKNANMKLHNVKSHLWVFVNALIDNPAFDSQTKETLTTRQGSFGSKCELSSDFLKKVEKSGVIENVLSWADFKLSKELKKTDGSKKSRISGIPKLEDANEAGGKDSDKCTLILTEGDSAKALAMSGIAVVGRDYYGVFPLRGKLLNVREANHKQIMDNAEIQHIKQILGLQHGKQYESTKGLRYGHLMIMTDQDHDGSHIKGLLINFIHSFWPSLLKVPSFLVEFITPIIKATRGQTTKSFYTMPEYEEWRKNLGASASSWTIKYYKGLGTSTAKEGRKYFEDIIDHKKDFVWVDDQDGNHIELAFSKKRIADRKQWLTNFQPGTYIDQREKQVKYSDFINKELILFSMADLQRSIPSMVDGLKPGQRKILFCSFKRNFVKEAKVAQFSGYVSEHSAYHHGEQSLASTIIGMAQNFVGSNNINLMSPNGQFGTRAQGGKDAASPRYIFTKLSNITRSIFPKDDDILLNYLNEDGQSIEPTWYMPILPMVLVNGSEGIGTGWSTYIPNYNPRDIVANVRRLLNEESTVPMHPWYRGFKGSIEKTVNTKVAGSTYTVTGIIEVVDNTTLRITELPIRRWTQDYKDFLESLAPDPKNKDKVTFIEDVTSQGDNEDVYIQLKLSEANVNVAKEEGLVKKFKLTTTIGTTNMHLFDSDGKIRKYDTPEQILEEFFQLRLEFYCKRKEALLKNIKLDLKKLENKVRFIRCVVDNEIIVNNRKRADLFLELRHKNFDPFPKKKKKAEPTAVGAIEEEENEESPETAAGVDPSDYEYLLSMSIGTLTLEKIQELNAEKQKLVDDVVELMNTSPKSLWLKDLDAFEKELDVLDQMDLAEEVQREKRIKEGKKGGSKAAPKKQPKKAAPIKLESSTEGIC

SEQ ID NO: 62257 - protein, 52 aa, Zea Mays
MLDMFTSSGISTTVTFSFIIRLNYSRALHTIASLVTMPPGSLTSPWARRLRE

SEQ ID NO: 62258 - protein, 468 aa, Zea Mays
MAPFQMRFGLQISPARSDDDEEEDDDDDNEEEYDEMASEGTASPPMMLRPGRGGGGLVSAVVGALRRSLVMCSAGAVDIDDDDDEEEGGIEIGRPTDVHHVSHVTFDRFGGFLGLPADLEPEVPRRTPSARSNSTCSVSVFGVSPTSLQCSYDPRGNSVPTILLMMQRKLYDRGGLKVEGIFRINAENSQEVYVRDQLNSGVVPNEVDLHCLAGLIKAWFRELPSGVLDALTPEQVMHCNTEGGCALLASMLPPVEAALLDWAINLMADVVEQENYNKMNARNIAMVFAPNMTQVMNFLKTLILKTLKERNKKDEALEALQPCSSSPNDQDEHQVSEHLEKPSVLPNQKGFGFHMNDSATPVQVLGAEKTLHHHSQIRSHEPKKFGTDMDHKKRQSDASSLLGSDSSNRFNSSGREFGSRNGASDRFSFRKGVERLCRHPVFQLNRSMKKSTDAVVFDAPRETRQAWV

SEQ ID NO: 62259 - protein, 1243 aa, Zea Mays
MAVLPTRQDPLLNIPAAPSPLPAGRLEHEHDGPTPFLFPARRINNLALASTVLPKRVPLHLLQKITNDFSKDRELGSGAYGKVYKGVHKNGETMAVKLLHSMAGLDDKLFEEEFHNIARLQHKNIVRLVGFCHETQRQFIPHDGKMIFADSKYMALCFEYMHNGSLDKFIIDENSVHDWSTRYAIIKGICEGLKYLHEELNPPIYHLDLKPANILLDDNMMPKLADFGLSKIFEQERTRITQSCVGTHGYLPPEYIDRKVISNKLDIFSLGVIIIKIISGPTGYTQCAEMPSKQFVELVHEKWRNKLQTTMDAAALETYCEQVVRCIEMALSCVETDRHKRPSIGAIIDELNKMETNTDQVFSVDICSTPAQTQPPPLPDSSHSTEETSNTKGVSRLGPREYVQSTMRDLVIGITKSVVEGVISKAQSVMEEENMLLISMQHDLHFITDEFQMIYSFLSITDEERINNAVVRIWVMQTRGLAYDLEDYMDAFSCLDKTRKWWSRLFRACLAPPGSPYMSVTSLAVELKHLKARVEDVSHRNTRYNLISDAGSKPGLVRQQPVPPGAVAYENDTRRKHILGDLTQLITNKDDADLQLISMWGAGGGTGTTSIIRKCYSDPEIIQNFICRAWVNLSHPFNPHEFVRSLMAHFYANSCQERQGGIIGVDVLTSMDATATQGDLLSEFVQLVDKNRYLVVLEDLPTMAEWDSIRTFLPDRKNGSWIIVSSQKYEIASLCVGHPYQILDLKQSSPTEHSVCAFLREEVTLKEKKGGNRKEKIYVGDESEVNNGSTSTNSKVISTEYDLSHNHRMVANSKWKEARDWMQNSSLVGRRLQMYQIHRCIAEAQRNHSHVMSVWGIVGVGKSAIVRNFYCDRILENQQFQEYGWVDLSHSQPFNLKDFSQNLLTNFQSDSLQANETTPSRGILGTVRKCCEFLSTRHCLVVIDGLQSKEEWDLIQSSLVSRYSKSNTIIIVITTEASIAAYCADKDDLVFNVKTLETDAAFDLFENEISKKAPLWTTSLCDRGNSVTQELVSKCGGLPMVIVAIAGILATKVVSWMDTATSINLRFMFELEINPDLQDLFSWVHSCFRTCPDFIKPCIFYLSFFPRDHNIRRRRLVRRWIAEGYCRDSDDKSAEENGEFFFSKLLGMSIIQPESSDARMVSCQINGFFRECILSRSGEMEDLVIELADRCNLTTQRSGRHLVISESWDRDKILFESIDFSRLRSMTVFGMWKSFFISKSMKL

SEQ ID NO: 62260 - protein, 68 aa, Zea Mays
MTLDCQNSSAVAEHPMNSEVPGRRPYSLHARSCPQIYQSSSTTLQKKKERRIKLCMPIQPVDCALKYT

SEQ ID NO: 62261 - protein, 1024 aa, Zea Mays
MPMDPSAFQIIECAEAPNTGVVSSKFALNVACDSPMDLNLTNVGTSDNILYTSEFAVPGRTEDRSMQVDFHDAKAALHKPNLPLEVVDTDTHDLQSSRNTESTILPSFGDDPMKDSSGALNNGLGRSTSSQVTELTHLHRSHPPADYNPFSLHSHDSPSVSGNSEHSVPTALTLGNNIYFSSAESEGQPEENHNLLDVNLGFDVTTTEFGNVVKRKGESGNDLMNAGSQNWLTLPLTVSCLDNASAVSNGRIGLEQIVDEGVPVICQDHDIMLDIDQRGSIDVLSGQDHNLKLCGISIPQAVLLATEERNKDVDDEIVRPGRDLASQISVDSDHTYHGSTEDPVGMSSTTPDSVSSWIEAIVPEANKEHQSCKSSLLPICSSEKVALPGSLLEPPRLNQNARNRTWRRDNASSSNSSLHVSQTSGLPPKLPLKKNSKSQNSYIRKGNALIRNPANGNHLHSSSSLDSQNKLSKPVMRRSMNFVRNVDSKDAAHSHISVERPKTPPLPLHTKSISCAVNVLEPLSQNLQQQVLETEKEDSSGQVNSGADNLSIISLHKSEALDAGKAIYVRPKLNQLVAQGRHLGESSNISLDKVTLLQPSATSDLYFKKRKNQIILGPSTSDAPSSKDTFQAENIKSGESKVLMSSSSNNNITVAKDRLHKALQTTNTVRSFSHVWTLNGQNPRKKSYVGASHMKVLPRILPWKRKIFCQNFRGSYSSLLNTSSIGIMRKLLQTRKRSTIYTVSTDGFSLRKSGVLSIGGSSLKWSRSLEKHSRKVNEEATQAVAEVERKKREKRKRQSLRSKGRNDRYSASVAANQLTNRSRASSDSRVSSTCNEYVRVNKGNQLVRNPKKVIRMLASEKVRWSLHTVRTRLAKKRQYCQFFTRFGECKKSGGKCPYIHDRAKVVICTKFLKGLCSSTSCKLTHKVLPERMPDCSYFLQGLCTNTACPYRHVKVNSNAPVCEDFLKGYCADGDEVFMISLELYRCLLFFCTLHRRVGRHMNSYGDGMKLASIGFLANNILYQN

SEQ ID NO: 62262 - protein, 544 aa, Zea Mays
MEVLCGSKKTNACPSGGVGVYNPGYWGMNIEKGKVYKVSLHVRSSDALSLTASLTSSDGLQKLAAHTITGSKKTFAKWTKVEFHLRSNQNNSNSRFQLTTSKSGVVWLDQVSVMPMDTYMGHGFRKDLASMLANLEPQFLKFPGGNYAMGNYLRNAFRWSETVGPWEERPGHFNDAWGYWTDDGLGFFEFLQLAEDLGASPVWVVNDGASLNEEVSTKTIASLVKDVVNGIEFASGGPKTTWGSVRAAMGHPEPFKLDYVSIGNQECWMLYYRGNYQKFYSAIKSAYPDINIISSCDRPTISPSNPADLYDVHVYTSSTNMFSKASMFDNTPRGAPKAIVSEYAVTGNDAGKGTLVAALAEAAFLIGLERNSDVVEMASCAPLFVNDNDRRWSPDAIVFNSGQHYGCPNYWMLHFFKESSGATLHPTAIQVSSYDQLVASAITWQNAKDKSTYLRIKVVNFGNQAVDLNISVVELATGVKKSGSKQTVLTSSSPLDENSFQQPEKVAPVSSPMANAGQQMGASVGPYSLTSFDLLLEPSKHDSV

SEQ ID NO: 62263 - protein, 365 aa, Zea Mays
MRFYLIKTKDHYMIALEKRGSAVTTEMEILAHMGLIHMNSSMLSLVVPTNFLGIVWGLGDFIIVQKQRTIGHLTSESILGGKREINVFRHETCGTCHGTGAKCSNDITECTRCRGQGRLMKTQRTPFGIVSQNYMLCISILLCRGASGDLYIFVRVNKKQGIHRDGLNLYSDASVDYTDVILGTTVKVETIEGLKDLHIPPGTQPGENLKFSQLGVPDIKKPNVRGDHYFMIKVKIPKSISGQERLLVEELAALKKAQNISVPEPTKIENFRERNHHPSAKRRSFWGRVWNFFRDDKGDKRFASISVQPIIPGWNSCRGTDTAVPLLLKGFLMTAIFLFVIRSKLRYTGKRIDRPTQAEIPVEPE

SEQ ID NO: 62264 - protein, 275 aa, Zea Mays
MASVIDGNGGSRLVVTELGHLKELAMQLEGHLGGSSPDLCKHLASQISSITDRSISLLITATSSSPHGGASDAPPFIRATTKKRKRMDKKRHEVRVGSAGGGGGDHPADDGYSWRKYGQKEILGAKHPRCPLDTCCAIRRFFSPLLHLFHTPQPNLICTCSYRNFASGIEIILPLLSLSSFHGGAAASIVLVEMSVQPLFACLVLQLFGWPPLFVRCRGRTGIHHIVRILLWMHKKILSSPSPPPPPPPLFSPNKQDAGAHKQNLMGLPDLPART

SEQ ID NO: 62265 - protein, 279 aa, Zea Mays
MITAEEKSPEREEEEEEANPRAEAFLEIICRVPAGEVEAALSACGIGPTAEVEELVLKSRECYKRPKSAVRFFRWAGQSVSHTAYAWNLLVDILGKAAMFEPMWDAIRSMKQEGGGGLVSVATFASVFASYCAAGNIKDAIAALDVMDRYGLKHDAVALNSLLSAICRVEGRAQDAQDVFERTKATIPPDGDTFAILLEAWEKEGNAVRAKSVFGEMVVRIGWDAANVSAFTEVTKRADEMIDMRVELSRSTMENMKRGFAKAGRHQSYDNIARRLKRY

SEQ ID NO: 62266 - protein, 789 aa, Zea Mays
MRQALPDLFDAQPDLLFHLVTMLNPSILQANSVPVYSVMQEPGNFIITFPRSFHGGFNLGLNCAEAVNFAPADWLPHGGIGANLYRLYRKAPVLSHEELLYVVAKNGVDAESLTHLKGEIKRLFINERRRRVELWINGTVKSSLMLPRINPNFIGSEEDPTCIICRQYLYLSAVSCNCRLSSYVCLEHWKHLCECSPKKHCLLYRHTLAELGDLVCEVSLVSPQRDNVMQNPHLLNDVYVPSKKVKDHYILYRQLAEDWVSNSEHILQMPFVERSYATALEEAEQFLWGDHAMDSVRNITVRLTKAMKWALGVRKCLSKIQDFLKDGCSEKVNYVEIEELVATKCAPCCEPSLTKLQAYAEEAKLLINEVNNALSSFLTVDKLETLYSRVSEFPVKLTESSTLFWELSSAKSWLKKASDCLEQNKLGIIDIDVLNKLKSEIIQLRVLLPEIDLISKLWKDVESWQTRCQLYLQDFPDLKELEGFLLAADGANFSIPELNILKQHYSNCCSWVSRAKNILRKLYATSDYHNAVEELTVDELPIVEKELKRSLCRKQASEALATVMPMEVVEEILKEASILHIEEEQPFDDLSRMLKEATSWEEKARLILERSASLSEFEDHMRCSEGIRVILPSKLHMKAEVDIAKLWIDKCQAYLRPGCNKLAFGDFLKVDDIKDLINQPANLKVILDTSELNSVLNNIEKWEHSSLSLLNNFRALLHLNSIGSTVDTLQRKLEELQGKMNTEIEVGLSLGFEFKVLWELKDSSLMLRWILNALSLCCMIPLLQMLKIF

SEQ ID NO: 62267 - protein, 758 aa, Zea Mays
MWRLKIGEGRGPWMQTVSDFHGRQVWEYDPDAGTEEERSKVEQLRREFTENRFRRRESQDLLMRMQLTGQKHLHADDMGAATKIEDGDEVTEERLRESLRRALGWMSALQAEDGHWPGDFSGIMYIMPFWIFALHITGSIDVVLSKEHRREICRHIYNHQNEDGGWGFNILDESAMFSTCLNYTALRLLGEVQQEENDGLAKGRAWILSHGTATAAPQWAKILLSVIGVYDWRGNNPVVPELWLVPRFLPIHPGRFWCFTRITYMSIAFLYGKKFIGPITPTILELREELYSLPYVQIDWSKARNSCAKEDIRNKPSEIFKFISTCLNMFVEPVLNYWPLNKLRERALNHILEHIHYEDETTQYIGISPVTKALNMICCWVENPNSDALKRHIPRIHDYLWIAEDGMNTKIYDGTHNWELALIIQAMLSADAANEYGPTIQRAMEYLKRAQVTTNPPGNPSYWFRHRSKGSWPLSTIDNGWGSSDTSAEATKALLMFSKVYPNLVENSNGDEWMLNAVDCLLSFMNKDGSVSTFECQRTYSWLEILNPLESFRNIVADYPTVECTSSVLQALVLFEEFNSEYRSKEIKENVKKAAIYIENNQNKDGSWYGTWGICFVYGTLYAIKGLVAAGRNYENSICIRKACNFLLSIQLKTGGWAESYHSCERQVYVEGHSTHVVQTAWAMLALIYTGQMERDPTPLHRAAKVLINMQLETGDYAQQEHVGSTNCSVYFNYPNYRILFPVWALGEYHRKVCTKSN

SEQ ID NO: 62268 - protein, 110 aa, Zea Mays
MNPSSSSTSSSGGYHSRAAAFASPQPRGGGGGGGRDGSDRIDALGRLLTRVLRHMAAELRIDMRTDGYVRVRDLLKLNLQTFAKAPLKSHTVDEIREVSMILVLFRWLID

SEQ ID NO: 62269 - protein, 378 aa, Zea Mays
MAIRITVSYSGYVAQNLAASFGLRCTVAAGASAALGPGCRFLQDALSHPFCLFASSRRADPHHDAEDHNHPKPRSKALAPAAAARGGGHSLLLPRSCSGKAAPPVDDPPASLAVGLLSVFASGMGSTGGIAGASSLAASPSISAGFNPAALLPFLQASKWLPCSDIVTVATTSRSSGRPAGSTASPVPRTTAPSPRPTQRAAAPSPCPVPSPAVAAPSKVGIQALVGSASIASGSAEIGRGAIASGVAGMVKKSGASIPAGAGVRRKTGWLSKWVSSCSDDAKTVFAAVTVPLLYKSSLAEPRSIPSRSMFPTFDVGDRILAEKVSYIFREPEILDIVIFRAPPVLQALGYNSGDVFIKRVVAKSGDTVEVSFYPNGT

SEQ ID NO: 62270 - protein, 869 aa, Zea Mays
MSASASAGKLAAALHRRTRRVTSALACAALEWVLIALLLVNGLLAYAVARFADYFGLSPPCLLCSRVDRLFQAEGGGGGDASGAGARWLRDALCDAHAAEISALGYCLRHRRLAEAGEMCVGCRPSSWKERTSDAGACACCEAAAVLRASPVRELEDTTRDARVSEKEVEDGDQGYVLLAQDDHEEEPDEVENRQQEPQSEVDGRQHLEDEVMAAVQDESLEFMDQVEDITIEDDRLVSVVALDEMTIADDSGLHRDVEEVDGTNHVVEDEQDPRDVDVGAVLEEKRMLDSSVATPVDLTEDSVVPTSPVPCPETSTDPSHPDHSSVSQDDGDVLEDTSTAEEEHIFVPQASVSEAVSEDDNRTAAEVDTNCEVSIGSDICEREQDEHVVPFQDLAAFEELVAPLATGDDLPLPSEVLEPPDQAGEVEQEDVTTSTGLDLQPNEQNEIEEDRAPETPTNSVATQRSDRMFLLERKRSLSLSLDGSVASEMEGSEPSTVDQLKSALQAERKALGALYAELEEERNAAAIATNQTMAMINRLQEEKAAMQMEALQYQRMMEEQSEYDQEALQLLNELVSKRAREKQELERELELYRQKVQHYEDKERRRTASFKANGVSPSGSGTSVSSSGEDSDGHSDDYCELGDSPDGGNVQSSSDAALSSMRDQDDGTKHLAALDDSLTYFEVERLSILEELKTLEERLFTLEDDDINTSKEVTGHSSSDMDLPHDGLQSPEYILTGDRPRFGGRASISRGKSLLPLFDAVGDEACDRMPPSAGAGEADQADDAATKPASVLVKEQERLAIIEEVDHVYERLQALEADKEFLRHCIKSLKKGDKGMDLLQEILQHLRDLRSVELHVKNAGGAMAANSA

SEQ ID NO: 62271 - protein, 390 aa, Zea Mays
MSVTSLLAQPIPSLFAPSPAPSRARRNRTSRRRFLAATKLTMDGTSFDLTEHEGSNLSPFLLKLFNEWDDRKTRGLFHHDISSCETKVLPGVHNFVATLIEGRDQKKRPTEFTMNQVLQPFVSEKFNFTKVSPLEVIFRFNDTEKDSAQYFDGVPDTVSASSSAILINVSPIGYCHVLLTPKIQDCLPQRIDQESFLIAMYVAREARTPFFRVGYNSLGGFATINHLHFQAYYLKVQYPVEKAITEKLKTLGNSVSIFHLVDYPVNGFVFEGGASLEDLSDVVSKVCIFLQENNRPFNVLISESGKRIFLLPQCYAEKQLLGKASQEFLDMRINPAIWELSGHLVLKRRKDYEEASEANICRFLVEAALSETEFQELNLCVLDFLTSSLG

SEQ ID NO: 62272 - protein, 277 aa, Zea Mays
MGNCWGAKISSDSPSRGASSPSGTASKLASRNGAAAALSGCSSHASSASMLPTPRSEDEILESANVRAFSFNELRTATRNFRPDSVLGEGGFGSVFKGWVDEKTLAPARPGTGMVIAVKKLNQDGYQGHKEWLTEVNYLGTLSHPYLVKLVGYCLEDEQRLLVYEFMPRGSLENHLFRRSSYFQPLSWNLRMKIALGAAKGLAYLHSDEAKVIYRDFKTSNVLLDANFNAKLSDFGLAKDGPTGDKSHVSTRVMGTHGYAAPEYLATGVILNLTSAI

SEQ ID NO: 62273 - protein, 2104 aa, Zea Mays
MRDANALQMLLDGCRRCYWVVHEADSIDTFTLTGNERPLGNVNALVDELLVVIELLIGAAPSTLASDDVRCLVGFIVDCPQPNQVARVLLLIYRLIVHPNTSRANTFAQSFISRGVVEALLVLLQREAKSGDSNILHSCNVSHDSASWNESSKLTNKDSKFKNASGETNCQDHQIQSVQHYEPNSHETGVGLGSTSKWSLLKGQFLKNLGGMDVPNISDNVQNIDNGDGVLVGIVRVLGALVASGHLTSTSPTVRPKLPSGFLTTSNGEGNTMFEDRVSLLLFALQKAFQAAPRRLMTRNVYTALISSVINVSSKDNLKNLQDSGYHFKHIPLLVVLLRSLPYASRSFQARVIQDLLYLVCSHPKNRSTMTSINEWPECILEVLISNHEMGDNKDSDGISICEVEDVVHNLLLVVLQHSMRKKDGWKDVEATIHCAEWLSMVGGTSTGDQRIRREEALPIFKRRLLGSLLNFSAQELQVQQTEGIAAAAAGVAAEGLVPKETKVHAEKVANLSVMLAENAVVLLMLVEDHLRSRSQQFFMACLADSAASPASMASSAVSRSNSLSRTGSEHLEAGDSRQSLSSDAGGLPVDVLASTVDTNGQLSAEVMERVTAAAAAEPYGSVRHAFVSYGSCISDLSEGWKYRTRLWYGVCIPPKSNVFGGGGSGWVSWKSVLEKDSDGNWIELPLVKKSVAMLQALLLDSGLGGCLDSGVGFGPGMGVMGAFNQLLDSDQPFFCMLRLILVSMREDDSGEDDIFMRNISMKNVISEVLGCQTGSMLGLGGNSSASMRKRPAALLWRVLGPVLNMPVSESKRQRVLVASSILYSELWHAVSSDRKPVRKKYVGLIMPPFVAVLKRYRSVLAGIHELTCPDVQNPLLIDDWASTADTSPVEVGVAMISPAWAAAFASPPVAMALAMIAAGASGTETIAPPTNKLRRRDTSLLERRAAKLHTFSSFQMPIDTTPSLPTSAPKDKAAAKAAALAAARDLERSAKIGSRRGLSAVAMATSGQRRSAGDIERAQRWNISEAMGAAWMECLQSADSKSVSGRDFSALSYKYVALLVSSFALARNLQRVEMERRTQVEILNRSCMSIGLRAWQHLLHCLIETSRLYGPFGELLCSPDSIFWKLDLTESSLRMRRFMKRNYNWLNHLGASANYVEQKFLCDGADACHSEDGDSLLSVLPASSLITVDEVHEQIVQRQSDNICSSVDDQLTDSSTTDQIFTGSIDSRSSDFSGVRNLIRSTVVTPGYKTNNERIIIELPSMMIRPLKVVRGTFQVTSKRINFIVDEHMSDSYMDDIASTSGQYDQQDRDRSWFLSSLHQIFSRRYLLRQSALELFMVDRSNFLFDFEDIGSRTHAYRALVHTKPPYLNTVSVATQRPEQIFKQTQLMERWAKWEISNFEYLMELNTLAGRTYNDITQYPVFPWVIADYKSKTLDLESPSTYRDLSKPIGALNPARLKKFQDHYSSFKDPIIPKFHYGSHYSNPGTVLYYLARIEPFSILYAQLQGAKFDHDDCAFSDVARTWNSVLEGMNDVKELVPEMFYLPEVFTNVNPSGRLGSVALPPWAKNAVDFIHMHRKALESDHVSTRLHEWIDLIFGYKQRGKGAEVANNIFPHVTYDGMVDIDKITDPVQRRSVQNQICYFGQTPSQLLTVPHIRRRSLTQILQLQTIFRNPSEVRSYVLPSPEHCNVPASTMLVSNDCLVVIDSNVPTAHVALHHWQPNTPDGLGAPFLFHHGKNAINSSGGAIFRIFKGSSGSAEDYQFPRAVAFAASAVQSSSAVVVTCDKEVITGRHADNSVKMISPDGARTIETAFGHLAPVTCLALSADSSYLVTGSRDTTVILWRIRQVGSAHKKNAPEPPPSTPTTPTSPLATGSSSDSSPSKTLETYRRRRIEGPMHVLRGHLGEVTCCSVSSDLGLVGSSSSVSGVLLHSLRTGRLIKKLDVPEAHSICFSSQGIVLVWNEVENRLSTFTVNGIPIATAVVSPFSARVSCIEISTDGQFAAMGTCSSSNDNHDCSTALEDNSELDKPGSDEDVQGSNETRLSVDAPSICFLDLYKLEVIHKLKLEEGQDVTALALDQENTTLLVSTADKQLIVYTGPAPSTP

SEQ ID NO: 62274 - protein, 1244 aa, Zea Mays
MTSARSDLDDAGEIVTPTPRVKRILSSPRCLPHVAQVMLTGEPSIVEAAASLLMAIVTRNPKAMIRLYITGAFYFALAYPGSNLLSIAHLFSATHTHQAFHGGEEAALSSSLPLAKRSVLGGLLPESLLYVLERSGPSAFAGAMVSDSDTPEIIWTHKMRAENLICQVLQHLGEFPQKLAQHCHSLYDYAPMPPVTYPNLKDEMWCHRYYLRNLCDEIRFPNWPIVEHVEFLQSLLVMWREELTRRPMDLSEEEVCKILEISLDDLVLGENGSIKQSSDLSLANSGNKIENIDEEKLKRQYRKLAIKYHPDKNPEGREKFVAVQKAYERLQASMQGLQGPQVWRLLLLLKAQRILYKRYGDVLGPFKYAGYPMLLNAVTVDKDDSNFLSFDRTPLLIAASELIWLTCASSSLNGEELIRDGGIPLLATLLSRCMCVVQPTTPANEPAARIVTNIMHTFSVLSQFESGRVEILKFGGLADGIVHCTELEFVPSAVDAALLTAANVLVSSELQNALLRAGFLWYVLPLLLQYDSTAEENETCEAHGVGARVQIAKNLHAVHATQALSKLCGLSGDDILYPDNKPAYNALKALLTPKLADMLRNHPPKELLSNLNSNLESPEIIWNSSTRGELLKFVDQQRASQGPDGSYDLTESHSFTYEALSKELNVGNVYLRVYNNQPDFEISDQEEFCIALLKFIVELVLQWNSINLETIHQHGSVTEASMSGNDEVSDSTIEGKMDNSSGKQSTDGDSEVIINLQSGLTSLQNLLTSNPGLAAVFASKERLIPLFECLALHVPSESTSPQICLSVLSLLTKHASCLEAMVAERMSLILLFQILHCNPPCRDGALAVLYSLASTPELAWAAAKHGGVVYILELMLPLQEEIPVQQRAVAASLLGKLVGQPMHGPRVAITLARFLPDGLVSAIKDGPGEAVVSSLELTTETPELVWTPAMAASLSAQLATMASDLYQEQMKGRVVDWDVPEQASGQHVMKDEPQVGGIYVRLFLKDPKFPLRNPKRFLEGLLDQYVSSVAATHHEAIATDPELPLLLSAALVSLLRVHPVLADHVGYLGYVPKLVAAMAYEGQRETMASGQASSGSQAEPGEHDNSSHSEATVQTPQERVRLSCLRVLHQLASSTTCAEAMASTSAGTPQVIPLLMKAIGWQGGSILALETLKRVVGAGNRARDALVAQGLKVGLVEVLLGILDWRAGGRQGLRNKMKWNESEASIGRVLAVEPSSAFRLALER

SEQ ID NO: 62275 - protein, 429 aa, Zea Mays
MARYFRSSNLASRIFDRQLISPLPGATVNTIRQFYENLVPSYTIYDIDCPDYSFRKFTDDGKYLVAFSRNHQDLIVYRPIWFTYSCNEECETHELPPKAKKFDSFFKQLYSIPLASSNEYICKDFFLYMECHRFGLFATSTAQSNESTATEGAIHGVPLIEKITFHLVRLEDGVILDEKAFCNDFINLAHSIGAYMYEDLLCIVSLRYQTIHILQIRDSGNLVEVRNIGAFCREDDELFLHSHIQTGYGGSFLPGIKQRLLSYIFCKTWNEVPDQTLRVQHLKKKFYFHFQDYVDLIIWKVQFLDRHHLFVKFGSVDGGVSRSTDQNLAFFAVYNMETTDIVSLHQNSSEDIYALFEQFYDHFHANPQASSHGKFISSHSNDIHALDQLRVIKNKASSSSQFVKKMMTSLPYTCQSQSPSPYFDLSLFS

SEQ ID NO: 62276 - protein, 50 aa, Zea Mays
MQYSNHQILTAPHGVRIGCRRAQPECVCESEDYIADQPISVSGQSRQKEH

SEQ ID NO: 62277 - protein, 227 aa, Zea Mays
MATDALALMDHLGWKKAHVFGHSMGAMIACKLDVMAPHRLCSLALLNVTRGGFQCFPKVDAQMLSLAFRFLRAKTPEERALVDLETHYTKVLHSLSSIASSLPCPLPLPTPTHTRKPLTSASTSTSKLLVALEARCPSPRCRGSCRLEVHARTPQRLLPPRGAEGSGIAGVAVGTRNPVGVCGDGSQIRLDPLRLIRAPHAPDLLQGTHSTLQRPALLHRDPLLDLG

SEQ ID NO: 62278 - protein, 727 aa, Zea Mays
MSVVGFDVGNDTLVAAAARQRGIDVLLNAESKRESPAAIAFSRNARLIGCHAASASSAHAPFSSVKRLLMGATGRHPDSSLLRDLSRLPFPAAVGGGAVVHADHIGRRIALSPTHLLSMLLAYLKQLAEADLGGAPVADCVISVPCYFTQAQRRAYLDAAAIAGLRPLRLMHDLAATALGYGLYRSDLGGSGGPTCVAFVDVGQCDTQVAVVSFDMSGMKVLSHGFDADLGGRDFDEVLFEHFAEEFKDRYMIDVTGNVKASMRLRAACEKAKKVLSANAEAVVNIECLIEEKDVRGVIRREDFEKLCARLLERVVEPCNRAVTDSRIGLERLHSVELVGSGSRVPAIAKVLKEFFRKEPSRTLNSSECVARGCALQCAMLSPTFRVREYEVHDAIPASIGFYTSDGPVSTLSSDALFRRGLPFPSVKIITLQKNDSFSFDAYYVDANELPPGTSTDIGSFQIGPFQAHMEASKVKVKIRLNLHGLVSVESAALIDDYQRNATSADHMEVDTSGDDMGHKSRSERSIQRQELPITEYICCAMSKQELLEAQEQEHQLAYQDKLMERTKDRKNALESYVYDTRNKTEDWLYEEGDDETEVVYSSKLEELKKLVDPIENRCNDDEVRAEIARELLKCIVDHRMAAKSLSAPERDAVDNECNKAEQWLSEGSKLQESLPKNVDPVLWSCEIKGKEEELDMFCRNITRHKGSPARTDGSRGSDHMPTPDRD

SEQ ID NO: 62279 - protein, 1057 aa, Zea Mays
MGSGSSKSEFEDFHANAVEEAVKNLAPYLEDTRVRNQAIYFDGWDGLGASAVLNSIAERPPPSLRNKFDDIILHIDCSRWKSRRALQRTIAQKLGLPQHVMAVFDRQDEEDDLVGVHEGSRTEIRDIGREIYRVLQRQSFLVVFHNGSDTMVDFNDFGIPRAAADPWSNIIRKVLWTFRGRLHAIKETEEVSGHLKPDKRQPKGTETVDTSYLCFRSLFSGGPSDVSSYRLQILCEEAAAIAQYTNNPIVTQEIAEICCRYLLSLNSKGNGKLDFNWSAHASNYWVCDGILNECQPEQAWEIAASLHKELRLEGYSSARKFCHPGADTTSWVVTIKSSEDIVPTVKPETTSFFLAVKRKHGHSVLPLPMKMFQRSEQLHVLKLYHCSFSFASPPFLCCLNLRFLGLDSCTDHQSMKPKENKEEESEEAGAEGEEENTATIEFFQSLWVLDICCTDWELTLSPNTIVKMATNIREINIKRGRIWHSSISWRFLGNIHKLRVIEPTSPWETSNKDEFMDMVKLELLDLSGNTTIQFLPSLSGAISLRTLILDGCIELQHVVPETLPPWLETFSFDGGYKQAKISCISLAGCARLVNFRLCGSVQNLEELDLSNTSIKTLDLSDKVVQVPCLERIILLGCERLRAVLWPKDGMPNLMVLGIDTRGGAEAASAKTVHDNFAISKEREEGCRAFVAVMEMRFLQSLVLASSNKLCWDTDRKYDLNICLSSSRSSSKGVGQHSYKEETMGPLQKSMITSKTYLTYSDVNIDKAGSVRQFQPLHRHVEIGEGISNSSMVTVREISAAILLINRVYSLLVHDNSSIRTVIPENIMSIDTKKVYWSCLRWCCVERCPSLDSVFATNYDAVCFNALETFWAADLLVARCIWSKGRTTNVKDTESFAKLQAIHLHSCPRLAFVLPLSWFYTLSSLETLHIVYCDNLGQVFPVEAEFLNEISTGHPGGLLEFPKLKHIWLQELPKLQQICEAKMFAPELRTITLRGCWSLKRLPATADRPGDRPVVDCEKNLWAKLEWDGKEAGHHPCLFEPRHSKYHKKRVLRTTLLR

SEQ ID NO: 62280 - protein, 714 aa, Zea Mays
MATATESGSAPPVDGEVRQRGRPRGSGRGRGRGRGRGRERSQSARRSKRPRKPRPWRSASPPALEPLVPLPPGTEVEVRIDDDGFHGTWFEATVLDFAPARGYRNPARYTVKYVHLLADDEGALSEPFAPSQIRPRPPPLSSPPRFQLHDIVEAFHNEGWWSGIVVSAPDATGAGVTVSFPITREVIEFPSSLVRPRRDYVAGDWIPSRAAMVLRPNRAVKVYEVGEKVEVLRNRDVYGNSWFPATVRVVIDDLSYVVEYFDLEEGKGGSEKATEYLHWWFIRPAVEHSPSKREFQLRPGAAVEAYCDGAWSLGVVTRVVGEDEYEVGIIGKKTRLLVTKVVELLKPQYIWNGNQWRITTAKVSIGTKRGSSTKVLACKKLAKRRRSKELCNLNSSLDVTRTDQQRGRKEAAEPMKDHPLALECSKSDAQGQLDRTLEDAQNITELSNQENLLPTVSPGFISTSNGKGTNIHDTQFEEEPTATLPIDGSSQCIIDISPLRSCSALERSLPSPPQASFVKRSPVWRVVDAKHVFKELPQQPHFLPLQKYPPTLREGIALGMMVSFSELVKFTMEASIDDSMEWFEDKVRTVSLLEANGFSVQSIQSVLTELIEIKSERARIHGEIGKLSSKLAENTASSSRVGALLDEKDGAAAQLEQELGRIRQESQKMAQEKEKIDAEGVSIKTACSGYEDLCSDAERKFKEVLAQLRRKGAR

SEQ ID NO: 62281 - protein, 384 aa, Zea Mays
MYVSAHLPFLVTLSSPAFPSSPPFRTSSTPANNFTSHDLAGALEDMQVAAAAASMRGTETVGAKSAARRLSRVLVGRRRRAAVLLLALAYAAAMLMLTIGGSEGSGSSGVVAGVLRRGAQSAPPGSVYRSHLVFERLLPEMRAFASRPNPLVTSQYKKFGKQWEPCISKGLIHSELPPSNGFLIVEANGGLNQQRISICDAIAVAKILNATLVTPAFHLNSVWRDSSKFGDIFDEDHFIESLRKYVRVVKDLPEDVFLRFNHNISIIPNMRTKAFSPPSYYLQHVLPKLLELGAVRIAPFSNRLAHSVPMNIQALRCLTNYKALRFSEPIRILADNMVDRMIKRSFLSGGKYVSVHLRFEEVLLKFILCGLILLLFSSCDELYV

SEQ ID NO: 62282 - protein, 1388 aa, Zea Mays
MPAAAPTTPRRHPSPNAGGRASSPTPAGSQAKRSQSTERRPVTPSRPSSGGSRPSTPSRISAPASPSSATSSPSSFSSSSTPVGDAVPETQIALRRLPGGRAPDGLWPSMRSLSSSFQLESKGKKISSSSSADQAKTRDAAPADRKRSPLRGRATPEQSENPHAKVIDHHRWPAMMGGRVSASTMSKSMDLTDKISRSALPSVPSRGVSPKRTTVSSAANTLSRSIDLADKIDRLVSSSMSSQGESPRKSPCNGADDVSKKVGVRKDLKLSSLAISRRVSPVTTDDKIDRLVSSSMSSQGGSPRKSPCNGADDVSKKVGVRKDLKLSSLAISRRVSPITTAASDGTRTLSGSMDLTEKDNSTLSPVSSPSISPSASLSSVSNAASQTTTKSSERLIGPVSNLSSSRGLSPRRTTSGGIVDLMKSIDFPEKDRRPASSRGFSPRRRLVSDGVNDIGKNMDFAEKDSRVVSSSIPSRGVSPRRRLASDGVDTMCRSSEFSGKDNRPSTSSSTSRGMSPRRRLASDGISAVTKGMDFGDNANRPSTSKGVSRGISPRLQLASDGVGNVSKGTDLADGLDRPSTSYATPRGMSPRRRVASDASNATSERIKFTKEDSGTVSSSVAPRGVSTLRQLASDGVESVSKSMDLVEKDTRPTTSSASSRGLSPRRRLSSDGVNVISKSMDLVENNNKLVTMSAAARGVSPRRRLASDGVKVTSKSIDLVENSNKPLTVSAATRGASPRRRLTSDGLAFISKSTNITEKSIRPSTPSMSSRGMSPRRRLASDGINAVLDTEFADKNCRPSSSSAALRGVSPRSRSASNAISTGMTNAENDSRPSTTSSPSCQTLQSSRLESNGVNILSKDMEISSTVSGCTSDSRLDGAGALVKSIDVTEKLTVSTEDGGGEDDPGRIDSSDVVTSAVSSSLASQEVSSRHVTDDVKNASESVGATQKGNRPLSVKVPSRVASPRRRLASDGIDTISKSMDFAEKDKKPMTVSVPSRGMSPRRTARSDSADIMSKSMDFPLQVFSTRRVLGPDGANAMSRSMDLTDKIRQKISSTMQSSRVSPRKMPLAYNRIKGPEILSGDAESPGSADGNESQEENASSSPDAPSNSSEKSTPPKQLARRSPSPSHILICPSSSSNASSTPSFVSRRLPSPSRTRPSTPVSPCSSARSDSASSILSYIGDATRGKKSPTHTEDAHQLRLLHNRNLQWCFTTSYVDELLSIQKISAETMLYSVWDANSRMCDSMVIKRNYVQQLRQEVKLGIVLKEQMDYLDHWAALQTEHSSSLSSATEALKASTLRLPVSGGAKADVLTVKNAVSSAVDIMQAMGSSVCHLLSKLQASHSLVTELSAVAAKESTLLNEYRELLATAAALQVQESSLRTQLIQETE

SEQ ID NO: 62283 - protein, 95 aa, Zea Mays
MALQSNLLSLQLITRNYASFRQRLPVFVELYDWWKRLRNRCCKESKKIFDGLLISFWWNIWLERNNRIFHRLQRSAIQVMQLVKDQIVSFSVCNW

SEQ ID NO: 62284 - protein, 648 aa, Zea Mays
MGGIAECGVSIDTKASPRRAAIEKAQEELRQEYDVREERRRELEFLEKGGNPLDFKLGHVASLSVQSTSVTEQIAEQNVISEAKGSSAFATSSHGDSVESNDKPGNSLCREGNTADNLTLLDGDASNLGVDKIVKHGTKRTNSAQAEQFLHCDGQNNAKEEDSGLFRLGPKSQAYARRRSKPIRENAYSLSVMYPPIPPLSSQQKDVTGLIPETKTEDNGVSSIGDSKPTSPNSKNMVTNASLLNDKVEMETENVQAIPEGNQAPKNELSNSNNGSPAMEISPNSVPDNSRLTVSDQMATAFVSVESPDAISKVAASRIVCSLPYISNEILKEAQTLEKAGNNPSMVSVVDVHAYGMDNNGAAPYSAVKSASLNENEVDPIHAYAAKAVTEHPDQNENLVPVNADEMADEGLNEILPDDKDDKKDCQLEVSSGPVILNDSSTPVYPEFSNFFYAKDGTEVSNNAVDSKNNAEQHASSNQGKGNMEECKDSDGNNASESSVAQKLVSVIVLPASDTGDVSNFVENDVEKSSRDQEKVAKKEYEDSVVAKKDHEDAILRRARYIEANIKRAGEWSLCNISLEKKQKSHWDFVLEEMVWMANDFTQERLWKNTVAAQMSHWISSRGRAAFEEASIQRKQKSVARVLANATE

SEQ ID NO: 62285 - protein, 784 aa, Zea Mays
MERLKSAVPPDLRRAVGEGTAADLANTTSRLFAFFDSLPLFHQVMQELTDPELALCRKDKVKAVELKGHGNACFSRREFGKALRFYSQALRHVPINSGGMDVNLVSSLYVNRASTMHKLGLFEESLRDCDRAITISPNYSKAWYRKGMVKTALKNYSSAIHDLEVALSQEVTSSGKSNIEQELKLILEKHESVNEAGTSNCDSKDRDLPLAGQPHKIVIESISTPNKGRGMISTDDIPPASLIHVEDPLAAIIMKSSRETHCHFCFSETPADVVFCPSCTIPIYCSKRCQEQSAGHISRDEDTNLGYSTNVANLSITSSCKSPRSKLFAEHRHECGGAHWAAVLPADVVLAGRIIAHSIVKRMPSGKSFAFSGPNLDLVHHYDQHSPANKLESHIYAIVLLLCLQNHYRSDLLWTEDSLSQLVLLIFQIKVNSIAIVCMRSMDRGPEHTINRGFYVAEGAKMCSVEQVRVAQALYVSGSLFNHSCQPNVHAYFLSRAFVLRTTEFIKSGSPVELSYGPQVGEMHISERQKSLQENYYFSCQCSSCSELNLSDLVMNSFCCPQSNCLGAISESTYYRSKENFVNVSLGGSYVCKLSLPDVSKVDMDMENVAKSLLQNSGVSLNIDHGCCMSCRSCIDLSSALATSHREESTIDRLKKHTFLDKTLITEALQSLKQLKKLRHPYSKALAQAEDTIAEAFAKVGDQELARKHCEASIQILEKLYHPKHIIIAHELIKLVSILLSLGDGASAAATFAQAEAIFSLYYGSHVEKVLTYMGALKKAVIDV

SEQ ID NO: 62286 - protein, 230 aa, Zea Mays
MDGLHGTDACFSPARAISPQVRPPGPPDVGSQYLAELLQEHQKLGPFMQVLPICSRLLNQGVPQGAMGWQGPPQSPSSYIVKKILRLEVPTEAYPNFNFIGRLLGPRGNSLKRIEASTGCRVFIRGKGSIKDSGKEEQLKGRPGYEHLSEPLHILIEAELPANVIDARLAKAQEILEELLKPVDESQDYYKRQQLRELAMLNSPLREESPHPGGAPPSPFSNGGMKRVKQ

SEQ ID NO: 62287 - protein, 140 aa, Zea Mays
MKRYGFGGMPASHGTSLAHRSGGSTGQRDAPGRVFKNRKMPGRMGGVQRTVKNVWVYQIDPARNLLYLKGQVTLFLMSQQILLKHRSCVLCIFRCPFCRFLVLKVALFSLRILYIRNLTRLCSHFLHTSRVKVSLKTWSP

SEQ ID NO: 62288 - protein, 83 aa, Zea Mays
MHREEAQLLNLLKRHDQEYNVDEISMNDKLTNCGHQITIMCIYVNILVRLRRVLIHSLTNYENHMQDSLTDAHFLHYSTLSRK

SEQ ID NO: 62289 - protein, 84 aa, Zea Mays
MELAELANSELRMSVWTDDVYSFMRSQKRRRIQSSDISQDFDAMRKQLVSDAARVCRSKVPESLMENLIKRLRSYFEDKYPPKA

SEQ ID NO: 62290 - protein, 318 aa, Zea Mays
MAAVRRCCLLAAVLLWSALASAATAAPAPVVAGPVSRVEDATMFRIYYGQSFKVIKNSGDGKSYLLMQNTSKMASKTKYCTGRIKSFVIPLASFSVDTTTSPVSFFELLGVLESLKGITSNQVASQCVLQSYTSGNAQLVNRTDVQTLSQFTAHFISDTDEDRGCNFAAYVPLEEGTPLQMAEWIKYLGTFTNSENRANAVYDAVKTNYLCLSKVAANLGTRFKPVVAWIEFTQGMWTFVKESYILQYVTDAGAEIVDATITDKRFNSSDPEDMDNFHAILCVSINHSECNITTVMLVDELTVACECVTYKRHILFWP

SEQ ID NO: 62291 - protein, 402 aa, Zea Mays
MVEPSSGITPLGGDLQPLDDDKELVKNQTSLEDIDSTDNVDSYKKDSPEGGSPEKLNLDRSSGDESMEEDTVEIKQDESNMKSDDLGGKNEFNSEDVKEVILPDSVVEASKEAMAEEKSAASTEKRKLEAEEGVASTEPIKRQRRWTADIAKVSGRQALSQTGPETPKESFQPAFKRSFGRSDSTASVDSPKERIVPPSEKPPTTSLRIDRFVRPFTLKAVQEFLGKTGSVQDFWMDHIKTHCYVTFSSVDEAVATRDAVYNLQWPPNNGNKLVAEFVDPQEVKLKVDPPPPPAAPVSPAAATRAPPVQHTQTNQSVPRQAAAPKEELPPPPPPPLAKPPMADLTPLGRERLPPTPKKPEPPVVTLDDLFKKTQSSPRIYYLPLSEEEVAAKLAAQGKGKKG

SEQ ID NO: 62292 - protein, 548 aa, Zea Mays
MEEHQVKPSDLPPTSLHNQDSAATPVTSADPARPAASNDSPSQVASAAPAAVSAPTAAPAEDAAGREASASVFSASGLSSWAKNLKIPQPSPGQESPTGKNTFARLTSGLGLRLSPKAAQQDEGAEGSTSPTTGQPGVFGSLTKGIVDSSKNAVKAVQVKARHMVSQNKRRYQEDIENVVVVHCKAGKARTGLMISSLLLFLKFFPTAEESIEYYNQKRCVDGKGLILPSQIRYVKYFERILTYFNGENQPPRRCMLRGFRLHRCPYWIRPSITVSNHNGVLFSTKKHPRTKELMPEDFWFSAPKKGIMVFALPGEPGLAEVAGDFKIQFHDRQGDFYCWLNTTMMENRVTLNPTDLDDFDKRKLPSPGFQIEVVLVDYDGSQPAKPKPGAGPAADKSHADSSASTVAKENSAAPEESNKGTGSNNDRDEVFSDSDGEDGSSNGRKEKTAGGGQSSVNAAKPSQTGNMEEAAASAAASRLDKVAISSEQGTTKAPDGTSLKTEVSSKASSTTAPPPPAADSSSMSEFKAIAADASVFSFGDEDDYESE

SEQ ID NO: 62293 - protein, 123 aa, Zea Mays
MAASPPSPSLPVWCPADALSHGRPPPLAASQQPHLLCPPSPARPSTMDTASPGTRPLHAIALLPAASPISTGALIFSHPAWPASSPFSTGTRFVLLWMVLSTGGHDLLISLSTSPILLIEDYH

SEQ ID NO: 62294 - protein, 218 aa, Zea Mays
MEYTLLPDLAPHKIHAKIQVHVSRKWLFRGATDSGPLQHVDMVLSDREGNAIYAEIPGNLAEQKATNIEEGGVYDISRFRVCAAKTVFKIVDGDKMIQFTFHTIVKRATSPPTTFPLYVYRLTSFDLIEPHVQTTNNFVDVLGVITEIHELTPVHVRSQLTPTVTRTIIIEDLSANKSNINSPEKDDGDKETAQLDTIPNNKGKGPADTIESPPKRFK

SEQ ID NO: 62295 - protein, 211 aa, Zea Mays
MVGEHLLHHASVGLVGLILRATGFDNSTWIYLAPGKLFGGKHFMKPFKAMFPRLKNHSMIRSGKLEENIRGLAGSAVDYMVCLLSDIFIYDGPSNFADNLMGHRLYYGFRTTITPNKKALARIFMDREEGHTSAFEERVRQVMLTHFGAPHKRIHPESFYTNPWPECFCQTKARNHADRCPHNSVNDVLESWFHNKEDVEVEATNQTDSTS

SEQ ID NO: 62296 - protein, 399 aa, Zea Mays
MAAAAIEAAGRRKGSCFLEVGRREIGSSFPRVSSRRISGSEVRVGRLKEGGEVTTKLVGEHDSRVHKMAIEPGNPYIFYSCGEDGLVQHFDLRSDSATKLFTCCSFLNDRRRVKLNSIVIDPQNPYYFSIGGSDEYARLYDMRKFQLDGSRNTNQPVDTFCPKHLIKGASARVHITSIAYSYAREILVSYNDELIYLFQHNIGLGPNPVSAEPEFFNMLDQPQAYRGHRNFRTVKGVSFFGQHDEYVVSGSDCGNVFIWRKKGGELIRMMNGDKSVVNCIEPHPHFPFMATSGIDNTVKLWTPAAKKLIMPLPKNAKQIIAANELERTVHISQATATLSSDVMMHVLRLLRRRDSEMNIENEPASADLASDDDEAFDFGFDDAERNERENSDPRECNMT

SEQ ID NO: 62297 - protein, 323 aa, Zea Mays
MAKPMLLKEMFTFQLKVFLNISVYLEENLIKIRQVHGLLLIQESVILQTSHSGKLQRRVNLFGIALGAVEDQIIALYHPMALRFFLMRTHYRSDVNHSDQALEIASDRVYYIYQTLYDCEEVLATYREEGTSLPVPSEEQNLIGKHHSEFLKHMSNDLKTTDVLDRCFMELLKAINSSLNDLKKLQQKIEQQKKKQQQQKKQQQQKQQQQKQQQLQKQPEDYIQALIALETELKNKLSILGLMPSSSLAEVLKQLKDKSLKRAGLTEEQLQEQIEQRNVARKNKQFEISDGIRKNLATKGIALMDEPSGTVWRPCEPERSEES

SEQ ID NO: 62298 - protein, 542 aa, Zea Mays
MSVLIVTSVGDIEVDLHTDRMKYYNGCLFHKVEKDFLAQTGDPTGTGTGGDSVYKFLYGDQARFFDDEIRPELRHSKTGTVAMASAGENCNASQFYITLRDDVDYLDDKHTVFGMVAEGFDTLTKINEAYVDDNGRPFKDIRIKHTYVLDDPFDDPPQLAELIPENSPTGKPRDEVAEERLEDTWVPLDQTVAPEELEEMIRSKEAHTNAVILESLADIPDAEVKPPDNVLFVCKLNPVTQDEDLYTIFSRFGTVTSAEIIRDYKTGDSLCYAFIEFDTKEACERAYFKMDNCLIDDRRIHVDFSQSVSKLWGQFRQSKRNAKKDGCFKCGAPDHLARDCDQDGEQKNKGPSYVLKDENTQRGGNHRRSYDLVFDEDEADCSEERDHENGHRRKNRRIDDRKSELPPRGGRDRNSHERTHSDEKGSKHGKDDRNRGDRKHDDYHSYSRSGDRSSGRNDDRDYSKRHDRSRSGEEEKGYRRRDKSDGERHHRDDGYDRRRRDEDSHRKRSPDSKHRREDGGHHVRNQQSDDRSYKERRHRDGR

SEQ ID NO: 62299 - protein, 274 aa, Zea Mays
MEGAGRDANPLSSYRIGRTLGTGSFGKVKIAEHILTGHKVAIKIINRLKIRSLKMEKKVKREIKLLRLLMHPYIIRLYEVVHTPADIYVVMEYVKKGELFDYIVEKGRLHEQEACRLFQQIISSKLYVGPDVDVWSCGVILYALLCGTLPFDDENILELFYKIKGGIYILPSHLSLSARDLISRMLVVDPMKRITIHGIREHVWFKIQLPRYLAVPPPDTAQQVKKLSEETLNDVLNMGFDKNLLIESLQNRLQNEATVAYYLLLDDRLCTTSG

SEQ ID NO: 62300 - protein, 527 aa, Zea Mays
MQIKGGFDVLKHGPELDIDGKRAHWIKASPWLLGANPRDLIMPVDGDDGFYPTGNELKPEIVSSNRKYRAHVLVCAPSNSALDEIVLRVLKTGIRDENNNTYNPKIVRIGVKALHSVKAVSMDYLIQQKLSGVDRTLDGGRRGAGEYDRIRASILDEAAIVFSTLSFSGSSIFSRMTRAFDVVIIDEAAQAVEPATLIPLIHGCRQIFLVGDPVQLPATVISQTAQKLGYGTSLFKRFQAAGFPVQMLKIQYRMHPEISTFPSKEFYEGVLQDGEGLSRKRPWHSYSCFGPFCFFDVDGIESQPSGSGSWVNQDEVEFITLLYHQLALRYPELKSSPEVGVISPYRHQVKLLKDSFRSTFGDQSRELIDVSTVDGFQGREKEIVIFSCVRCNKEQKIGFVSDFRRMNVAITRAKSAVLKGRPGVVVVGSASTLKQDKHWNNLVESAKERNCLFKVPKPLTAFFAEDNLKTMKVERRPPPELNARVLEEINQEVVRQELMNVDDAADHADAGDDDDADMDADDGGGDD

SEQ ID NO: 62301 - protein, 504 aa, Zea Mays
MTKAATIYGSKTQSDALRPGPLRPANIIRNKFPTYKNGSNGIVIKLADGPEIPPLKEIVAKETADLLDRRQRLSVRELAMKFEKGLSTATLLSNEVKWRQVALMERDILLKNLKSVLESLRGQVTGKTKDEIEESISMVEILTVQLSKREAELVQQKEEVTKLAKSLKQASEDAKRIVEEERANAHTEIETAKGAVQRVQQAVQEHEKMSQNTGKQKQDMEELKKEVREARRIKMLHQPSKAMDLENEIRILRNTFAEKSKDCVSLLKELETHKRLKENGTIPSFDLEGLQCLGSMLRIVGLSGTHMDLSNISIQWFRIHPKESNKEIISGATRPVYALEPHDVGRYLQAEIDVGGEIAVAKTAGPVDPDAGLVDYVETLVRKPETEFNVVVLQSNGVDQPKESVHVLNVGRLRMRLTKGKSVVAKEFYSSSMQLCGVRGGGEAASQAMFWRPRNDLSLVLAFESTRERNAAIMLARRFAVDCNVCAFTKRYIILAGPGDKTPW

SEQ ID NO: 62302 - protein, 138 aa, Zea Mays
MVVPRAPETQQDQDEEMLVPHQDAIEGLQKDVLEGPQPMEEFASAVENQIIPDTSTSRFTWYIENFSKRNVRKHYSDDFTVGGYKWRVLVFPRGNNVDYLSMYLDVADSNLMPPGWSRNAQFSLAVVNQLDSKASLRK

SEQ ID NO: 62303 - protein, 81 aa, Zea Mays
MPPPSASAIATRFATHWIADALADDESFDFSVLQDLMPLTWNTDVVLVHSECASRNGGGFLLITFAALNPVALTWIGCGIR

SEQ ID NO: 62304 - protein, 794 aa, Zea Mays
MMIPARHMPPTMIVRNGGAAYGSSSALSLGQPNLMDNQQLQFQQALQQQHLLLDQIPATTAESCDNTGRGGGGRGSDPLADEFESKSGSENVDGVSVDDQDDPNQRPSKKKRYHRHTLHQIQEMEAFFKECPHPDDKQRKELSRELGLVPLQVKFWFQNKRTQMKNQHERQENSQLRAENEKLRAENMRYKEALSSASCPNCGGPAALGEMSFDEHHLRVENARLREEIDRISAIAAKYVGKPMVSFPVLSSPLAGARPSPLDIDSGGVLGGAATYGGAADIFGGGGGVAACGAARDCDKPMIVELAVTAMEELVRMAQLDEPLWNAPAGGHDGSAETLNEEEYARMFVPAGGLGLKKQYGFKSEASRDSSVVIMTHASLVEILMDVNQYATVFSSIVSRAATLEVLSTGVAGNYNGALQVMSVEFQVPSPLVPTRDSYFVRYCKQNADGTWAVVDVSLDTSSVLKCRRRPSGCLIQEMPNGYSKVTWVEHVEVDDRSVNGIYKLLVDSGLAFGARRWVGTLDRQCERLASVMASNIPTSDIGVITSTEGRKSMLKLAERMVTSFCGGVTASAAHQWTTLSGSGADDVRVMTRKSVDDPGRPPGIVLNAATSFWLPITPKRVFDFLRDESSRSEWDILSNGGVVQEMAHIANGRDHGNCVSLLRVNSTNSTQSNMLILQESCTDASGSYVIYAPVDVVAMNVVLNGGDPDYVALLPSGFAILPDGPSGSSNMQGGGGGGVGSGGSLLTVAFQILVDSVPTAKLSLGSVATVNSLIARTVERIKAAVSGESVTQQ

SEQ ID NO: 62305 - protein, 480 aa, Zea Mays
MATHYQAATLIASPSYPNAIAWSSDNLVAVASGHIVTILNPAALDGPRGLVGLRHSDPFPIGVVKREDLLEPCLLPTSLARETEPCARSISWSQQGFAPNYGCLLAVCTVNDHVKLYRSPIWELCDEWVEVADISQLLFNYYKIINFGEDNGSHLTSSKNTNSGEAEVLGSTCRSEESLYFRGPGQRKIKPARVGGFIYDGNEVDLDASKDADFSMEPCSKSKKKSLKKTVKPRDEVVAVNGRNSTGNVKASLSSNEQNKSLPLITAKQYACRAAHLSSLVVSWSPVVSLSDRTSCLLRHWCILAVGSKSGNISFWKLYKPEYYTIDAGVVTSDPMLIGVLHAHESWVNAITWQVLSAGSSKSSLLLATGCSDGSVKIWLGNIEGLNQCAIGEEVPFVLVAEVAANLSAPVSSISLGIPARSQHEVSLAIGRVSGLLEIWIWNASTNKIESSSAWHAHDQVVYDGLSMAIVYSAAVRPPG

SEQ ID NO: 62306 - protein, 168 aa, Zea Mays
MDGKTLDGRNIRVNHANERTGGFRSSGGYGGGGYGGGGGGYGGGGYGGGYGGGSGGYGGGGSGDYGGGSGGYGGNYGDRAGGGYGGGGDYGVAALAQWVVPVALMGSLPAHLVTVTRMMKSWMISSRTMSLTATPTRGANLCPPPPCEAVWILGHMYSVVFSVNMIGV

SEQ ID NO: 62307 - protein, 198 aa, Zea Mays
MSKRLLREGADTWNMISKNNERALWSSAIPEIITKFTNIAHSVRRGLSEQDLEVLRGIAGCGEDIGRDEFDRLWCWLYPVAVSLSRERIKKLWDCTAPRWIEGLITTEEAESALRSSRELLKEAGTFVLRFPITRSWPHPDAGSLVVTYIGSDSSIHHRLLSLDSSDASAEKLQDLLLQEPELSQLGRVDRVSITIRR

SEQ ID NO: 62308 - protein, 135 aa, Zea Mays
MIEACAGRDGEAATSINLPQHQVPPHLRIVSAAICQRDVTPRLREGASVVEDTRLPEPQVLLRSASAWRGGWCGAACRRRSRRPTPSWGSPAWPSSSTRSGCSALGTGRSPTSNNTSRSPGASTHFLDWGSFCAY

SEQ ID NO: 62309 - protein, 232 aa, Zea Mays
MGDDCKEKERRYLLKEFPELCSSKDHAKVLEVGCGNGSTAVSILRSSERITVFACDCSKDTLEKAYEIISNTKGINIKDRFHPFLMDVSKETFPDWLFCKACQTSLGKAAASLLDPSHHGIREEHPVFLGENQCCAGGMDFITMIFTLSAIPFDIMPTTIEQCVSVLKPGGLLLFRDYGLYDMTMLRFLPHQRVGFREYMRSDGTFSYFFSLDTVRELFRAAGLVEVVAARS

SEQ ID NO: 62310 - protein, 314 aa, Zea Mays
MPSGSATQFRYTQTPSKVLHLRNMPWECTEEELVELCKPFGRVVNTMCNVGANRNQAFVEFADQNQAISMVSYYASSSEPAQVRGKTVYIQYSNRQEITNNKGTGDSSGNVLLVTFEGVQPNDVTIEVIHLVFSAFGFVHKIATFEKAAGFQALIQYTDAPTALEAKNSLDGRSIPKYLLPEHISACHMRITFSAHKDLNIKFQSHRSRDYTNPYLPVNQTAIEGIVQPTVGPDGKIKEPESNVLLASIENMQYAVTVDVLHTVFSAFGAVQKIAMFEKNGGMQALIQYPDITTAAVAKQALEGHCIYDGGYCS

SEQ ID NO: 62311 - protein, 286 aa, Zea Mays
MALWLRRGLLFELHVVHKSRLCNGKRGCRKTKATSTTILQRQEKETELGLRHDQRRLPTIRPPAVRRATADPDRPETLDGRERADPPQEGRRRPRGLPATRAGAREGRAAAGEDVQQLSVKPNATVEGRAVGAPDDVQRMRHEAQARDQVVSRAAVRPGRTHQEGARARQEEEEGGQEDVLREQRRPAVVGPAREAVRPLPVLQDPAVEGGASGAQDPVQRLRRQVQVRQAAARVPARQQPHLRELLALQLPQEGHADAAGRRAAAVRPTSPGIYRWKRVRGSLRS

SEQ ID NO: 62312 - protein, 644 aa, Zea Mays
MSVSMKDLDPAFRGSGQKDGLEIWRIENFKPIPAPASSYGKFFMGDSYIILKTTALKNGSLRHDIHYWIGKDTSQDEAGTAAILTVELDAALGGRAVQYREIQGNETEKFLSYFRPCIMPQPGGVASGFNHVEVNEQDYKTHLYVCHGKHVVHVNEVPFARSSLNHDDIFILDTKSKIFQFSGSNSSIQERAKALEVVQYIKDTFHEGKCEIASVEDGRMMADAEAGEFWGFFGGFAPLPRRAPAEGNEKHDETAFKLLCFDQGKLEPVDCQSLAHELLETNKCYFLDCGAELYVWMGRITSLMERKGASEAAEKLLSDSNRTRTHIIKVIEGFETVTFKSKFKEWPQTPELKLSSEDGRGKVAALLKRQGLNVKGLMKAAPTQEEPQSYIDSTGNLQVWRVNDKDKVQLSPSDQSKFYTGDCYIFQYTYPGDDKEECLIGTWFGKKSIEEDRVIAVSLASKMVESAKFQAVQARFYEGKEPIQFFVIFQSFQVFKGGLSSGYKRFIAENGIDDESYSEDGLALFRIQGSGPENMQAIQVEPVASSLNSSYCYILHNGNTVFTWAGNLTTALDQELMERQLDVIKPNTQSRSQKEGSETDQFWSLLGGKSEYSGQKMVRELESDPHLFSCILSKGQRNTPLYSR

SEQ ID NO: 62313 - protein, 204 aa, Zea Mays
MAELVKLYRHSHLDGRLPAYDGRKSLYTAGALPFASKTFEITLQDEEDSLGGGQRRQRVFRVTIKFAARADLHHLAMFLAGRQPDAPQEALQVLDIVLREMPTAKYCPVGRSFYSPKLGRPQQLGEDMSSTAFFEALPVIDFVSQLLNRDISVRPLSDSDRVKIKKALRGVKVEVTHRGNMRRKYRISGLTPQATRELSYVHVS

SEQ ID NO: 62314 - protein, 126 aa, Zea Mays
MINFSVYDVTKRESFSNLADVWTKEIEANSTNKDCIKMLVGNKVDKDDERMVTEEEGLAFAEESGCLFLESSAKTRENVEKCFEELALKILEVPSLLEEGSSSVVKRNILKQKQESHAKNGSGCCQ

SEQ ID NO: 62315 - protein, 186 aa, Zea Mays
MGEVGANFEVYRNDEITVEEIKKISPRGILISPGPGTPQDSGISLQTVTELGPSIPLFGVCMGLQCIGEAFGGKVVRSPYGVVHGKGSLVHYDEKLDGTLFYDIPNPFQAGRYHSLVIEKDSFPHDTLEIVAWTDDGLIMAARHRIYKHIQGVQFHPESIITTEGRLMVNNFIKIIEGYEASNCSP

SEQ ID NO: 62316 - protein, 323 aa, Zea Mays
MPRTALLRLAAASTTRASSASAAARRLCPSSESDDGGERHAAARKDELLPPPRTPRPDERRLSRRGEHRRELLSVTMASRDHTGLTRQLLDFQHDTIDEVGAEHGPFMDLKARFMDFKQRNYVENFSNYQNLAEQQTPKFMVIACADSRVCPTAVLGFQPGEAFTVRNVANLVPPYEHEGSETSAALEFAINTLEVENVLVVGHSRCGGIQALMSMKDDSTSGSFIKNWVSIGKSARLSTRAAAGNLSFDMQCKHCEKESINSSLLNLLTYPWIEKRVNEGTLNLHGGYYNFVDCTFEKWTLLYREGLEGGSKYAIKNRSTWS

SEQ ID NO: 62317 - protein, 257 aa, Zea Mays
MRHDKKPDDGETNSSRSLSVSDNNDDRKKETLLSGDDKEDHEIQLKQIRQDMELLRDDKSLLEIILDEKNAEVRKISSRLNDLDLQLRKEKEECHRMTSKIKKFLKAHARFLKAQEELKRSQARFERLGDLLASDILKRGANEEVSSINVDEDPNVPYERSPNAAIAKKRSIPYSTSEEAKAVKKRRERDSDTTRPDKYRFEGTIAGFEKLSKGTEPTKSLYLKKKLWEDEKDKIGNFVSSANTDKYEADDEEVDVE

SEQ ID NO: 62318 - protein, 974 aa, Zea Mays
MASSSFAPDDQTDADFFDKLVDDDDPATDLPRAVSATSVADDPPPVLEPQVPAPAPSEGSGKGGAGVHTAVKQVQWASFGGGVDDGPDPFADLSGGAGDDDGFLGNTAGTQAALDHAAEVTDQDFFAGSSSSDQQNVHGQHDQGRGSAAVDSADPKSLEAMYPGWKYDEASQQWYQLDGSVNSTGNAAQALDDSAQNAHHHQQQLDAAYLHNSAHAGLGTIAEESTTAAGAANSWGQGAAPEYPPSMLFYAEYPGWYFDTNTQQWHSLESYQQAAVQAGTSSTGQTVVASDDVVATSSLTGHNAGQTEDLVAHNQVTQRNSSSNSFTHQNQWQTTDALGNNVQSESLASSFYGFEQHMNAETTSSSTSQQTGFHTAETITDHYGGRKAFESSSLQSGYSSSDSQQSSHKAFEPSTGYQAGYNGFEPASGHHTAFEPAMHNQSGYKAFDPSTGHHSASWGFMPSTGQQTDFKGSRASTVHQAGYEEFEISRGYNTNFKAFESSSSQNAGYNGSQPSSGHQPNYMGFDTSANHHGYTDVNGVASTQGFVPMQTTYQGQKQANATSQGHLSNSYLGTDNSMNFNQQQFLGANASNLQFGHSPHEGRSSAGRPPHALVAFGFGGKLIVMKETTSMPASFNSGNQETDGPEMAVTKLFSSCKRSTVHMGDYGSLVPCMKSIPSESQMQAVAQEVQSLLVSGRRKEALHCAQAGQLWGPAIILALQLGDKFYVDTVKKMAHFHFVSGSPLRTLCLLIAGQPADVFNVENNVNSDYGASHQPVEPGPNMLDDWEENLAIITANRTEGDVLVITHLGDCLWKEKNEVAAAHSCYLVAELNIDSYSESARLCLIGADHLKCPRTFASPEAIQRTEVYEYAKVLGNSQYILLSFQPYKLIYAYMLVEVGKVSDSLRYCQASIKVLKASGRAPELEVWKQLFSSLEERIRTHQQGGYGTNLAPGKIVGKIFTSLDKSISRMMVND

SEQ ID NO: 62319 - protein, 103 aa, Zea Mays
MQYCVDHPEEVSKLAKVKAQVSEVKGVMMENIEKVLDRGEKIELLVDKTENLRSQAQDFRQQGTNVRRKMWLQNMKIKLIVLGIIIALILIIILSVCHGFKCH

SEQ ID NO: 62320 - protein, 121 aa, Zea Mays
MVILPKMFFAGVSLFAALGFVLYGGRLFLMLQRFPVDSKGRRKKLQEVGYVTTICFSCFLIRCVMLCLNSFDKEADLDVLNHPILNFLYYLLVEIVPSALVLFILRKLPPKRGITQYHPIH

SEQ ID NO: 62321 - protein, 747 aa, Zea Mays
MTEDQSVLGRRRIYYDTSCGEALICSDSEDEAIEDEEEKKEFKHSEDHIIRMTVQECGMSDAVLQTLARHMERAADDIKARYEILHGEKTKDSCKKGTEHNVKVEDLYCDKDLDAALDSFDNLFCRRCLVFDCKLHGCSQDLVFPTEKQPAWSGVDDSVPCGIHCHKLASEPDAAAGADHMLFDVEEPTHSSDNVMNQPGSNRKKNGSSGRKTKSQQSESSSTARVISESSDSEVHPISNKSPQHSPSPSKVKIGPKGGIRKITNRRIAERILMSVKKGQREMASSDSNFVSGYLLARDMKLRSDTRNGNKELIVSSQQSSPSTRSSKKKSTPQIGNSSAFAEAHNDSTEEANNRHSATDGYDSSRKEEFVNENLCKQEVYLRSWKAIEQGLLVKGLEIFGRNSCLIARNLLGGMKTCKDVFQYMNYIENNSASGALSGVDSLVKGYIKGTELRTRSRYFRRRGKVRRLKYTWKSAGYNFKRITERKDQPCRQYNPCGCQSTCGKQCPCLSNGTCCEKYCGCPKICKNRFRGCHCAKSQCRSRQCPCFAADRECDPDVCRNCWVGCGDGTLGVPNQRGDNYECRNMKLLLKQQQRVLLGRSDVSGWGAFLKNSVSKHEYLGEYTGELISHKEADKRGKIYDRENSSFLFNLNNEYVLDAYRMGDKLKFANHAPDPNCYAKVIMVTGDHRVGIFAKERILAGEELFYDYRYEPDRAPAWARKPEASGAKDDGQPFNGRAKKLAQNNRG

SEQ ID NO: 62322 - protein, 226 aa, Zea Mays
MDSRCPHLLLLLPLLLLAALLPPPSSGVPEVIWLPTSGGAGPLSCAPPDPAVYDRPVIGIVSHPGDGAGGRISNTTATSYIGASYVKFVEAAGSRVIPLVYNEPEDRLLEKLSLLNGVLFTGGSEKEGVYFDTIKRVFQYVLDKNDAGEPFPLFAQCLGFELVSMIVSKDNNILEAFDAQDQASTLQFPSYALEGSVFQRCLLHAKQIFILLLLDGDILEFRQVIL

SEQ ID NO: 62323 - protein, 191 aa, Zea Mays
MLEKKEKVLEKKANAELERAKEFSKAKNKRAAIQSLKRKKLYEQQIEQLGNFQLRIHDQMIMLEAAKATTETVDALRTGAAAMKAMQKATNIDDVDKTMDEINEQTENMKQIQDALSAPLGAFADFDEDELEAELEELEGAELESQLLEPVAAPPVHPVHVPANKQPARPAPQKVTAEDDELAALQAEMAL

SEQ ID NO: 62324 - protein, 315 aa, Zea Mays
MALVQVRFTRAEAPTTISELPGLVCDDISGGQENIPIPATNLVDDPPVPPSGFKYLKSLQIPKDIKIPSSIIGCDCEGGCASNKKCLCAQRNGSDLPYVSYKNIGRLVEPKAVVFECGANCSCNHDCVNRTSQQGLQYRLEVFKTASKGWGVRTWDTILPGAPICEYTGVLRRTEDLDGSQNNYCFDIDCLQTMKGLDGREKRAGSEMHLPNLHPENDSDAQPAPEYCIDAHSIGNFARFINHSCQPNLFVQCVLSSHNDVKLAKVMLFAADTILPLQELSYDYGYRLDSVVGPDGKIVKLACHCGAPDCRKRLY

SEQ ID NO: 62325 - protein, 289 aa, Zea Mays
MDTQARPVPPRVKLGIQGFEVSKLGFGCMGLTGAYNSPLDDEAGIAVIAHAFSRGVTLFDTSDVYGPLTNEILLGKALKQLPREQVQVATKFGIRHDESGTRTVCGRPEYVRACCEASLRRLGIDCIDLYYQHRIDTTTPIEETIGELKKLVEEGKVKYIGLSEASPDTIRRAHAVHPITAVQMEWSLWSRDIEPEIVPLCRELGIGIVPYSPLGRGFFGGRGVKEQVSAESNLHGIPRFAPENLEKNKQIYLRMEELANKHQCSPAQLALAWVLHQGDDVVPIPGVTL

SEQ ID NO: 62326 - protein, 74 aa, Zea Mays
MAAMAPAAVSFLAMALLLLSDAEAKFLPNNITVVGSVYCDACSNNTFSKHSFFLKVCVAQVHYALEFTGDTASS

SEQ ID NO: 62327 - protein, 171 aa, Zea Mays
MSGQQDHASKSSSSSISSSTQESEEEAPVRSVTIGSLLAQANSTSGHSLGKRLSHLGSIPYTPRVNGKIPNVGNATLDHERLLERLGTYGLAEFQIEGDGNCQFRALADQIYHNPDYHKHVRKAVMKQLKEFRKQYESYVPMEYKVYLKKMKRSGEWGDHLTLQAAADRVK

SEQ ID NO: 62328 - protein, 232 aa, Zea Mays
MGNCCRSPTTIAWEDVSSSHFPASNAKKKPHQARNGGGGDGQKRLSVLAGRRGELLACKSISKRKLRTTIDVEDVRREVAIMRHLPKSPSVMSLREACGDEGTVHLVMELCEGGELLDRIVAQGHYTECAATNVTRTIVVVVQLYHRHDIIHRDLKPENILFTNKKENSPLMVSPSSSSLVSHTSRDPFPISDDFLRTSVISGFSGRKFDGRAQSSKMYFFFPAIHKTCGYY

SEQ ID NO: 62329 - protein, 56 aa, Zea Mays
MTTSPVIVPTGTGSEPPPTCATGGGDPPSIGDRNPQPHPGQNTQGGGGHRGGESTV

SEQ ID NO: 62330 - protein, 126 aa, Zea Mays
MHQGYPKETLVHFLKAREWNVAKAHKMIVECLNWRIQNEIDSVLERPIAPVDLYRSICDSQLIGLSGYTKEGLPIFGIGVGHSTYDKASVITLMLAICLVGYNYSQNHKSVWFEAISTKPNKGTCY

SEQ ID NO: 62331 - protein, 171 aa, Zea Mays
MVVTPLLVLAAPQCSARELPFLSRPSPSRLSLLASHVPGARSGYSLPHGGSLVLFCSWSASHPLPSLLMSAAPRILPRRARPPSCSRPSFPLAALGAGRPRREPLLGRLSFFPIRPSFFRTGHHGASVQRAAASPFLASALEPLPLAPQSSSPRPRPRRTVQPLLSFPSRA

SEQ ID NO: 62332 - protein, 268 aa, Zea Mays
MEGLRIGAPIMQVYHEKSFILPDVSRVLACLYEKDVKFETHTASYRSLLGLQASSHAPVPFYEGPTFLEESREICRYIAEKYENQGYPFLLGKDALERASIEQWLHNEEHAFNPPSRALFFHLAFPLGEGEDDDIDVHTRKLEEVLEVYEQRLSDSEFLVGNKRWWDAISDRSSWKKVLRYMKSVEEKNKQEELKKQQQQQEEAPRTSTDPTRVDSRKQSRTEPRTILVPPADNESSASIVPRTKKPLPGDHLVSTQQIDGVGMPATN

SEQ ID NO: 62333 - protein, 190 aa, Zea Mays
MMLELFISMLALHLKHWFLLLVNFWFTSLSRDILNRAFMAMQQEEFRQEIRSIIRDEFEKYCRTQPIQNSVSTTEHRKLHVADEPTALKSKMANSGLTNLHNQAMTYARLSEAPGLKMDSSLSGNYKDQSKEMDGLLTVLPISAESAGLLPSRPDKPTGSDLVLEAVLEAEVAENAKLFVSQPHDQLPKE

SEQ ID NO: 62334 - protein, 512 aa, Zea Mays
MAMIDEPLYPIAVLIDELKNEDIQLRLNSIKKLSTIARALGEERTRKELIPFLSENNDDEDEVLLAMAEELGVFIPYVGGVEHAHVLLPPLETLCTVEETCVRDKAVESLCQIGAQMKENDIVDWFAHVVKRLAVGEWFTARVSSCGLFHIAYPSAPEQLKAELRTIYGQLCQDDMPMVRRAAASNLGKFAATVEQSHLKTEIMSMFDDLTQDDQDSVRLLAVEGCAALGKLLEPQDCAAHILPVIVNFSQDKSWRVRYMVANQLYELCEAVGTEPTRGDLVSAYVRLLCDNEAEVRIAAAGKVTKFCKILNPQIAIEHILPCIKELSSDSSQHVRSALASVIMGMAPVLGKDATLEQLLPIFLSLLKDEFPDVRLNIISKLDQVNQVIGIDLLSQSLLPAIVELSEDRHWRVRLAIIEYIPLLASQLGVGFFDDKLGALCMQWLEDKVFSIRDAGANNLKRLTEEFGPEWAMQHIIPQVICAKPMHIISYARATMESSVKGPLAEMVRWSG

SEQ ID NO: 62335 - protein, 139 aa, Zea Mays
MASVLHAKLPAFVFSVSLLLSSALGARVVCEQLTAEVCAFAVSSTSRRCVLETTHCAGRPTEYECRTSEVVAADGRLSGLVETDACVRACGVDRATVGISSDSLLDPRVAGAVCSAACLRGCPNIVDLYANLAAGEAFH

SEQ ID NO: 62336 - protein, 253 aa, Zea Mays
MHLLRLCHLGSQSSDSMKSSSDEDGDLMPKQFWKRKQHSVRESGASSHSDKKTNMRNDNNLCLTPLQSSPIAKTRDAKRRRQYHAYSKQASHAPLSFWPRWVYEMYDSYTLARSAAELWRQIIANPSMDDHKEIQLLKAFNHIKCRNCQSHIAKRSDMVVMSTDGPLGAYVNPHGCVHETITVSNATGLALIGNPSKVHSWFPGYSWTIAACMACESHIGWLFRATKKNLRPRSFWGIRSSQIADDTQVDQGD

SEQ ID NO: 62337 - protein, 1296 aa, Zea Mays
MAHAGRSGTGAQAQGAPRPSSHQVPSKTSAVAAGGSSSAPTPTSAAANAMPSSSAQAPPSEGPDTLADKKRAAGGGSVFKPPPPMVAVAVGSIDEDEKPGPTENDATSLSTTIRSNSLRRYRGSGSDDKTSLNVTDEDERAPSPNHQDEPHRQEAHISRSSQGSRPHGTPRGYGYYDDRGSHDKHGDRERSASIGYSNSGRRRYHDDRESHTRRAERERSTSNEYTNKRSRHEHSSRSSRTSARSDWDDGRWEWEDTPRRDYRDNRPGSRRQHPTRSPMLAAASPDARLVSPWLDGNTPRLAASPWDNVSPSPAPIRASGSSKGSSYSHSSGRSHQLTFSSTTSSNIIDADRSPSNPDRNSEITEEMMQEMDYNADRAWYDCEEHTTMFDGDHSMYLGDDNSYKKREAEMPKKLTRRDGSLMTLAQSKKMSQMTADNAQWEDRQLLRSGAVKGTEVQTEFDDEEERKVILLVHDTKPPFLDGRVVFTKQAEPVMPLKDPTSDMAIIARKGSSLVREIREKQSMNKSRQRFWELAGSKLGNILGVEKTAEQVDADTAVVGDQGEINFKEEAKFSQHLKDKAEAVSDFAKSKSLSQQRQYLPIFTVRDDLLQVVRENQVVVVVGETGSGKTTQLTQYLHEDGYTTTGVVGCTQPRRVAAMSVAKRVSEEMETDLGDKVGYAIRFEDVTGPNTIIKYMTDGVLLRETLKDADLDKYRVVVMDEAHERSLNTDVLFGILKKVVARRRDFKLIVTSATLNADKFSKFFGGVPVFHIPGRTFPVNIMFSKTPCEDYVEAAVKQAMTIHITSGLGDILIFMTGQEEIEATCYALAERMEQLISSSTKTIPKLEILPIYSQLPADLQAKIFQKAEEGARKCIVATNIAETSLTVDGIFYVIDTGYGKMKVYNPRMGMDALQVFPVSRAAADQRAGRAGRTGPGTCYRLFTESAYQNEMLPNPVPEIQRTNLGNVVLLLKSLRVENLLDFDFMDPPPQENILNSMYQLWVLGALNNVGGLTEIGWKMVEFPLDPTLAKMLLMGEQLECLDEVLTIVSMLSVPSVFFRPKDRAEESDAAREKFFVPESDHLTLLNVYLQWKSNQYRGDWCNDHFLHVKGLRKAREVRSQLLDILKTLKIPLTSCHMEWDVVRKAICSAYFHNSARLKGIGEYVNCRNGMPCHLHPSSALYGLGYTPDYVVYHELVLTTKEYMQCVTAVDPQWLAEMGPMFFSVKETDTSLLDHKKRQKEEKTAMEEEMEKLRRQQAEAARMEKEKEREKRAKQQQQVAMPGLKKGATYLRPKRMGL

SEQ ID NO: 62338 - protein, 220 aa, Zea Mays
MVLVACGWRHTITVSDSGNLYTYGWSKYGQLGHGDFEDHLVPHKVEALKDSTISQISGGWRHTMALTSEGKLYGWGWNKFGQVGVGNNDDHSSPGQVSFPEDQKISQVACGWRHTLALSEKKNVFSWGRGTSGQLGNGEIVDRNTPVLIDALSSDGSACKKLESSTAAPFAAKVWVSPSERYAIVPDENVRKAGGGTARGNGADANVPENDVKRMRVQSS

SEQ ID NO: 62339 - protein, 68 aa, Zea Mays
MELPCKLLAGRLAPLCAPGRISQPSPFPNHSSIPTSPPWRCRGFPCCALLAIASRGVPCTPSLLQLLC

SEQ ID NO: 62340 - protein, 1041 aa, Zea Mays
MRATGEHTTAVPMPAPPPPPAAASASEEDDKERRKNRRRSSRRSRQAAVAAPQGLHADAAGPRTVRSMPPMHVGSSAGVDAEAEPSAAGTSQSCPLPPTPRPTEAPVSRLGRGAPGTRYFQPHWPERAVEEAVKRGHAFVGKFRVNAHNRNEAYCTIDGVSVDVLITGLAQNRAVEGDLVAITLDPVAHWTRMKGPNVACNPLIGDSVVCEVSETNRNHSWKKGQADDGCKFENCSNGVPVLDRTHPPHKNSGFSQAVKCGNGNATIPERNEIDLNDGKSEVARALQRISATIYSHPSRRPTGKVLSIIKKSPRRDAIVGFLASFSEFPDGEQQKNQMGLNRMNNRTQSVTGLFYLLPTDPKFPQMVVSFSTLPDSVRQSLRGNVAVKKELVAARIDEWNEENLYPYAHVIRFLGKVGHVKTHMDAILFENVICDAEFSPESLACLPDNCWKIPQKELEARKDLRKVLTFTIDPPTASDLDDAISIEILSGGTVRIGVHIADVSYFLHPETALDAEAQSRSTSVYTLKHKISMLPSGFSEVVSLNPGVDRLAFSIIWDIDPHGNLISRWIGRSIIFSCCKLSYELVQDLICNETSQTRPEVSSLEVHGIFGRDDVIKSLRGLYEVSKNLKEIRFKGGALSLDTAKIMILFDEDGDPCDSYRYVRKNACFIVEELMLLANMSAAEVISNAFPDCALLRRHPEPNLRKSREFEAFCAKNGFELDVSSSGQLHLSLSRIKEKLQEDPVMFDIIMFYASKQMQSAEYFCTGDLISKKDDWAHYALTLNAVIEAEQVYMKQKKSSAGQNGVKASCELMDMCFTGLQLCKDAAESEEGKKALSAAAKKFKVPSSENLGEIAEHCNERKWAGRRAEEAGQKLYMWALIKNKETVVCNARVLGLGPRFMSVYVPKLAMERRIYYDEVEGLSVEWLEVTGTLVLDTCRNKPAQRRGTQMKRRPIEEVAVVVNPSELSEEDEESGATEAGGCTAKSVLLSGDAVKAQTAPAVLPLVIHYLSDIPVVLHAIGGEDCAVDIGVRLYMASYFKL

SEQ ID NO: 62341 - protein, 381 aa, Zea Mays
MYDPFLYSFQVFSAFGYVHKIATFEKAAGFQALIQYTDADTASAAREALDGRSIPSYLLPEHVTSCCLRISFSAHKDLNIKFQSNRSRDYNNPYLPINYSAMDGTLQPAVGSDGRKVEAQGNVLLASIENMQYAVSVDVLHTVFSSFGTVQKIAIFEKNGGTQALIQYPDVNTAAVAKEALEGHCIYDGGYCKLHLSYSRHTDLNVKAHGDKSRDYTIPAGVIQGAPQPPGIQATSPGWQGNLQAAGPYAPPGAPPQNHSANGQVPNWTPGNSGYSPAPGTYPGQMYSSPAQYVASGSFLNTSAATPPQYATSGGFPNTPSTAPSQYAASRGFPNTTPAAPPGAPSQTPHASQQMPHQHGNHSGGGTPGTSQPPLPASYYR

SEQ ID NO: 62342 - protein, 90 aa, Zea Mays
MYRLQRSIRSIFIAEAKCSDDFVFSIVFYVISSACTYIDMIYGMASVIFVIFMTSFLIDVCDMNDGFFNILTIIVSLIIVFCISFMGSRI

SEQ ID NO: 62343 - protein, 422 aa, Zea Mays
MDGYCLFSCSQDNSARCWISHENHLEEIFMHSNFPELRESADLSELSDRCYGLTLAPGEQMIAVVRSLDLNLLNQMYQVRTQKAVVEFIWIGGQFVGIPLDRSIDICSSQSTDLSSSNLMWWGSNILWSLKKYENVEKRLVIWDVVAVLQELKKSAPAFLETLVHSWVSVLLSGDPQCVSIDAPSRSMHDMMPYVSTRKLHLLNIMCRKVMVSIHTHHGPGAENGNEETTDFWSTLLVRSETELRERLVGFTFAAVLKRTAYLFNGTSTENCWFPVGVAQMDSWVTMNYDGQVHDQLQSIRSKIKDLGSRIDGYSDVESCPYCSSPVHFESPDVAICGERHTLPRCRASMILCSVVQPLWHCVCCGGTVNKLLPESFFTMQASTMHDEGSLDLSAASVPLCPFCGILLQRSMPAFLLSTSPA

SEQ ID NO: 62344 - protein, 633 aa, Zea Mays
MRFYFVYLRLDWLWSLNLFALILLNFLEKPLWCQKYAPHTCDQRDLYFLGQLPYLSKTESLIYEALTLVILVLDIFYPLSYEGLNLFWKNSMNKLKVLLLFILACDILVFMLSSGPFRVAPYIRVVFLIMTISWLAYVTFEDTPQGKTIFTSYGTTLYQMFVLFTTSNNPDVWVPAYKSSRWNALFIVIYVLLGVYFLTNLILAVIYDSFKEQLAKQLAQMDSIRKSILQKAFDLIDTNGQGYLNKEQCISLLDELNKYRSLPKTWREDFELIFSELDRSGDFKVTSEEFADLCNTIAIKFQKEPPPSYLEKYPSFYHSPQCERLKSFVRSRLFEYIVVFVLLVNLIAVVIETTLDIENSSSQKVWQEVEFVFGWIYVVEMALKIFSLGFGAYWMEGQNKFDFVITWTIFIGETLTFAFPSTLPFLSNGEWIRYLLLGRMLRLTRILLQIRRFRAFVATFFTLMSSLLPYLGTVFCILCVYCSIGLQFFGGIVYAGNLKLEETDLFGNDYLLFNFNDYPSGMVTLFNLLVMGNWQVWMESYAHLTGSSWSLVYFISFYLISVLLLLNLIVAFVLEAFFAEMELEKAGEADTQDSTPQGRNKRRSMRVRTKGTMVDILLHHMLSNELDGSQNSD

SEQ ID NO: 62345 - protein, 98 aa, Zea Mays
MRRKLFKLPQIFSVAGAAIIYEVQRSARSEARKEEARRLEIEGIKKREEQLALEVQIMKHKISEMERQYSKWTLPGLRGFGTAQAAAQPAGTQHPTAA

SEQ ID NO: 62346 - protein, 143 aa, Zea Mays
MLYPGATVSSLTKSKTFPSWNDLFDMYNLTEAKNASAVVDLQRLEILAGSYFCVAGALIGIINPGRMTLFGTLLIIWGMVKEALFGKPVNSDLTQSTHVYPTILIALICAFMSITYNVKKTARSSTPVSIAKPLISSAKSKLK

SEQ ID NO: 62347 - protein, 381 aa, Zea Mays
MPCCQLMLDAIMSMNHTATSTPSWLRRLHAKKGISVPSNLQIDDFINGDGSQPSLCLPVPTSSYHHHKNLLDISKNQHQKATETEQCKPPNSQTQQSPRFEKPHMPQPQPKAMISNVLGTPSIDPMDTLPLKAFRKKKKSTSSTLCNKSINKEMQTTFMMSNVLDVPSCNSIETTPYNPICKQPKPNTNVTNALAIPSSTPMNTIQPRKGMKMNTKGKNRYEGKWNGNIYYTIVDTSIDKCKGTKKSICSNDFMVSSKNPKQTFEQHDSIIKGKRRFNLLSNLQEKYEKDKEVTLQEKSTKVKNNHDTRDTTSAVIERPQSIDITTIDTSINGWKATKHLIHRGQVWEIVDRKSTIRPLHKKLSTMRKRKWLHTRNITYSW

SEQ ID NO: 62348 - protein, 135 aa, Zea Mays
MVYKHLATLYFVFVFDSSENELAMLDLVQVFVETLDRCFKNVCELDIVFNFNKVPYVHMILLFLSFYTRIVCLSRMHGFYPAENSIYDSSVACFRQQKRWDTEAASPFLTAVGLSVSNYAFLCTCHMQCCANLKV

SEQ ID NO: 62349 - protein, 472 aa, Zea Mays
MASLVPGVLVKLLQHMNTGVKVGGEHRSSLLQVVSIVPALAGSDLFTNRGFYLKVSDSSHATYVSLPEEQHDLILSDRIQLGQFVHADRLEAATPVPILRGVRPVPGRHACVGTPEDLVLTASSSNSHGGGKNKKARPSNAKTKDASASVLSLDKESSKLEKINASRKPTATGAENKKPTLTRSNSSLPREALDGRIGDDKVAAVKSKKVKPGVTRSTPSSPTSVYSLPASFDRFSNDLKQRNRVKGAENKASSSSRLSLLEKAASVLKATSAAGRVSSAGIPIGSSVLSIGSSGPKALRRSWEGNTDVKGKGKPESRTAKPDRKSDSKIPMTPRRKSPVDEKVAPHKDDNSQKAARKSTTSAPASDDAADKAVKKKHIPTAKRTSGGLGNWSVTNLVKIPPSSRKLADVSASWTSLPPSLAKLGKELLRHRESAQIAAVEAMQEASAAESLLRCLSALLLFHCSRNPLNRN

SEQ ID NO: 62350 - protein, 3697 aa, Zea Mays
MQTPRPSYAHHQLQQHLSSLLSAAAADPPHPSDDASRTAALSNLRLSFLHPPNRPLLPALAPFLAPPLSVLLADDASYAVRRAAVSAYAALCAVLCSHEAPGGLPDGFVAWALPLLGDPSSAALVAEGLRELLSTGDVSPVERFVPPLLAACRDVLEDERMSPAVLRCLLSLLMLVAAKFPHCFRPQFVDIMDLLLGWAFVQDLADADRSMIIDSFPQFQWHWLGNLQFSLGLLPKFLADMEGLVHDLNLGGSHNPGRLRSLFACFSTVLQIMSSGVAERNNLRELVAGPLEGLAPQLLRCASVIASNLGWSERMEDASKCLVLLAEILQERFADFYVHFVDVLVQSLEVASSAQLAAALKTNLQVLSLQNLGLHAASVGALLDFSSILSKSRLHPNHSVVANSAATYIFCLQHGLEDVVDQAIASVMNELELIKSLLAEGQASCPDIHSPPLELNSERKNESNSGVHCWPQYSEDQLLCLMKFDLKILLATIALDTKKRNERTTNLIQFILKKLDPFGAPFHNFLEMQFQIFSTLHKLSNMELSSNMPASEPFERDSGGYKTQPVVLEKKISCECKKKFVHKYGKYIVQGLNASSSLTLKLEALDWIGSFEKLIHGLERGVDNFSFSYEVIWDATLSSDILFAVLDCAYDRESKVRYHVAITLELLFLGRLINPMNFYVVAQVLLDKLSDPDSNVKDAFLRLFSITLPITTYAFGLFADEHNYRNSSDIVNMSNHCMNWRHVLAVKQQPRKLHWQQLVSVLSYLSLRLKLPLSSWVQRLVFSYRGKKDTRYGQIDMFGDADGNELPKGPGVDRNTIDIIYSVNNHAAVWWGIHEAARHCINLRLRTHLGGPTQTFAALERMLLDVTNVLMVEAKEAEGRYIGPADICLLPMRLLLDFVEALKKYAYNAYEGSFVLSPPPKASSVFFHANKRVCEEWFSRICDPMLNAGLAMHCSDAVIHYCSLRLVDLRNLAASSLRGNSHMGGATESHAFRERLEADVMKVLRHASLALCRCHETDALVGLQKWAASTFYSYFEQDNQLVRGVSDRDNRFSWISGLIYQSQGQYEKAAAHYSHLLQSEEALISMKSDGIQYIIERVIECYTSLSDWKCLESWLAELQVLRAVHAGKPFSGALTSAGNELNAIHAMACFDEGDFHSAWGYLDLTPKSSNELTLDPKVALERSELMLLRGMLRCNSKLEGITEELHKAKLMLDEALTVVPLNGLPQAAACAGQLHCIFALEEALGLTSQNGLNQSQSIMDSLLKALHDPVDKMHQDCNMWLKVFKVYRNTRPSSLSTLLLCQKLASLSRKQSNFMLATRLNQYLIDHPLKSSDEMDKEILELNIKYEGALLKHANGNNEEALSDLWSLVRASVLSRVSCSSGIGTSHSLVARACLKLSTWMEQANSSPLNSIIPMVVKDFSDSDGFQDGAEKLLSGDSVSVSTLDYHALAQEIIGTARKISWQLCPTMGKAWLAYASWCFAHGSYSLSGTDSNLQNSLSPVLQSELSPSRCHLTDDEKSEVGEIIRSICADEHANHVGCEYPMTPGCYNSAPEHPISLLVEQAISLIETAAGAPGFESREGDDPSAVLASELVVLCKCDSGKDTAPLIGKLTEIWWSLRKRRVSLFGHAAHAYFQYLSHSSTELQSSYHHDALKGKTRSYTMRAMLYLLHIMLNYGVELKETLESGLSTVPLLPWQEIIPQLFARLSSHPEKIVRELLESILLKLGKLSPCSIVYPTLVDISACEGEPSEELQRISDFMVKLYPNLIKDVKLAIEELGMITVLWEEQWLSTLQDLHSDVLRRINILKDEAVRVAANSTLSSAEKNKINAAKYSAVMTPIVVALERRLVSTSREPKTPHEMWFHKEYNAKLKSAVTTLKMPPGSPAALGEIWQPFDSIAASLATHQRRSHIMLSEIAPQLAVLSTSDIPMPGFEKILGSSESFSGNHGIVTISSFCKEVTILSTKTRPKKLILQGSDGQRYTYLLKGREDLRLDSRIMQLLEAINSLLYSSSDTRSRNITLRFYSVTPVSGRAGLIQWVENVSSIYNVYKSWQKRSQLAHAHAEAQVSSVSTGNIHNPVAPVPRPSDMFYGKIIPALKEKGIKRVVSRRDWPLDVKRKVLLELMNETPKQILWQEMWCASEGFRNFNSKVNRFSRSVAAMSIVGHILGLGDRHLDNILMDFSNGDVVHIDYNICFDKGKRLKIPEIVPFRLTQTIESALGLTGVEGVFRVTCEEVMGVLLKNKDIILMLLEVFIWDPLIEWTRGNIQDEAGIAGEEKKGMELAVSLSLFSSRIQEIRVPLQEHKDLFLTNLPATVSSLKKFLDILDQYEVASAIFYHAEKERSSVLQHEMSAKLVLADATSGAEKSRTSFEIHAHELAEAKAAAVDEANKLAIWVEKHALVLEAIRENSVACIESCMQLNCKDKTLSLISAVLESGVPLTVVPEPTRAQCSELDREISQLLSELQGGLSSALDSLGEYSLVLKQVLPVNYITTSPVTSWAQVLQRSVRSTSQDMLSLAKIQAAEVIAKVQGEGINLVQQRYQDLVNQMESYVSCVEKLARECSELMNSIGLNNEVQSKERILSVFMNSVQLPSQKKDGDSTHLSHSGSPQQGEIKTPAKGDVQETTGKVLSILGIAVSQLYGDIRAKVSELSIKAIGKAKFRTDDSGLQADAGMSLQVFEQHIEKCALISGVVDEVHEVIGRTLAETSAAYAKPSPRHWASTFQAALHSSINLIEQMTEAFLPEFIRSVVPHNSEVKETVRSISEVRGSVDNALEKLIEVELERTSLAELEQNYSVKVGRITEQQIALEEAAARGREHLSWEEAEELASQEEICRAQLEQLHETWRQKDMRILSLMKVEDNIMNSLLSSKQYVSSLVDHDQESEFHYGQIKALLSIFAKPFADLESLDHMLSSSGMFPHIDNPISNIKDALSLGSSLSDVVWPLAGILKDHAFFVWELNLLDSVLVLCMREISSSLEHGINANQLYMTLKKKLAIYVEKQVFRYVTERIAPALTLKLDEEISALLQLSQGIRASDQPKRDSAAVGRVALMLEEYCNAYETARAAGTAVSLMKRQLNELTEALRKIILEIVQVEWLHDISSSHAQKVKVLSQNILSDDKFISLMLNLSRSNLLDKIQSSVSLITRSIEVLQACESISVSAEGQLERAMGWACAGPNTSSAGGSTAKGSGIPPEFHGHLLKRRKLLRVVQKEASDLVKVCTSVLEFEASRDGLYFVPEDKASEQSSDKGRAWHQTFLNLLARLDAAFHSFTCAEQEWKLGQLSLEAAGKGLFSANNQVSVVSVKANSALVNLQDVLGAMYGHACEASALLSGFKHVSQDCTALTSECGSLLEEVLAIADGLHDVYTLGKEAAAAHSSLMTNLSKANTILFPLEVCLCADVTVMSEAISNEREKNNASMPLIHGKALYQSYNIKVREACKTLEPLVGPLSDNAKELHSMVMKLGHLSSLHAGNLHKALEVPGERESMRSQDLLSTHPDLLQSDSSTEKDRASLGMDSGSPDLELNTDICLQDRCWISPPEHSYTSSSGCTTGLTQINPYDNLEKIDALMDDGAEIDGSGSTDLETKDSNQEVETDLVVGRIESVDNNSAAAFRQVRGQECDNSDPKSYGDSTTRVTRGKTKTKGKNPFALSILKQVEHKLHGQNIDGTRSLNISEQVDYLLKQATSIDNLCNMYEGWTPWI

SEQ ID NO: 62351 - protein, 55 aa, Zea Mays
MRTTTTEGVSAIVSRQIYIRPPRLNHPLCEPVCTLGHQIHEGRTRLKTGRIILYV

SEQ ID NO: 62352 - protein, 511 aa, Zea Mays
MSGSSAAGEDIVQHLSSNSNPSSSKLAKLEARMAGKAVSAPSSPPHHPMAAPASAPAISFMDQEELPETSSSDDDNCEEFLIQKNTLKRPRSPDGDNISALGNFEGSSNEAAKILDVTDTRPSLDNSNRKKQGRGRGRAGTGRGRGSKTVDQPRLTLISSAVVTNGQLDKLTNKEPQSSVQLGHDDRAALQEELSMLHGKVAFLEEELSKSRQDATNYHQLSDRVAKELKDLKDHDQQMRSKQMKVLSDLLIAVSKAERQEARMRIRQESFRLGNVGVMRAGTIISEIWEDGQAIKDLNSHLKSLLETKETIERHRKSLKKRQSDKGDGSDAETSMSEEDIVLQDEICKSRLTSIKREEEQYMRERDRYELEKGRLIREMKRLRDEDGSRFNNFQILHHRYALLNLLGKGGFSEVYKAFDLVEYKYVACKLHGLNAQWSEEKKQSYIRHAIREYNIHKTLVHPNIVRLWDIFEIDHNTFCTVLEYCSGPGLSKQEGPKDHSLRSKTWQCSL

SEQ ID NO: 62353 - protein, 405 aa, Zea Mays
MPHAAATAAAALPRASLLVISAPLRDSLAAAPYEPPAGASASVKSLLASLLPSPSPPQPQLQEPAGKESGDLLLFCAAVLAASPEYPALHWVPASLVGAAAAAVNELAAAGGWGSVGDMVVAVAPEVVPPLKAVVKDSCVDADSDEIGAVKPPKEHAAVAAHQFRWLVSQVSYPKLGDLCSLVIPCALTTLDHWSPEVKVQGMVSFVHIAKNVKATELSLYEDAILDACCQNIPADDELWYQVIEVSVMLLTFTQRSNPRSPWYDRMLSEMLGHLERQPLNKERRVAWLTLIGPVFDAMGLFLLAHFRRLFSLFFQWMHTDDNKTVLLTLKQIHAIIKLTWIRKSPYTLRSTYLWIGWWTSLFYYIKNQPQGATVKSCEIISWRYLYCFRTARDINLRKLGRNMN

SEQ ID NO: 62354 - protein, 398 aa, Zea Mays
MTVRAAAVLVAAAVLVLLLPGWAAAEWNLTKKGSVVTYDGRSLMIDGKRDLFFSGAIHYPRSPPEVWPKLIERAKEGGLNTIETYIFWNAHEPEPGKYNFEGRFDLIKYLKMIQEHDMYAIVRIGPFIQAEWNHGGLPYWLREIDHIIFRANNDPYKKEMEKFVRFIVQKLKDAELFASQGGPIILTQIENEYGNIKKDHATDGDKYLEWAAQMALSTQTGVPWIMCKQSSAPGEVIPTCNGRHCGDTWTLRDKNKPMLWTENWTQQFRAYGDQVAMRSAEDIAYAVLRFFAKGGSLVNYYMYHGGTNFGRTGASYVLTGYYDEAPMDEYGMYKEPKFGHLRDLHNVIRSYQKAFLLGKHSSEILGHGYEVGSNFFNHFGSWKLVFSDLQINLLWCCD

SEQ ID NO: 62355 - protein, 886 aa, Zea Mays
MPRGQGSSVSTRENPKVDRATDSNDDSRKNRRGAYLLLGLLIVFLHGSWSVYQIQFGSLPLPLDAEQAGKRGFSEASALKHYVYAVAEKIKKTAHWEVDVQLELFHTDIGANRLSGGLFKGKTLLYSDLKHVLLRVTPKYLPEAEENLILVSSHIDTVSTTEGAGDCSSCVGVMLELARGVAQWAHGFKSGILFLFNTGEEEGLDGAHSFITQHHWRNSVIFAVDLEAMGISGKSTLFQGTDHWALESFAAVAKYPSAQIASQDVFSSGAIKSATDFQIYEEVGRLPGLDFAYTDTTSVYHTKNDKMALLKPGSLQHIGDNMLAFLLHSAASPKFLKDAQQRKQGKTEQDRAVYFDILGKYMVVYPLRLATMFHNSIILQSLLIWGTSLLMGGHPALVSFAISCLSIILMWIFSICLPVVVAFALPYMCPFPIPYVANPWLTIGLFGSPALLGAFIGQHIGFILLKRHLRRVHSKAKTGITPSMIENVTDLEAERWIFKSGFVQWLIALILGTYFKVGSSYIALIWLVSPAFAYGFLEATLSPVRLPKQLKVVTLVVGLVAPVVSSAGLAVRMADVIVGSIVRIDRNPGGLPDWLGNVIVSVAIAVVVCSTFVYLLSYIHISGDKRILGLLLSLSFGLSIALASSGIVPAFTEDVARSVNVVHVVDTTGVHGGHIEPVSYISLFSNTPGKLTNELVDLGGEEFSCGRNMTTDLVTFTVKYGCWSYKESSTGWSRSEVPVLLVESDSVIGGARQTVVSVDTKSSTRWTLGINKDGIDDFTVQVDSEKIVLPGDKSEIDGWHTIQFAGGKNSPTKFQLTLYWSSSKPSEREAKQAADAPLLVKLRTDVNRVTPQVARVVEKLPRWCTPFGKSTSPYTLAFLTALRVDI

SEQ ID NO: 62356 - protein, 68 aa, Zea Mays
MDASLQELLFQVYTTTFDPHSCHFAHWSSAGDVKRRSQVFLSSRRLPSAILDLGLDLLICSQVHMDIH

SEQ ID NO: 62357 - protein, 791 aa, Zea Mays
MDCLQKGCGLVFLKMTMKHSTSGTMRLVCQRSGYRGWVQKITFGLVAQLDLVDLALKFIMISILREDHQMCCLQDLGDDSRFIEFYNLVFMQYNKKDDGSLEPLKQMNIDTGMGLERMARILQKVPNNYETDLIFPIIEKAASMAMVSYAKADDATKTNLKIIGDHMRAVVYLISDGVIPSNIGRGYVVRRLIRRVVRMGRLIGIRGDGHGNSEGAFLPSLAEVVISLSTEIDSDVESRRRSILGELQREEMRFVQTLERGEKLLAELLDEALLNAGNNGNKPSLSGKNVFLLYDTYGFPVEITAEIASEQGVTVDIEGFDIEMENQRKQSQAAHNVVRLSVGNETEIVKNIPDTEFLGYDSLSASAVIKGLLVNGNPVNEVSQGSEVEILLDRTPFYAESGGQVGDNGFLYVNGGEDRRQTTVIEINDVQKSLGNIFVHKGMIKQGSVEVGKEVDASVDAKLRQGAKAHHTATHLLQSALKSVVGSETSQAGSLVAFDHLRFDFNFHRPLSEEELTTIEALINQWIGNAAHVETKVMALQDAKNAGAIAMFGEKYGEQVRVVEVPGISLELCGGTHVSNTAEIRGFKIISEQGIASGIRRIEAVAGDAFVDYVCARDNYMRRLCLSLKVKAEDVNSRVETILEELRATRNVASSLRSKIAVLKAASLASRATTVEPQNVRIVVENMGDVDADGLKSAAEYLIDTLKDPAAVILGSSPGDGKVSLVAAFSPAIVEMGLQAGKFVSGIAKLCGGGGGGKPNFAQAGGRKPENLPDALEKARAEIVARVSGSS

SEQ ID NO: 62358 - protein, 74 aa, Zea Mays
MRCKQQQQPAISGCLVGCWVSECVADRAAGNGEAARGGHRGRVFNAPQLSALSAWAEYYRRGRIGCHCSTVRSS

SEQ ID NO: 62359 - protein, 685 aa, Zea Mays
MTFNPDGRSLLCGLHESLKVFSWEPIRCHDTVDVGWSRLADLNVHEGKLLGCSFNQSCVGIWVVDLTRLEPYTMGTSTKVNGHSELKTVSSGTLPLQNDSGSRANIGRSSVLQNTENNLKTTSGRLSASQNSDSAPKETNSAPSSGLIPSTPHRAGVGSHNRSVGNSAFQSGGTTLKRSSLRNNSASNVHNFSKADVVPVIVPRTSSGGELATDSRSDAADVAPVLPKVTRRVEPATDSRKESNDVELVVPRASSRMEIADLAPISSSKSGRRLESAPDSKEESADTAPVVVSNPRANVRMEIVSDSAPALSKSNRKLDSGTNSKKESADAVIVPRTNSRMEMISDSRREPSAGRISPFRIQSRYAEPRKLAHARTDSNKVDSRSKITETEDFNCQIFLPRRNSVFQTISSEEPREDVKCGPVDRVGFSNSSEPNASVRNENYVPRMRKPGDNCYIEVSRAGRARSSVSNWEGRDQPPSHEEPTTSSSTLAPTGHPYSSRGSNQASEAPIIASDEDVLSLIMERHDLFLSSTKSRLMKLQIIHQMWERNDIRGVLSAMDRMGDHAVCADMASVLMEKSETITLDLCTSILPVVTDLLESKIDRHLVVALELLVKLVRTFGPMIHSTVSSGPCVGVDLEAEQRRERCNLCFIELEKAKNKLPSLTRKGAVANAAQELALVFQEIMS

SEQ ID NO: 62360 - protein, 367 aa, Zea Mays
MSTFPPPPPSAARSPVARVRLDHLVPFDGAFTPAYARAVEAVAASLTRHGAAAVDLPAADAAVVRCALESARAFFCDRSGLYVYRAGRALDDGELSPACMSDAFRCLGKTARAALCAIARNLRLRSDAFSHLLDDNPLPLDEVSASELMVSFSHGHPQSSQAPMVGLRPSMAEVDRGFVTLVASDHPGIEVCNPNGHWYPADVGSSPDVLLLLTGRALSHVTAGLRLNSQYRIINNENRASLMFRLMPRANAILDCSPISAAGHCTPQIHRPISASQFMDDLRAEENVYHHLEAPPESQGNFVNEPSLRSVLSDPLSGAFLEDAMVLPCGHSFGGLMLKKVLELVYSETLYSVFLTFLKKIGLFVNQ

SEQ ID NO: 62361 - protein, 80 aa, Zea Mays
MLDNIKDIDFLWNPYTRTCIETVAPHGLSLLCSCDKEYWKTKDGLIFNNTVQKHPVERVMRHFSLYQEQLLVAVEDQQEG

SEQ ID NO: 62362 - protein, 96 aa, Zea Mays
MWTNERHITWTPISCHYLLGCSFISERGRGCGLGAKEEREYWAAAGCERGGGSFHQSVHPHPQRLMLTRWIRRGYRSGEKLTIDQEFEQYFSNLML

SEQ ID NO: 62363 - protein, 77 aa, Zea Mays
MVTQADHVPRQPFDTADYLNCSNNIVRISSKIFLCVGSSIEVIHKQMCTPSGQDMVITVVFIHYFGLQCFSNEFDTK

SEQ ID NO: 62364 - protein, 298 aa, Zea Mays
MSHCCPCASASSSTAPFFLPSIPDSSSCRSGSGGAFSAAVGRSKLRCGGGPRRGQATVAAGSKDGGSGGTAGGEKGEDDAPAFNPFGFVTDNPSSRSAIQLPAVPAEDGNVGQMLYRIEDKGREYGSYVRAGEFRWFVRETGSPDARRGTIVFLHGAPTQSFSYRVVMAQMADAGYHCFAPDWIGFGFSEMPQPGYGFDFKEDEFHKAFDDLLGTLNITEPFFLVVQGFLVGSYGLTWALNNSSKVLKLAILNSPLTVSSPVPGLFQQLKSVISSYLSSLHLIHINLLVHQIWSWTNL

SEQ ID NO: 62365 - protein, 279 aa, Zea Mays
MEVGFLGLGIMGKAMATNLLRHGFRVTVWNRTLAKCQELAALGATVGETPASVVSKCRYTIAMLSDPSAALSVVFDKDGVLEQIGSGKGYVDMSTVDAATSTKISEAVKQKGGAFLEAPVSGSKKPAEDGQLVILAAGDKSFFLGEIGNGAKMKLVVNMVMGSMMNSLSEGLCLADKSGLSPQTLLDVLDLGAIANPMFKLKGPTMLQGSYSPAFPLKHQQKDMRLALALGDENAVAMPVSAAANEAFKKARSLGLGDQDFSAVYEVVKGAGGSGSGQP

SEQ ID NO: 62366 - protein, 387 aa, Zea Mays
MVGAVTSGRLADFLGRKMTMRISATICIFGWLSIHLAKSAIMLYFGRTLLGFSTGVLSYVVPVFIAEIAPKNLRGGLATSNQLLICSGSSATYIIGALVAWRNLVLVGLVPCVLLLAGLFFIPESPRWLANVGREKEFHASLQKLRGEDADVSEEAIEIKEYIESLYSLPKARLRDLFLSKNIYAVIVGVGLMVFQQLGGINGVGFYASYIFSSAGFSGKLGTILIGIIQIPITLFGAILMDRSGRRVLLMVSASGTFLGCFLTGVSFYLKAQGLFSEWVPTLALSGILVYIGAYSIGMGPVPWVVMSEIFSINMKATGGSLVTLVSWLGSFAISYSFSFLMDWSSAGTFFMFSSASLITVLFVAKLVPETKGRTLEEIQDSLNTRR

SEQ ID NO: 62367 - protein, 593 aa, Zea Mays
MGRGADEVVKVVDSEDGEGEEEEAEAAAAEGSSKETPMLPRMPVRVLLAEGDDSTRHVISALLRKCGYRASDGVKAWDILKEKSFNIDLVLTEVELPLMSGFLLLSTIMEHDASKNIPVIMMSSHDSVSMVFKCMLKGASDFLVKPLRKNELRNLWQHVWRKQLANGGPDVQHIQEENLAERMEQKTGVTKDDNLNSDGPCKNRECSEQESDAQSSCTRSELEAETKGNNLIPTREDDLLPKKRTCLNDNNSERTSRDMELVHIMDNQQKHDTQRDVDTMRTTSRRNDEKNSIPAHQLELSLRRTDYGKLENHEKNDRRTLNHSTSSAFYLYNCRTASSLGNAGDGQLCSTSETLVDVENRNGDLAALSEDTTETNRPPIRVVPFPVPVQCFTFDGQPFWNGTPVASPFYPQSAPPIWNSKTPTWQESTPQATSLPQKSQQKEPVEMDAKPVENAEEQFVVGPPSASGKQLHVEIPKDDLRHISPVTGESGISTVLDSTRNTLSSSGCDSTSNQITAPTEPSSNVYRGVPETARAEGLRHLSQREAALNKFRLKRKDRCFEKKVRYQSRKLLAEQRPRVKGQFVRQDHSIQGS

SEQ ID NO: 62368 - protein, 700 aa, Zea Mays
MYVNHITEMEDGLNDDGMEYPFEGDANTSNNDQIVEDHADDAPIASGDNAIVQQQVGLRKKKYMYVNYHRVEQPDGSSVKQKWAKCLRCSHKAKSDASNGTKAFSNHLKLKHCLVKGQQQLIQSGNDIATYKYDEKASVRLLYYAIIMHEYPFTVAEHKYFVKFIKSLRPSFPFKSRITVRKEIMQLYKEEKNMLYAQFKKLTCRVSFTMDAWTSIQNKSYLCVTAHWIDDNWNMQKRIINFMHVEDSHGGIKLSDIFFVNVLNWNLDKKMFALSLDNAAANKVAVDIVIDNAKDLLICGGKFFHVRCANHILNLVAKDGLAVMGNAIANIRMFITAIKRSPLQFEAFQKCAKECDLDTKKVLSLDVATRWNSTYIMVRDAIYYKDAFDRLAKKDKDRFGHMAPSSDDWLNAININKCLKKFYDVTLLFSGTSYPTANHFFRKFSEIKMAIARWCESSDVIICTMAFSMKEKFNKYWDMNNMALAVGAFLDPRYKHKMVELYMSKMYDSERAELEKLSFINVINELFALYSSNINAKTTNMASTSKESELVPHKNGSFMDDEDEDEVDLDELYAAANNVKKVSELDVYMSEGLVKVNEGDAPFDILSWWRGQVTNLPILSTLARDVLSMQVSTVASESAFSSSGRIVDAFRSKLKPEIIEALVCTKDWKIASEKDLETEIRTISEDMNAMDLDEDAIAAT

SEQ ID NO: 62369 - protein, 541 aa, Zea Mays
MQEILDQQVAEEAAEAEGAGAMATITNQRRTAKKGAGATVTPRKGTQEKSKVQGKGYKDKCYESIRMAVEARFNKLLTELVFVEDLMEALEEAKAIGDELGDIYDYVAPCFPPRYEIFQLMVNLYTERFIQMLRLLSDRANDIQNINILKVTGWVVQYQENLIGLGVDESLAQVCSESGALDPLMNMYVERMQATTKKWYSNILEADKTQPPKSTEDGKLYTPAAVDLFRILTEQVQIVRDNSTDVMLYRIALAVIQVMLDFQAAERQRLEEPASDVGLESLCALINNNLRCYELSSELSSSTLEALPQNYAEQVNFEDTCKGFLEVAKEAVLQTVSVIFEDPGVQDLLVKLYQKDWLEGMVTEYLVATFADYFGDVKMYIEERSFRRFVEACIEETIVVYVDHLLSQKNYIKEETIERMRLDEEVLMDFFREHINVTKVESRVRILADMRELASAESLDSFTLIYTNILEHQPDCPPEVVEKLVAMREGIPKKEAKEVVQECKEIYENSLVDGNPQKSGFVFGKLKCLTAKKGIWRKLGQ

SEQ ID NO: 62370 - protein, 273 aa, Zea Mays
MQQHQRWQLFWDWSWQDLAEYDVLAMLSYVYTVAQSKILYVGHSQGTIMGLAAFTMPETVKMISSAALLCPISYLDHVSASFVLRAVAMHLDEMLVIMGIHQLNFRSDMGVQILDSLCDDEHLDCNDLLSSITGQNCCFNSSRIDYYLEYEPHPSSTKNLRHLFQMIRKGSFAKYDYGWWGNLRRYGQLRPPSFDLSSIPESLPIWMGYGGLDALADVTDVERTIKELRSTPELLYIGGYGHIDFIMSVKAKEDVYVDLMRFLRAQQGMHSSY

SEQ ID NO: 62371 - protein, 241 aa, Zea Mays
MGLGEAAGRLLAAVDWEREAYPAYDDFLALPVFVLFFPTVRYLLDRFVFEWVARRLINRNGHQSTNNETEEGRKKIRKFKESAWKCVYFLSGELLALSVTYNEPWFTNTRYFWVGPGEQVWPDQKIKLKLKAVYMYAAGFYTYSIFALMFWETRRSDFGVSMSHHVATVVLIVLSYVFRFARVGSIVLAIHDASDVFLEVGKMSKYSHCDWLANVSFLFFVISWVLLRLTYFPFWILRSTR

SEQ ID NO: 62372 - protein, 115 aa, Zea Mays
MSGEEADGSKPQGGGVHYGTFQGPPSYPPPRPPPSLSAHHRGDYQAVPARDYEAGVRGRSHDRLPCCGIGFGWFLFIVGFFLGAIPWYVGAFLLCCSRVDYREKPGYVACVAAAP

SEQ ID NO: 62373 - protein, 74 aa, Zea Mays
MATALKSFLNSPVGPKTTHFWGPVANWGFVVAGLVDMNKPPEMISGNMTAGTWRRKSQRHNSKEGMQHCSDLFL

SEQ ID NO: 62374 - protein, 400 aa, Zea Mays
MKAVESLQRTTGLPKAASPALGGLIVGLLALLYPEVLYWGFENVDILLESRPFTSGLSTTILVQLIGVKILATSLCRASGLVGGYYAPSLFIGAATGMAYGKFMKFTFTGPEPLLHVPFLDVASPQAYGLVGMAATLAGVCKVPLTSVLLLFELTQDYRIVLPLLGAVGLSSWIASPQRFSKRIRSKLDSWEDKSSIPQQANDMLTENKEATSMDAADLSLELYKIESSLCVYDANDSNMFKNLTVGEAMKTNYFSVSMTTPLIEALDLMLAEKQPFVMITENNTSARGLLALKNIQDFCKAAKTTRSQAEVKELLISHVCQAGKCKSWSVTPQMPLTTAEKIMDSHDVDHLPVVSEDANLQDRGLLIGFVDRECIAIARRAMATKEIFSSMYGIRKEER

SEQ ID NO: 62375 - protein, 565 aa, Zea Mays
MPHHHHTNPSHPPAARKLLSWRRVVAACAVVAALALLLAAAPATEDPSRWRSYLLGPLPGDTRKETVAAAVVAGSFAGPAASTSSPSEAPLSSFGEINLSARIAPAAAPSMFLAPSSSPAEIFYDGSMEEPEHPDIKRNPPKESSPFLKEEPIFSGLPTMSSDVNGENVMDTKSVLPVTPEAPLWSTAADEELIYAKKEITNAPLTSDDPDLYAPLFRNVSIFKRSYELMERLLKVFIYHDGAKPIFHSPELKGIYASEGWFMKLMETNQNFVVRDPNTAHLFYLPYSSRQLEHNLYVPGSNTIEPLSIFVKNYIDLISAKYPYWNRTKGADHFFVACHDWGPYTTKLHDELRKNTIKALCNADLSEGFFIRGKDVSLPETFLRSPRRPLRDIGGRPAAQRTILAFFAGQMHGRVRPVLLKYWGNKDDDMRIYSRLPHRITRKRNYVQHMKSSKYCICPMGYEVNSPRIVEAIYYECVPVIIADHFVLPFDAALNWSTFSVVVPESDVPKLKQILLAIPESRYITLQANVKRVQKHFMWHPNPVKYDIFHMILHSVWFSRVNQIR

SEQ ID NO: 62376 - protein, 146 aa, Zea Mays
MLNGTHKFVLGNIHVLFNPKRGDVKLGQSAIYKFLSTMKLNISLHDRRHLSGLDSTEFGYELCSLLKYQWTDEEVRNATGYSNVMVAEHPLKLSSSYAMLKGNSNNRGLHGEPLATSYHRKFLGTVDYLWYASKCLPACCMYTQRD

SEQ ID NO: 62377 - protein, 317 aa, Zea Mays
MPGMDPGGGGSSRYFHQLLRPQQQQPSPLSPNSHVKMEHHRMSPDKSPVVGEADAGGSGAGGDQPSSSAMVPVEGGGSGTGTPTRRPRGRPAGSKNKPKPPIIVTRDSPNALHSHVLEVAAGADVVDCVAEFARRRGRGVCVLSGGGAVANVALRQPGASPPGSMVATLRGRLEILSLTGTVLPPPAPPGASGLTVFLSGGQGQVVGGSVVGPLVAAGPVVLMAASFANAVYERLPLEGEEEEDETAAGAAGAEPQDQVAQSSAGPPGQQPTASQSSGVTGGDAGMSLYNLAGNVGAYQLPGDSLGGWSGGGVRPPF

SEQ ID NO: 62378 - protein, 441 aa, Zea Mays
MASPQESNSLCLKRKLVDDCLSKDCKSRRVKSENEPSSDSFAKRCNCCCTRPNLANDCVNFLKSGAPNRVMYYKKGSWHNFPEQIMNSLIDEFKGNKSSVVSVMDDEPILVDFLSMTLVNLKTRKQRSVAWFDDTGKRFFPSLFFDEESDEMPKQDSGNVNNTAQGIMLDKVTSSPPEVVKQVVLESSPPVPQKPSTVDVLRKKITSVERGSEGFLFVQDLFLSGMNPFATPNNILHVHRYSPNDITAQCRFEAFERQMKSTKEARGDANVKYGWLGSRKSDIVRILINGLGTTANPVEKAGLSAGVYLSPENRAFTSVGLCDVDEKGVQYMLLCRMILGNVEAVEPGSQESFPSSEIYDSGVDDCSNPKCYVMWPSHLSTHIRLEYLVSFKLAPKVRNYLLDLKGLWFNPSLKELGTDICTLQPVSQPESCYPPGASCNV

SEQ ID NO: 62379 - protein, 142 aa, Zea Mays
MVVETLAEKHFDLAFRMLHEFDLPAVDIYAGVAASLAERKKGGQLTEFLKNIRGTIDDDEWDQVIGAAINVYANKHKERPDRLIDMLISNHRKVLACVVCGRLKSAFQIAARSGSVADVQYVAHQVSYLHKFTDVCCLLIIE

SEQ ID NO: 62380 - protein, 307 aa, Zea Mays
MKTGQCKFGSTCKFHHPEFGGIPVTPGIYPPLQSPSVPSPHTYAPNWQMGRSPAVPGSYIPGSYTPMMISSGMVPLQGWSPYPASVNPVASGGAQQTVQAGPLYGIGHHGSSTAIAYGGTYLPYSSSAGQSSNNHQEHGFPERPGQPECQYYMRTGDCKFGTTCKYNHPRDWSTPKSNYMFSHLCLPLRPGAQPCAYYAQNGYCRYGVACKYDHSMGTLGYSSSALPLSDMPIAPYPISFSVATLAPSSSSPEYISTKDPSINHVVSPVAGPAPVGAILPKGVFHHDTIMQTQTPTSAGSSSPGGGR

SEQ ID NO: 62381 - protein, 183 aa, Zea Mays
MATPTTRKAASKRSRRAAPSGGAHIARSRRRRSGARGRWGPRRSATPAACATSPVVCSRSTAPRRAPPSCRPSTPTRTRGWWRCARRLSGAATRRATFSISSAAGIDVPAWRRRTVGRSRPPYSYICMHAWLLHQSSSPIMVIITASPVTAMDRLPPIITCIGLCQHPSNPNPSPGVPTLLVH

SEQ ID NO: 62382 - protein, 2680 aa, Zea Mays
MKACASETDLPNHIRILANTMQHYMLCTFRKVLISAPALLKSFREEGLWDLIFSEKFFYFGSSLDYIQQNDQLIDAPKSIDSKSFSETDVNVLQAEAISFLEFAATLNENSNNLPECLALVGALEHCTYDPGLAGGIVKSFHVILQLATEQTLASFKSIDVLTRVLKVACLQAQEIRKLSQDDLNQNGSQSRNAQTTYSDERIKNTCAFVKLAFNLFKEYATISDIGRITVLCNANCIECLFDLFQEEYLRKHILEQVLALFRLPSSSAQHHAAKMLLCSKYLETFTRAKEKEKAFAELSIDLLVNMREVIMIDRVYYQNLFRNGECFLHIVSLLNGTFDEAVGEQLVLNVLRTLTALLAENDESKAAFRLLVGAGYQTLQSLLLDFCKWIPSPKLLDALLDMLVDGTFDINEKATIKNEDVIMLLINVLQKSSTSLQHYGLMVLQQLLKGSITNRTSCFRAGLLSFLLDWFKVEKGNDIVMKIAEIIQIIGGHSICGKDIRKFFALLRDEEIIAKQQHSSLLLTSVSHMLKEKGPEAFFEFSGHDSGIEIKSSVQWPYNKGLSFCCWLRVESFPEKGLMGLYSFFTENGKGCLAMIGNNTLIYESVNPKHQCVLLSLSLPIKQWKFLCVTHTIGRTFSGGSQLRCYVDGDLVSSEKCRYTKVNELMTRCSVGTELMPIGEEPSSLGFENTLAFTGQMGPVYAFSDALSPEQIRGIYNLGPSYMYSFLGDQNLLTNDDSRYKGILDAKDGISSKMIFGLNAQASNNRTLFNVSSALDGLDKSKFEATTMGGTKLCSRRLLQEIIYCVGGVSVFFPLLIHFDDAVVQNGEFATRDQLAGQVIELVASVLDGNIANQQQMHLLSGFSILGFLFQSVSPQLLNIKTLSASKYMFTILKTSSMSDILLRDALSQFYLNPHIWAYATYQVQRELFLFLIQYFEADGKFLPVLCALPRIIDVIKQFYSEKLDPRFSKPLLVSKKVTGERPSMEEIRKIRLLLLSLAEMSLKLKVSQHDIRALVSFLERSQDVACVEDILHMIIRALSQNSLVPSFLEQVNSLGGCYIFINLLKREFEPIRLLGLQLLGKLLVGVPSEKRGPKIFGLPVGRPRSIAEDIRKGATAAPQLFFYSISDRLFKFPLSDHLCASLFDVLLGGASPKQVLQKRSQSDALKDRSMAPFFVPQILVCIFKYIQSCRDASVRTKILSDLLDLLDSNPVNVESLMEYGWSSWLETSAKLDVLRNYKSNSVAKADGLETNELILVRNMYSLVLSYCIFSVKGGWHQLEDTTNFLLLKIEQGQLPNSSMLRDIFEDLIGSLLETSSEESVFNSQPCRDNILYLLNLSHELFVDQIGIKLLFPSPDMSAHLSSDDINSAVLEIMNTEGNGLLTSLPWSNILFNDGEKLTDDWWSFFDKIWTLLCYLNGKGQTRLTPKGLNTAGPSIGQRARGLVESLNIPAAEMAAVVVTGGISSALGGKTNKVADKAMMLRGERFPRIIFHLIIMYLCKAGLENASKCVQQFISLLPNIISEDDQCKNRLHFLIWSLLRVRSQYGQLDDGARFHVMSHLILETVIYGKSMLTTNIVGRDDSTEANNSKEAGFILNLVQKDRVLTAATDEAKYMKDAIADRMKLVQELHSKLDERSIQDVEQLQSFEDDVQFAKTAAIAADDSRKAAFQLAFDEDQQIVADKWIHILRALSDERGPWSAAPFPNNIVTYWKLDKTEDKWRRRLKLKRNYKFDECLCHPSSIKSSNDNAAPTVDPSANAKITEKMKHLLLKGVRGITGDISSESCEDSNDMIDPPQNVPPENHTVSDTSDSADSSDYPAIVQNRKESSSTSSDNDYIEVLSSVHCVLVTPKRKLAGQLTITRNALHFSFEFLVEGTGGSSVFDRFHDKKDSDSKNEMGGVEKLKGNLDGGRGNAAESSDTQIKNQSGKIKHHRRWKITRIKAVHWTRYLLQYTATEIFFDDANAPVFLNFSSQNDAKSVGSLLVSLRNDALFPKGTTRDKNSLISFVDRKVALEMSESARESWRRREISNFEYLMILNTLAGRSYNDLTQYPIFPWILADYSSEKLDFNKSSTFRDLSKPVGALDAKRFKAFEDRYLNFVDPDIPSFYYGSHYSSMGIVLYYLLRLEPFTALHRNLQGGKFDHADRLFQSIESTYSNCLSNTSDVKELIPEFFYMPEFLENSNSYHLGIKQDGEPLGDVGLPPWAKGSPEEFIHISREALESEYVSSNLHHWIDLIFGYKQRGKPAVEAANIFYYLTYEGAVDLENMDDMLQKSAIEDQIANFGQTPIQIFRKKHPRRGPPIPIVHPLYFAPQSITVTSVVPTIVTPLSVLFIGLLDSNVVMMNEGLILSVKLWLTTQLQSGGNFTFSGSLEPFFGIGSDVISPRKIGTSLAENVEFGRQCLATVQIRGDNYLILCGNWENSFQIISLSDGKIVQSIRQHKDVVSCVAVSSDGSVIATGSYDTTVMIWYAFQGRSNDKRYRNANYDLSTKDHVIIESPCHILCGHDDIITCLFVSTELDIVISGSKDGTCMFHTLREGTYVRSIRHPSGAGLSKMVTSQHGRLVIYSDSDLSLHMYSINGKHIASSESNCRLNCMELSCCGEFMVCAGDHGQIVLRSMHSLDVVWRYEGAGKTITSLVVTPEECFLAGTKDGSLIVFSIENPLLRKNAMQRHKAKPSIGG

SEQ ID NO: 62383 - protein, 236 aa, Zea Mays
METRRPRRGWNKRFVLPLALLCLAVLLPGALLPPSASASSSSPAAGGGSRKRRWVGFDYYVLALQWPGTICRETSNCCDTNGCCRSQPLKWFTIQTHGTCAYPEIQDEYDYFSTALYLYSKYNVTKALRKARIRPTSGRKYAVGHIVAVIEYAFGAMPSLVCKNGSVQELRLCFHKDYQPRDCTLEAGSAPNGRSYCPRYITFPSYKPSVVANTTEGINNQSNGEVPSYMRTSDSE

SEQ ID NO: 62384 - protein, 136 aa, Zea Mays
MDHHCIWINNCVGHENYKIFLVFVLYAVVASFYALILIVGSVLHSVPKDEQPGSDSSRTSIYHEGVRAMWLAEKGGDLYHHPYDLGVYENLISVLGPNIFCWLCPVLNTVGNGLRYRTSYDIPVSTPPKKIAAHSQ

SEQ ID NO: 62385 - protein, 248 aa, Zea Mays
MHPSSGAGDYAPYYPPYPSPAAPPPAAYPSVSAPASAPPYSSYPADFAPAPSYPAYPPADLPHYAPPPAAPAPPQPYYPYEPAPAPPLPPSPHNPVPSPYPSLDRAGSYGYGSGPGSGYGQELYPPKPAGGWSDDGAYAYNGGDAPEPYGSRGTAPRPGSGSALFDDYGRSIGSAADRGGRGGSAASPKVVRAVPKAETSEDVRGGVQKFRVKLLPEGAGSPMDVLCQSTSGPVTPGGSSKCGILPSM

SEQ ID NO: 62386 - protein, 378 aa, Zea Mays
MDAKMLGEASGSVTPIHVSSEPDASDNREINRHESPHPLGNSAGLTLDQSPAADENEAKITTERTPPVSIGDAKTVKVHTLPGATCGVNLQCMVEAENIQQEKYKETNGRLIAENTISEQKCEDRSNSSRSNSCATPVTVDQCSHLSNEIGKGDNCLSSEVSVGAAPITGKTESSLTSVHCANQEDEKAYAAPVDTKIPLVIMDEKPDKHEFKTMVVGCSQGSMEPKSLENRTSIVNGTSMDAYRDKIPNEDHSASAVDTGVSVKLYAQQMETIEEKTGSVLPDSEHSSSCKDVLVTLTESKPLKNDILEMDDAVIKVGMTGQSFNEAGITAPALNISDPVGENVVKPTQTCGEGQLRGEDVIYSNNVMEDDLTSRAC

SEQ ID NO: 62387 - protein, 513 aa, Zea Mays
MRRGATKDDAAPDKVMGPLFPRLHVNDTLKGGPRAPPRNKMALYEQFSVPSHRYSAAVPPAPSPAPPWGAQRPASAVPSTSASQVGGGDRPIFPLFRVPSTEPVRSSDQTNANSNGQGANGTIAESGRQRQSTHLKSKDTNAAGPPAEGNNSVGKKLANDDDFTVPSVLYSGMPPHSSQEKLTLFPTTSPCKSVPAKYSSTDKRRLEGMDASDVKSKGPSGIKEKEPVQVRIDLEDKETTPSFQVLNDKTWSPDPKLSSHMDRLKKQHAEAESYQIRTRNENAVETQSPPKNGVSLLSKPYVDRREQNGDSDLLGHGLRETGVKRKRSHHDVEQNDDLSDSSVESLPGMEISPDDVVSAIGPKHFWKARRAIVNQQRVFAVQVFELHRLIKVQKLIAASPHVLIEGDPCLGKSLAVSKKRLAGDVETQLESAKNDDGVRPTQLEHSKEKTEANQPSPSQDEQAATNGDVAASMHTPSDNKQKSWCIPAPPIFWRPHFLPATPPPPPPQLGGIS

SEQ ID NO: 62388 - protein, 530 aa, Zea Mays
MIYGRVGVIALDNARQSAKIIDQSLTPGKIYDGDGFNYIKESFENGTLHLIGLLSDGGVQLSYKRTTRFTFICSIQLLLKGVSERGAKKIRVHNLTDGRDVLDGSRVGFVETLENDLLELRGKGIDAQIASGGGRMYVTMDRYENDWDVVKRDWDAQVLEEAPYKFKSALEAVKTLRAQPKANDQYLPPFVIVDDSGKAVGPVLDGDAVVTINFRADRMVMLAKALEYADFNNFDRVPVPEIRYAGMLQYDGELKLPNRYLVSTPEINRTSGEYLVKNGIRTFACRQPGKTTRSSSHALPPPYFSLLDTPPATDIPYRQVPFPRLALVACFRPAHLPPVLAMGAGANNHEESSPLIPAAVAAPAYEKPVSAHAFGGVPRESWNSGILSCLGRNDEFCSSDVEVCLLGTVAPCVLYGSNVERLAAGQGTFANSCLPYTGLYLLGNSLFGWNCLAPWFSHPTRTAPQGSPPWIQQWALRLCHDAAHGADHGAWHVSYSTTFPTLVLSVLPVVYHLLLLALMCDVSPSVNTSL

SEQ ID NO: 62389 - protein, 413 aa, Zea Mays
MTSKTSGSITTTSQSTTGKLSSVGSSFMASAGSRSTSGGFDEGAKYPDGGQILEAPNLRTFTFMELKTATKNFRLDSVLGEGGFGTVYKGWVDEKTMTPTRNGTGMVVAVKKLNSESMQGYEEWQSEINFLGRLSHPNLVKLLGYCWEDRELLLVYEFMAKGSLENHLFRRGCAPLSWELRLKIAIGAARGLAFLHASEKQVIYRDFKASNILLDANYNAKLSDFGLAKLGPTGSKSHITTRVMGTYGYAAPEYVATGHLYVKSDVYGFGVVMLEMLSGQRALDPNRPNGQLSLADWAKPFLADRRRLARLMDPRFEGQYNSKQAFQAAQLTLNCLAGEPRSRPSMKEVVETLEQIESVKSRAREARGGSSRDRHHGRAGATHQRSPRAGGEPRGRGGSRAAANGHAARAAAR

SEQ ID NO: 62390 - protein, 282 aa, Zea Mays
MASAPEPENGRELYALLHLSPDASSEEVRRAYRQFAQIYHPDKYQDPQMKDVATENFQRICEAYEILSDDNKRQVYDIYGMEGLNSGLELGPKLTKPEEIKEQLERLRRRKEEEKLFKHALPNGSIIANFSVPQYLNDGSIMRGMAMLSQVELPVSKQNTVVVGGNLIVNGSAGSGAATTVLRHQLSPVSSIEFMATAGLRSVIGGQMFRQISPHSTATSGLAVSLRDGSINLSNAWTRQLSDNTVGNIQLVLGDESSISVGWQKKDEKRTATGEVKVVSLR

SEQ ID NO: 62391 - protein, 98 aa, Zea Mays
MGRKLGGLDRVLHCFSLSLCSSACACVHSMDEEEEDDERKALLLSSQLVQLRGFVDGAAAKTLAFHLEPKTVELKVSMHCYGCAKKVQKHISKMDGMA

SEQ ID NO: 62392 - protein, 397 aa, Zea Mays
MLRVNAWQGAPTGGNPVIESFLVDIYPLKIYLTEAMYRMMWGYFFPGDEQQPQKRQELFKVSTTAGTRRKKNTSVAETNSPNNQSSKETTFAQKPELRRTSSFDRTWEETVAESVANELVSQMEGQTNTQYEPQDAAKDSKLLRPVRSTREDKKIVEPNELKQSRPQKMMDFRNIKISQVELQLTYEGLPFAVSDVRLLMDTFHREDFTGTWARLFSRVKKHIVWGVLKSVTGMQGKKFKAKSSSQKEPSTALISAADFNLSDSDGDEAGSSDQLPAFLKKPSDGAGDGFATSVKGLFSTQKKKAMAFVLKTMKGDADHDFHGERSENEIEFSPFARQLTITKTKKLIRRHTKKLNKSKVHKVTATELEVAELPPRAPGYNTDSSSDSSSAETSPKD

SEQ ID NO: 62393 - protein, 69 aa, Zea Mays
MQKKAAKEAVVNVVHKKRKRQAPSSSCVKKNKGSVTNTTSTTTPNPLSSKYNFQCVHSLSILGNASYHN

SEQ ID NO: 62394 - protein, 274 aa, Zea Mays
MDPPRAVAFLLILLPVLAPVASGVPFVVLHGIGDECGNDGLSSFTKMLGEWSGSKGYCIEIGRGAWDSWLMPLQEQANTVCKKVKKMKELSEGYNIVGLSQGNLIGRAVIEYCDCGPPVKNFISIGGPHAGTASVPLCGDMEDYLKGCKFLPKLNNEIPSARNTTYKERFSSLENLVLIMFEDDAVLIPRETAWFGYYPDGAFSPVLPPQETKLYTEDWIGLKTLDEAGRVKFVSVPGGHLRITRSDMKKYIVPYLTPEASSKKNIHIHRMLSL

SEQ ID NO: 62395 - protein, 317 aa, Zea Mays
MSSPAARSITCYSKIPEFLVGTNGQPMPAVGLGTASHPFVAEDVRTSVLTALELGYRHIDTAGLYASERVVGEAMAEAVSCGLVASRDELFVTSKVWCTQCHPELVLPSLKESLKNLQMEYVDLYLIHWPMAVKPSKPHFPMKREDIVPMDLSGVWQAMEECHRLGLAKMIGVSNFTTKKLQELLAIAKISPFVNQVELNPTWQQKKLIEFCNDKGIHVTAYSPLGGQRISKLNPVRQSDILEEIGKARGKSVAQISLRWIYEQGASMVAKSLKRERLKENIEIFDWELSDEDRFKIGQIAQRKLVTVQNLLCPEAP

SEQ ID NO: 62396 - protein, 1079 aa, Zea Mays
METSISPPGTSKQSAVRKPSPGSSLKDLCLVSKQGSIAEVESALALLKKSGGNIDGRNAFGLSALHLATWRNHLPIVRRLLDAGADPDARDGESGWSSLHRALHFGHLCIAGVLLQFGASLALEDTKGRTPVDLISCPVSQANGDFPDAVATEVFSWGSGTNYQLGTGNAHIQKLPCKVEALHGSYIKTVAASKFHSVAVSSNGELYTWGFGRGGRLGHPDIHSGQTTAVITPRQVTVGLGRKRVNAVAAAKHHTVIATELGELFTWGSNREGQLGYPSVDTQPTPRRVGSLKQRIISVAAANKHSAAVADTGEVFTWGCNKEGQLGYGTSNSASNCIPRMVEYLKGKVLRGVSAAKYHTIVLGADGEVFTWGHRLVTPRRVVVARCLKKGGNTNLKFHRMERLQVISVAAGTTHNTALTADGALFYWVSSDPDLKCQQIFSMCGRNIVNISAGKYWTAVATSTGDVFMWDAKKRKDETPIFTRVHGVKRATFVCVGETHMLVLSSIYHPEYPPKPKSQGLKSMLEWNGGTEELGEDILFDDVQPNSGLSGSSGEMSKGVPSLKSLCEKVAVEYLLEPKNSIQLLEIADSLEAKELKKHCEDLAIRNLDYIFTVGASSIMNASSEILVNLEKLLDEKSSEPWSQHRLPTMTATYPAVIDSDVEEDEAREFPKTRKCGKSASRPSAMSSDDSFLQKDCTAEQAVSKQIRALRKKLQQIEILEAKQLAGHQLDSQQVAKLESRAALEGELAELGIPSEIYSTSSACPAEGRTNRKPEVSKKQKRKNKQSTQTPSVKNEPGQQIPITELQVLQVNVSAEKEAYAADPIKPMEAAAFSNTKDTASPPEKKPSQPTPSKKKNRKGGLSLFLSGALDDTPKPSLPAPAVPATPKPEGPAWGGVKITKGPASLRDIQTEQSRTNEPASAKAKDRHENSPDSAGRATRLSSFIPDARSSPVAVVAPARAAAAPSSEGDRSTPPWSSSATSPNVSQPSLRDIQQMQQKRHHGGVSHSPKTQTSGFCIPPHGGAPEAAGGGGVKDNVPNRWFRPETDAPSSIRSIQIEEQAMKDFRRFYSSVRIVKPQV

SEQ ID NO: 62397 - protein, 864 aa, Zea Mays
MQYNHRSRLPPPPLPFGRGGHPRGPKQPCYAPLPPPPFPPAPPPPPPSLERKYEVLMEAGRLATEYLVAQGVLPPAALQRGAGISGAWPDHPLPPPPQLQQQEPRGGYGRRRYKDEYNNNPRRANDTSSSTSSRDDCSRGSYNGRGKMKYGKYRRGYLDSGRDREKERRRPFPNGRRYEEDKDEDGAPGFRRERHGNRGSDEVRPHDTEALREGTPLTAKAVEGFCMEDATSKIMSSFKDTIKDSNDAPKVPEETEEGEVEDDRETQNSETEVVKQGIDTDVNHASCYVITESNPNQLSDGKIQDEIPDEEAEDDKKVMDEATLDHNTCDGEVTNMEVEMHVGKESLIDYCNFTRTPTRPRSARAHRNAASIPGEPAVVETFDLVSSGQASHMVSAESAERFFTKIVSENTEDKFCQENTSSGDVRAPPKELMLLQENGITVVTENMAEDNVDAEPHVVVQQYKEETNLSPLTDALEKSLRQEITLSPFAASHKDSLMQEGGLMQEVDLSPLTANHRESFTEETELPPSTASHKDSLIEGTDLTQTISSYNNNLKLQFKEGTQVCDIDMLPQDVNLIELPDQRKIIGRDVGAKAVTGMEEGKLDQSSSLNLSDVDLVGGTEVAAIHNNPVLVQLSAAGSSTESNNKQQQDPETFTGANASPTDDLCQLPLDNKDVQVVNIECGTPVEVGGFGLSKSIHNNPVLVQMSVAGSSAELINKQQEDPETFTGANANPTDDLCQLPLDNKDVQVIDIECGTPVEVGGFDLSKSKNKMVCSSMDSIMDPGDGIHTDVIPVVQDGYSLAFSDFLSSDIPCYPSMQSDLHAGISANDSEGITVMDDPIYGSLADIGFMDMWGQPTQDYDKFF

SEQ ID NO: 62398 - protein, 506 aa, Zea Mays
MLDNVLIDSDAVSVLKGVYNHLLKFRDFLAWEAAVAMAVIEADSSIEKPQAAVENEAASVTEKPLAGGDKAKGDKKSKKKKTLGKGTSAVLMLLRDHVTNGSTVAAMNSASVAEWATSLSLLFDPKCPGLESLVEKVKEIVESNEVRRLPKIPKGTRDFGKEQMAIRERAFSIITSVFKMHGATALDTPVFELRETLMGKYGEDSKLIYDLADQLDIGTYEIKLNHRKLLDGMLEICGVPPQKFRTVCSSIDKLDKQTFEQVKKELVDEKGISNETADEIGNLVKTRGPPLEVLMELRKEGSKFMNNVGSVAALNELEILFKALDKANAISKITFDLSLARGLDYYTGVIYEAVFKGAAQVGSIAAGGRYDNLVGMFSGKQIPAVGVSLGIERVFAIMEQQEKERNEIRPTETEVLVSILGKDLTLAAELVSELWNAGIKAEFKLTTRVANHIKYALQSSIPWMVLVGESELQKGTVKLKDVEANQEEEVDRKDFVRELKKRLSKS

SEQ ID NO: 62399 - protein, 212 aa, Zea Mays
MFMVSLLLIKAVRVASLFLFCLFHFPVLPFPFPPAHCIDHQSHRSSTSSTPCRSNRLASPLSFPPRHGVDQGSRREAPLHRHAAPSAGPRQGVLRGLGRLRGQRRHDEAGRAQRQAHGAGPRRRHPRGELHPAHAQPRQPLRGGADHAPLPQQQAQERWLRRRGLSHHRVRHRGDAQAPRVRGRQVPRGGVRGAQEPDRSTFMLMFILYFLI

SEQ ID NO: 62400 - protein, 57 aa, Zea Mays
MRRTRQIPTPHTVLPLAWSREQAQGHRSLVLSTVCGTRHDRTVRPADGPSIGADGPR

SEQ ID NO: 62401 - protein, 133 aa, Zea Mays
MVAAARIALRPPPLSPFLLATPPPFVHQVTTRLGDGSRGAQQSGQDTLNESFKIAREMEAPPSARNRCITSSDSSPFRSFAFVVDEKKAAKGASEKRAWRRRHTILPLAHGVLKLSPHLAGIPGAIHHLCRQG

SEQ ID NO: 62402 - protein, 132 aa, Zea Mays
MNNNGGCVHRITGSVGDIIYSTCSSPSGLIASGGTDRAVTIYDPRRWSALSRWVGCSKFEITGLAFSSVDESFIYVQGVDYEITCGHWKQSERAFSFRGDSNWLGFSKCANNDVIAGWCESGSIFIADARQL

SEQ ID NO: 62403 - protein, 526 aa, Zea Mays
MKANSFQSSPSSPNERPPMHGGAVDSRRGSTISSFCFPPLLAAELLDSILASSAWRDDPDDLDGGAGATAGVLLRDRRRRRRGVRAGVGGAAGGAVPGAVPDGAGHGWAKVERVGVRVGPVRRVGRRGEAADDALLQLVLLLHLAGVAAGRHRAGVRPGQPGQALGLRRLRLRHRRGPPRLPGRHTQVPLQEAGRQPPHADRRRRRRRLAQAPPPSPRRPRHALRRRRRQGRRRRGWVLQQEEQAQGAPPPHRPVPLPGPRGDQRGSGGGGEQQQQVAAGDADGRGGGEDGGADAADLGDHDHVLDGVRADDHLLGVAGHHHGPPRRGLVPDPRGLPHRLLRRLHPAHRARLRPPGGARRAPRQRQPARPHPAAADRRRPRALRRRHGGRRAHGGPPPPRRARFLRVRLRRRRAHVRVLAHPAVLPRGGGRGVHVHRPARLLPARVPQGDEDHEHGAVPQHPVAGILRQLRARRRRAQGHGRPPPLDRQRPQQGPPRQLLLAARRRLPRQPTSLPRRRPLPPPPPP

SEQ ID NO: 62404 - protein, 332 aa, Zea Mays
MSVPAIAVYTSPPGAVYAPPELESSSRGSAPCAAAASPSAPSSHRHAAVAGGLSCLFSSPSAAPRATAHEELGALWHDRSDEPPSVAGGFGGGGYSYPQSSPSPLKLRDHLHRSPVSLFHTPASSPASRSPSVSWLAGRERERLFSSFVRNALGSCIDYAPVTSFPLGVRPAATGVDAAELAFELDENLSEAEPSCEPDAHELLAGAQARHHIFRDELVVKAFKEAERAHRGQKRASGDPYLQHCVETAVHLANIGANATVVSAGLLHDTIDDSFMDYDHIFRMFGAGVADLVEGHFLHLRFITWIKALEMKAFHITVFLEGTRVCTVYTPR

SEQ ID NO: 62405 - protein, 108 aa, Zea Mays
MRITFSAHKDLNIKFQSHRSRDYTNPYLPVNQTAIEGIVQPTVGPDGKVKEPESNVLLASIENMQYAVTVDVLHTVFSAFGAVQKIAMFEKNGGMQALIQYPERCRSS

SEQ ID NO: 62406 - protein, 75 aa, Zea Mays
MNSNKREYMKTIHASPIEDPRFSHVSSDKDYFPSESMNATVKLVRGKLDKIQSGGDNSSTSAASRKPGVDKRRRI

SEQ ID NO: 62407 - protein, 142 aa, Zea Mays
MALHDGNWHRTATPTPCGRHGGVMQGPSSQGSGRTEAPRVASFSSGSRSLAWNQPDGTSRRRHAPNKLAPAAAPIVSSRRRLAHWLAPVAVPPRPLRPCHGFPRSLCRLWRCANRAQPPMRGHGRPSVGPLRRGRAGPACGR

SEQ ID NO: 62408 - protein, 1160 aa, Zea Mays
MKERSSLCESAADGNWGLKYKRKRSKLTVSPSNENEATSPTSDSPMSHGSTKKKLKHDTNISPSAKKIRGHDGYFFECVECDLGGNLLCCDSCPRVYHLECLNPPLKRLPPGKWQCPRCRPKKGSLKMLGNAEVGTSKHEKSTRTYAGTTSGSPPSHTKVSFKTRNSTQDKTGSKEQGKQSSGGTMMGGDPNNEVEKKNTLILHLKKHSMKELSENAKPLKSKFVGEPSEEKIVKHGSVLKLKKHSDRMDLSPNKSKSRGQNSQRESKRPGTKKLKYSMSDDDSVSSSEPSTSLDNNEPPPKRKPSDGKAPSSSTKKGKKKVKFIEKRHSEEQCVVGDKTTTSQEDQQVDRILGCRLQTNKINPLSHASFKQFESANLQVEDMALPLASAGIPNKSHDGTESSRNGTVEDICADESANHSGHSLEMQKDRNSKSHENESCKREQGNNILSICFVDETSIMKDDQVGRENVAASKKGEDATYDLPAEKDDTKLPVTRADAMTRTNQEHTDESKQHGKIKQITDKDYNDAGYEFLIKWVGKSNIHNTWVSESEVKILAKRKLENYKTKYGTSLINICKEQWCQPQRVIALRASVDEVEEALIKWCGLSYDECTWERLDEPTLMKYSHLVTQFKNFECQALDKDVVKDYANTRNRHELNVLADQPKELKGGMLFPHQLEALNWLRKCWHKSKNVILADEMGLGKTVSACAFLSSLCCEFKINLPCLVLVPLSTMPNWMAEFASWAPHLNVVEYHGSARSRSIIRQYEWHAGDSSQIGKTKRSYKLNVLLTTYEMVLVDAAYLRSVSWEVLVVDEGHRLKNSSSKLFSLLNSLSFQHRVLLTGTPLQNNIGEMYNLLNFLQPTSFPSLSSFEEKFNDLTTAEKVEELKKLVAPHMLRRLKKDAMQNIPPKTERMVPVELTSIQAEYYRAMLTKNYQVLRNIGKGGAHQSLLNIVMQLRKVCNHPYLIHGTEPESGSPEFLHEMRIKASAKLTLLHSMLKILHKEGHRVLIFSQMTKLLDILEDYLTLEFGPKTFERVDGSVSVAERQAAIARFNQDKTRFVFLLSTRSCGLGINLATADTVIIYDSDFNPHADIQAMNRAHRIGQSNRLLVYRLVNHRKKWKISFAGVQKNSLGVVTVWMVKIAMKPQVLLLMLNLSIEEKPVA

SEQ ID NO: 62409 - protein, 1899 aa, Zea Mays
MAMPSSTTAALSRLVDRTRVPDPTLQRHAVGAVFRHLLSLPAPLPAAAHDATSALLASPHPAVAAHAAASIARLTATRPDLLPSDVALPLLIAPLAASPSPLLASCLVKAVSALATCALRSGSRFPAHDHPFIQALASGADGARAELMRQAAGMVADRVDWVVKFLRPFVMFSVVRKGDAAFARDLIGALAAAAVAAGKASVAIPVLKMLQDSMLHFGRGDDQEVRLWLSSAECLVDAYVVLLRKLAHGQMPTYDAQASSATLMETLLSQYSFHQKFLGIDSTIFGLSKHLFLVQKDLGLCYIPEISVVLSSLSYSLTGLEFEHEQLAALKLLSFLIDWKYENVLDSKEQTHHVSVELLCVLAVINLTISPSKSVKAVAYHVLSRFSLFVLDLPASHSSEEQDISTSYHISKPALLLPKLLHHLWSKPSSSCFSFMKYIATKASPDSGQSDLEANYWTHQINAYLTALHREKHTLDVRSSKTTSVAISSLISSVASVLVMHPKLGTSAAESLAMLGTSDPRLGMPLFVVILFYSKILCSSGKFSAEISLSLLESLPSLAIHGFVLPLALQWISPMLKRDSNSVLYAMAVRLLCKIWAVTDWAFPNLQVVLDPENFSNFISDREISASIATSIRDVCKQNPDRGVDIILSVSFCIESRDSVVQALGLESLSYLCEADVVDFYTAWKVISKQVLDYYVEPAVAHSLCILLRCGAMDAEAYSVISGNLVRTLWRIGTSKKNNPDPLWDKARGTAFHSLSNYKVSLIQDAIPDFWKLNYEFFTNEHNLAVLKAMEHLQDEIIRYEHINRRRVTTDKRTAVHKFEKLLEVFPRAVFKGMLSHHQLPGAALLTLNFTPKDILNEGKPKDLPRVHSAFEQAFVEIAESMYVSRNIVVALLALQSWKSFVSNWMQAVVALLDTKDSSKLNKAMKAANDIFKELCISIKNGIDPVLRKTGPESYTERTNNPDNDSPTQSPSRFIVAELNTRDEQLRLRETSRTWPKELDDTYIETPILCDQVPVSTPQVVVNIALVIGALALIVPPTAHLVVSSVSDFLLKWLLQYEHEHKQWSAALSLGLIFNCFHPTDKKSRLQVINGFLEVISKTESCLVKGACGLALGYVCHGLLTRAHNAVDSEVEAITQLNERASVEDILHALVTLLIQLCPSSCYSLKKLSIYGISSMGGMEENIHSFSDDPWAVAGLVIGLGNSVVALYRLGAYEAVTEVKDVLISWIPNVDSNSALFDEIDSVSLCMGSCLALPSVVAFCQRVELLNDDLDALFNRYTSLASELLNLNKSGIIFQNLLMAICIGAGSFLSSILNDGVHAMEFNGVKGFLDTLRHIYTHPFPPLVHLGGMFGVVNAFGAGAGDLTGVFSKPMTSQIKHEESSFVSGSLLTSPVGETLSTSMIQEIFLLAKDAKDKHIQDYAAWAISFLRSRWSKNQNQILYEDNGSNRSPDDHDQASSFSEQSLVWNLSLWLSDLKFEKSGDVVPISTVGTVLKCLSKAPRLPTTDWGAIVRRCIKAEAQISHKLTNQEDPKILKEACLYLTLAHAAHISPLLQFLDDLTDILRFQRLDINVQSILLKHLLHLMKLFSDSRLDKLHEDFTEYLYSPTSSYLNYSSEQKSMLRMSFWEGIYTCLVDVSEESGVFSFIEKCIQCLLPLLTLHSDGQPEFMKEWSVAILCLTNAQKKWLDDILQIRSTALVNEGHVDVAKKIILRARLCATGCGSTHELGNIKTAILCTKADGVWWSVLVEITSALNSAENIIKRQWLLDALDIGCVTAHPSTVLCFVGLLCGSCCIYMPLLLVNSINVLSDLPVTLPAFLSTIVSDDFRNSVADRLWLLTTDIYTWAEQLAHGHDQPGHDRIHRSETEIATFLANILLSTCITVEDYLSVDKRLKLANLEAL

SEQ ID NO: 62410 - protein, 76 aa, Zea Mays
MGCSCCRLCLREAAVAAPASNGRRCRAPLGTAVVRVSVVWGRHRSCIVMGASLPTPLKNGTLGLWGFFYRRPRPDA

SEQ ID NO: 62411 - protein, 165 aa, Zea Mays
MAPVSHNNDSDSSDSDDNTIILATLLTLCIEATRRRRRQSSIPRRVIARDHFARENLIRHHYFGPNPVYPAHMFRRRFRMSRPLFLRILQGLQQQDSYFTQQVDATGLAGLGPLQKPFGTPGRKRRSISRRCRKVTGKISSAHSVCFKHGGQCYVVLLTDGIVTV

SEQ ID NO: 62412 - protein, 92 aa, Zea Mays
MVSRTVYCTNIDKKIAEDEVKQFFEGTCGEVSRLRLLGDYVHSTCIAFVEFVQADSAILALNCSGIVLGTLPVRVSPSKTPVRSRSPRVTSY

SEQ ID NO: 62413 - protein, 155 aa, Zea Mays
MQMRRARVKSSLRRIRMAHLDFPWAVRTTWNLHLNPQTLLPSALYFLTKKAPCQPGPDHWRTLQLATRSGNTSLAAPRNNQQPPVLDDTHHAMLSPNQIFNTSQRNTLQWFLQTGIPDSESRATAMNCFLFLRSIHVRIFFPEHRAMYRLEMELD

SEQ ID NO: 62414 - protein, 81 aa, Zea Mays
MGESQGRWPATTLHRTTTTAPRQNTVSRPSDLLLLPARTRHGGTSGEPQRQQPAPDPRAPSAPHIPRRRPCQSFPPWPACC

SEQ ID NO: 62415 - protein, 111 aa, Zea Mays
MSVPALSPAGTMSPDDRMQNSKSSAESEARHSQIPCSSPSCPSLAAPTSPRALAVPREDTEVQCQCFPQVHLGFSVPARLGRIQHSSAPPKHCHYDVYACVRTGDPKVLHR

SEQ ID NO: 62416 - protein, 452 aa, Zea Mays
MTLAKAYVILAKEQGNLQLAWELSSQIRNCQRLLSEGAVNGRAITKDEAHPIISRLARLIYKAQDSHYDISTTIVTLKNHALALEERAKAAIVQSAEFGQLAAESFPKNLHCLTVKLTEEWLRNPKHRSHSEENRNSTRLVDNNLYHFCIFSDNVLATSVVVNSTVSNANHPQQLVFHVVTDRIHFGAMSTWFLINDFKGCTVEVRCIDEFSWLNASSSPLVRQLSEAETQGYYYSAGSKNPERETKFHNPKFVSLLNHLRFYIPQILPNLEKVVFLDDDVVVQKDLTQLFSIELHGNVIGAVETCLESFHRYSKYLNFSHPTISSKIDPHTCGWAFGMNIFDLIAWRKANATSLYHYWQEQNSDLLLWRTGILPAGLLTFYGLVEPLDRRWHVLGLGYDVDIDDRLIESAAVVHYNGNMKPWLKLAIRRYKYIWERYVNISHPYVRECMLQ

SEQ ID NO: 62417 - protein, 151 aa, Zea Mays
MKQEAATSIVVTQEDVLHHYKEPPPRREDDPPALAASLSLPSSLSEDDGDAMPQPSSYAVLPRREGELVSAEELLLVPPLNFAMVDHGVYRSGFPDASNLPFLETLRLRSVLCLCPEPYPEANLEFLRAHGIKLFQFGIDGSKVRLRRSHM

SEQ ID NO: 62418 - protein, 609 aa, Zea Mays
MDLCGHGGRCWLARERERKDRGRRGAFDSLLAALDTRGTREAQLHSMLQVIEPTFKEAIKRNVSIELSAGRYPKNGATDMIRANYHSEVGSSSSTPSATSDSITAYSDSFKVELGRNDFEKTAISKRADIFLKWMWREFYNQELTCAMKYGKKRCSELLHSCNCCYQIYLAEERHCSSCHKTFKSIYNFSDHTTQCEEKQRTEPFWNMQNTDYSVPIGMVLLKLQLVSIEAYIPSEALQPFWTDVYRKSWSVKLYTTKSIAEIFQLLTVLEGAIRPDCLSSDFETSECLNSQVGSASVLPWVPDTTSAVMLRMLDLDSAILYVQNQKMDRDDGGFMKFPSRYTVAKSKQETTPETAGLDLYDGRWLPGSGRRGRGRGSRGGSRGGRGRSRGGRIPRGVSSSSRIEFKGGIVASDKAPRKNVRRGRGRGRGRRRGRRTVRPRQPSVGRARSIPKENLLGSFSMLSSSKAATIEESPRSSGADEWGLETRTTYTECDENSSGSQSEDNEENGQPMDDDYEDQVPDYSIGYSTGSRHHVMMSMMDHDSDEEDEDAEGDENVEEDADLAVDDADVEMDEDDEIGDDGEDGGVGGEMNADEDPDATSYSSDYSD

SEQ ID NO: 62419 - protein, 225 aa, Zea Mays
MNRNFRPLLREKLSKGKDGFVAADFTATEARCAVPSTPILWFQQADECMHLCIYQHKSLTILLLVPASSVINGEEGITHVKKAMLENASQKIVTVEQKLTRGWGGENAYHVSGYRYLLVDPERRVSRASPPGKVTTLAKDSLLALNMLRQEVDLEKSRYKRGDPCHDKDFEVCIRTKNNAWVIAKISQGRELYMALEKGGETLLYASTAVEKFSNRYCEGAFSTD

SEQ ID NO: 62420 - protein, 409 aa, Zea Mays
MPSSEQEALSLSEYQRGVSAWNFDIEDLKAQASLIHDDEPPEIKEDEDIARNIEVEKDLSSRNHLGKSFANECNSRQRAFVTTLKSDGNRPTTNEAFDFDFDFSEAATTRRADGHERNIRENDSLPSTAKRDPESNHWTSDVGQRQLSSGGSNSSTAERGYGFERDAVVQTIPEKQRSEARKTASLSGPLSLPTRASANSLSAPIRSSGGFVDSSGDKSKRSVVEIKGRFSVTSENVDLAKVQEGPLSSLSRKSPEGSLLKKSASTGDCLINTKLMRNANQLKEFCNSSVSSSVLIPHLNNLVQQTMFQQDVIMNLLSNLQQDEKVDRTQPGISSQVRTMENGKVADTANSEKERSLLVKISELQSRMITLTDELIAAKTKHVQLQQELNALYYREEIEDVRDEDIEET

SEQ ID NO: 62421 - protein, 239 aa, Zea Mays
MISGNLTNEDLGAGRTKAEGPTTAARAVAKSPVLPSSRHWPPSTESRIVRVSRVFGGKDRHSKVVDWLLDAAQHEIDKLPPLQFPPQAAQDLVAHLPPPSMVAPFAADRAEADGDKRHCHAGVKGLMGLNNSIRLVNATMPLAHGLYYTPGESWTGTNADDAAAHDHQTVAHGHSPFSSLLSLAAPGPQLVFYSSEGGGFTMKEEATGYQFPVQNSLDHSQGQLSLSSARSFLRPGNQV

SEQ ID NO: 62422 - protein, 231 aa, Zea Mays
MILLLGPIGLALLLSRSVSLLEAIKCCISTTLVCIGFTVLIDSIMWRRILWPEFQVLWFNSVLNRSSEWGTHSIHWYFTSALPRSMIVAYPLCMVGALLDRRIVPYMFPVFLFVVLYSKLPHKELRFIIGSIPMFNVSASLTASRLYNNRKKAGWNLLFILMLGAFLVSLGYSTVTFMASYNNYPGGYALKALHEADSSVKEKMVHIDAFTAMSGVSRFCENEYPWRNGNQ

SEQ ID NO: 62423 - protein, 375 aa, Zea Mays
MPLGMLVCSNVAIVTVALTAQWPWAADIIAVCTSLLDTLPAVTTPTERADDDDEMPMDVNIKINLDVDLERQITAAIDSKLLQHLVNALFRGTLSTNDSDLSGPSDAEVDAVGSICAFLHVTFNTFPLERIMTVLAYRTEIVPALWKFIKRCHASRRWPFFLKFASSLPADSPGWLLPMSVFCPIYKHMLKIIDTGEFYEQEKPLSLKDLKSLVLILKQTPGEALILGGWALWQLLWVIPSSSTQKVSPNPSGLKKLSVENVKTRARVGLSELLTQLQDWNSRLPFTAASDFYSQEATSENFVSQAILGNTRASEIIKLAPFLAPFTSRVKIFTSQLTCSRQSTSHSALTRQRFKIRRSRLLEDAFDQLSLLSEE

SEQ ID NO: 62424 - protein, 353 aa, Zea Mays
MDDPSSASNKHKRKRGRKPKASPPFPDRSSPSPSAAPAPAGRRGRKPRRHEAPADADATRPPSPPRRGEPKPVANGGDVVAVAESGPASWDEVVRVVPCMDAVVKVFCVHTEPNFSLPWQRKRQYSSSSSGFIIGGRRVLTNAHSVEHYTQVKLKKRGSDTKYLATVLAIGTECDIDAAINSGNSGGPAFNDRGKCVGIAFQSLKHEDAENIGYVIPTPVITHFIEDYKKSGEYTGFPILGVEWQKMENPDLRKAMGMKPDQKGVRVRRVEPTAPESGCLRPSDIILSFDGVDIANDGTVPFRHGERIGFSYLVSQKYTGEKALVKVLRDSKVHEFKISYLCSISSIRVWKRL

SEQ ID NO: 62425 - protein, 599 aa, Zea Mays
MYSSHADSMQWLDDIQVLEMIVDKFSTSDSAEVHANAAEILCAVTRYAPPALAAKISSPSFVGRLFQHAFEDSRPKSVLVHSLSVCISLLDPKRLVSASYQAFRSQLSHGTLVTASPETVNGMLDSLGDLLKLLDVSSAENVLPTTYGSLQPPLGKHRLKIVEFISVLLSIGSEVAETRLIQLGAIQHAIDLFFEYPFNNFLHHHVENIIGSCLESKQDHLIGHVLDECKLVTRILEAEKNSALSSDLTKHTLSTEGRCPPRIGIVGHMTRIANKLLQLANTNIMVQSYLQQNSDWIEWHTSTLTKRNALENVYQWACGRPTSLQDRGRDSDDEDFRDRDYDVAALASNLSQAFKYGIYSNDDIDEAQASLERDDEDVYFDDESAEVVISSLRLGDDQESGSLFTNSNWFAFDEDKALNDGLVSPEASPSPNSEISALKEDDEVILGEVIDDTEGSEPTLPVSNKDANEESGHTVLANGTIDKQEDDIRPLTPDVKESQPEFVEWKEEEAEPGDVAEKDTAVPGIEVESEKQLNSMDDVMLCDAELGEEKKSGGMLGSSAPEAEAASPVSSDIDSIKHPEQAADSAVSEYPMGEQNPEI

SEQ ID NO: 62426 - protein, 325 aa, Zea Mays
MGSSSNTNTSGGASDKEEKKKEDKIKGKDSSGPSFKENERVLAYHGPLLYEAKVQRIENHEDEWRYFVHYLGWNKNWDEWVANDRLLELTEENVRKQQELDKNQVVDKTMKSGRSTQHKPKVSNADAKADKDDTKSLISVKGKKRKSQLGTEIQDKEKRSSHSLLVLQFPLPLKKQLVDDWEFVTQMGKLVKLPRSPTVDDILKKYLEHRAKKDGKINDSYAEILKGLRCYFDKALPAMLLYKKERDQYAEEVKGDVSPSTVYGAEHLLRLFVKLPELLASVNMEEDALNKLQLKLLDVLKFLQKNQITFFTSAYDGSCKDAADS

SEQ ID NO: 62427 - protein, 274 aa, Zea Mays
MPPPSLVSILPAASISPRRRQAKHPKTPTASHPFFSRRLVSQPPRHASISPSAAGGSGSDELHLLEKPLPAVAEDNEAEEELESAPVSSTEEALAPFLKFFQVKSTDPDVGADTADGEVPEEASRRDVLSAAGERGVSYYDPKPGDFVAGVVVRSDGRTLDVDIGSSGEPALMLAKESAPVPAEEFGYLACDVASKCAAEFAAEGRVGVVVRQFRGGGEGDGEAIIGRNGKEKVAPVLRAGTIVFAEVLGRTLGGRPLLSARRLFRRVAWHRAR

SEQ ID NO: 62428 - protein, 1134 aa, Zea Mays
MNMERLPPPAGSRHGHHRYTRMPRQADLEGEAAPADQEREPERRPEVLAASASASLRVPDAARVFDELPRASIVAVSRPDAGDITPMLLSYTIEVHYKQFRWRLYKKASQVLYLHFALKRREFLEEFHEKQEQVKEWLQNLGIGEHMPVVHDEDEADDVNVPPQSDDNSIRNRNVPSSAVLPVIRPALGRQNSISDRAKVAMQEYLNHFLGNLDIVNSREVCKFLEVSCLSFLPEYGPKLKEDNVSVGHLPKIQKDRKKRCCSCGLFNCCKSNWQKTWAVLKPGFLALLEDPFDPKLLDVIIFDALPHMDITGEGQVSLAKEIKERNPLHFGFQVSSGGRTIKLRATSSSRVKDWVTAINAARQPPEGWCYPHRFGSFAPPRGLLEDGSMVQWFVDGQAAFKAIASSIEEAKSEIFITGWWLCPELYLRRPFQHHGSSRLDALLEARAKQGVQIYILLYKEVALALKINSLYSKQRLLNIHENVKVLRYPDHFSSGVYLWSHHEKIVIVDNQVCYIGGLDLCFGRYDSPEHKVADSPPEMWPGKDYYNPRESEPNSWEDTMKDELDRDKYPRMPWHDVQCALYGPPCRDVARHFVQRWNYAKRNKALNEQAIPLLMPHYHMVIPHYKGRSKETNDEAEGKQYNDKDVDIGKPVLTSRTSCQDVPLLLPQELEPRELSSSDLRVNDLDINHSDRLNKKNFNQPLLNRKAKLDSSHQDLPMRSFVDNLSSLEPSSVRRFDSSKDDRNHIDKKWWEMQERGNQVASLLDIGQVGPRVTCRCQVVRSVGQWSAGTTQIEGSIHNAYFSLIEKAEHFVYIENQFFISGLSGDDTIKNRVLEALYRRILRAEREKKRFKAIIIIPLLPGFQGGIDDGGAASVRAIMHWQYRTICRGSNSILQNLFDVIGPKAHDYISFYGLRAHGKLHDGGPLVTSQIYVHSKLMIVDDRITLIGSANINDRSLLGSRDSEIAVVIEDKEVVNSKMDGRPWEAGKSSLSLRLSLWVEHLGLHPGEVSHIMDPIDDSTFKNIWMATAKTNTMIYQDVFGCVPNDLIHSRVQFRQSFAHLRDKIGHTTIDLGVAQEKLEAYQEGDLKSINPMDRLQLVRGHLVSFPLDFMCQEDLRPYFSESEYYTSPQVFH

SEQ ID NO: 62429 - protein, 93 aa, Zea Mays
MNLFVVTEGSNFLGFVVTFSKINSFVHYNYKIVSQCTARTMFFLNTQKNNVHHGFCYVTMWSSLFGTRGHIFVFALCICSLFIPQFIHFYLVV

SEQ ID NO: 62430 - protein, 567 aa, Zea Mays
MFDAGSPRPAPHKSNSTSAPSHGYPGSTAPAPVRLPPPKGKGEGNFAHAPNHPNQYHSTSYSPGLPPSPPAASMNNGLSNVNGPSLHPLAADVGNYRERKGRHVIIIIILSSVCAFILCAGAALVLYFKLRNHIHLTEASLVPTKPTGPVSAMVGNRLESRPISASPSFSSSLVAYKGSAKTFNLVEMERATLGFDESRIIGEGGFGRVYEGILEDGERVAIKVLKRDDQQGTREFLAEVEMLSRLHHRNLVKLIGICTEGHSRCLVYELVPNGSVESHLHDKGAAQFDWNARLKIALGAARALAYLHEDSSPRVIHRDFKSSNILLEHDFTPKVSDFGLARTALGEGNEHISTRVMGTFGYLAPEYAMTGHLLVKSDVYSYGVVLLELLTGRKPVDMLRPPGQENLVAWAGSLLTSRDGLESIIDHSLGRSIPFDSIAKVAAIASMCVQPEVDQRPFMGEVVQALKLVCNEGGEFNESTFSQDLHIQDVEVMSRASTDVDVDPTLSAELFTSSARYDAIDAPGSFRRYSSSGPLRVGRTGLNKERGLSTGSSSEHVGLQRFRIDGE

SEQ ID NO: 62431 - protein, 329 aa, Zea Mays
MLQQKGIPERPMYYPEFPLQDPEPEVVLVDEDRDPVERVHEALRCLPQYDPSVRWTTEENPPFLYWKIRDFAHAYSSGITTPSVVAEYVIAGIEEWNNKKPPMPMLIYFNAEDLKKQAEASTKRFQRGNPISILDGIFVAIKDDIDCFPYPTKGATTFFDQIHTVERDAVCVARLRKCGVIFIGKANMHELGLGVTGNNPNYGTARNPHSVDRYTGGSSSGPAALVSSGLCSIAIGTDGGGSVRIPSALCGIVGFKTTYGRTDMTGVLCDSGTVEVASPLTSSVDDAILVYSAIAGSRPMDKLTLRPEVDSTIFCILNIKNAGMHFMGV

SEQ ID NO: 62432 - protein, 283 aa, Zea Mays
MPMKHRRLQSLNLEAETQENVEQHEDVQDPQPELTIGFPEGEAPTRNKSFKIIWQNGVVREVFRNFRTAELWDLKGGRVLVETDKNGIPNQWSESILSSYLGELAQNSSFAPLHIPRWDNKLFKGPKERIIKDVEKKFIYSSETKWSTRDWILKTVNKRWRDYKSDLKKQYFNPDKRSFDQIEKDVPDGVNENQWSFLLGIWCSEAHQKLCRTNAESGKKQRHPHTSGRKSHARLKKEMEDKKKGSITKIDLWDESHKKRNGNYVNQNVQTLMGKAFDELENR

SEQ ID NO: 62433 - protein, 111 aa, Zea Mays
MFISSVFKKEEERVPNLRPAIPLSCPAALKLLIEQCWSWQPERRPEFQQIVSVLENLKTVLERDGTLDKIPGSICQALEPNDQNKKKAGNWIQRLSYAQPAFSGPPPPKLL

SEQ ID NO: 62434 - protein, 288 aa, Zea Mays
MDNAGWATFDTPPEQKQPALTGLSYVSATSIDKQALNHDLFSSESNDELTWFRSSKDDASVTNHNQSTATSLDTCSSEPWSIFDASSGSTQYTVKGDLSLMTSRLQEPKGTMNENSSQLWHSFDDANGIVCAQPRIDDHSNTASISLSTSNPFVCSIVLKESYDDDSHKVLMGELTPNTLIAASSEPSLGGPSTEQMPLNPFDLPFDTQSGTPDLFMDVSSLQEALPSPDLPTFLDGLPERWFSSSSCAYVPSASASHGGLPCLVERGPNCSLLNIPVGTLSAGNPFV

SEQ ID NO: 62435 - protein, 395 aa, Zea Mays
MEQDQSVVVGSADSGAAAFGFATGNPPSLAVTGGSAVAPDGGAQAADASAYQAEHTALNGTVGDMGNYPSTGAAENGEAVPNETGEPVPELSYEEAVLSAEEARLWSVVTANSLDFNAWTALIEETEKNAENNILKIRKVYDSFLAEFPLCFGYWKKYADHEARLDGVSKVIEVYERAVLAVTYSVDIWYNYCQFAISTYDDSDIIRRLFERGLAYVGTDYHSNILWDEYIKYEESLEAWSHLADIYTRVLEHPIQQLDRYFNCLKELASKHSLSEILTAEEASLYVVTSETTAQAPDGEAHPDDVDKLGQPEISSSTDAESLAKYVSMREEMYRKAKEYESKIIGFELAIRRPYFHVKPLDNPELENWHNYLDYIEKEEDINKYLDEASFVMGY

SEQ ID NO: 62436 - protein, 2233 aa, Zea Mays
MEAAAPDGAGKASPAPEEPDWPPELRLLAPPPAAGTDDPQFLSSIIGDAAAPPPPMPPLAQKRKRGRPPKRKDGAGAVVPARPARRREDEEEVVCFICFDGGNLVVCDRRGCPKVYHPACIKRDEAFFQSRSKWNCGWHICSSCEKAVHYMCYTCTYSLCKVCIKQGKFFSVRGTKGFCDTCYGTILLIESKDESAIKVDFDDILSWEYLFKLYWLDLKGKLSLTLEELTIAKTRWNVPSTSARKEKDESSDDLYDANNDDDAGTDCSSGKRRRTNSRKKGQKCRKVNKDCSVPAKKVELPITNTESVPTEVTNERVPLPVDTKVPNGWVPLPVDTKVPNESVPLPANTKWASPELLEFVGHMRDGDQSFISQFDVQTLLLDYIKKNNLRDPQRKSQIICDLRLHRLFRKARVAHFEMLKLLEMHFLMNETSTVTDSRQVTIDLNSAYVDTNGYNDMAAKFSPDKRRKIHRKMERDTQVNLEDYAAIDMHNINLIFMRRSLMEDLVDDAKFSDKIHGGFVRIKISDVYQKQDIYRLVKVTGTHKVPEKYSIGKKMTNFALEILNLNKKEIITMDTISNHDFTEEECKRLRQSMKCGVISRLKVGDILEKAKILQSVKVNDWFENEKQRLGHLRDRASETGRRKEFREYVEKLQLLNDSEERTRRINEVLEVHVDSHMDPNYESAEETDEKRTVGKSVDRTRPDTTISRRISRYLSTMQNHPQKVSDCSHHPKNLSTESTICGSGARSLENSTANRTMYEAGSFSSSGVTMSNDTEPEKVWHYKDPSGNVQGPFTLLQLSKWTSYFPRDLRVWLTFESEERSLLLTEVLSKQQKDFTQAASHTSSKATLVGTGHTRNNPSVDQTNAFSPAGHSVVSSSGITVQYNKYSVPERESVYSPDDSLSLSTSSVPPKDACTVNSQTHCQNKHSVFIQSPGSAYGHTDLNHDGIQGGCSGESNHHHSSGALWSPTVVQVSCGHGNVESHQSQHVSWSQSQHESKNSSQRPVKDLNSRRDLSKNLPTQRIGKDVSSPLFACAWSPAESRTASSQHDGSCLSSTTNPNFLDELHYSIASAKPKSCAPATPIEDRGSSSPSGMLSHAERVPICSPQSTPLASAFDMCKMEEIMNQQRTLEPDTSNASINQSPESKIFPVSSPDNHDIDREFPSPVPRSENKDIAVDSSGLTPASPENITTNLPGSDTCKMEVMSQQQVTEAVVSNSSDNHSPQSKVSPVSSPNNEDMKHQYPSSTRRSENKIPAVDNLLSTSAARENLTTTSAHDSDTCKMVELVNQPKTPEVDASNAPLCQSPHSHTSQVPSDNQDIERECPGPTPRSDSKEPLVNNSATTSASASDTIKMEEFVNQQKTVEADASNAPLNQSHSHIFPVPSDSQDIEHECPGPTPRSDTKEPLLNNSVLTLAASEILTTTSAASDTCKMEDSVNQQKTLEADALNAPLNHHPHSHVLPVSFDNQDIQHEYPSPTPKSDSKEPLVDNSVLTSVGPEMLATTSVSDTCKTEEFVNQQKAVEADASNASLNQPHISAVPSDKQDIECECSSPTPRSDCKEPLMDNSVLTSAVPEILATSSASDKCKMEEFVNQQRPIEVDASNASLNQYSRCHIFNVSSDNQYVERECSSTTPRSDCEEPLMDNSILTSAVPEILATSSASASDKCKMEEFVNQQRPIEADASNASLNQPHRCHIFTVSSDNQDIECECPSPTSRSDSKESLVDNLVLTSAVPENLPTSFAVASDSCKMEILNKKRTLEADASNASLDQPSHSSVFTSSSNDNQGNACERPSPNPRPEGEQPLMDNSGLTSPVPQNLTSASDICKMGEILNENRTLEANPSNGSITQSHQSKVFLVPSIDILERECSSETPRPQFKEPVVDSSGLTSAAPESLTAKQHVHSPDAFIPPKHGAPTGELGDAKSDFKGEEIIQKEQYCEREPIVATRENLLIDLSCGAESIDVSDVLESLMEERSVTSYVPVSIEDFLAASAVEEPQYSSPIALSPWGEPSYYQGDAGDSALWGIQDSINDMWSLLSPRPMLQASSGIGTEGKETFDINEVAVTHVNSDFFQRGSMLGEENMNQANLSVAADRMLLPEQVPSIPNGMSTSSVDEGTRVIGSQASINQSLDWGTTWRTSQNLSVYSNEIAGPSSKSYWEESRKQEATNSGVSISGEAIRNKRLNPPDNAIRGSHHHRGRYSQISESWLLSSNHSRSSSAKFGSGGSSRSTSKGQTRG

SEQ ID NO: 62437 - protein, 286 aa, Zea Mays
MSESELAVIKPEVLKTYIWLQCFDGSIQQVEEEVAMFCPMICQEIVKNGTGSSKNHAIALPERVNPANLSLILDYCRFHQITGRSNMERKSFDEKFVRIETERLCELTSAADSLQLKPLVDLTGRALARIIEGKTPEEIRDIFHLPDDLTEEEKLEPLKNINDGPARIRLLNRLYAKKRKELQERHKLKDVQVQKEQKDERSLDELLSFINGDGGSGGRKATKSKKKNKRKDHVENPPKADSEPVNANPDMQDDAEYPFEDADLDDGLDPAMKEELDRFVFNMQRS

SEQ ID NO: 62438 - protein, 429 aa, Zea Mays
MEAMTGGKFLQKFRLYETRSKFYLIGRDKSRIHWRVLKIDRLESTELGVDEDPTIYTESECQELLWRIHEGNMLTGGLKFVTKCYGIVGFVKFLGPYYMVIITSRRKIGTICGHEIYSVGKSEMIAISSVTVWPNVAYSRDENRYKRLLCSVDLSKDFFFSYSYNIMRSLQKNITQKNTGQAVYEPMCVWNEFLTRAIRNHLKNTCWTVALVHGFFKQSKLSVSGKDFWLTLIARRSRHFAGTRFLKRGVNEKGRVANDVETEQIVFEDTSDGIPTQMASAVQHRGSIPLVWFQETSRLNIRPDIILKPDVDYKATRLHFENLALRYGNPVIILNLIKTREKKPRESLLRAEFAKAIHYINKSLPDDKRLKFLHMDLSKLSRRKGTNVLALLTKVASDVLDLTEFLHCEISTSTKPDDTSRRVSSGQIA

SEQ ID NO: 62439 - protein, 2821 aa, Zea Mays
MKPLSRNIVRFEIVHLVYNPLVDHYLAVAGYEDCQVLTLNSRGEVTDRLAIELALQGPYIRRLEWVQGSQVQLMVVTNLFVKIYDLSQDNISPMHYFTVADDVIVDATLVPSSMGKLVLLVLSESGVLYRLNVTLEGDIGAKILTETVLVEDVISMHRGLSLYFSSTYRLLFVSHQDGTTFMGRLNADSSSITELSYINEDHDGKSKPAGLYCWRELVAGSGILTCLSKSKSNAPLVALLSPHQLVAQNMRHNTGANSSVVGVAAYKPLSKDKTHCLLLYDDGSLHIYSHTPSGGDGSMNLTAEQTKKLGSSILSSRAYTGTKPEFPLDFFEKTTCLTCDVKFNSETTKSGDSESIKQRLTSDDGYLESLTPAGFKVAISNPNPDIVMVGCRIHVGNTSASNIPSEITIFHRVIKLDEGMRSWYDIPFTTAESLLADEEFTITVGPTFDGSSIPRIDCIEIYGRAKDEFGWKEKMDAALDMEALGGNATGGRSGKRLQIVKAAPIQEQVLADALRILSRIYLLCQPSCFTDMVDGGMELDNMKCRALLETIFQSDREPLLHSAACRVLQAVFPKKDMYHHVKDTMRLLGVIKSLPAITSRIGVGGAASSWVIKEFIAQIHTVSKVALHRKSNLASFLESHELVDGLMQVFWCILDLDRPDTQTINSLVVPCVEFIYSYAECLALHSNEKTSVSVGPAVALLKELLFAPYEAVQTSSSLAISSRFLQVPFPKQTMIANDDAPENQAKASASAMNSTSANSQVMIEEDPVTSSVQYCCDGCSTVPILRQRWHCSICPDFDLCETCYEILDADRLPAPHSKDHPMSAIPIEVDTFGGEGSEIHFSVDELTDSGVLHADRSVQTSPSSIHIFDASESADLPETITDQATVSISASKRAINSLVLNHLIEELRGWMGTTAGTRAIPLMQLFYRLSSAVGGPFMDSSKPENFDLEKFVKWLMDEVNINKQFPAKTRCTFGEVLILVFMFFTLMFRNWHQPGSDNSHSKSSGSSDLTDKGPAQVLGSTTITLPSSSADLDKNEFASQLVRACSALRQQKFLNYLMDILQQLVHIFKSSSINGEAGSSGSGCGSLLTIRRELPAGNFSPFFSDSYAKSHPTDLFMDYYKLLLENTFRLVYSMVRPEKEKSAEKDRCYKVPNTKDLKLDGYQDVLCSYISNPHTAFVRRYARRLFLHLCGSKTHYYSVRDSWQCSHEVKKLNKIINKSGGFRNPVPYERSVKLIKCLSTLCDVATARPKNWQKFCLKHMDLLPFLMDNVYHFSEECVIQTLKLLNLAFYSGKDANHNAQKAETTDLGGSTRTSSQSPDMKKNRKADDGSEGSSEKSCMDMEQVVEMFSDKEGDMLKNFINIFLLEWNSAGVRHEAKCVLFGVWYHAKNRLRETMLSILLQKVIHLPLYGQNIVEYTDLITCLLGKVNDFSAKQNHSELVNKCLTSEVISCIFDTLHSQNELLANHPNSRIYNTLSCLVEFDGYYLESEPCVTCSCPDVPYSRTKLETLKSETKFTDNRIIIKCTGSFTIQSVTMNVYDARKSKSVKVLNLYYNNRPVTDLSELKNNWTLWKRAKSCHLTFNQTELKVEFPIPITACNFMIELDSFYENLQASSLESLQCPRCSRSVTDKHGICSNCHENAYQCRQCRNINYENLDSFLCNECGYSKYGRFEFHFMAKPSFSFDNMENDDDMRKGLAAIESESENAHRRYQQLMGFKKPLIKLVSSIGEQEVDSQQKDAVQQMMVSLPGPTCKVNRKIALLGVLYGEKCKAAFDSVSKSVQTLQGLRRVLMTYLHQKSSSDTNALPAFSIPRSPNSCYGCSTTFVTQCLELLQVLSKHENCRKQLISAGVLSELFENNIHQGPRTARTLARAVLSSFSESDEDAVHELNNLIQKKVMYCLEHHRSMDIAQSTREDLLLLSETCALVDEFWEARLRVTFQLLFSSIKVGAKHPAISEHIILPCLRIISQACTPPKSDCGDKESGLGVSSLTLHSKNDDTTGNTASNNPNTKIQSDISGKIYDGSRRDQDIPLLSYSEWEGGASYLDFVRRQYKVSQAVKGSAQKTRHDSYKSDYLVLKYGLRWKRRACLKSSKSDFSKFALGYWVSDLILSSCSQSIRSEICTLISLLCPSNSPRQFQLLNLLMSLLPRTLSAGESAAEYFELLGTMIDSESSRLFLTVRGCLTTLCSLITKEVSNVESQERSLSIDISQGFILHKLVELLNKFLEVPNIRARFMSDRLLSEVLEAFLVIRGLVVQKTKLINDCNHLLKDLLDSLLLESTENKRQFIRACISGLQRHVKEKKRRTSLFILEQLCNLICPVKPEPVYLLILNKAHTQEEFIRGSMTKNPYSSVDVGPLMRDVKNKICNQLDLIGLLEDDYGMELLVGGSIISLDLSISQVYEQVWRKHHGQTQHCLSNVSAITGASSIRDCPPMTVTYRLQGLDGEATEPMIKELEEEREESQDPEIEFAIAGAVRECGGLEIILSMIQSLHDDEFRSNQEELTSVLNLLKYCCKIRENRCALLCLGALGLLLETARRAFSADAMEPAEGILLIVESLTMEANESDISIAQSVFTTSTEAIGAGEEARKIVLMFLERICHPSGAKKSNKQQRNEEMVARILPYLTYGEPTAMEALIQHFEPYLRDWSEFDQLQKQHEDNPKDDNISQKLSTQRSAIDNFVRVSESLKTSSCGERLKDIILEKGITKAAVEHVKESFASAGQTGFRTSEEWTTGLKLPSIPPILSMLKGLAKGHLPTQKCIDEEGILPLLHALEGVPGENEIGARAENLLDTLANNENNGDGFLGEKIQELRHATRDEMRRRAL

SEQ ID NO: 62440 - protein, 265 aa, Zea Mays
MLLIALNVFLIMDIGGCDIQKQEIREAVELPLTHHELYKQIGIDPPRGVLLYGPPGTGKTMLAKAVAHHTTAAFIRVVGSEFVQKYLGEGPRMVRDVFRLAKENAPAIIFIDEVDAIATARFDAQTGADREVQRILMELLNQMDGFDQTVNVKVIMATNRADTLDPALLRPGRLDRKIEFPLPDRRQKRLVFQVCTAKMNLSDEVDLEDYVSRPDKISAADIAAICQEAGMHAVRKNRYVILPKDFEKGYRTNVKKPETDFDFYK

SEQ ID NO: 62441 - protein, 99 aa, Zea Mays
MQGHGSAASVGTKCQPAGDGRESLHVQSSPDPTHHLVPPWRRWVDGGGADDTAPAPATVRPYTRDGNEINASHPVSCHVRPSVLYVPLQYGPCLRLRVT

SEQ ID NO: 62442 - protein, 564 aa, Zea Mays
MFGSALTYVILRLLGEGPDSGDGAMEKGRNWILDHGGATYITSWGKFWLSVLGVFEWSGNNPVPPEVWLLPYLLPFHPGRMWCHCRMVYLPMCYIYGKRFVGRITPLLLELRKELFKDPYSKIDWDKARNLCAKEDLYYPHPFVQDVLWATLHKFVEPVMMHWPGSKLREKALETVMQHVHYEDENTRYICIGPVNKVLNMLACWIEDPNSEAFKLHIPRVYDYLWLAEDGMKMQGYNGSQLWDTAFTVQAIVATNLIEEFGPTLKLAHNYIKNSQVLDDCPGDLNDWYRHTSKGAWPFSTADHGWPISDCTAEGLKASLLLSRISPKIVGEPMEANRFYDAVSCLMSYMNDNGGFATYELTRSYPWLELINPAETFGDIVIDYPKEVDNCISKASNFIESIQKSDGSWYGSWAVCFTYGTWFGVKGLIAAGRTFENSPAIRKACDFLLSKELPSGGWGESYLSSQDQVYTNLKGNRPHAVNTSWAMLALIDAGQAERDPTPLHRAAKVLINLQSEDGEFPQQEIIGVFNKNCMISYSQYRNIFPIWALGEYRCRVLGAGKPWR

SEQ ID NO: 62443 - protein, 268 aa, Zea Mays
MRARRTLLKAGDSSGDGEPTSTACIQGEGLSKGCMKNFKTQNLESVVVKKGVKTPKVESDVMNKDLKTLNVGSGIMKKGLKAPKTESDMMKKGVRTSKAESDGMKKGMKIPKVEPDVMDWKTPKAGSDVTKKGLRSPKAECCQPVIESVKLKLAEILNTISTQDDCKMLQHQLDTQRKRARYKKMIRRHMDFRMLHSKIKSGAISGTKELLRDILIFINNVITFYPKTTLEHMAAVELRDFALWGCKGKQGFFKGCCCQGRGWQETLQ

SEQ ID NO: 62444 - protein, 565 aa, Zea Mays
MFVIFTLFQVHNLFVVCLLWTSSSSGTYFYFLLLVLMVPFVITLFQTVATVCVFLASKVEDTPCPLDHVVRVAYETMYRRDTAAAQRIRQKDVFEKQKALILIGERLLLTTIRFDFNIQHPYRPLLDAMQNLGINQKEVKQVAWNFVNDWLKTTLCLQYKPQYIAAGSLYLAAKLHNIKLPLHGAHVWWHQFDVAPKPLEAVIHQMMELAALKKLMPARPNPVKLKETLCEAKLSLSNSPDSVLNQSNLLISSSSPDIGEPSDKVQVDSCQYLISSHMGDCRVSGPDSSSLNTCANRNVSCKAHDEESLDQALIIKHDSGMMPSSNQTSLYATVGTEGSAELKQDVSHCNDFNIRVNDESLNQVLRNQHGDAIPLPDVVSLDAKVDKERSWCVEPLIANSDCCTDSVNVDSLCTDQRLADAPSGPTADAPSMLAEEESYPFSAKLENIDVARIKGLLMKRKSRREIQDRAIASDGLSEEDWIERELESGIVTNQEANCAAISDELSDEAWIERELESGIVVGPRNEQAITFDGLSEDDWIERELESGIIVEPAPATKKRKLESSC

SEQ ID NO: 62445 - protein, 589 aa, Zea Mays
MVRTRRRLVLLLLLLGLTVLSPLALYTSRLSVALNSIPRVFPGEITNQGRGVKADKLNALPLQTVSSLKEPVDIVFSEELTESKSQELRLPKVGAHKSRVLSEVTVADDDTSSKDNEVIEQVITLEAQDGGLVKGAGVSDEQEKNIGSLQQSSSEESSQDTMPKQTPAKVVAENSQSARTDGKTKTTVLPDMRIRNIKDQLIKAKVYLGLGSIRASSQYLKDLRQRIREVQKVLGDASKDSDLPKNAHEKVKALEQMLIKGKQMQDDCSIIVKKLRAMLHSAEEQLHAHKKQTVFLTQLAAKTLPKGLHCLPLRLANEYFSLDPVRQQFPNQQNLINPKLYHYALFSDNILATAVVVNSTVLNAKHPSDHVIHIVTDKLNYAPMRMWFLSNPPGKATIEVQNIEEFTWLNDSYSPVLKHLGSQSMIDYYFGTNRANSDSNLKYRNPKYLSILNHLRFYLPEIYPKLDKMVFLDDDIVVKKDLAGLWSINMKGKVNGAVETCGESFHRYDRYLNFSNPIITKSFDPHACVWAFGMNVFDLAEWRRQNITEIYHSWQKLIDHSGNLVLSLRVWSHSGTRHFPSAGHGMFLV

SEQ ID NO: 62446 - protein, 564 aa, Zea Mays
MNRETSFGDQGMYYYGYYYPGSYGGWDENGYFVGYNGVEVHPAVVQTDNGSYLCHLPGYENGYASYSQVVPGGIASVDGQYVSKEPYYSTALPIQDPRTPGIFAQPIAYRTELASAYSWDPSFVLLDGVQGHPVGVHQTNYAARPKYSFNKHVIPSSKATRSAKSAADTVKGSSSALETVTNAVNSSPPSKSANKTPGASITKGYLPYSKSVMHTNNQEKNSVYQSKGINVKESGRSWNSREKLGRSKLNGQGDSESNENNHTDNLKHSLSHRSDVVGLSSAGDANASIPSPVAISKNACNLSDFVTKYEQALFFVIKSYSEDDIHKSVKYNVWASTPNGNKRLDNAYRVAQERIAEKGTKCPVFLFFSVNASGQFCGVAEMVGPVDFNRNMNFWQQDKWNGFFSVKWHIIKDVPNPQFRHIILENNENKPVTNSRDTQEVNFSQGTEMLNIFKNFTCKTSILDDFDFYENRQKVMQDRRGKLLTTSFDHPLPKAEKSPEIKSQTQLISGPEVGRAKSDEGQGNNVGMVLDTTKKNEEQSSNVPEILDAACSNKEQPNKIAIEG

SEQ ID NO: 62447 - protein, 749 aa, Zea Mays
MVLYRISSNKDPGAGRGESLSMKEHAALLLEKKLLDLPKLLDICAIYEHDNGKLTSSLVTNVINVQPSVLDDINIVIPQFLNIFHTMHDRCMTSLQVLTSTGSIDNGYVQLQKDFMEVLDFINDAIVTLDSFVGAYQPAALLFCTNFEMSYGVEELLNALARLYSSLLPSLLHGFKVMPKSQSNAEASLDSTLSDIPLAIRMLSKRTARFGWRLLHYCYLNDQVREHDAQTSTKMFPAKVEDPMIRGDILVQTLKDINRESTYSSQVNHGNTFLQELESEFQLMSQIGDIRNKGWIYMDDEQFQFLSRLCGSTHTSWNGISDLPVSSHGGELQQKDEETAMVESKISQIRDLFPDYGKGFLSACLEAYNLNPEEVIQRILEGTLHQDLLALDTSLEEMPHEKPAPTAVKDKGKGILVETVPQITKKPHKVAETHYFVQDGLSSATSSASQGRFTRKANDDLPDTAILDSKNAKNAARSVILDSQYEYEDEYDDSFDDLGFSVVESSYEETDGVNDAEASSHGPRWSSQKKPQFYVKDGKNYSYKVAGSVAVSSAREAAVMRQTQKETIYGLGRGGNVPFGVPNRQHIDVEAEEVGDADNSGRGSNSRGRGRKGGREGNRPEENESSNGRGSGFGGKRGGWSQGNPAEENWNPNGQQGFGRGGRRGGWNQGGPAKEDGNSSGRQESFGRGARRGSMNHDQSAEDNEGHNNPAQDFTRGPAPRGGHGRGGGRNHHRRDRAMKKHMQGLTGL

SEQ ID NO: 62448 - protein, 315 aa, Zea Mays
MKGKKPVKELKLTVPAQETPVDKFLTASGTFKDGELRLNQSGLRLISEENGDEDESTKLKVEDVQLSMDDLEMIQVIGKGSGGVVQLVRHKWVGTLFALKGIQMNIQESVRKQIVQELKINQATQSPHIVMCHQSFYHNGVIYLVLEYMDRGSLADIVKQVKTILEPYLAVLCKQVLEGLLYLHHQRHVIHRDIKPSNLLVNRKGEVKITDFGVSAVLASSIGQRDTFVGTYNYMAPERISGSTYDYKSDIWSLGLVILECAIGRFPYIPSEGEGWLSFYELLEAIVDQPPPSAPADQFSPEFCSFISSCTFFWL

SEQ ID NO: 62449 - protein, 74 aa, Zea Mays
MVEMRRQTLTASMLLEDCLILGFCQVYPIRHQWSQPLCFLLDNLISGSIVFDPQLMKVIANTKDYLATMLLVRL

SEQ ID NO: 62450 - protein, 891 aa, Zea Mays
MSCSAAAGAEATALLFRSAAPSTIVGRHRLAMSRRTSRRNLRASIQRDRASASIDEEQKQMSEDENGLLDIQLEDLVGMIQNTQKNILLLNQARLQALERADKILKEKETLQQKINILEMKLSETGKQSVLSSEVKSDEESLEFDVVKEENMLLKDEMNFLKGKLIEITETEESLFKLEKECALLNASLRELECTSTSAQSDVLKLGPLQQDAWWEKVENLEDLLDSTANQVEHASLTLDGYRDFQDKVDKLKASLGTTNVSEFCLYLVDILQQRVKSVEERFQACNHEMHSQIELYEHSIVEFHGTLSKLINESEKKSMEHYAEGMPSEFWSRISLLIDGWSLEKKISINDASMLREMAWKRDNRLREAYLSSRGMEERELIDSFLKMALPGTSSGLHIVHIAAEMAPVAKVGGLADVISGLGKALQKKGHLVEIILPKYDCMQHNQINNLKVLDVVVKSYFEGNMFANKIWTGTVEGLPVYFIEPQHPGKFFWRAQYYGEHDDFKRFSYFSRVALELLYQSGKKVDIIHCHDWQTAFVAPLYWDVYANLGFNSARICFTCHNFEYQGIAPAQDLAYCGLDVDHLDRPDRMRDNSHGRINVVKGAVVYSNIVTTVSPTYAQEVRSEGGRGLQDTLKVHSKKFVGILNGIDTDTWNPSTDRFLKVQYSANDLYGKSANKAALRKQLKLASTQASQPLVGCITRLVPQKGVHLIRHAIYKITELGGQFVLLGSSPVQHIQREFEGIADQFQNNNNVRLLLKYDDALAHMIFAASDMFIVPSMFEPCGLTQMVAMRYGSVPVVRRTGGLNDSVFDLDDETIPMEVRNGFTFLKADEQDFGNALERAFNYYHRKPEVWKQLVQKDMKIDFSWDTSVSQYEEIYQKTATRARAAA

SEQ ID NO: 62451 - protein, 109 aa, Zea Mays
MQPPPPVQPPPSPLLSRSAPPVRPPPAPPPLACYCSLVVRPPCPALPLSARRPVPLSACCCSLVVALLSRTPTAPLFLACCCFSSCSNKQLCVCSCSCCSLAEELLRPS

SEQ ID NO: 62452 - protein, 224 aa, Zea Mays
MARGGGDRSREDDPFSDGGTTETDSDESSPRGVGARGPGSTSNPILTRLAVSRNSSPLAAATAAPGVCLLRFAWESAAGSLVGAVVGYGKGLVMMKGIKGSFADAASSAKIFAVLAGVQSLVACSLRKLRGKDDGVAGCCTGLALSFPGAPQTLIQSCLTFGTFSYIIEKLNKQQPALALLPATGVMDPKAGQSVLPSFTLPPLDTMDEFSKFQNFLSSKFRGN

SEQ ID NO: 62453 - protein, 521 aa, Zea Mays
MSYLCAGSSSFDDPDVVEVSSATAAAAGWASGHHKRKRSQVVPQEVIEIDDDDPDGVIIIGDKAPLDKNKQTVVCPMDWPKHAKSGWVQDIAGPSTYASKYIDSCVDLKVFQDEAVYNYSDDCPYAGFEDYMYDEDEFEVDGYDALLIESEFKFGLSAKFDNLHAPPVLEVSLPWMQKTAIDIANKTKPTKVVDDKIEEKYKAFKRFDTVDDHSDHYYSKPTSRKVQVVKKPSKDWVKRIQHEWKVLERDLPDTIFVRAYEDRMDLLRGVIMGPAGTPYHDGLFFFDIYFPPRYPNVPPMVNYRAGGLRLNPNLYDCGKVCLSLLNTWDGSGCEKWNPANSTMLQVLVSIQALVLNAKPFFNEPGYAMHANTAHGEKKSLAYNEDTFLLSCRTMLYSLRNPPKVLGKVGLVLMNQFVSKNFEDFVAGHFRQHGRNILVACRAYLDGAQVGCLSGDGVQDVDEGDTSCSVRFKQSLKKLVEELLTEFTVKGADCGKFLTEEKAKRSSGACSTWTADTTLRLT

SEQ ID NO: 62454 - protein, 771 aa, Zea Mays
MKAILDIILSWKARRNMSLVVKLRYILKLLSAASWVVILPVTYAYTWKNPTGLARAIKSWLGDGQNQPSLYILAVVIYLAPNLLSATLFLFPVIRRALERSNLKVVTFIMWWSQPRLFVGRGMHEGAFSLFKYTMFWVLLLATKLVVSFYVEIKPLVQPTKDIMKEPIRTFKWHEFFPHANNNIGVVIALWAPIILVYFMDTQIWYAIFSTLIGGVYGACRRLGEIRTLGMLRSRFESLPKAFNQCLIPSDTSKRRGFRAAFSKPSKTSEDTREQEKIAARFAQIWNLIITSFREEDLIDDREKDLLLVPYCKDRDMDIIQWPPFLLASKIPIALDMAADSGGKDRDLKKRMKSDPYFTYAIKECYASFKNIIYELVIDSRERGYIQKIFDAVDEHIAEETLIKELNMSNLPTLSKKFIELLDLLESNNKEDHDQIIILFQDMLEVVTRDIMVDQLSELLELIHGANNKRSEGMTSLDQQDQLFTKAIDFPVKKTQAWNEKIKRLRLLLTVKESAMDVPTNLDARRRISFFANSLFMSMPDAPKVRQMLPFSVLTPYYKEDVLFSSQALAEQNEDGVSILFYLQKIYPDEWKNFLERVHCESEDQLHETEHSEEQLRLWASYRGQTLTRTVRGMMYYRQALVLQASLDMARDDDLMEGFRAADLLSESDESPLLTQCKAIADMKFTYVVSCQQYGIQKRSGDPHAQDILRLMTTYPSLRVAYIDEVEEPSKDKNKKIEKVYYSALVKAAVTKPDDPGQKLDQVHNSCQSCG

SEQ ID NO: 62455 - protein, 722 aa, Zea Mays
MRIKEVDVGVVAIFDGHNGAEASEMASKLFLDYFLLHVYFLLDGIHSLRFRKSTGKLTYREVTIFNNVFNLYKHGQSDHAERSCWASPAILDRSFHTEILKESLMRAVHDIDLTFSKEALQNNFESGSTATVVLIADGQIISANVGDSKAFLCSEGYNLHHRNRKRRRKRNSINHEEFALANYDGPLYHARELTKDHHPNREDERNRVEAAGGYVLEWAGVYRVNGELALSRAIGDVPYKRYGVISTPELTGWQILSENDSFLIASSDGIFEKMTMQDVCDLMLHAKIRVKHDFGSSAITQRNLADYVVHVALQKGTTDNVAAVVVPLGSPGSTGTTLKDSSQFEEDLKISISPMLNVPYGLKPDHGHSSAVIDMEYFKRSSIKFQRFLVEAKPKKLGCFYLSESLDEDMDYIFRVPEAYQREEVHDFNHIPAETALYSDGNLEKYKDKHFCLYLGPEDGEMGQCNGPEAFANFFGLLDSLPHNGSKPNGSHSFGNTIDFRYKLKRRFDRGSYGEVWLAFHWNCSEDTDVHKEPPHFTNISQSEMYNCTSSGRMSSDEDHGSGTVNGDLFILKRIMVERGNAAYLSGLREKYFGELFSNASRTLEGLSRIESSTISVDMLYDPDIHLEKNLSATEEPLKHVARFIESFESESREIWLVYHNEGHSLSKLIYTAEETKLVTGNNNERVRHIQVLHPSKWWHWLRTTKAGLKQMQNLLWQLASD

SEQ ID NO: 62456 - protein, 127 aa, Zea Mays
MTAETGTYRWMAPEVINHKPYDHRADIFSFAVVLWELVTSKIPYRNLTPLQAALGVRQGMRLEIPSWVNPQLSKLIQRCWDENPNLRPSFSEITAELEGMLRDHQASKGSNKHSKAKAHKKSQREAE

SEQ ID NO: 62457 - protein, 481 aa, Zea Mays
MAAAPTADAMDVDAPARTLTTSPATKLRSPHDLLAETRASIEKVAARILAIKKDGAPKSELRELVTQMSLHLVTLRQVNREILMEEDKVKAETEAAKAPVDSTTLQLHNLLYEKNHYVKAIRACLDFQTKYPGIELVPEEEFQRSAPADILEKTLAADASHDLMLKRLNFELVQRKELCKLHEKLGQQRGSLLETIANQKKFLSSLPSHLKSLKKASLPVQQQLGMQHTKKLKQHHAAELLPTPLYIAYTQLLGQKEAFGENIEVEIAGSTKDAQIFAQQQAKKENTGTLSSGDNRMDDDVIDDEEDAQRRRSRSKKNVVKEANNPAVAYQLHPLKIILHVYDTEDSGSKRRKLITLRFEYLAKLNVVCVGIEDSEGLDSNILSNLFPDDTGLDLPHQMAKIYVGEVPNFSDKDSRPYKWAQHLGGIDFLPEVPPSVGDDSSRALNTADLSSGLALYRQQNRAQTILQRIRLRKVAQMALM

SEQ ID NO: 62458 - protein, 245 aa, Zea Mays
MPLRPVHGFASLLVIFACHCHGGGSEQGADVAAERLERDVTSPLATVPVVDPTAAAAATTTQSPATGGSWCVASPSASATALRVALDYACGQGGADCSAIQQGGSCFSPDTVRDHASYAFNSYYQKNPVQTSCDFGGTAALTTADPSTSTCQYPSTSTGASVLNTSTPLTPTNGSPPGPGYGSSPPAGYANSPPLYGNMSPPDYGDNISAAARALPGRKTTATAAVASLATTCLLTAALSLTVSG

SEQ ID NO: 62459 - protein, 422 aa, Zea Mays
MMGRKAPLGCATTLLLLLAAAVAPAELSVLGLGGGAAAASGAVTRADFPAGFVFGVGSSAYQVEGAVAEDGRKPSIWDTFTHEGYSLDNATGDVTADQYHKYKDDVKLLHEMGVDAYRMSIAWPRLIPDGRGAVNPKGLEYYNNLIDELLSYGIQPHVTIYHFDFPQALQDEYSGLISPRFIEDFTAYADVCFSNFGDRVKYWSTVNEPNVETIGGYDQGILPPRRCSFPFGFGCEEGNSTTEPYVAAHHLLLAHASAVSLYRDRYQAAQGGRIGLTLLGWWYEPGTQTPDDVAAAARMNDFHIGWFMHPMVFGDYPPVMRRNVGSRLPTFTDEEAARVRGSFDFVGFNHYIVVYVKADLGRLDDQVRDYMGDAAVNAVSQVTQPVPVRRLDERLHDVHPLGSQENAEASPGDIQEPCSHDP

SEQ ID NO: 62460 - protein, 83 aa, Zea Mays
MGFGKPRQHCKIARGKAFVNNQIEGASVITHRAQGTTIRGSGVLQVFKIQGQPGRFFLGACTQKHCLSVGRTCIYQVDSIFGE

SEQ ID NO: 62461 - protein, 317 aa, Zea Mays
MWVTSMPQVWDEEGAAKGGAVTPAPAAAMLGSLAGWLSRTVQPQPPAPRVCGTAGGPPVTAPRLRLRDGRHLAYCESGVPRDQARFAVVFSHGFTGSREDSVRASQEVAEELGVYMVGFDRAGYGQSDPNPNRSVKSAALDVEELADALGLGPKFYVIGISLGCHAVWGALKYIPDRVLAGAGGGGVREAGGGRPVGAARVAPRAGHPPLVDGAELAAHLHGGGRHHAAAQRARRRDPEQDEGGRHVPAEAGAGDAAGDPRVLLPRHDRHVRQVGVRPHGAAGAAVPRAPLAGRRGRPRPCRAAEVPRRQDRMDQLP

SEQ ID NO: 62462 - protein, 253 aa, Zea Mays
MEKLAADRKDQVFDNKFCQKLAEEFNRSVGRAGSKALQATQVQGWFLNKFPASATKPTCVPTASQEKTSASEINVSVSEKRSAASEEKLFPLDTGVSNNEDEVSPVFPLETKDMIPELEDLEFEAKSTKDFAWYDIALFLAHRRNRAGEVEVRVRFEGFGADEDEWVNVKKFIRQRSIPLESSQCKSVVEGDLVLCFREGNEEALHFDAHVLEVQRKQHDIRGCRCVFLVEYDHDQSQERVSLRRLSRRPKYF

SEQ ID NO: 62463 - protein, 146 aa, Zea Mays
MTGAGEALRTGRKRGWAADVRGRGERWDGELWRAACGGARVAQVSSWWGRVVAVAATSGGGTDDARGSMWGADDEKGAQMWILIGCADGRGSMRGAEDGGDRCNITFLTLQQDYDEDGTLSLSEFSDLMKAFGNKLAVAKIQIVMA

SEQ ID NO: 62464 - protein, 346 aa, Zea Mays
MESRNVVVCDNGTGYVKCGFAGENFPTSVFPCVVGRPLLRYEESLQEQELTDIVVGAACADLRHQLDVSYPVTNGIVQNWDDMGHIWDHAFYSELKVDPSECKILLTDPPLNPVKNREKMVPVVDGYSYPHLTKRMNVAGRHITSYLVDLLSRRGYAMNKSADFETVREIKEKLCYISYDYKREYQLGLETTILVKSYTLPDGRVIKVGTERFQAPEALFTPELIDVEGDGMADMAFRCIQEMDIDNRMTLYQHIVLSGGSTMYPGLPSRLEKEILDRYLDVVLKGNKDGLKKLRLRIEDPPRRKHMVYLGGAVLAGIMKDAPEFWITRQEYQEEGVACLRKCGQS

SEQ ID NO: 62465 - protein, 426 aa, Zea Mays
MLFVIIAGSYIGFQTGWVGYKVAGGFFPYGANGMLAGSATVFFAYIGFDSVASTAEEVKNPQRDLPLGIGTALSICCSLYMLVSVVIVGLVPYFAMDPDTPISSAFAKHGMHWAMYLVTTGAVLALCSTLMGSILPQPRILMAMARDGLLPSFFSDVHKTTQVPVKSTVVTGICAAALAFFMDVSQLAGMVSVGTLLAFTIVAVSILILRYVPPDEVPLPSSLQASFRLSQENDEEKLRGTLGDDDHEQGSAEISDVVVEPITDPLIEKQLYASNLSEAKRRKTAACSITSVCIGVLILTTSASATFLPFPVRCSVCVLGGMLLLAGLGMLCWIDQDDGRHSFGHSGGFICPFVPLLPVMCILINTYLLINLGGGTWMRVGVWLVMGVFVYIFYGRTHSSLTDVVYVPVAEANEIYGSSSSLGFVA

SEQ ID NO: 62466 - protein, 397 aa, Zea Mays
MLPLSKPASGFRPPSSSAPQPPHPMESSLLLSTPRPLKPFHPHHFPTARRRDASFRGKPPPPPPLPPLGRGSRRLGRAVPRASSEAFGDGFRSQDRPPGVSSGGVRRRTYREAQGEAAVPPVAAAARAVAPYVAPVGAVLMLSFVIWKVVQNMIPGKKKDHGSGKHAPSGIMWSFAAGSNLATSTLSAEKESRKNLNKFYKELRTLKTVNMAGRQFGDEGLFFLAESLAYDKSAEEVDFSGNGITAVGIEAFDGVLQINTTLKTLNLSGNDIGDEGAKCLSDILVENVGIQKLLLNSINIGDEGAKALSNMLKKNKSIRILQFSNNAIEYSGFASIAEALLENNTIRSLYLNGNYGGPLGACSLAQGILGNKSLRVLLKTLGYILPVFHIVLMFFFL

SEQ ID NO: 62467 - protein, 687 aa, Zea Mays
MDFGDEPEGSDSQRQRKRYHRHTPRQIQQLEAMFKECPHPDENQRAALSRELGLEPRQIKFWFQNRRTQMKAQHERADNCFLRAENDKIRCENITMREALKNVICPSCGGPPVDEDFFDEQKLRMENARLKEELDRVSSITSKYLGRPFTQMPPVPTMSVSSLDLSVGGMGSLGGPSLDLDLLSGCSSGLPYQVPAPVTEMERPMMVDMAARAMDELIRLAQAGEQIWVKGVPGDAREVLDVGTYDSLFAKPGAAFRPPDINVEASRDSGLVFMSAVALVDVFMDTNKWMEFFPGIVSKAQTVDVLVNGLGGRSESLIMMYEELHIMTPVVPTRELSFLRYCKQIEQGLWAVADVSLEGQRDAHYGVPSRSRRMPSGCLIADMSNGYSKVTWVEHMEIEQMLPINVLYRNLVLSGAAFGAHRWLAALQRACERFASVATLGVPHHDVAGVTPEGKRSMTKLSQRMVSSFCASLSSSPLQRWTLLSGTTDVSVRVSTHRSTDSGQPNGVVLSAATSIWLPVPGDHVFAFVRDENARSQWDVLSHGNQVQEVSRIPNGSNPGNCISLLRGLNANQNSMLILQESCTDASGALVVYSPIDIPAANVVMSGEDPSGIPLLPSGFAILPGSGAGASSSAVVPPPGCVVTVAFQILVSNLPSSRLNAESVATVNSLIGTTVQQIKAALNCAGH

SEQ ID NO: 62468 - protein, 72 aa, Zea Mays
MSETRRRHREFVNRSSLRPRLVVGNLHRCMSHGPGASSCGLGGRRQCNCLPEFSDASSPHGSMGSVFRCSIP

SEQ ID NO: 62469 - protein, 289 aa, Zea Mays
MIRAAGREADGKLFVWGRNSGGQLGLGKGKVVSTPTKVDCLTDLRVKTVALGSEHSIAVTEEGEVLSWGAAGSGRLGHGRQSSILGFSLTSTEYTPRLIKNFDGIKIAAGMLHSACIDEKGTLFIFGQKTEKGFGRPNEEFRPNIVEEIPFSEEVACGGYHTCVVTDSGDLYSWGSNENGCLGLGGTDMVRSPEILKSSLFKLPVSKVSCGWKHTAVVSGDDIYTWGWGGANGTFFEEGHSSGGQLGHGNDVDYFEPMMVPFGTNARAVHVSCGFNHTGAIYECSEDFD

SEQ ID NO: 62470 - protein, 404 aa, Zea Mays
MDAPDSGGGGSADAGEPIWDWGNLLDFVVQDDDSLILPWDDAAGIAASDPTEAATALLPASPPLPQSVEEEPEPEPEPGPVLPPPPLRVQGIGRRVRKRDPRLVCPNYLAGIVPCACPEVDEMVAAAEVEDVATEFLAGARKKTKTAGRRGKAEAAGTAGGTVRAAVAEMKCQVPGCEADIRELKGYHRRHRVCLRCAHAATVMLDGVQKRYCQQCGKFHVLLDFDEDKRSCRRKLERHNKRRRRKPDSKGTLDKEIDEPLDMPADVSGSDELREENMEGITSEILETVLSNKVMDRETPVGSEDVLSSPTCTQPCLQNDQSKSVVTFAASVEACIGAKQESIKLANSPMHDTKSAYSSSGASHSSCMIGILQNFLDDYDTRSSNGWVACLLNWRATFVRVVLF

SEQ ID NO: 62471 - protein, 133 aa, Zea Mays
MAGAQCAPCMSSNSINKGCDWYVGTGGRTMRHELVPCSLFLVDDFPSGEVAWALGQGQILMLLGFHFRGDAQDSKKANRIRPVHQSETISCNGNGIWLFISPSDGQSTIMYAYRCICLHLHEGLCSADTLWWQ

SEQ ID NO: 62472 - protein, 437 aa, Zea Mays
MLVAYCAVSCRVVIDNDSCGNATVIRVDRVNKHGILLEAVQVLVDLNLVITKAYISSDGNWFMHVFNVTDQDGSKLHNREVIDHIQKCLESDGYLVPPANGYALPEDQFTSIELTGADRPGLLSEVCAVLATLSCNIVKAEVWTHDGRTAAVIQVTDEATGRAVHDAGRLSRVQELLRDVMRGDGTCNRGGTGISAERRLHTLMLDSVGGGGAEEAGGGRDESGGCGVARPKVVVMDCAERRYTVVILRCRDRPKLLFDTLCALADLQYVVFHGTVDAEGASKDKEAYQEYYIRHVDGHPVRSDAERARLVRCLEAAVERRASNGLELEVWTEDRVGLLSEITRVFRENSLSIIRAAITTRDGKAEDTFYVSDAYGNPVDGRTMDAVGEQLGHAVLRVKRGGHDAPVKHEAEGGAVSVLGSLLKSSFQGLRLIRSYS

SEQ ID NO: 62473 - protein, 260 aa, Zea Mays
MLDLGFEPEVRAILSQTSSVRQMVMFSATWPLAVHKLAQEFMDPNPIKVVIGSEDLAANHDVMQIVEVLDDRTRDSRLLALLDKYHQAQSNRVLVFVLYKKEAARVETMLQRRGWKAVSVHGDKAQHDRTKALSLFKEGKCPLMIATDVASRGLDIPDVEVVINYSYPLTTEDYVHRIGRTGRAGKKGVAHTFFTQANKALAGELVNVLREADQVVPPALMKFGTHVKKKESKIYGSHFKELTADAPKSTKITFGDSDED

SEQ ID NO: 62474 - protein, 364 aa, Zea Mays
MTHVGDHVLVLVCLGRKFSEPGPTTLWQYVISLLLFLLTMFSCIELGIASKVCLSYSSSIVCYFILIHISLLMRISFMQISSLPPEIVSYFTDPNATGPPPDMQLLLPFVESALPVAYGVLSIQLFHEIGHFLAAFPKNVKLGIPFFIPNFTLGTFGAITQFKSILPDRKTMFDISMAGPVAGAALSFSMFFVGLLLSSNPVGASDLVEVPSQLFQGSLLLGLISRATLGYRAMHAATVSIHPLVIAGWCGLTTSAFNMLPVGCLDGGRALQGAFGKDALFGFGLTTYSLLGLGVLGGPLSLPWGLYVLICQRTPEKPCLNDVSDVGSWRRAALIASVFLVVLTLIPLWDELAEELGVGLVSSF

SEQ ID NO: 62475 - protein, 207 aa, Zea Mays
MWRGTRMYSLLGVLLLLALAYLNWHPGHGPSAGGPGGFKLPMPWLQPRMSFVGRAGTHFVDTLTGAPIYINGWNSYWLLSARSPSLSVEMLRRGRRMGLTICRTWAFSDGGPGALQISPGRFSEPVFQSWIEEMAAYIKSLDRKHLITVGTEGFYGPGRGERLGVNPGDWAASVCSDFIQNSAVKDIDFASVHAYPDSWSVSLHFHY

SEQ ID NO: 62476 - protein, 366 aa, Zea Mays
MYQWRKFEFFEEKSAGRGGGGGSAAAVPAEIAGRVTCCSGGRGRVAVGCDDGTVGLLDRGFRLSYGFQAYASSVLFLQQLKQRNVLVTVGDDDQSSSQASAICLKVFDLDKVQEEGSSTTTPFCVQILRIFTDQFPQAKITSFMVLEEAPPILMIAIGLDNGFIYCIKGDIARERITRFKLQVEAASDGSTSLPITGLGFRVEGQAHQLFSVTPGSVTLFSLHIQPPRRQTLDQIGCQTNAVAMSDRMAETELMKREIQDLKTNAKVFQLSKCSACTFTLDLPAVHFLCMHSFHLRCLGDNEKECPECAPEYRSVMEAKQKLEQNARDHDLFFRQLRGSKDGFSVIADYFSKGIVSKTTLPPENGR

SEQ ID NO: 62477 - protein, 137 aa, Zea Mays
MDNLSPATLLNSISCLGALTSDVSTARPKPIHKYCKNVYDISSIVTPLLEDLCKSPEEQLDEVLRDLDTAVNEASGLIGNWHQTTSKMYFGWRIESVISDIQGCSLQLCQLVNSLLPSLTARACMCIEKDTLAAGHP

SEQ ID NO: 62478 - protein, 411 aa, Zea Mays
MNSPCYPLPDMSHVNGKNRKELLAMAKVQGESKKGTSLLPGELTPKAESPFSPSRVKVEDALGEGLAGRSPSHIAVGANKKASNVGHIKDGSNVSKVEDGHVDRSVGVKKPRYSADEGPSLTELSGYNAKRHEFDPEYDNDAEQALAEMEFKETDSETDRELKLRVLRIYLSRLDERKRRKEFILERNLLFPNPLEKDLTNEDREVYHRYKVFMRFLSKEEHEALVRSVIEERKIRRRIQELQECRSAGCRTLAEAKIHIEQKRKKEYELNAQKAKESNHLIANTKLVQKMNRPMKIESDGNLDPKKGGVGLDSPKTTGLTSVKQWDDWDIVGLPGAELLSASEKLLCCQNRLLPSHYLRMQEVLMQEIFKGSVLKKEDAHVLFKVDPTKVDSVYDMVTKKLGNHVELPTV

SEQ ID NO: 62479 - protein, 169 aa, Zea Mays
MEAGLRALGHRYFGGGGGGLGGFAAARATRLRRQRQRRMAAFCSLAVNGDGNGAAGGPVGSGVEVARARRMLHVVLVSPLIPGNTGSIARTCAASAVGLHLVGPLGYKVDDTKLKRAGLDYWPYVVVKIHDSWDHFCDYFMKQEGDKRLLAFTKRGTHIHSVSSRCFFK

SEQ ID NO: 62480 - protein, 620 aa, Zea Mays
MQSMESLAQLEVLCEKLYNSRDSAERAHAESTLKCFSENSEYISQCQYILDNASTPYALMLASSSLLKQVSDRSLSLMLRLDIRNYVINYLGTRGPKLQNFVIVSLIQLVCRITKFGWFDDDRFRETVKEATDFLGLASQDHYFIGLKILNNLVTEMNQPNPAMPLTLHRKIAGSFKDQFLLQIFQISLTSLNQLKSEAPDDFGHIPLDLALKCLSFDFVGSPVDESSEEFGTVQLPASWRPLLQDPSTLQIFFDYYKVNDIRVSKEALECLVRLASVRRSIFVEDPARSQFLSHLMLGTKEILLTGQGLADHDNYHEFCRLLGRFKVNYQLAELLNVEFYGEWIGLVAEFTTRSLLSWQWASNSVYYLLSLWSRLVTSVPYLKGETPSLLDETVPKITEGFITSRINSVQAILADNSLENPLDSVEVLQDQLEFLPFLCRFQYQSSSLYIINIMEPLLQAYTERSRLPAPGDADELSVIEGQIAWMVHIIAAIVKVRQVTGVSQETQELIDAELSARVLQLISVTDTGAHTQRYQELSKQRLDRAILIFVQSFRRSYVGDQAMHSSKLYGRLSELLGLNDHLILLNVIVGKIATNMKCYAESEDVIDHTLSLFLDLATG

SEQ ID NO: 62481 - protein, 86 aa, Zea Mays
MLILDGFYQNNSYRSGLKSWGVWQSATDFGGRKLKKAQTNRATVWKSVALWTVVRKKNSQQINVQGQKVLQNQAQKHPGRKLEGTS

SEQ ID NO: 62482 - protein, 72 aa, Zea Mays
MHALICQVSKLIIKRSRNNEAPVVRKLEKKNQNTNPTARTDLVAWMDPVLCLLVQRRRRFWRLRLLRARRRR

SEQ ID NO: 62483 - protein, 193 aa, Zea Mays
MPDPTTKLPSPRPRRRRRLFSLCLGTALLALIVSALVHVVAQPPGPAPASARFSVIIDGGSTGTRAHVFAAGPDGRPDLARSTVMRVSPGLSSFAADPARAGESLKPLLDFARDKIGGAVREAEVRLMATAGLRLLEERAQEAILASCRDVLRASGFRFEDAWAKARMKVSMLGLRQIMLLEDLEGILTKPLE

SEQ ID NO: 62484 - protein, 992 aa, Zea Mays
MFYMVLKTNVSILQVSLYMDKFAGVCQAVLHDCKLTFLQIICDHDLFVEMPGRDPSDRNYLSSVLIQEIFLTLDHDDLSQRAKAARILVVLICKHEFDARYQKSEDKLYIAQLYFSLIGQILDEMPVFYNLNAIEKREVLVVILQIVRNLDDATLIKAWQQSIARTRLFFKLLEECITHFEHNKTGGSMLLGASSRSPDVERPAPPKYSERLSPSVNAYLSEASRHEIRLNILDGGMPQGTPENGYMWNRVSPQLSSPNQPYSLREALAQAQSSRIGSTARALRESLHPVLRQKLELWEENLSTAVSLEVLRITEKFSAAAGTRSITTDYAKLDCVTSIVMGLLSRSQPLAFWKAFLPVVYNIFNLHGATLMARENDRFLKQIAFHLLRLAVFRNDSIRKRAVVGLQILVRNAFNYFKNTTRLRVMLTITLSELLSDVQVTQMKSDGSLEESGEARRLRKSLEEMADVRSKDLLKDCGLPVTALEAAPDGSSDNMWSWAEVKHLSKCLVQALDAGLEHALLDSVVTVDRYAAAEGFYKLAMAYAPVPDLHIMWLQHLCDAHQEMQSWAEAAQCAVAAAGVIMQALVGRNDAVWSKEHVTSLHKICPIVNTDVSAEASAAEVEGYGASKLTVDSAVKYLQLANKLFTQAELYHFCASIQELIIPVYKSRRAYGQLAKCHTSLTNIYESILEQEASPIPFIDATYYRVGFYGERFGKLNKKEYVFREPRDVRLGDIMEKLSHIYEVKMDGSHTLHIIPDSRQVNADELQPGVCYLQITAVDPVMEDEDLGSRRERIFSLSTGTVRARVFDRFLFDTPFTKNGKTQGGLEDQWKRRTVLQTEGSFPALVNRLPVTKSESLEFSPVENAIGMIETRTAALRNELEEPRSSEGDQLPRLQSLQRILQGSVAVQVNSGVLSVCTAFLSGEPATRLRSQELQQLIAALLEFMAVCKRAIRVHFRLIGEEDQEFHTQLVNGFQSLTAELSHYIPAILSEL

SEQ ID NO: 62485 - protein, 378 aa, Zea Mays
MAALERLVDNYMLTCEEESELLSSLQFGEEDGWLSSFYSCLITKHEKEYLVEAKFKKLEEEACNILSSSSGETMKNNIDVLVCKAEYYHQSGEYQKCFKLTSSLLERDPFHLKCTLVHLATAMELGHSNDLYLLACNLVKDYPEKALSWFAVGCYYYCIKKYDQARRYFGKATGLDGTFPPAWIGTGIAYAAQEEGDQAMAAFRTAARLFPGCHLPTLYMGMQYVRMHNFKLAEQFFTQAKSICPSDPLIYNELGVVAYNMKEYRKAVQLFELTLDHTSSSLNEMWEPTLVNLGHALRKLKEYQKAVSCYEKALTFPTKSLSAFAGLAYSYHLMDNFEAAINYYHKALWLKPDDQFCTEMLTYALESICQSTARRRPS

SEQ ID NO: 62486 - protein, 607 aa, Zea Mays
MTCLTLLHILHLLISHQKMGSQAVKPLRVFLLMMRVWRRHLICQRGQQPFLTCIRAVGACPLVFAWRWAVDLNSFACQSLKYNHPQTEVRNEKADEFLALLKEWAVLCEKYVHQDVDSNLAGSEDQEDADTLDKDEFVVQKLIGIRYDGTGRKKGVYFKVQWEGYGPEEDTWEPIDNLSDCPLKIREFVQEGRKRKILPLPGDVDVICGGPPCQGISGFNRFRNRDEPLKDEKNKQMVTFMDIVAYLKPKYVLMENVVDILKFADGYLGKYALSCLVAMKYQARLGMMVAGCYGLPQFRMRVFLWGALSSMVLPKYPLPTYDVVVRGGAPNAFSQCMVAYDETQRPSLKKALLLGDAFSDLPKVENHQPNDVMEYGGSPKTEFQRYIRLGRKDMLDWSFGEEAGPDEGKLLDHQPLRLNNDDYERVKQIPVKKGANFRDLKGVKVGANNVVEWDPEVERVYLSSGKPLVPDYAMSFIKGKSLKPFGRLWWDETVPTVVTRAEPHNQVILHPTQARVLTIRENARLQGFPDYYRLFGPIKEKYIQVGNAVAVPVARALGYCLGQAYLGESDGSQPLYQLPASFTSVGRTAVQANAVSVGTPAGEVVEQ

SEQ ID NO: 62487 - protein, 251 aa, Zea Mays
MGDSFYEYLLKVWIQGNKTEHVKHYRQMWETSMEGLLSLTKKTTPSNYYYICEKNGGSLSDKMDELACFAPGMLALGASGYGPEKSEQIMNMAKELARTCYNFYQTTPTKLAGENYFFHAGQDMSVGTSWNILRPETVESLMYLWRLTGNTTYQDWGWDIFQAFEKNSRVESGYVGLRDVNTGEKDNMMQSFFLAETLKYLYLLFSPPSVISFDEWVFNTEAHPLRIAPVNYNKSIGTPVRPFGRKQGKPE

SEQ ID NO: 62488 - protein, 323 aa, Zea Mays
MEDEISSIIAYALAISDERHHLIDLKFENGMDYSKGEYAKAIEKSFSFLSESSFSSSPWSSTSSEASLSSLSSFSSDDFSGYDSSSLLSPMHPEMTVNGKVTLKDKYSVTVVYDNQFFALRKKCCPSELAYITSLSRCKKWNAQGGKSKAYFVKTTDDRFIIKQINKTEFESFIKFAPDYFKHVYHSLDTGSQTCLAKILGIYQVKQIKHGKEVKIDLMVMENLLFGHNISRIYDLKGAIFSRRITDSNDHDTVYLDQNYVEDMSFSPIYIGGRTKHLLQRAIWNDTSFLTSVNVMDYSLLVGVDKEKHELVFGIIDYLRQYT

SEQ ID NO: 62489 - protein, 1042 aa, Zea Mays
MSVAVGKRVLDTGWLAARSTEVALTGVQLTTTHPPAADPAPAAPWMSAAVPGTVLGTLLKNKLIPDPFYGLNNQAIIDIADAGREYYTFWFFTTFQCALSGNQHATLNFRGINYSAEMYLNGHKEVLPKGMFRRHNIDITDILHPDGNNLLAVLVHPPDHPGKIPPQGGQGGDHEIGKDVATQYVEGWDWMCPIRDRNTGIWDEVSISISGPVNITDPHLVSTFHDDFKRSYLHCTLQLENKSSWIADCTLKIQVSTELEGNICLVEHLQSYAITVPPQSDIEYTIPSLFFYKPNLWWPNGMGKQSLYNIEISVDVKGFGESDSWSHYFGFRKIESTIDDSTGGRIFKVNGEPIFIRGGNWILSDGLLRLTKKRYMTDIKFHADMNFNMLRCWGGGLAERPDFYHFCDVYGLMGWWRGRNTDILIVDEGALELRMMEFLEKLTQPGCFGNTISDGAILHLSTRVGDDVLTLGGPGYKVWQEFWITGDVDGRGIPVSNPNGPLDHDLFLLCARDTVKLLRNHASLALWVGGNEQVPPVDINKALKNDLKLHPMFVSYQTSKSEVIYLSEESTDPSKYLDGTRVYVQGSMWDGFANGKGDFTDGPYEIQYPESFFKDSFYKYGFNPEVGSVGVPVAATIRATMPPVGWSIPILKKRIDGYIEEVPNPIWDYHKYIPYSKPGKVHDQIELYGAPKDLDDFCEKAQLVNYVQYRALLEGWTSFMWTKFTGVLIWKTQNPWTGLRGQFYDHLQDQTAGFYGCRCAAQPIHVQLNLVTYFVEVVNTTADELKDMAVEISVWDLDGACPYYKVTEKIVIPPKKVKQIIEMKYPKMKDAKPVYFLLLKLFRLSDNGTISRNFYWLHLPGQDYKSLEQYQQKKIPLKIDSDVSVSGTRHKVRMTVENISKKSVVDSTRSVSAMDLGDASGSHSTRKETTRKGNGSDGLWRKIRSGLGVARPSDNRRTLEVSGTDSGVAFFLHFSVHTSESSTDGEEYNDTRILPVHYSDNYFSLTPGENMAVDISFEAPQGSSPRVVLRGWNHHLDHAVMI

SEQ ID NO: 62490 - protein, 75 aa, Zea Mays
MPYAGPGSIEIEGERERVEFCRGRERGRLLPTSLLVSAIVWSPQCGRGCSHESIDRVQGTVGRMVNQSAQNSSPA

SEQ ID NO: 62491 - protein, 434 aa, Zea Mays
MPGKMVQCLKSVGTANPLVLIDEIDKLGKGHSGDPASALLELLDPEQNVNFLDHYLDVPIDLSKVLFVCTANVIETIPNPLLDRMEIIAIAGYITDEKMHIARDYLEKNTRQACGIKPEQIALQLVRQGVSNEPDQESLGVTVNEESNSGDSITAKDEIVKDPAVEDASVANNVTNPASEEANEVNLTTEAPKEDSTSKGNKKTDGVAEDAADKATEKVVVDSSNLGDFVGKPVFQAERIYEQTPVGVVMGLAWTAMGGSTLYIETTKVEEREGKGDLVLTGQLGDVMKESAQIAHTVGRTVLLEKEPDNHFFANSKVHLHVPAGSTPKDGPSAGCTMITSMLSLAMGKPVKKDLAMTGEVTLTGRILPIGGVKEKTIAARRSAIKTLIFPAANKRDFDELASNVKEGLEVHFVDTYSEIYDLAFQSDAGTEMI

SEQ ID NO: 62492 - protein, 287 aa, Zea Mays
MVRMNVLVYATCFADAASSSELSLAYVKLIQQLAVFKGYSAAFCALKLAEKKFPSSTSLHIQLLGMQILHERALHRGHLKVAQQICDEFGVLSSSVSGVDIELKTEFSVRRARTLLAAKQFSQAAAVANSLFSTCYKYNIQSFCKSFNLDLLEASATLTLAELWLDLGSSHAKKALSLVYQSLPMILGHGGLELRARAHVVLAKCHLSDLKFSVLEDPEAVLDPLNQATEDLQALEYHEMAAEAYYLKAMAYNHLGKLDEREEAAARFKDHVTALETPHNEEDSLKY

SEQ ID NO: 62493 - protein, 59 aa, Zea Mays
MVSSSLLMYDPLISLTIFSWFFSSSLSSTSAFRLLRASIIKGYSKLNAKMNERASKNRM

SEQ ID NO: 62494 - protein, 386 aa, Zea Mays
MWETLDICIKVVDKNSLDLLVPRLAQMIRSAVGLNTRVGVASFITLLVQKVMVDIKPFAAVLMKLLHSAVLEERSSAAKKAFASSCATVLKYASPPQAQKLIEDTTSLHSGGKNDQLSGAILIKAYLSNASDILGGYNAVVIPVIFVSRFDDDKDTSALYEELWEDIPSSERVTLTLYLPEIVSLLCDGMSLSSWAGKRKSAKAIKKLCDVLGEPLSAHYQNILKSLLKELPGRFWEGKDAILDALASLCACCHVAITAEDSCLPSVILNCVCAACSRKSKLYREAAFLCLHKVITAFRDPGFFNSVFPMLFEVSNQSAISKTKGSAELDESEGASVSLDKVLNCATSCISVAFPQDIINQKKNVVELILNSLLPEESWQGVVPQI

SEQ ID NO: 62495 - protein, 145 aa, Zea Mays
MQVYYLSSCNEDGSDPEYEKLGWKKLEDYDPSQKRWNCLASLVEGGGLSEDLDDDTDEMTINDYYASLPFAALFSACKAKGLKVSCVLCYCSEGDNMPESFQLAEAICKLLGHGPEKFHGNGSNGWIVPLSWKSVYGPPPDMSIF

SEQ ID NO: 62496 - protein, 815 aa, Zea Mays
MCTLCAVQRWSRRVATMLPWLVVPLIVIWAATQLLLPAAYRFEVTSPRLACVSVLLLTLFWYEILLPRLSLWRARRSARLREERRAHALELHKLRKTATRRCRNCSNPYRDQNPGGGKFMCSYCGHVSKRPVLDLNSAGKAPTGWPCAQDCGYWLDLRCSSGNNSSFLGFSWRLLSSFCSTAMRWLLRNIFRLTSSGDGEGLSIDGKRLAKRGENGGKTEESKTEKARRKAEEKRLARLEREMLEEEERKQREEMAKLVEERRKLRDEKAEAEERSKSATPVGEKDAKREAEKRRQERKKKEDKGSSKSNSDCEDIDRRLVREGDRKRDFDRKSDLDRREGYKPHYFDSNNHSNKTGESRSKYFGRMTGGFLSSSRGFGSSSFFGRSAQAPAPQVSKVSRPVVPATDQGNTVKRDVPHAATQATGKSATAGETRNAWTNFNRPVSNKVSPNVHPYPTGLKKSWHQLFSRSASVSPCPDVTTSAHDMVRKAEPNGAQIYNAHTFLSQYPPLDYKPSSSQSMQFPGFPPLNGAPPSNPLPHFPAGHMPFYDDAESTLLEEPEQFEDPCYDPDAIALLGPVSESLDNFPLDLDCGFFSSDVAKESHGRPSPIESPLSRSRTVEEKPIEPPHSSVARGPGGSILPESSSEQGTWQMWSTPLVQESLGLQGPQSQWLRQNTNQFNHSANLFSSGGGAISPLGTGLNDSDPWLQKAPFQQLPPDTPSLFLSHEMPGKLHNDLVFGSPNKSARERPFGPPGYLWPKEELALNGAQDGGGGHILSPSGGARVGGGVGLFSSASPDVQSLWSFHETFNEKESIE

SEQ ID NO: 62497 - protein, 320 aa, Zea Mays
MEGSKGSGGGGAGAGSEKPSAESNPSLNLPPPTAADVEATDDGGATAAAAAAAEAARRPFTALSQEEADLALARVLQEQERAYMLLRMNGSGGEGSDYGSSDAGSYEYDEEGDDYEEELEHHLRVHHHEHPSGDGDGEGEGEGAEGSDYDEEYEEDEEGEPEVDPAEFENDEAYARALQDAEELEVAARLMALAGLSDWRTVDVEHEEDHVNDPQEAWQEVDPDEYSYEELVALGEVVGTENRGLSADALASLPSVTYKMQSVQDGNTEQCVICRVELEEGESLIALPCKHLYHPECINQWLQINKVLGVGRVEPWSASA

SEQ ID NO: 62498 - protein, 712 aa, Zea Mays
MENYFNDNQTAYVFTADHGMSDKGSHGDGHPSNTDTPLVAWGAGIRSPKFLAYTEKPDDGFRFVDNHKHDTPTPKDWALEGFERVDVNQADIAPLMATLVGLPCPMNSVGSLPTPYLKLRKADEVEAVLANTKQILNQFLRKSQLKESSSLYFKPFKPLANFSLVLSQIEDLISGRDYETAMEQSEELRRLALAGLHYFQTYDWFMLMTTITLGYIGWMVNLIIHVLQSYTSYPVILLKRAQLYPNNTSMKVYICGCFFMGLSSILLLLEKSPLLYHAYVLCTIFLWTRIVQKIDFLKSVWRELANMPFKYIFNLLTSSVVALLVLEFLVMSFFDRKIYTWCFLVLGILGSTYVALFIQASAALAIYIWLACWFLSVFTLMPAEIPENNNLVIFSGGLIILIGLASRWIKSNSSSFWLYLTRANKRDPQSFKLYFVQVILVAISSIMVWLSTSHRSQNRELLSLHQFINWSVAGVAMVLPLFSPPSVLSRLTSIFLGFAPPFLLLSIGYEAVFYSAFAMVLIGWIFVESANLYCSEESGSARRRSLADNSVFGYEERHLRLSDLRIPLLFVILFNVAFFGTGNFASIASFEISSVYRFITVFSPFLMAGLLIFKLFIPFMLVICTFSAITKVVRIPRLGCYFLVILLSDVMTIHFFFLVRNTGSWMEIGNSISHFGIVSAQVVFVLLLFALTNIYTRDILVSSRQLTARKVM

SEQ ID NO: 62499 - protein, 821 aa, Zea Mays
MLTFQLSDQTLHPFDHASFQGTARLSAVRCPPRALRSRAALPAARPRAHWTSFRPAPIDPAAMSSAAVSSSSSTFFLALASASPGGRRRARVGSSPFHTGASLSFAFWAPPSPPRAPRDAALVRAEAEAGGKDAPPERSGDAARLPRARRNAVSKRRDPLQPVGRYGSATGNTARTGAASCQNAALADVEIKSIVAAPPTSIVKFPAPGYRMILPSGDIAPETVLPAPKPLHESPAVNSVPPVSIPNPDTDGIAALAEKKYAQVDGDSNGIAPPTVEPLVQEATWDFKKYIGFDEPDEAKDDSRVGADDAGSFEHYGDNDSGPLAGENVMNVIVVAAECSPWCKTGGLGDVVGALPKALARRGHRVMVVVPRYGDYVEAFDMGIRKYYKAAGQDLEVNYFHAFIDGVDFVFIDAPLFRHRQDDIYGGSRQEIMKRMILFCKVAVEVPWHVPCGGVCYGDGNLVFIANDWHTALLPVYLKAYYRDHGLMQYTRSVLVIHNIAHQGRGPVDEFPYMDLPEHYLQHFELYDPVGGEHANIFAAGLKMADRVVTVSRGYLWELKTVEGGWGLHDIIRSNDWKINGIVNGIDHQEWNPKVDVHLRSDGYTNYSLETLDAGKRQCKAALQRELGLEVRDDVPLLGFIGRLDGQKGVDIIGDAMPWIAGQDVQLVMLGTGRADLERMLQHLEREHPNKVRGWVGFSVPMAHRITAGADVLVMPSRFEPCGLNQLYAMAYGTVPVVHAVGGLRDTVAPFDPFSDAGLGWTFDRAEANKLIEALRHCLDTYRNYEESWKSLQARGMSQDLSWDHAAELYEDVLVKAKYQW

SEQ ID NO: 62500 - protein, 189 aa, Zea Mays
MRMEDAEWFKRLTGRSEVAICSRDYKFYSPRHKIRRSPQAAFDIPDTSALAEDENSSLVCSSGFRSPNEIQNQHQSTSKRPIEHLENQPFLHLFHQAEDDSMQQVQHCAQFPPIHQCTSTPHLSDNPQHQQQAYLSQHISCLQVGQGHLGGRMHIIPTSPAKFCDECGSPYLRATSKFCSECGTKRLGM

SEQ ID NO: 62501 - protein, 174 aa, Zea Mays
MLTENVCNDGAMRKGIQSVKSAMSGGDWTISGNRLDLHDPRILAMAAAQHRLLEDDYDEYTATNNNAAAFCRSIFLILMALLLLRHTLTITNSDDEDDASAIFSLFLLRAAGFLLPCYIMAWAISIMQRQRQRQEEAMLLPTEVAIILHRNGRTMQFAVAPPETPISPHPELNQ

SEQ ID NO: 62502 - protein, 459 aa, Zea Mays
MWKMASNIKEDMQANGVRLNLVTWSSLINAYANSGLVDRAIEILKEMIRDGCQPTAPCFNIILTACVKSCQYDRAFRLFYSWKESGIKISLSSEQKRVIDGGFTFCKEYPNNDSTILVVPFRPTVTTYNILMKACGTNAERAKSTMNEMRRNGLCPDLISWSILIDIYGSSQNRDGAVQALRRMQRVGMRLNVSAYTVAIKACVENKDLKLALHLFEEMKTHQLKPNLVTYKTLLAARINYGSLQEVQQCLAIYQEMRKAGFQANDYYLKELIVEWCEGVLSSRSDNQDFYNLDLQPETERKESFNLFLEKVVTVLQKDTDQNQIVDVRGLSKVEARIVVLSVLRKIKEQYLLGRVVQDDVVIITGHEKTSTTEAETTTSAVDVVQAIVTVLTDDLGLEVLIGPGSCPPVSSKPKAPTKSRSNLEQISKEFTRRPQGMIKIPINSLNHWLRKKAVRIAE

SEQ ID NO: 62503 - protein, 491 aa, Zea Mays
MPGSIHISATQPPVITPLFLQVTVGNREYSGNIEQDALSFPVTSLRESMVIMLYSADGALISKSELKTKEIVESGTMDTVFALDSGGEIVLQIQFLLNDDDRKRIQEMRNSAMKMKQQGLLGDGNELNFSDSALSKRLTEKISNIRSKAAERSELQKSMSLDDLQERAVFPGIDADPRVKASRDSLLQGGVRLEDPGGSKQRLSQAEVEALASPVEGERRRLGLDVASGGGRGVVGEAEQEVSDGAGAVDAISTWPPDRPGPGSKKGDSIPESSKSSSAVKTMISSFEGTTTPQGIVSETDSGSRSTQAGKTAIIPVDDHHKASNHRSQHILVETIAPAQLQTIRTPKAAESRSRRRASKQHNELHPRTRRRSQAKQMQMQMQPRDYVERPLNYLVATSSTWIHPHICVTGATKQLKDLLELEHLNFQRTATKGQQGTRERKSDESIAAAAARARSGGFLMINGWLIVQGVRAAVVLTVCCGAMFFSSSSR

SEQ ID NO: 62504 - protein, 605 aa, Zea Mays
MLATRRIMPGLIGSWTDENSKNPHWRAIGYSPPPADDEPAPAESERPEKRPLDDGIVETNKENDASLPALLAEKGLRVADDAARNVCRVECDVVIVGSGCGGGVAAAVLAAAGHKVVVIEKGNYFTARDYTAIEAPSMEHLYEGGGFVSTLSASALLLAGSTVGGGTAVNWSACIKTPDDVRGEWARDRGLPLFATGEYAAAMDKVFERLGVTAGCAEEGLQNKVLRKGCERLGYKVESVSRNSSEGHYCGSCGYGCRTGDKRGTDSTWLVDAVSRGAVILTGCKAEKLLLEPGSAADGRAKRCVGVVARSTNPAITRTLEVTARVTVSACGSLLTPVLLRGSGLRNRHIGKNLHLHPTALVWGYFPDTVPDLRGRMYEGGIITSLHKVEGGGPGAPARAILEAPAMGLAGAGTQFPWVSGRDMKERMLRYGRTVHLFSMVRDRGSGTVHGERRVAYHLDATDRENMRDGMRRALRVLAAAGAAEIGTHRSDGQRFACGGATEAALEEFLDGVDVVRGPQSKAEAWTLCCTAHQMGSCRMGATARDGAVDARGESWEAGSLYVCDGSVLPGAVGVNPMVTIQSVAYCLATGIAESLRRGPVSRKD

SEQ ID NO: 62505 - protein, 124 aa, Zea Mays
MLNYLLSVTPVGVGEYMLASWLGMMPITLALVYVGTTLKDLSDVTHGWSEISTTRRILIISGFVLSVVLIICVTKIAKSSLEKALAENGELHVGTSQLPGVTSPLDLQQPLVIKIDTSNEDHEK

SEQ ID NO: 62506 - protein, 741 aa, Zea Mays
MARHSPLLLLRRRRGIPTPSSLLVLRHRPFASSPSPPAPSTPSSASSKPPALSARLSFVFDQLDALDRSRSSELSARDAALRRIQSWRRPVPPPEAPPLDADPGPEPEQDGQKEAALASASADEVGMSMKEVLRREVELVHPWREWIELMERLAQQRYFDLGRACGADESSMAAAVPLDLSEVSEEVGLDFSRDWTTVKNACMNFGRDRFDILKSLPRKDLQILVGHGCPSMDAKVVFSAKLIRKHVHLDEGDPPIKVKQPPPPPKKRVGRDDVEMKKGDWLCPKCDFMNFAKNTVCLQCDAKRPKRQLLPGEWECPRCNFLNYRRNMSCFHCEHDRPSDEYANRQMEAKQSALRNRLERPPRKSDISSAWNFDFEDNESDGADVAAFEYADSSKVRRESSSAGSMSYRGVSKGSDDEEYRMAETMTTGRGNKFSERDSLPSSRDGFNDFDDEDDDIDSYELDLSKGSHTGGVSRMSYSDLESASDSEGFSEIDNSRESRYGNSKESRYDNGRESRNDNNRESKYAAKVEDEFEDHHSLRSTHLADSWQKTRGRSGSNDYRRASFGSESDDEINSYPDEDIDKGPRNNGSRSQGSTNRASVRHNALAYSDDEPFSDDVDSGMADRFGPRQTKSSTNIKDNFRDTRRNLNGRRSSGDRYGRTERNERDRYGRTEQRNERDRYGRTERNERFNNFDMHRGGSVLDKGRGARGNQLDSGSRGLQRNARRNWDRSGGFDGRHKGV

SEQ ID NO: 62507 - protein, 470 aa, Zea Mays
MSSSVRHGSSRGQAWFCTTGLPSDVVFEVHDMTFHLHKFPLMSKSLKIHRMLSEQEDQRPTRGRRQRRRQVRSSDGDDDGAAETEIEEEEAEPEQQQVRTEGEGDGQPYCIAFPDFPGGPGTFEAAAKFCYGVRVDLTPWNVAPLRCAAEYLEMTEDHAEDNLAARAEAYLDQAVLRHPGDATKALKSCEELLPLAEDLGIVSRCVEAIAARSSSASRSWFDDLAVLGLRMYKRVMAAMAARGDVRAEARESCLVSYARGTIPGLSRSMRRRLASAPVSSEVEQKELLEAVVASLPADKCSGRVVTAKFLFALLRTAHILRASDAARAALERKAATQLQQAALEDVLIPSYSGTAETLYDVDCVQRIVRYFLAEEELGGEASSSAAIEEEEAVAVARPSAVVMVQVGKLVDNYLAEVASDANLKPAKFCDLALSLPDHARIYDDGVYRAVDIYLKRRSGTGWWAWWTAGS

SEQ ID NO: 62508 - protein, 325 aa, Zea Mays
MLGVWGCIAKLCISHIHACLQILCGHNNEVWFVRFSNNGSYLVSSSSDCTAIIWKVENDDTLTKKHCLQGHEKPISFASWSPNDRMLLTCGTGESLKLWNVDTGECNLKFRGSADCIISSCAWFPNSEKIVCASSEPASAPNRIFTCDLEGQNLEVWAGDRIPKVSDLAVTPDGRHLIFVSCNDIWIRELPRGREWRFREKQTISSLSLSGDGQSLIVNLNSQEIHLWKINESCTVPEKFMGHKQDKFVIRSCFGGSNSSFIASGSEDSQVYIWKRHVEMPIKVLHGHTMIVNCVSWNPARPHMLASASDDRTVRIWVGRKNATK

SEQ ID NO: 62509 - protein, 684 aa, Zea Mays
MRAWEMHPLCCLAGEWPASGGGLAPGDRSPPAEDAGAAPAVAGVLYKWTNIGKGWRPRWFAIRGGVLAYSKIRRRVAAEPRPEAAGGVRLIGVARGAAGAAERPIGFVPLKISSFSESKSDDKRFYIITPTKTLQLRTGCANDRATWIEALVTARSEYSFNGDLSGDQNDASFSTEKLRNRLNAEGVGEAVIKDCEQIIHSEFSQYQTQMKQRCEEYLSFIGTLPQDVEVVNSVDSTVPEKPRLELFKHDCSSSGKCSEYSNTESSDDVGKQEISELSDGDEFHFYDTRQSFSEFASSPADPRKGCLNNGNEDHKSVESLTVDKAEKYMLSHSKRRLQLPEPIEKEKGVSLWSMIKDNVGKDLTRVCLPVYFNEPLSSLQKCFEELEYSYLLDRAYECGLRGNGLMRILYVAAFAVSGYASTDSRPCKPFNPLLGETYEADYPEKGIRFFSEKVSHHPMVMACHCEGKGWKFWGDSNLKSKFWGQSIQLDPNGVLTLEFDDGEIFQWSKVTTTINNLILGRVYCHHHGTMNISGNRRYSCKLTFKEQSFLDRNPRQVQGVVKDAGGSKVATLTGKWDESVHCVINNDASKVNSHGPHQSSGSTLLWEKNEPPVNPTRYNLSAFAITLNELTPELELPPTDSRLRPDQRHLENGEYEKANAEKLRLETQQRMVVHILHCYTFFFS

SEQ ID NO: 62510 - protein, 194 aa, Zea Mays
MSNMLYACSILYKTRLPLVLTFNKVDVAKHEFAIEWMQDFEAFQTAVESDKSYSATYTRSLSLVLDEFYNNLRSVGVSAISGSGVNTFFEAIEASAKEYMETYRADLDKRIAEKERLEEERRKENMEKLQKDMMKSKGQTVVLTTGLKEKNSVSDMMDGADEEEEEEALEDFGFSEDDEDEDEGEDEEVAHFGF

SEQ ID NO: 62511 - protein, 156 aa, Zea Mays
MVGSKSEASGIAKAGAKMVMAVSCAKVPKITIIVGGSFGAGNYGMCGRAYSPNFLFLWPTARISVMGGIQAAGVLAQIEKNNKRRQGVEWSKDEEEAFKAKVVEAYDREGSPYYSTARLWDDGVIDPADTRRVLSLCLSASAKPVPEDTRYGVFRM

SEQ ID NO: 62512 - protein, 144 aa, Zea Mays
MAPGALISAGSSGQFEYVQKLASGGCDNTVKVWKLNNGSWRMDCFPALQMHKDWVRDVAWAPNLGLPKSTIASASQDGTVVIWTAAKEGEQWDGRVLYDFRTPVWRLSWSLTGNILAVSDGNNNVTLWKEAVDGEWQQVTTVEP

SEQ ID NO: 62513 - protein, 406 aa, Zea Mays
MDIDYMDGFRCFTFDSIRFPDPISMVDDLHSIGCKAIWMLDPGIKKEEGYFVYDSGSKSDVWIQKADGSPFVGEVWPGDCVFPDYTSEKTRAWWASLVKDFISIGVDGIWNDMNEPAVFKTTTKTMPESNIHRGDADIGGVQNHSYYHNVYGMLMARSTYKGMEMGNAAKRPFVLTRAGFIGSQRYAATWTGDNLSNWEHLHMSLPMVLQLGLSGQPLSGPDIGGFAGNATPKLFGRWMGVGALFPFSRGHTETGSIDHEPWSFGKECEEVCRLALLRRYRLLPHIYTLFYHSHTKGIPVATPVFFADTQDPELRKVETSFLLGPLLVCASTLPNKGAHEYAHKLPKGIWLSFDFADSHPDLPVLYLQGGAILPVGLPIKHVSEASLEDDLSLIIALNENVLQTWG

SEQ ID NO: 62514 - protein, 744 aa, Zea Mays
MVDDLHSIGCKAIWMLDPGIKKEEGYFVYDSGSKSDVWIQKADGSPFVGEYASHSLHSGEVWPGDCVFPDYTSEKTRAWWASLVKDFISIGVDGIWNDMNEPAVFKTTTKTMPESNIHRGDADIGGVQNHSYYHNVYGMLMARSTYKGMEMGNAAKRPFVLTRAGFIGSQRYAATWTGDNLSNWEHLHMSLPMVLQLGLSGQPLSGPDIGGFAGNATPKLFGRWMGVGALFPFSRGHTETGSIDHEPWSFGKECEEVCRLALLRRYRLLPHIYTLFYHSHTKGIPVATPVFFADTQDPELRKVETSFLLGPLLVCASTLPNKGAHEYAHKLPKGIWLSFDFADSHPDLPVLYLQGGAILPVGLPIKHVSEASLEDDLSLIIALNENGKAEGVLFEDAGDGYAFTQGDYLLTYYIAELHSSVVTVKILKSEGSWKRPKRNLKINILLGGGAMISTDGVDGEVIHLTMPSESVVSSLVATSEFEHKKRMEMIQPIPDIEEPSGQEGAELSKIPVDLKSGDWFLKIVPWIGGRIISMAHIPSDSQWLHSRIEINGYEEYSGAEYRSAGCTEEYKVIRRHLEQSGEEESICMEGDIGGGLVLQRQISILKDNPKIVQIDSSIQARSVGAGSGGFSRLVCLRVHPTFTLLHPTEVVVAFTAINGSKQEISPEAGEITFEGDLKPNGEWMLVDKCVGLSLVNRFNPREVSKCFVHWGTGDVNMELWSEERPVSNETPLRICHQYEVQQTT

SEQ ID NO: 62515 - protein, 100 aa, Zea Mays
MPISCVEELCRSMSFFPDLALCAAATALPPSRHGRCPRAPLRTWKRASPGGSAACARDAWPASPTVYAARGQPTVSTSCAWPACPRLARASPVQPCAHPA

SEQ ID NO: 62516 - protein, 118 aa, Zea Mays
MMWALEYDPGICSTYEEDNTGAVVHKIEGKVKSIRQFGKYERENMKKRANDGDGPVPISVFLVASVLKENSTKLLQEARGIDDIIRILNNVNGNLDAKRACVVALKLHRKYHKKEKKS

SEQ ID NO: 62517 - protein, 437 aa, Zea Mays
MEGRDDDDTGGAGDGAGVGKGGEKKGRKSPESKAVIDKAGEGNRMVFFDGPALAFDLEDLLRASAEVLGKGAFGTAYRAVLEDVTTVVVKRLSKEVSAGRRDFEQQMELVGRIRHRNVVELRAYYYSKDEKLLVYDYYTSGSVSNMLHGFGYPLPSLALSSCPRPQPNPSTRSRTGTTQRSRAVGIQPSRTRRPPRSQAGRVADTHSATRPQPPTTVRGSPTMPGLPSEKESIPNLILRGFGTIDRVKAKLEQACPEVVSCADILALVARDVVVLTKGPHGDVPIWRRDGRRSVKQDALDNLHAPFFDVGRNMCQFFMPKGLNAKDQIVLLGVGVCRVPTTVWWLVSSGVESGGGVRSDSGGRRDAVRWPTGWQVELDASRGTGTGRTTEQADDTRRRQKLGGRGSGVGTRGSGRPQMASRPADQAQRRRGLTWVSR

SEQ ID NO: 62518 - protein, 920 aa, Zea Mays
MSLPSNNRRTCSRSSSARSKHSARVVAQTPVDAQLHAEFEGSQRHFDYSSSVGAANRPSASTSTVSTYLQNMQRGRYIQPFGCLLAVHPDTFALLAYSENAPEMLDLTPHAVPTIDQRDALGIGVDVRTLFRSQSSVALHKAAAFGEVNLLNPILVHARTSGKPFYAILHRIDVGLVIDLEPVNPADVPVTAAGALKSYKLAAKAISRLQSLPSGNLSLLCDVLVREVSELTGYDRVMAYKFYEDEHGEVISECRRSDLEPYLGLHYPATDIPQASRFLFMKNKVRMICDCCATPVKVIQDDSLAQPLSLCGSTLRASHGCHAQYMANMGSVASLAMSVTINEDEEEDGDTGSDQQPKGRKLWGLVVCHHTSPRFVPFPLRYACEFLLQVFGIQLNKEVELAAQAKERHILRTQTLLCDMLLRDAPVGIFTRSPNVMDLVKCDGAALYYQNQLLVLGSTPSESEIKSIATWLQDNHDGSTGLSTDSLVEAGYPGAVALREVVCGMAAIKISSKDFIFWFRSHTTKEIKWGGAKHEPVDADDDGRRMHPRSSFKAFLEVVKWRSVPWEDVEMDAIHSLQLILRGSLPDEDANRNNVRSIVKAPSDDMKKIQGLLELRTVTNEMVRLIETATAPVLAVDIAGNINGWNNKAAELTGLPVMEAIGRPLIDLVVTDSIEVVKQILDSALQGIEEQNMEIKLKTFHEHECNGPVILKVNSCCSRDLSEKVIGVCFVAQDLTRQKMIMDKYTRIQGDYVAIVKNPTELIPPIFMINDLGSCLEWNKAMQKITGIKREDAINKLLIGEVFTLHDYGCRVKDHATLTKLSILMNAVISGQDPEKLFFGFFDTDGKYIESLLTVNKRTDAEGKITGALCFLHVASPELQHALQVQKMSEQAATNSFKELTYIRQELRNPLNGPAEKDFT

SEQ ID NO: 62519 - protein, 2138 aa, Zea Mays
MATLVRHDSRQYSWWISHISPKNSKWLQENVSDMDSKVKAMIKLINEDADSFAKRAEMYYKKRPELMNLVEEFYRAYRALAERYDQSTGALRQAHRTISEAFPNQMPSMSDESPSAFSQEMEPHTPDTSTLTRVAFDYDDLQKDGVGVSPQSFTSKRNGTHPEETSALSSSVENAPRAGFDGKVWKGLTFEGPNVKGKDDISNEMANLQQEVARLLAESQDLKQQMFSESERANKAENEMQMLKATVLQLNAEKDTSLMQYNNSSERISTLESELSKAQSDLEKLTDEMAADVQKLINAETLNIAIQSEAEGLDQKMKMQQQALEQKLKELESFRSSFQEEHEKRMQAESALLSQRKELAQSHEEVQRLAIEIKTANEKLNEFKQTKEVLEYTVCELKKDVERLTEQNQSSEVLVQKLGDQINTLKDSNNELQSEIQSLKSIISQLNTEKNAAVLQHQQFVELVSVLESQLSKLQSELDETEQKVQMLTHDLEKKKEEADNVHLKLQDECHRRMQIEATLLMTEGLHSQLQEEMQMLTQDFDGSTKKLSELEKNKLDLESILKELNNTILGLNSEKDAALLQQQQSLQKVSNLELELSMMQLEMDKSEQKILLLEQEIARKNGSVDSLEISLKDECEKRLQAQKMYSQSQEDVSRLYIEIEKQNGKLNELENLISELNNTILLINTEKDATLHENQQSSVRISDLESELMALKTELENVEGKVHAVEQELIYKKEEADNLQISLQDEIQKRVEGEESLLMMTNLHSGSQNEVRGLALELEKLNGNLRQVENSKVDLENIVTKHTEEIHILRERNLSTDLMIKDLHLELDALKDLNVKLQTEMGLHIGEKEALQREFTSQREEKKNLEGIHHTLVDEMSTLKTTATMNQKLIEELQITNSKLKEVCAKSEVEKALLSEKLQEVEKLSEECSLLENSLSDANAEMDALRDKIKALEALESSLKDIISCHVSEKAVLVSELEILGKRLSDASEKNSIMDSSLFDMKMDLEDLRTKLKDSEESCQALLANNSALSGEVDALREKIKALQDSESSLKDAISCYVSEKAVLASELEILGKSLSEVSEKNSILDISLCDMKTELDELRTKLKDSEESCQAHLTNNSALSAEKNNLFSQLESITLAMKALEGMHANLEQKHSSVSREKDFAYDQVRELQDQLRIKNEEFEVSAKSHQLQANSYEKQIFSLQEKNHYMEEVLQQEQQKNINASISTVILENCLVDEQDKKVALFTECQKYAVENHSANMLVSELMEEARYHGEERKKLLAHNEKLREGISNQMKFLNICKDLGPADLAEDEVLLQTVSDETINIMRLKDETEDVNRLMDTELSVLSVVLLQVGMELRDLHLQKCALEKEVESGEKETLSLQNQNQQMLEQNEQLRSGLQESSEGVEVLKTEVFVIQEKLSCLRESYQTSQDEISNLTKKNESLSKEYQSLSEKYNALEDENDTIFEECMMLKNLCLFFRGHNNEIASALASLTDEMALLSLAKGDLDLQVNELNRRSVMLESENYHLKDYIIYLVEILRTRLVLSEFDLDTNRSVFQELVVELENCMTQLVQKDDELMEAEEKVQLLQEKNRELCGVVGSLQVAMEGAKVVKGELEKKITILIEQCSSKDDKILLLHQDNEALQSEIEQCEREFVELMDDAITFSVNSAVYEEKAFELMMNGKATENRAISQKELLMKEISSRDANIEELQKRLAGIQDEHAELKAELNTHLALIASLVDHVSVLEEDVRSLSKPCSTEGKEETARVHHVQEGDDGLESHCLVNGTPKLQGLIARIEALQVVVLNAKDRQDRKSAESAAKLAAASAEIQELKTRGGSRMEAKEICSDNEKQDVEVSKGKQVQIMKDIELDQISTCPPYGAGAALYPHGTGANAELDDDMLQLWEAAERSCKNQTAKSSSSEHDIQAVEDLESECPSSELARGRDLGTNKLEVPKGAVEPHEAWSKNVLERLTSDAQRLLSIQASIEELKKKMEGSSKGTNSEYGSVSAQVHETEGLVLEQINSNNKLSRKAENYPALSDNTSTERGGYSSRRKISEQVQRGSENVARLELELQKIQYVLLKLEEEHEYTRLKVSDKRTRVLLRDYLYGRKDRGGGQKGKKKRVPFCGCVRSKSRTEP

SEQ ID NO: 62520 - protein, 398 aa, Zea Mays
MVQPSSGITSLGGDLQPLDDDKELVKNQTSLEDIDSTANVDSYKKDSPEGGSPEKLNLDRSSGDESMEEDVVEIKQDEANMKSDDLGQKNELNSEDVKEVILPDSVVEASKEVTAEEKSAASTEKRKLEDEDIANTEPIKRQRRWTADVAKVPERQALSQTGPETPKDIFQPAFKRSFGRSDSTASVDSPKERIVPPAEKPATTSLRIDRFVRPFTLKAVQELLGKTGSVQDFWMDHIKTHCYVTFSSVDEAMATRDAVYNLQWPPNNGNKLVAEFVDPQEVKLKVDPPPPPAAPVSPAAITRAPPLQQTQSVPRQAATPKEQLPPPPPPPLAKPPMADPAAIARERLPPTPKKPEPPVVTLDDLFRKTQSSPRIYYLPLSEEEVAAKLAAQGKGKKE

SEQ ID NO: 62521 - protein, 659 aa, Zea Mays
MAQGAGRDPEELFEELWRACAGPLVELPQTNERVFYFLQGHLEQLQEPTDPALLAEQIKMFQVPNKILCKVVNVELKAETETDEMYAQITLQPEPDQVDLPQLPEPPLQETSRPVVHSFCKILTPSDTSTHGGFSVLRRHANECLPALDMSMPTPTQELITKDLHGSEWRFKHIYRGQPRRHLLTTGWSTFVTSKKLIAGDAFVYLRSETGQQRVGVRRLVQKQSTMPASVISSQSMHLGVLASASHAIRTHSIFLVYYRPRLSQSQYIVRLNKYLESSKIGFDVGMRFKMSFEGDDVPIKKFSGTVVDKGDLSPQWQGSEWKTLKVKWDEATNLNGPERVSSWEIEPFDASAPAITMPVQPSMKNKRPRETAEGLDIHALEPAQEFWLSGRPEQHEKTSVSSSEPKHQVAWTSERAGYSAMSSSICQNSAVTGSWFKGFNSSGSHPSLPEISQKLFQVTSNDARVPPWPGLSAYHADEPSSKLSCNTALCSYQTEEVAPRFSNAVEEEKKEPGETSARAAGSFEDSAQLSRVTKDHTHMVNGSPREIQSHQSCSGRSRIKVQMHGNDVCRAVDLGNLDGYEQLMGEVGEMFEIKDLGSKEKEEWKVTFINDENETMEVGAVPWQEFCQMVRKIVIHSIGDRGHMEACPCLGQDGKRDY

SEQ ID NO: 62522 - protein, 449 aa, Zea Mays
MAEVLRSRVEDDGNDILCLPIDFQQLQELRMFIEDKLNESPKEALLCMGVAAHLALCSDKDNKRNKINIRLYNTGAAIALKKLKAAFIKKLVTVRGTVLKVSTVKPLVLWLKFRCMKCRKEIPRVFCDGKFSPPMSCTIQGCKSRSFIPDRSSAQLMDFQKIRIQELASADNHEEGRVPRTVECELTEDLVDCCIPGEIVTVTAIVKVLNNHMDVGGGKSRISSQGLYYLYLEAVSVRKLKSHAVSDKEIQASGICHSQSSTVNDDFAVKYKEKYGTDVFRRILQSFCPSIYGHELVKAGITLALFGGVQKNSMDQNMVPVRGDIHVIVVGDPGLGKSQLLQAAAAVSPRGIYVCGNTTTKAGLTVAVVKDSMTNDYAFEAGAMVLADRGICCIDEFDKMFTEHQALLEAMEQQCVSIAKAGLVASLSARTSVLAAANPIGGHYECLAG

SEQ ID NO: 62523 - protein, 725 aa, Zea Mays
MVTCDVWSWNFEEIVVGGRNKYLINGHLAQPSRVQTLFHSVQLNVNNPHFLIMQGRITKVLNMKPPEILSMLEEAAGTRMYEMKKESALKTLEKKQNKVDEINKLLDVEILPALEKLRKERCQYMKWANGNAELDRLKRFCIAYDFVQAERVRDGALNDVKQIKTKIVELDETTENIKAAIQEMDNNISTLAAEKEAKVGGEMKVLSDKVDKLSHVLIKETSVMNNQEETLKSEEKGAEKILTNIEDIKRSILERDAAVKNVENEASDMKRRAEDLTKELDEKEKEYQGVLAGKSSANEKKCLEDQLRDAKAAVGDAESGLKQLATKIKHSEKELKEKKTLLVSKRDEAIAAENELKTRTKDLEGIKASMGSINYDEGQMEALQKDRSAELEIIQKLKDRVRNLSGELANVHFSYRDPERNFDRSKVKGVVARLIRIKDSSTATALEVAAGGRLFNVVVDTEETGKQLLKNGDLRSRVTIIPLNKIQTYMIPDRVQQTARRLVGPDNVTLALELVGYGEEVKNAVAFVFGSTFVCRNMDAAKEVAFNRQISSTSVTLEGDTYQPSGLLTGGSKGGRGNLLRKLDELAKAEADLSDHEKKLFVIEQQIGALLPLQKRHTELKSQFELKSYDLSLFQNRVEQNEHHKLGELVKKIEQELQESKQELTEKQVQHEKCVSTVSELEKTIKTYGTEREGKLKALEKRIKSIKSEMQSMSKQLKLRKNSGC

SEQ ID NO: 62524 - protein, 158 aa, Zea Mays
MASLFKDPSKLSAYRDRRFKGTQEEYEATLHASTTLYIGNMSFYTTEEQAYELFSRAGEIKKIIMGLDKNSKTPCGFCFVLYYSREDAEDAVKYISGTMLDDRPIRVDFDWGFEEGRQWGRGRSGGQVRDEYRTDYDPDILRCYSITVYSIPIWCYRI

SEQ ID NO: 62525 - protein, 65 aa, Zea Mays
MPRRVLSRLQRIQHTARWEGSFEAARRGASAGRAEPMARDPWGANALTWVGAGGEQRRRLLAWIL

SEQ ID NO: 62526 - protein, 71 aa, Zea Mays
MRSPALPVTSSTTTGFSQSQEDQVHSALSGRGISPNAFGSSSVPDAPDVSHAGCSVPGIAHGTRSTGFNHR

SEQ ID NO: 62527 - protein, 57 aa, Zea Mays
MGGQISGHIRVLVIVKCFFFFSFLIPMSCIVYAQSYINVPLATSLLANNKLCSCRSA

SEQ ID NO: 62528 - protein, 909 aa, Zea Mays
MAEGSSSHRRSAFSPGLAVLLSGDEAKISSQKSHLVSYHDEIGHQAVERTIEHIFDLPHKSVVRPPGPVDTGFVHSVVRNQARKFDLDWENCIRGYHRSVFIVDKGAGQRKVVLDDSSICGSFRNVRGPSLVESSAPFSSARANACVWKGKWMYEVTLETSGVQQLGWATLSCPFTDQKGVGDADDSYSFDGRRVTKWNNDPKPYGQPWAVGDVIGCCINLDAGEISFYRNGTSLGVAFDGIRSVEPKKGYYAAVSLSEGERCHLNFGSHPFRYPVDGFDPLEAPPRSWSFVTYLLRCLFRLLEVHNLEKSESAYFEKLRRVKKFAPLQELFGPISEGICAEIFSAIEASQGCLEYIAWGSLITLLLDVFRTREPHDFSCLDQVLDLFLRFPGCTSLFQELIVALSCMCKVAPLVLTECPYSGSYPFLALVCHLLRHKDVMCLWWKAEDFVFSFEGFLTRKIPNKQDLQCLVPSVWWPGSSEDEVSMTLTMTTLSDAIKKIEEMHRELCSLVICFIPPMSTPQPPGSVFRSFVQSLVLKARGGDHRMVVNGTFNNTVLVSLYTVILHLLSEGFSMDSAGSASSSKANFGNGVGFLHKGGKRKFPTQLFFRNDAYHSVIPRIGGPPSILMHHQFDAVENEVQWDEGCMNDEETRVTHTTAQKPCCCSVTDVAVGLRYKETAKYVPSTSKGSCKPMPERSPHVAAECNGRGLSDEIEDKPSTSAQSEIEYGYQSLHSLENMPMATQSSSETLKEEELLDVMLLLYHLGISPNFRQAFYFMSQQSQSISLLEETDRQIREKSCSEQVRRLKEARNSYHEDLVDCVRHCVWYRATLFSQWKQRGMYATCMWVVELLLVLSNSNSMFHYVPEFYVESLVDCFHALRRSDPPFVSPALFLMQGSLWLSSTSMIQG

SEQ ID NO: 62529 - protein, 364 aa, Zea Mays
MASNNGGAMQEPLLPKAPKSGGWLWKGTRPSASGDLPSSKAVLRPPRHVPALLCTLIVALGPVQFGFTSGYSSPTQDAVIRDLNLSISEFSAFGSLSNVGAMVGAIASGQMAKYVGRRGSLMIAAVPNIMGWLAISFAKDTTFLYVGRLLEGFGVGVISYVVPVYIAEISPHNMRGALGAVNPLSATFGVLLSYVLGLFFPWRLLALIGTLPCLLLVAGLFFIPESPRWLARMNMMDDCETSLQVLRGFDADITEEVNDIKIAVASANKSGTISFRELNQKKYRTPLILGIGLLVLQQLSGINCIIFYSGSIFKAAGSCHWCHNHDLGQSWPENPPHYFFFWDDPKPSGSCCCILHQGSVIPIH

SEQ ID NO: 62530 - protein, 277 aa, Zea Mays
MSKEDETDTSLAPFNMWRFRNLGVFAMEREWCAVIKMLLDFLFIGLVDVGSRSAEEMVLSENLLHAAVRRKSVNMVRFLLRYKPNKNSKGTAQAYLFRPDALGPSKITPLHIAAATSDAEDVLDALTHDPGLIGISAWSNARDETGFTPEDYARQRGNGAYLNLVQKKIDKHLGEGHVVLGVPSSICPVITDGVKPGDVSLEICRAMSASVPGCLLCSRQARMHPSSTARTFLYRPAMLTVMGVAVVCVCVGILLHTFPRVYAAPTFRWELLERGPM

SEQ ID NO: 62531 - protein, 665 aa, Zea Mays
MIKGISGGQKKRLTTGELLVGSARVLFMDEISTGLDSATTYQIIKYLRNSTHALDGTTIISLLQPAPETYELFDDVILIAEGQIVYQGPREYAVDFFGAMGFRCPERKNVADFLQEVLSKKDQQQYWCHYDYPYQFVSVSKFAEAFKTFIIGKRLHQELTVPYNRHHNHPAALCTSSYGVKRLELLKSNYQWQRLLMKRNSFIYVFKFIQLLLVALITMTVFFRSTMHHDSVDDGIIYLGALYFAIVMILFNGFTEVSMLVTKLPVLYKHRDLHFYPPWAYTLPSWLLSIPTSLYESGMWVLVTYYVVGYDPQFTRFLGQFLLLFFLHQTSLALFRVMASLGRNMIVANTFGSFALLVVMILGGFIITKESIPVWWIWGYWVSPMMYAQNAISVNEFHGHSWNKQFANQNITMGEAILTGYGLFKEKYWFWIGVGALFGYAIILNILFTMFLTLLNPIGNLQAVVAKDQVRHRDSRRKNDRVALELRSYLHSNSLSVLPPAGNLKEQKGMVLPFQPLSMCFRNINYYVDVPVELKKQGVAEDRLQLLVDVTGAFRPGILTALVGVSGAGKTTLMDVLAGRKTGGLIEGSITISGYPKNQETFTRISGYCEQNDVHSPCLTVIESLLYSACLRLPSHVDADTQRVSLDWLYITRAFCPPYLLCSLS

SEQ ID NO: 62532 - protein, 899 aa, Zea Mays
MASGAARKRRRKSSPPAAAAAARDGRKLLVGEVVEVLSCDQGLRGSWHKAIVIGILENARAVRYTDFIDENGSPLVENVQVSDAIDGKSSMPEELIRGNIRPMCPHQALQVSHASYGLCVDALIESSYWEGVIADHAEGSMERKVLFPDEGDECIIEVDQLRLTQDWDEATGEWKPRGIWSFLQILLSHEERDGLPVSIRQIWFDLRSKPSFKTDAKMWMCGTEDFWERSLADVIAELWSLCDKPTLDGYQVEAVQKDTVETTVLDRLDPFQALSEYISCYRNNRKNALIKKEWAKQHLKSSGWTFLDDRPKNKFYISPDGKRFPSFLGACQACLAAKEANGYQYDHTENLHLDSMSLVHKNACYNQTHMDLALVKNKSNDKWITSPSRSWELVQLDAEFSPQIVSLLASYQDGTTVLQRTIDRTLSVKLKKHLLALGWSIKFKKDEIQENGHHKHTTRYRYESPYGKTYVSIIQVICSLIVGGVKQDDRPSYRTAAKGAHLTVSTGLARLNKRKRRDKTDALEKYIDYMKTDKQNSRRRKLLRSNAQKFLKSAGWNFWLKKKSRNKLELRYGAPHGKSYSSLVAACKGYLENGYQEDSDADIKIANHGSADGSMRPSKLIALSGGLKDSSKIQGMPVVDRCSNMFTLSAHHGKCRKRKPSSVSLNSARVLCSHGQIFPCRHHVKTVLSLLVEKNIVVPRDKVTYKRSDGPGIKEGSISRDGIKCMCCNELFTVENFEVHAGSSTPLPSAHMFLKDGRSLSQCLVEFMGGNKPRDPLHVRLKGSSSDLESDSICSVCHDGGDLLLCDNCPSSYHYDCVGLEVEAIPEGSWYCPSCRCGICNLSDYDPDISQFTEKTIVYCDQCEREYHVGCTRNSDHQLICRPEGCWFCSRGCSNSERQ

SEQ ID NO: 62533 - protein, 303 aa, Zea Mays
MPAAAVVSPLLLSLSSSSSPFLSSSSTSFFPPSSAAVTPHAAVRTRAAVSVLRALRAEAATLPVLSFTGEKVGEVTLDLKSAPPSTARAVVHRAIITDRQNARRGTASTLTRGEVRGGGRKPYQQKKTGKARRGSQRTPLRPGGGVVFGPKPRDWSIKINRKEKRLAISTAIVSAAKDAFVVEEFEEAFASGPKTRDFVAALQRWGLDPKQKAMFFATDFDDNVRLSGRNIGSLKMLTPRTLNLYDILDARKLFFTPAAVDYLNSRYGASVSDDYYTDDEDDGEEELVEQEAEEGTTADAAPG

SEQ ID NO: 62534 - protein, 152 aa, Zea Mays
MRREQEEIITVPDTEAAEIGEIMSRYGLEPQEYGPVVAGLRRNPQAWLDFMMRFELGLERPDPRRALQSAFTIALSYVVGGLVPLLPYVLVSAAQDAMLTSVGVTLAALLFFGYVKGRFTGNRPFASAVQTAVIGALASAAAYGMAKAVQAR

SEQ ID NO: 62535 - protein, 137 aa, Zea Mays
MPLYDILNEFQKGHSHMAVVIRKNNPSYQPAEQAANDGGTFEVSIAIDDKNNEKVVKNLPPPLQRWKSYPNTQNTSNRGNRPKKWSKDQADVLQVHKEPLPTLSEDEEAVGIITMEDVIEELLQEEIYDETDVHEEQ

SEQ ID NO: 62536 - protein, 71 aa, Zea Mays
MSPAWSIEGSAPAKSPFWKGDTDKSESLRVQKPSHCGARITVAGVMLLSMKRGHHDLRAELFRPNERKRAY

SEQ ID NO: 62537 - protein, 649 aa, Zea Mays
MHRRLARRTDGRAGKISAVTSEEGTQPAMASIDGEGPLEIGAQRSLQELEETTTSFKMEAEPCSPEMAPPGFEDCKSQWLPLSHPNPLVESTHTVVQVTTTNAMGTTPDAATGSLSSPRLLPLLKRDTEGQTLPRSCSPTTEAAPCSPDMPPPGFENCKSSWLPLPTLQPIAETTHVLHDVAPTKSMVVGLMEKACSVLALERTDVKIDSEQSLLPPLESETESSLQGPLPRSPSSMMKAIPCSPDTAPPGFENLKFTQLQPPCPPLVQTAHVLQNSANNEAMPVISKEAPQPLPALDATDLDIDAKPVLAPPSESKPGQLSPEPPLLLPHVAQHTTCSPGMTLLGSENIESSQLLPRALVLPLDQTSDILADAGTKKTVTMEEVCHPLPVAGVAEEANRSVLLPVTENGCEGQSPHLELQTSSPAVNAAATSLEIAPGSFENSESSQLISPCLAQTIDPTTHASGIMPTIVKSEKTNLPLSSLQATCTDMESAILCQSPSKSEERSLPQAEQHPSSPSVKDTTCSPEVAPPGYENFDSLDQLPPSPPLCSKFEIGQMVCGSCRQLVAYPTGAVHVQCFGCLTINLVLEEHQVGKVYCGQCDTLLMYPFGAPAVKCSNCLFVTEIGERNVRPRILMEQSVSPAAQEEVH

SEQ ID NO: 62538 - protein, 923 aa, Zea Mays
MPPWWGKSSSKEVKKSAKENLIDTFQRLISSNEQKGSRKSRSSRRHGKDTAGDKGCWSTAQSRSTSPSKEVSRCQSFAADRPHAQPLPLPKSRAKVTRTSSDITNSKSTLEKHGKGQLLPLPPIQPKKRPEATEPVTEVATASVSSNCSIDSDDPGDSQLQSPVGNEAENATRITATSSSSVVRKECSSAITRKNTKEVAKPNSAFLSNQILSTSPRGTFADGYQSNLQSPRQIALESAPNSLMSSPSRSPRNICPVQIPTSAFWAIKPHTDVTFLGSGQCSSPGSGQTSGHNSVGGDMLGPIFWQPSRGSPECSPIPSPRMTSPGPSSRVHSGSVSPLHPRAGGVTPESPTNRHAEGNKKQTHRLPLPPLSIANSSTFLPNSSNPTSPISRSPGRTENPPSPGSRWKKGKLIGRGTFGHVYAGFNSDRGEMCAMKEVTLFSDDPKSKESAKQLCQEISLLSRLQHPNIVRYYGSETVDDKLYIYLEYVSGGSIHKLLQEYGQFGEQAICSYTKQILLGLAYLHAKNTVHRDIKGANILVDPNGRVKLADFGMAKHINGQQCPFSFKGSPYWMAPEVIKNASGCNLAVDIWSLGCTVLEMATSKPPWSQYEGIAAMFKIGNSKELPPIPDHLSEEGKDFIRQCLQRDPSSRPTAVDLLQHPFVQNAPPLEKSSASHPLEQLTAISCRTNSKVVEHARNMSSLGLEGQSILQRRAAKFSLPNSDIHIRSNISCPVSPCGSPLLRSRSPQHQNGRMSPSPICSPRTTSGASTPLTGGSGAVPLNHVRQPAYRNEGFTVTSRGFDDHMPSRPVDPVHGRFIRVQQFSVGRQERVVSEVDILSSQYGKMRHANVWDPHDRPLPSERSSQQCFGNHAKLKPSLDLRSDADSWQWIKILKCQSHIPITLKKMRHALSGRGCCILKDPKQ

SEQ ID NO: 62539 - protein, 431 aa, Zea Mays
MCGIALVLASDRLVIVPCATATTAALETQHSCKRKGVPDELKEALRRRGPDSLGYRSRCLLADGTVVVGDGCNDGVEGKIGVSDSSVADLFFIGATLHLRGAKLVSQPLVAPSGSVFLYNGEIYGGIQVADDENDTQALFNSLESCCSCDCHALGRDKTCTCCGTGSGAKSVLQVLSTIKGPWALIYWQMKSNTIWFGRDAFGRRSLLVHWPTADDSHFILSSVSPPSFAKIHSDQTVSDRDMSNHTKASYWEELPCGIYSMHMKDIGKHGACMKEGWIVEVNTHKWMASSLNGLIKWERKLTVPTMENIPVDRGNHQLSQSFISSREPEENTNNGITKADFLSDSSLCDANCITQSAHRVLVALRESVMLRTKMNTLFQGTLDRSEDGESAPIAVLFSGGLDSMLLAALLDQCIDSKFLMGNLPLIGFLQ

SEQ ID NO: 62540 - protein, 214 aa, Zea Mays
MNYTSEDQPYPRGEICVRGPIIFCGYYKDEVQTREVIDEDGWLHTGDIGLWLPGGRLKIIDRKKNIFKLAQGEYIAPEKIENVYAKCKFIAQCFIYGDSFNSSLVAIVAVEPDVLKAWAASEGIQYEDLRQLCADPRATAAVLADMDSIAKEAQLRGFEFAKAVTLVAEPFTLDNGLLTPTFKVKRPQAKAYFAKEISDMYARLLETELARSKL

SEQ ID NO: 62541 - protein, 80 aa, Zea Mays
MATGQPVRLVLDASLLLDPSSTREAAVVALRPGVEELLRRLRYSNLTVAICYAEGMPTNENGIMLTKMNEKSVISNGKAV

SEQ ID NO: 62542 - protein, 638 aa, Zea Mays
MIRFWNSRDEKCIDSVITLSEMPSASKSKAKERSAAKVAKEQPKVAAKPMGNATLASSYNNLSGKFHVLEPSSSLLGSQGIDKFRNTDEIDEHSRSSHGTGDFDCASNNGSCSGDSEDTKEKSTSTASRVDSVPGCDIDKREKIRQKNEKKHQRQKERRAQELHERCKGYIMSRKLEALAQKLVAMGFSADQATMALIQNEGCVEESVTWLCNFDASEEAKQQLVADQQSGVNLKIDIADELSKIVSLEAKYKCTKQEVERAVVSCEGDLERAEEALKTHKQESTAIPPKPEGSGYSSGLPNKPQVVLAQNPARPQTNGLSSVGSHQMRREEKDINYKLLMNGSGPKEPAIKGFQPLATPIKPDLVRQQFVQPEKRRLNPNSNPSVPSVASSPLPVAVPQVKPDMRHVAGTNEVKSLMPNGSLRESVIVMQRPQSAGTKQSLPSTSHSMFVSEPSARDWYLNGVSGVDMMLNGGLGHGLRNMSLDSASSARSFGHANHQQNLVSNPIELAANGWGGTWSSGGTSSSRSVVSSLGAFRGWNASESSALPHSDWRTNGAAPYDYTSVDWSVDTTLLNPAAKSELLSDTWSTMFMGGRSTRTPGNLSGAGIAGLYDSNRPMDPAPSARPYEWPTFCRGGSS

SEQ ID NO: 62543 - protein, 373 aa, Zea Mays
MYSEKIPKYRDTKVRMKEPLEQFNQTKDASDYLWYTTSFRLESDDLPFRNDIRPVLQVKSSAHSMMGFANDAFVGCARGSKQVKGFMFEKPVDLKVGVNHVVLLSSTMGMKDSGGELAEVKSGIQECLIQGLNTGTLDLQVNGWGHKAALEGEDKEIYSEKGVGKVQWKPAENGRAATWYKRYFDEPDGDDPVVLDMSSMDKGMIFVNGEGVGRYWVSYRTLAGTPSQALYHIPRPFLKSKDNLLVVFEEEMGKPDGILVQTVTRDDICLFISEHNPGQIKTWDTDGDKIKLIAEDHSRRGTLMCPPEKTIQEVVFASFGNPEGMCGNFTECLGKPSCMLPVDHTVYGADINCQSTTATLGVQVRCGGGKKGA

SEQ ID NO: 62544 - protein, 396 aa, Zea Mays
MVCIRRFVACSSLVFVLISGIWIVIFITHKNPCCSILYSILALFLSTNVVWMSCMQHVQEFLNYAKFVSWWVSLGVASSIGLGSGLHTFVLYLGPHIALFTIKAVQCGRIDLKIAPYDTIQLKVGPSWLDKKCSEFGPPVYPASAHSVRIPVFDLLPQIQLEAVLWGIGTALGELPPYFISRAARLSGSESKAVQELDAATSKEDGPVASSLNRTKRWLLSHSQHLNFFSILILASVPNPLFDLAGIMCGQFGVPFWEFLFATLIGKAIIKTHIQTLFIVSLCNNQLLYLIEKELIWIFGHVPGFSATLPSVIARLHAAKDKYLSPPAPVSPSSQMGEKQWNFSFTSVWNSIVWLVLLNFFIKIVTSTAQDYLKKQQDTEMELISDSPIQDHSKTN

SEQ ID NO: 62545 - protein, 182 aa, Zea Mays
MAQYCLGNTLGRPTNRIEIRVRHGVPHSRTASVPHSCLLGRRPLLPVLQPPGLQPLGASDSSRSSRQLRCSADLLVRLTGCLVPPAAGCGLLAAWSRRGADPHGRTAAACRCFLLGRTSACLVVCLADCLMLSASSCLLASCFYASSCLIVTCETCEQSIERSKVAHEYLFDYPREYFIMRV

SEQ ID NO: 62546 - protein, 396 aa, Zea Mays
MITGTDFYHVMTAVVPLYVAMILAYGSVRWWRIFSPDQCSGINRFVALFAVPLLSFHFISTNNPYTMNLRFIAADTLQKLMVLAMLTAWSHLSRRGSLEWTITLFSLSTLPNTLVMGIPLLKGMYGDFSGSLMVQIVVLQCIIWYTLMLFMFEYRGARMLITEQFPDNAGAIASIVVDPDVVSLDGRRDAIETEAEVKEDGRIHVTVRRSNASRSDIYSRRSMGFSSTTPRPSNLTNAEIYSLQSSRNPTPRGSSFNHNDFYSMVGRSSNFGAADAFGIRTGATPRPSNYEDDASKPKYPLPVVNATSGAGAAHYPAPNPAVAAAPKGARKAATNGQAKGEDLHMFVWSSSASPVSDVFGGGAPDYNEAAAAKSPRKSSNLSRRLLAPPLGECFSG

SEQ ID NO: 62547 - protein, 104 aa, Zea Mays
MEWPPPSTSPSPSLVVRSPRQTVSLIRNRRPHRDWAPSSRSPSFAARDHGPKPSEVYGFVGSITTVIATAVYLAWAYTPEPVLRSLGITYYPSTGHWRCHRSWL

SEQ ID NO: 62548 - protein, 459 aa, Zea Mays
MFSPGFVSASKPLPSWPILSAGTSVTVALVLSLFLTFEHLCAYHQPEEQKFMIGLILMVPVYAVQSFFSLLNSNVAFICELMRDCYEAFAMYCFERYLIACLGGEESTIRFMEGRLQISESSPLLDIDYDYGIVKHPFPLSCFMRNWYLGPDFYHAVKIGIVQYMILKPICAVLAIFFELLGIYGEGKFAWKYGYPYLAVVLNFSQTWALYCLIQFYTATKEKLQPIKPLSKFLTFKSIVFLTWWQGVAVAFLFSTGLFNGHLAQRFQTRIQDYIICLEMGVAAVVHLKVFPAKPYRRGERNVPNVAVMSDYASLGAPDPEEIGGIDSLTILQTPVTKDRQLSFSQSVRDVVLGSGEIMVDDVKYTVSHVVEPMERSFTKINKTIHQISENVKQLEKQKRKAKDDSHLIPLEPWSEEFSEAHDHVAGGSASDSGLAKTRYNRILNRPRRSFESRLRRWF

SEQ ID NO: 62549 - protein, 744 aa, Zea Mays
MRRFFFFGSSAANAGDENGTPGSDSGTTHKKTLVADVGNESSGSCSTRLSRSRSRGQKRNKEEPANPKQLRRSMSFSSPATNTCLDERCFSFSGDVPCTLYDGFDAPQNVKDVAPNIWSPEGNPVLREYAINIPKDHSSMENDSPRSRCCSCSAGHSPVSSPIALRCRSTRLSNLLSKNEVLDRYIDRGHEDAMVNEKQRQYPSAASMVSTLGRPPRPQSTVPSIPKSMKGNTECYPDVDIKEDCLWQVAQEGTRDNCKITTMCDAGRNHVSMPDAFERDSATSVVDICEDLQEVRPPNVICPSAWEQETNDMLLQRAKEVESRFIVHCGDEYEFNIIRDKRMSSNDMFQLIQQLTEDRKQLTHELSSHIRAHVAERSAAKQQYKQSKKELDTRTRRLEKEKSERQTTLEREMDRRSHDWSVKLSRFQSEEERLHERVRELAEQNVSFQREVAFLEANKAEASTKVASLELQNNKLNDDLEKLRNEHEKLHNSSVDKDARFAEVVEERDHTREYLKDKEGENKALHKVIARLQTTCNEQERAITSLRQGCKAQLDKKFVECDSDKMRKLRMELIRLTGVEQKLRCEIRSCHLEVGSLRQENIALLNRLQVVGNGAPFSIRLDQELQARVDNLQVQGLSLLNKTSQLCTKLLDLMKHKKLENESFSGNDVLIVSNYTFEYQSIKGGIESLKRSLKTINSVLNEKQSVKEKSGETAARGSSSREQTVAEPAIFASERQSTPTDEAL

SEQ ID NO: 62550 - protein, 351 aa, Zea Mays
MCPTRELANQLAAEARKLLKYHRSLGVQVVIGGTRLPQEQRSMQANPCQILVATPGRLKDHLENTPGFSTRIRGVKVLVLDEADRLLDMGFRRDIEKIITFIPKDRQTLLFSATVSEEIHQISHLAMRKDYDFINAVQEGDEETHAQVNQTYMVAPLGLHLPILYDVLKKHVAEDAEYKVIVFCTTAMVTRLVAEVLSQLKLNIREIHSRKTQSARTKVSDEFRKSKGLILVSSDVSARGVDYPDVTLVMQVSHIIVYLAKRKENKRKMCGFIKKFICTCRLVCQLIENSIYIDSEGLDGKARKGKASYYWLPGKCIFLVQLTICQYQRLQHLRLIQAFRQQSKTQSEEWR

SEQ ID NO: 62551 - protein, 619 aa, Zea Mays
MRPPSSGKKTEVSHSVGKCGVSDQACHGKCQSCGIDAKPFCAGVNEVSLLTGSHTDVEASKENRGACSLNNDRADALEEEANVSTARIGHVESADPGGSVGVEKEIFMAVNEESEGEQAGATLEDLFFFNGEEDDDSDWEPASRLVVNRWFCLNCTMPNVDKITYCMNCRELPGSVVDGYDVFKKQIAQTALLSADTGLLPVSTAIGFDERMLLHSEQLEVKPNPHPERPDRLRAIAASLAAAGIFPSKCALVPPREITKEELLMVHSPDHIESVEQTKNMLYSYFTSDTYANGHSACAAKLAAGLCADLASLIVSGRVRNGFALVRPPGHHAGVKQAMGFCLHNNAAVAALAAKRAGAKKVLIVDWDVHHGNGTQEIFDGDKTVLYISLHRHEDGNFYPGTGAAHEVGVLDGQGFSVNIPWSRGGVGDDDYIFAFQTVVLPIASEFAADITIISAGFDAARGDPLGCCDVTPTGYSWMTSLLAGSSNGRLLVILEGGYNLRSISSSATEVVKVLLGEGPNRASFVVSPSKEALSTVSQVLKIQQQFWPVLGPTYASLQAQQGSVSSNHSNELKKRKRPGGGPGPFWWKMGSKRLLYEALIEPRSRPRKLKGSTGSAAP

SEQ ID NO: 62552 - protein, 197 aa, Zea Mays
MAKLARSPTTSPPAAAADKHRSAAGSGLRSLASAASGWWDRWTVIGSGLSKLERAFGDQFPEGERYFGLENFGNTCYCNSVLQALYYCAPFREQLLEYYRRNRNLEDAEENLLTCLADLFSQISASKKKTGVIAPKRFIQMVRKLNEYFRGYMHQSLVLQRILLGPHLLKMSQMAQLLMELEKNHWLHGYIRIFRVF

SEQ ID NO: 62553 - protein, 533 aa, Zea Mays
MTRGTEVVVRALLVAAAVAGLLLSAAAEDGVVIQRRSLHQPFFPVDPTPPPGFDDSIVPPPPPPAAAAGAAAASAASKGGGRSVTNAVAIALATGLVVLAVAFYSCFLLWRRRSDGGGGGVGGDGLRAVKSSRPGAVAVRVASDVGSSARHQRSPPPSSTASDAIYLDPLTTMVEVSRHRPQSPDLRPLALVKQPSPDLRPLPPLKRPAPQPPPPPASTPPMTTTTGDSSDEEDQATYYTAPKTAKSSFSRSTSQRSTVEPTVAQPPAPAPASTPTPLPPQANAPRPGRPPPPPPPPRQRLLRPMPEESPPPAVLASLALTNPPEPSGQDRGGENPDGHGGRARPPKPPSLKPLHWDKLRAISGRTTVWDQVNNSDSFRVDEAAIESLFLNNSGGVGNSDQAARRGGAGKQESRLLDPKRLQNVAIMLKVLNVTSSDVIGALMHGNGDLGSEFYETLAKMAPTKEEELKLKGYNGDISKLDPAERFLKDVLDVPFAFKRVDAMLYRANFGAEVNYLKKSFGTLEKIFRQLVQI

SEQ ID NO: 62554 - protein, 146 aa, Zea Mays
MASPNADPAQHHASTPPLLLAVRHLPFPGVHRTRALPGPDVLTPLARRLEELASAATSHPLLKPLFAAHSHLSSFSQGRRRLVAARRATVLSGGHCFAAVLGNSVAGLVVSNGINNFLNLYNTVLVVRLVLTWFPNTPPAIVAPLR

SEQ ID NO: 62555 - protein, 775 aa, Zea Mays
MLAFEQQVLADLVEDPNGGLVVLSSGLPLASLAATLLLHLHQTPGNAAGGGCLLVLSATDTLKARIRRRLQDKLQVHDVPPDLAAQQRATLYASGAALFLSPRALAADLLTSRLLPSRVQALLLLSAHRSTDTSSDAFICRLLRQRNLLPVYAFSDCPHAMVAGFSKAERTMKSLYVRRLHLWPRFHVLAAADLERAPPDVVDVRVPMTPPMRGIQAAVLATMDACLKELRRTNKVDVEDLTVDKGLFKSFDEIVRRQLDPIWHTLGKKTKQLVADLRTLRKLLDYLVRYDAVTYLKYLDTLRVSEGVRSVWILADSSHRIFELAKRRVYQAVRTDGVNVSIDNKGTPTKKRKVAHNSTKKGKVTENEDSTVGPNTQKANTDVGIVLEEVLEEAPKWKVLWELLQEIAEQRMKSSAGNVHDEDKNDESGIVLVSCKDERTCLQLQECILKGPCQVMREEWEKYLIGKAELHGLNKDKRKSEQPKGVGVLDGEVQMGSSESVCPVSISKLETNALLAAASELRNISNEADVKSSSNSSCSKAGGAKGKPKKTTSKRQGSNRKNKSKEGNDNSQGTGLDSEGQSGKADVQAEIVASKMSAYDASMSASTSNVKFNHSSAFGNLANAKPLPPVQFHALDSDHQVLDVWKPSVIIVYHPDITFVREIEVYKAENSSRKLKVYFLFYEDSTEVQKYESSIRRENEAFESLIRQKSLMMIPVDQDGRCIGPTVANEPEPPLCQNSITRKAGGKKAPEKEMQVIVDMREFMSSLPNVLHQKG

SEQ ID NO: 62556 - protein, 299 aa, Zea Mays
MILIVSLPDDVKKQLEDPDSRYHFGWSRVEEKFESERWDTAKGSYFANPVFDVPTTDDELVTRYPSYCRPNIWPKDHLPELEIAFKGLGKLMLEVGLMLAHHCDRYVIQRGVGQYIGESLEKTLARSRCPKGRLLYYFPKSFSKQDEVSSWCGWHTDYGFLTGLTCGLFTRKSEEVPCPDIGTGLYVRTRDNQVVKVTLVDDELVYQIGETAEILSRGHLCATPHCVKAPSSEDASDVGRSTFVLFIQPNWDEPLKLPSEIRYHQECIPPTRTLAYGEYSERVLASFSGKSVEQTLMPQ

SEQ ID NO: 62557 - protein, 185 aa, Zea Mays
MEKLLQDVGTDILPGVTIVCGGSYRRGKASCGDMDIIITHPDGESHVGFLSKFVQRLKEINFLREDLIFSIHSVDGTDSGVDTYFGLCTYPGRELRHRIDLKVYPRNRYACGLLAWTGNDVLNRRFRLLAESKGYVLDDTGLYLATRGSGGKHAGRSDAIVNCHTEKDVFETLGFPWLEPHERNL

SEQ ID NO: 62558 - protein, 356 aa, Zea Mays
MEHDMNEVPGIYRVVHTLSHNFRNATRLERVRLRLPIEPHNTLVKIIYAGVNASDVNFSSGRYFSVNSKEAASHLPFDAGFEAVGIVASVGDSVKHIKVGTSVALMTFGSYAEFVLISAKSLIPVPRPDPEVVAMLTSGLTASIALEKAGQMISGQVVLVTAAAGGTGQFAVQLAKLAGNKVVATCGGESKSMFLTSLGVDRVINYQSEKIKDVLKKEFPRGVDIIYESVGGETFDVCLNALAVYGRLIVIGMISQYQGEGGWKPQNYTGLCEKILGKSQTVAGFFLVQYAHLWQDHLEKLFNLYSSGKLKVFVDPKKFVGVASVADAVEYLHSGRSVGKVVVCMDLSYGQTLAKL

SEQ ID NO: 62559 - protein, 417 aa, Zea Mays
MSAPEFRTSYQQSPENVGQLKVCQCGSGDSNFQITNKSDGGENSPTTCPNCQVLKSGNLLLSSKGIGWTVWKKRWFILTRTSLVFFRSDPNVPPPRGSEPIVTLGGIDLNNTASMIVKEERKLITVVFPDGRDGRTFTLKAETTEDLNEWRSALENALAQAPSVVNTAGQLPVVSTDITEPVEAAVEQSENKSVIGRPAEFALVDADGTTAFLQKALKFIEDYGVKVEGILRQSADVEEVKRRVQDYEKGKNEFSPEEDAHVIGDCIKCILREMPSSPIPAPCCTALVRAYRTDKTKRLDAMNRVIYEVFPEPNRQLLQRILKMMQIVGSHKAVNRMSSSALAACMAPLLLRPLLLGECEIDSEFSMAGDGSFQLLQAAAAANHAQAIVIIMLEEYDQIFDVPAFPWTCFSLQACSI

SEQ ID NO: 62560 - protein, 909 aa, Zea Mays
MSSSRPTRSSISPFRSRRSAPAVSAAGPPPPARTSSGGRPSTPSSTASGRPTTPSSSGGRPATPSAAFARPATPSSSSARPATPSSTASARPTTPSSISSRVAVRAPLVDAANAKENIMVTVRFRPLSPREINKGDEVAWYADGDNMVRNEYNLSIAYAFDKVFGPATTTRHVYDIAAQHIVSGAMQGINGTVFAYGVTSSGKTHTMHGEQKSPGIIPLAVKDVFSIIQDTPGREFLLRVSYLEIYNEVINDLLDPTGQNLRIREDAQGTYVEGIKEEVVLSPAHALSLIASGEEHRHVGSNNFNLVSSRSHTIFTLTIESSPSGENEAEEVKLSQLNLIDLAGSESSKTETTGLRRKEGSYINKSLLTLGTVIAKLTDGKATHIPYRDSKLTRLLQSSLSGHGRISLICTVTPASSNSEETHNTLKFAHRSKHIEIKASQNKIIDEKSLIKKYQKEISSLKEELQQLRRGMMGNGGILPTDQEDLVNLKLQEQIVRLKDEIAEKKSHIHMLEQRMVQSLETTEGPAIKTELSQTFSKLSTQLSEKTFELEIMSADNRILQDQLQAKVTENAELQETVAHLRQEISNLSKAAKSEDSFASVQSSEPSTASTDTRDQTNEISNRANMSSRTTDLNESGFISQVLKQASEIESLKQENLRLVEEKDGLEIHSQKLAEESSYAKELASAAAIELKNLAEEVTRLSYENAKLNADLAAARELNASMSRSNIHPDPKRRDHESGILVEELQKELVASCQREAVLEDTLSQKDRRESELLKIIDDAKCREHELKNELASMGALLSKIKKENSQQDVFEFKAKQNGFHSSKTDSGRLVSEMQASDNGCWDGLSTFEEARAAYNFERMRCKELESIVSKLKGEDLRGLDVKVLEELQNFHVEALSRICQEKMASQAL

SEQ ID NO: 62561 - protein, 344 aa, Zea Mays
MQPLLLLLLASSLLRPPAAASAADSSSGCWPKTCGHLNVTYPFWVEEPGRAPCGPPSFQLKCNGSGAFLSISVYQAYQVLDIFPENSSFHVVDHNLPLATGCPAPTMNISLFSPGTFVFSGLNRELLFLGKCTGFPPAESAGFRSLPCDNSSFVRLGDGRNFSSQGIQGGVPHGCLFTVVPVLGAPDGNGDDDDYVASMRNGFLVDWKAVPGDCPKCMARGGECTYGGPDAEFACDCSGGKCGGNSNKNRILGIVCGVAGGGLLVVSVCFFFVWRKHKRRKQARAPNGCMRSESSMQSYSKDLELGGSPHIFTYEELEEATDGFNDSRELGDGGFGTVYKVDKR

SEQ ID NO: 62562 - protein, 1524 aa, Zea Mays
MATLVRHDSRQYSWWISHISPKNSKWLQENVSDMDSKVKAMIKLINEDADSFAKRAEMYYKKRPELMNLVEEFYRAYRALAERYDQSTGALRQAHRTISEAFPNQMPSMSDESPSAFSQEMEPHTPDTSTLTRVAFDYDDLQKDGVGVSPQSFTSKRNGTHPEETSALSSSVENAPRAGFDGKVWKGLTFEGPNVKGKDDISNEMANLQQEVARLLAESQDLKQQMFSESERANKAENEMQMLKATVLQLNAEKDTSLMQYNNSSERISTLESELSKAQSDLEKLTDEMAADVQKLINAETLNIAIQSEAEGLDQKMKMQQQALEQKLKELESFRSSFQEEHEKRMQAESALLSQRKELAQSHEEVQRLAIEIKTANEKLNEFKQTKEVLEYTVCELKKDVERLTEQNQSSEVLVQKLGDQINTLKDSNNELQSEIQSLKSIISQLNTEKNAAVLQHQQFVELVSVLESQLSKLQSELDETEQKVQMLTHDLEKKKEEADNVHLKLQDECHRRMQIEATLLMTEGLHSQLQEEMQMLTQDFDGSTKKLSELEKNKLDLESILKELNNTILGLNSEKDAALLQQQQSLQKVSNLELELSMMQLEMDKSEQKILLLEQEIARKNGSVDSLEISLKDECEKRLQAQKMYSQSQEDVSRLYIEIEKQNGKLNELENLISELNNTILLINTEKDATLHENQQSSVRISDLESELMALKTELENVEGKVHAVEQELIYKKEEADNLQISLQDEIQKRVEGEESLLMMTNLHSGSQNEVRGLALELEKLNGNLRQVENSKVDLENIVTKHTEEIHILRERNLSTDLMIKDLHLELDALKDLNVKLQTEMGLHIGEKEALQREFTSQREEKKNLEGIHHTLVDEMSTLKTTATMNQKLIEELQITNSKLKEVCAKSEVEKALLSEKLQEVEKLSEECSLLENSLSDANAEMDALRDKIKALEALESSLKDIISCHVSEKAVLVSELEILGKRLSDASEKNSIMDSSLFDMKMDLEDLRTKLKDSEESCQALLANNSALSGEVDALREKIKALQDSESSLKDAISCYVSEKAVLASELEILGKSLSEVSEKNSILDISLCDMKTELDELRTKLKDSEESCQAHLTNNSALSAEKNNLFSQLESITLAMKALEGMHANLEQKHSSVSREKDFAYDQVRELQDQLRIKNEEFEVSAKSHQLQANSYEKQIFSLQEKNHYMEEVLQQEQQKNINASISTVILENCLVDEQDKKVALFTECQKYAVENHSANMLVSELMEEARYHGEERKKLLAHNEKLREGISNQMKFLNICKDLGPADLAEDEVLLQTVSDETINIMRLKDETEDVNRLMDTELSVLSVVLLQVGMELRDLHLQKCALEKEVESGEKETLSLQNQNQQMLEQNEQLRSGLQESSEGVEVLKTEVFVIQEKLSCLRESYQTSQDEISNLTKKNESLSKEYQSLSEKYNALEDENDTIFEECMMLKNLCLFFRGHNNEIASALASLTDEMALLSLAKGDLDLQVNELNRSWCRRMMS

SEQ ID NO: 62563 - protein, 210 aa, Zea Mays
MNQLDSFSDKLVKRILKAHEPYNHNDNTKCSVVSERVSYEFVPERKACSSLNKSVVQNASGCDSNRNKCLASGKAVSKKKDQSTNNSLDKENMSSCGSGGTKVSSPGSLGLAREVDSGNCLSLLDNRNCPMTRTSKANHNNCRQTADILDFNLRECSSFKKGHSKGLSEAQKHEKSLPGSSIACSDIEDAGDCNDNLVKAPFIKQRNSQL

SEQ ID NO: 62564 - protein, 81 aa, Zea Mays
MALRALAGKLRVLPSRAAASRSFASQMEKKCSKCALEEQAGSFSQWLDERKRRDMEELARFRRKSYVHNVLVLAGNETQLR

SEQ ID NO: 62565 - protein, 412 aa, Zea Mays
MSRSISTTGSRRIYSSWRTWGWTRTAFRLPGRGFCPMVPAKSTRPASTTTTGLSMHCYRKALEDRYNGWLDRQIVYDFAEYAETCFEAFGDRVRHWVTLNEPHTVAVQGYDAGLQAPGRCSLLLHLYCRSGDSATEPYVVAHNFILAHAKVSDVYRKKYKAAQNGELGIAFDVMWFEPMTNTTADIEAAKRGQEFQLGWFADPFFFGDYPASMRSRVGDRLPRFTAAEAALVKGALDFVGINHYTTYYTKHNSTDLVGRLLHNTLADTGTISLPFRNGKAIGDRANSIWLYIVPSGMRSLMNYVKERYNSPPIYVTENGMDDGNSPFTSIKDALKDSKRVKYHNDYLTNLAASIKDDACDVRGYFAWSLLDNWEWTAGYSSRFGLYFVDYKDNLKRYPKSSVQWFKNLLASS

SEQ ID NO: 62566 - protein, 360 aa, Zea Mays
MIFCLDKGDGSDAETGMSEEDILLQDEICKSRLMSIKREEEQYMRERDRYELEKGRLIREMKRLRDEDGSRFNNFQILHHRYALLNLLGKGGFSEVYRAFDLVEYKYVACKLHGLNAQWSEEKKQSYIRHAIREYNIHKTLVHPNIVRLWDIFEIDHNTFCTVLEYCSGKDLDAVLKATPILPEKEGRIIIVQIFQGLVYLNKRGQKIIHYDLKPGNVLFDEVGVAKVTDFGLSKIVENDVGSQGMELTSQGAGTYWYLPPECFDLSKTPFISSKVDVWSAGVMFYQMLFGKRPFGHDQTQERILREDTIINARRVEFPSKPAVSNEAKDLIRRCLTYNQSERPDVLTIAQDPYLSYAKR

SEQ ID NO: 62567 - protein, 92 aa, Zea Mays
MIERDLMCWNSMFNGDARHVRMNQARSLFEETMERNVILWTIFIDGHVRCSGAKEALEYFQSMLRCGVRPDRVAVVGVVSVRAQLSNLEQGR

SEQ ID NO: 62568 - protein, 91 aa, Zea Mays
MAARSSSMVAEDDYETDQKKQAAADVLFHYSQFVMVCIGEDVRPTDLRLHLMKEVSGMSTSLKEPQQAAASPASSGEPSSSGTMKGVQDYR

SEQ ID NO: 62569 - protein, 527 aa, Zea Mays
MGEMAHACSAPRPSPAHHLCVRILLAYLLAARWLVPSCSAASFFRFPWPAERHDYRDALAKSILFFEGQRSGRLPPGQRASWRGDSGVSDGAAAGVDLEGGYYDAGDNVKFGFPMAFTTTMLAWSVIEFGDSMPRDERRHAAAAVRWATDYLLKTLAHPGVIFLQVGDPWKDHDCWERPEDMDTDRTVYNVSAGRPGSDIAGETAAALAAASMVFRDDDPEYAETLLTSARKAFEFADTYKGAYSDDPDLRAGGCPFYCDFNGYQDELLWGAAWLRRASKDDTFLQYIQNNGKTLGAEDSSNEFGWDNKHAGLNVLVSKEFIEGAALPLQSYKEFADSFVCTLIPESSSSPHITYTPGGMIYKPGGSNMQHVTSISFLLLTYAKYLSKSSHTVDCGDVSVGPETLQLQAKRQVDYLLGDNPMKMSYMIGYGDRYPQRIHHRASSLPSIRDHPQPMACKEGTPYFNSSGANPNPLVGAVVGGPGEDDAYEDDRADFRKSEPTTYINAPLVGVLAYFVGNPNPGHNTRH

SEQ ID NO: 62570 - protein, 89 aa, Zea Mays
MAAIPPLDHWRLGDCSPGLGITVVPCYVGDQAHLNQITGEEQVAQEEDYYEECWGSSSLPKVLKEKTPSDKTIQRHTRHDDTDGSRSYG

SEQ ID NO: 62571 - protein, 111 aa, Zea Mays
MWSPVPPLELKGVSADALNANAGFVTFVVYPRHVEGKKLDRTVWNLLTFHAYVSYHVKCSEGFMHTRMRRRVESLIQALDRAKSDAEKLKKLVHGGSFKRLSLKNEGDSRF

SEQ ID NO: 62572 - protein, 1281 aa, Zea Mays
MPAAAPTTPRRHPSPNAGGRASSPTPAGSQAKRSQSTERRPVTPSRPSSGGSRPSTPSRISAPASPSSATSSPSSFSSSSTPVGDAVPETQIALRRLPGGRAPDGLWPSMRSLSSSFQLESKGKKISSSSSADQAKTRDAAPADRKRSPLRGRATPEQSENPHAKVIDHHRWPAMMGGRVSASTMSKSMDLTDKISRSALPSVPSRGVSPKRTTVSSAANTLSRSIDLADKIDRLVSSSMSSQGESPRKSPCNGADDVSKKVGVRKDLKLSSLAISRRVSPVTTDDKIDRLVSSSMSSQGGSPRKSPCNGADDVSKKVGVRKDLKLSSLAISRRVSPITTAASDGTRTLSGSMDLTEKDNSTLSPVSSPSISPSASLSSVSNAASQTTTKSSERLIGPVSNLSSSRGLSPRRTTSGGIVDLMKSIDFPEKDRRPASSRGFSPRRRLVSDGVNDIGKNMDFAEKDSRVVSSSIPSRGVSPRRRLASDGVDTMCRSSEFSGKDNRPSTSSSTSRGMSPRRRLASDGISAVTKGMDFGDNANRPSTSKGVSRGISPRLQLASDGVGNVSKGTDLADGLDRPSTSYATPRGMSPRRRVASDASNATSERIKFTKEDSGTVSSSVAPRGVSTLRQLASDGVESVSKSMDLVEKDTRPTTSSASSRGLSPRRRLSSDGVNVISKSMDLVENNNKLVTMSAAARGVSPRRRLASDGVKVTSKSIDLVENSNKPLTVSAATRGASPRRRLTSDGLAFISKSTNITEKSIRPSTPSMSSRGMSPRRRLASDGINAVLDTEFADKNCRPSSSSAALRGVSPRSRSASNAISTGMTNAENDSRPSTTSSPSCQTLQSSRLESNGVNILSKDMEISSTVSGCTSDSRLDGAGALVKSIDVTEKLTVSTEDGGGEDDPGRIDSSDVVTSAVSSSLASQEVSSRHVTDDVKNASESVGATQKGNRPLSVKVPSRVASPRRRLASDGIDTISKSMDFAEKDKKPMTVSVPSRGMSPRRTARSDSADIMSKSMDFPLQVFSTRRVLGPDGANAMSRSMDLTDKIRQKISSTMQSSRVSPRKMPLAYNRIKGPEILSGDAESPGSADGNESQEENASSSPDAPSNSSEKSTPPKQLARRSPSPSHILICPSSSSNASSTPSFVSRRLPSPSRTRPSTPVSPCSSARSDSASSILSYIGDATRGKKSPTHTEDAHQLRLLHNRNLQWCFTTSYVDELLSIQKISAETMLYSVWDANSRMCDSMVIKRNYVQQLRQEVKLGIVLKEQVPYTRVTPMRHLA

SEQ ID NO: 62573 - protein, 77 aa, Zea Mays
MAMTVAAAWLPSTASRRRILSSPLPPFAAPISIHMPRRAPPPSPIHPKPRLFVAYAQLDFSRGHLYFYGCLCSFFII

SEQ ID NO: 62574 - protein, 75 aa, Zea Mays
MVIFTCMCINSLYLTWQGGTKTDPPATRYGRDASLLRQFLFIPPAWQELSPHRHPFRNQNTPSPICCRIDNRCAF

SEQ ID NO: 62575 - protein, 644 aa, Zea Mays
MAGSSVRGGSNCPPLFVTEKPTRMARYAYRLFASTVLAGVLLVWLYRATHVPPMSSGARWWAWLGLSAAELWFGFYWVLTLSVRWSPVFRRAFPDQLLRRYKEEQLPGVDIFVCTADPTVEPPMLVISTVLSVMAYDYPKEKLNIYLSDDAGSIITLYALYEASEFAKHWLPFCNKYQVEPRSPAAYFGTEASPPDACDRKEWFSLKEMHKDLAARVNSVVNSGKIPEVSKCKLMGFSRWSENASFRDHPSIVQILIDGNKRKATDVDGKVLPTLVYMAREKRPQEHHHFKAGSLNALIRVSSVISNSPVIMNVDCDMYSNNSGSIRDALCFFQDEQLGQDIAFVQYPQNFENVVQNDIYGNPINTVNELDHPCLDGWGGMCYYGTGCFHRREALCGRIYSPDYKEDWTRVARKTEDVIDLEGMAESLVTCTYEHNTLWGVEKGVIYGCPLEDVITGLQIQCRGWRSVYHNPPRKGFLGMAPTSLGQILVQHKRWTEGFLQISLSKYSPFLLGHRKISLGLQMGYSVCGFWAANSFPTLYYVTIPSLCFLNGISLFPELGGVPAMWRHCCRVVERAKDVAFQKNHLIPLGSHRHNPQNAWRHRVGVHPDGEGDRSAGPREVQEGDDGVWVLLRDVCDHYNRCTA

SEQ ID NO: 62576 - protein, 293 aa, Zea Mays
MATSSAGSMTPRSPITTPRSNHIDMLLAGKNAINESDDLPQIVELADIARCIANTPLDEESALSQMVTCIEDLQEIVNCRKHESLTVQTFGTRIEKLHREKYLQLCDSVDMDKVDSASTIMDEEDNVVRSLRASPVHPIKDRTSIDDFEIIKPISRGAFGRVFLAKKRTTGDLFAIKVLRKADMIRKNAVESILAERDILITVRNPFVVRFFYSFTSRDNLYLVMEYLNGGDLYSLLRNLGCLDEDVVRVYLAEVVLALEYLHSMHIVHRDLKPDNLLIAHDGHIKWGFTVWR

SEQ ID NO: 62577 - protein, 168 aa, Zea Mays
MLDSSIDVCCEGRRKGIDFIQPIVCRSTVQGRHLISDDNGYVCSALSINPWSHCCPTTGDRFSCQGCELDLQCCNSYEYCVSCCLNPSKIKKEDVLKLKVAKPVTAGTYTNVFDFCMGRCRHSSASVVHENAYASDFHHCFSVQQNSSGSTESSSVSKLLGINVVVGS

SEQ ID NO: 62578 - protein, 148 aa, Zea Mays
MSENNIQEVRIMSAGFDKQILAQKLSKLNSSQQTIETLSHWCVFHHRCCQQVVETWDSEFHAAPVERRVSLLYLANDIMQNSRKEGNGYIAEFMRVIPAALNGVLTVRDDFGRNVPKRLADYSIKHACCFASNQHRSMEAENSLTTNV

SEQ ID NO: 62579 - protein, 1130 aa, Zea Mays
MWNVIITSFREEDLIDNREMDLLLVPYCKDRELDIFQWPPFLLASKIPIALDMAADSGGKDRDLTKRIKSDPYFSFAIRECYASFKNIINTLVFGQREKDVLAQIFAVVDQHIEDETLIKDLNMRNLPALSKKFVELLELLQKNKEEDLGQVVILFQDMLEVVTRDIMEEQDQLGTLLESAHGANSRKHEGITPLDQQDQLFAKAIKFPVDESIAWTEKIKRLHLLLTVKESAMDVPTNLDARRRISFFANSLFMDMPNAPKVRNMLAFSILTPYYKEDVLFSLQNLEEPNEDGVSILFYLQKIYPDEWKNFLERVGCKNEEGLREDEELEEKLRLWASYRGQTLTRTVRGMMYYRKALELQAFLDMAEDDDLMEGYRATEVMPEDSQLMTQCKAIADMKFTYVVSCQQYGIQKRSNEPCAHDILRLMTEYPSLRVAYIDEVEAPSQDRNKKIEKVYYSVLVKASVTKPDEPGQSLDQVIYKIKLPGNAILGEGKPENQNHAIIFTRGECLQTIDMNQEHYMEEALKMRNLLQEFEKKHGVRYPSILGVREHIFTGSVSSLAWFMSNQETSFVTIGQRVLANPLRVRFHYGHPDIFDRLFHITRGGVSKASKIINLSEDIFAGFNSTLREGNVTHHEYMQVGKGRDVGLNQISLFEAKIANGNGEQTLSRDIYRLGHRFDFFRMLSCYYTTIGFYFSTMITVWTVYVFLYGRLYLVLSGLDEALATGRRFVHNAPLQVALASESFVQLGFLMALPMMMEIGLERGFRTALSDFILMQLQLASVFFTFSLGTKTHYYGRTLLHGGAEYRATGRGFVVFHAKFADNYRLYSRSHFVKGIELMILLVVYEIFSQPYRGAVTYIFITVSMWFMVGTWLFAPFLFNPSGFEWQKIVDDWTDWHKWISNRGGIGVAPEKSWESWWEKEQEPLRYSGKRGTVVEILLALRFFIYQYGLVYHLNITKKITKDNQSVLVYCFSWVVIFVILLVMKTVSVGRRRFSAEFQLVFRLIKGLIFITFTAIVVILIAIPGMTVLDIFVCILAFMPTGWGLLLIAQAIRPVIHKTGLWGSIKALARGYEILMGLLLFTPIAFLAWFPFVSEFQTRMLFNQAFSRGLQISRILGGHKKDRGTRNKE

SEQ ID NO: 62580 - protein, 230 aa, Zea Mays
MANLNVSALGDDPIREWILTEGKATQIKGIRSIGGGCINSAQRYDTDAGPFFVKTNSRIGPEMFEGEALGLKAMYDTKSIRVPLPYKVGSLPTGGSFIIMEFIEFGRSRGDQSDLGRKLAEMHKAAKSDKGYGFPVDNTIGSTPQINTWTDDWIEFYSKHRLGYQLELASRRYGDSAILEKGQRLIKNIRPLFDGAVIEPCLLHGDLWSGNISSDSNGDPVILDPACYCK

SEQ ID NO: 62581 - protein, 586 aa, Zea Mays
MPRWGDAEEGAAADEAIAAAAAVRLANKIRKRRAVSSSGGSDPAAGRRLRSRRPAVLLPRRRTSAGGDMSESSRGRHCRGGGTRLADGTWPSASARRLVDAFWQDMDSDLLEGDAAAAAARRSLVQWSGASTELSQRSRSKSKILEADGKGSRRNGHARWLSADMTSNGHARWLSADMTSNGSGMEVGKFSQDDVSRCPEKTVNLQDLQNSLIASKELVKVLAHIWGPGELNPSSVSLISALRSELDVARSHVRKLIKEKKSNPYEIEDLKKQLAEEMESWKVKQKEKVANALQFIVSELDTEKKSRKRAEKTNKKLSVALANTEASLQAVTKELERERKSKGRVEKICNELIKGIDEDKAEVEALKRETEKAQEELQKEREMLQLADEWREQRVQMKLLEARLQFEEKNAAVNQLRDELQAYLDTRKEQEPMNDPMQLSHASENGATAADDVVPDRNGGNFSEDDASEGSDIHSIELNVDGVNRTYTWSYTPSSKGRQRSASRHESFSDRGMDGVNSWRLEQSFRGMDEELEGDWAEGCSNGILTMDHDEERYLAIKNLREQMLAGSGFILSQGRENAERECCGL

SEQ ID NO: 62582 - protein, 477 aa, Zea Mays
MTISRSLPRLPMSLGSTPPPSSPSTPRPSRFTTFGPFVSAVLDPTSSHYPRWRAQVLLTLRRFALADHVLYDLVTPLSPSWAQMDSVVLFWLNNTITVELQDIVRDQADTARQLWLALEDQFFRNREAWALHLDDQFHLFSQGDLSVGEYCRQMKGMADSLRDLGEPVADRTVVLNLLRGLSPRYSHLKALIKRTVPFPTFHVVWNKLLLEELIMETEAPAPAPPLYSSPPGGQAPSREQAPRSLSIGAPTRPPPAVPAAPRSASTANGGRRSRKGGRGGGGSTRGGPFGQGGGQAWPSFYNPWTRTISMWSGQASSASYPPVLALLTAPPYGVPPTPPYGVPPTTLAPFQLSPSWTTTSTPWSPLAGGWNSASLVAAFSTMAMTPPPSDWVVDSGASYHTTPTAGTLSRSHPIHSSHPSSIVVGNSATLLVTSVGASVLPGPFGVLVAPHITHNLILFVGSPPTTLVPFLTPLFFL

SEQ ID NO: 62583 - protein, 133 aa, Zea Mays
MNRGDRALSQPMQLEQVFSDRDSEDEVDDDIADFEDRRMLDDFVDVTKDEKLIMHMWNSFVRKQRVLADGHIPWACEAFSQLHGRQLIQNPALLWGWRFFMIKLWNHNILDARTMNTCNTVLQILQEESTGLK

SEQ ID NO: 62584 - protein, 1085 aa, Zea Mays
MQEGLGQRMHVPHGINLCIATSSMPFQAQSFIEPSTGQVNPPVTSENLSANSQAVNDAGAVEGTDMNEKSVQKPKRKKHRPKVIKEGQSAKLQKPKTPKPPKENGNQPTGKRKYVRRKGLSAPAEQIPLCADTHTRAKPGVVQRCLDFDVEDQHGHLDLVPQTQETEIQTGPADTQPSISGVERSNVQISYHWGGTSSSISSVDPIAGIHGLQADCNSKRVSFDLNNSIVSQLPTNYSSPMDSSEQFFNFDLREEVRTNQLLPHLTSSVDHTRHPSVNFDQYISTSQDCPEKSPRHYQMVSSYRILENMTTASQYTERVSMGGNFNPEACMGEDAIIKQMAQSYRPLESPFVPPNHNERDMMNGNLNEFPVKNDYLKFSTNSNYQTGAGFDHCSPDYSDVLAMGTKREHDAISGHQISLGIDFINSNRTRKFCSDDPLSTSSQTSYCPQSCKRMRPEDHSNQLHGTMGDRRFSRWKGSVVDSVVGVFLTQNVSDHLSSSAFMAVAAKFPVKIEVPKKPVAEMSHTPEQKDSCSGLFGDSIKLQGNIYIEEISDIKSLITTEDNEESNNNELIGNSAGNGVNCATGGCHVSYSKSLTGSHGNGLSGSVFPTTGFSGVVETEDGSLEDVISSQNSAVSSQNSPDYVVRRTDPIGSSSLQNFTEEGCIMRNMSNGTGISTDYTLFLPIQDPKGMLGLSEYCGLNPLPVSGVNKDMLLDLNRSYQPLHTYMPYDQNSESDFTGVSCLNHMGKSFHTGPDKVNLSSVTQSEASLYPIDPLEQGDFSPLIKQNFQPLHSSDEVPFFKEHSSCNDFLRNKTEAHFLEPLVCSNPQEVYTTSTDQMGAEQSQSGCGQKYNDARVQTASHERHQSSTLCDNQNSCSVVLQGVASDSTQKFVDTQKGPSKARQNGSKAKVRGRPKKKTDDWDSLRKKVLSNGGDKQRSHDARDTVDWEAVRQAEVREISETIRERGMNNMLAERIKEFLNRLVTDHGSIDLEWLRDVQPDKAKDFLLSIRGLGLKSVECVRLLTLHHMAFPVDTNVGRICVRLGWVPLQPLPESLQLHLLEMYPMLEHIQKYLWPRLCKLDQRTL

SEQ ID NO: 62585 - protein, 958 aa, Zea Mays
MAEIRKYAMSNQPPDIPQILLEAQSRWLRPTEICQILSNYKKFSIAPEPPNRPQSGSLFLFDRKILRYFRKDGHNWRKKKDGKTVKEAHEKLKVGSVDVLHCYYAHGEENENFQRRTYWLLEEGFMNIVLVHYLEIKGAKQSFNHAKEAEETAGLSNADSPACSNSFASQSQVASRSMDAESPISGQISEYEDAETDNSRASSRYHPFTEMQQPVDGTVMEYPGGFMESTLYSSVATLGNSLEDGLQTFMSEALYTNNLTQKEVDALGAAGITSSKTENDGYTDQSVRYPLLKQSSSDLFKMEPDGLKKFDSFSRWMSNELPEVVDLDIKSSSDAFWSTTETVNVADGSSIPINEPLDVFVVSPSLSQDQLFSIIDVSPSWAYNGTKTKVLITGTFLAKKEDVENCSWSCMFGDSEVSAEVLVDGSLRCYTPVHHSGRVPFYVTCSNRVACSEVREFEFRDSETHYMDISDKHTTGINEMHLRIRLDKLLSLEPEDYEKYVLSNGNKSELINTISSLMLDNNLSNLALPSDEKELCTVQDQNLEKQVKEKLYYWLIHKIHDDGKGPNVLGKEGQGAIHLVAALGYDWAIKPIVAAGVNINFRDIRGWTALHWAACCGRERTVGALIASGAASGALTDPTQQYPSGRTPADLASENGHKGIAGFLAESALTSHLSALTLKESPSGNVEEICGLTAAEGFAASSSSQLACVNSQEESLKDSLGAVRKSTQAAARIFQAFRVESFHRKKVIEYGDDDCGLSDERTLSLVSLRNPKSGHGDSHSAAVRIQNKFRGWKGRKEFMLIRQKIVKIQAHVRGHQVRKNYRKVVWSVGIVEKVILRWRRKGRGLRGFQPEKQLEGPSWQIQPAKAEAEDEYDFLKDGRKQATGRLDRALARVRSMNQYPEARDQYRRLQACVNSLRESQAMQDRMLADSAGTDGGDFMTELEELCRDDGDAPMSTIS

SEQ ID NO: 62586 - protein, 82 aa, Zea Mays
MLVSLMYVHIHSICHKLNFSEENQTPSKNVAPQEMVPALNTLEPIKCTTSCGKEAICLAVALVPPVRYKGMFSFWSQNKLAS

SEQ ID NO: 62587 - protein, 146 aa, Zea Mays
MTLAKAQSDDSGPITLSPIGDSESGAPASRLAVSSSSSCTSIPRLPSCASSAPTKATATAGGGDEAEAAGGPLGWPDPVLRPQAGAGAVCDGPSHRVADALHENSFNDITGKVVADFGCGCGTLAVASALLDAEHVLGIDIDPTIT

SEQ ID NO: 62588 - protein, 250 aa, Zea Mays
MAGLDLGTSSYLHHHHHQSLHLHHEDGGRPPGSKNKPKPPVIITRESANALRAHILEVAAGCDVFEALTAYARRRQRGVCVLSAAGTVANVTLRQPQSSQAGPASPAVATLHGRFEILSLAGSFLPPPAPPGATSLAAFLAGGQGQVVGGSVAGALIAAGPVVVVAASFSNVAYERLPLEDGDEVAPPPPAGADQQQPGGVPFDPAAAAASAGLPFFNLPLGMPPMPMVGHGGWPAGSPGGAGVGRPPFS

SEQ ID NO: 62589 - protein, 502 aa, Zea Mays
MESESSAQIKDENKDVDSDDRPGMPAAVSVYEQKVNSKSTARKVKRQPEISNSEMVTRKKAKVTKDPHHDGSTTSDVKQQACTCGVKTEKKKRKSSTTKVIPKLLFVDHFCKEKYVSAEEGKVSSNIGTTTQGDTTQADLSSKGKSCRKIGIQQALIEECKSTKVANDTGSDKFSHSVNNVIDLKDKLSHCLSSRLLRRWCMFEWFYSAIDYPWFAKSEFVEYLNHVKLGHVPRLTRVEWGVIRSSLGKPRRLSKQFLHEEREKLSQYRDSVRQHYAELRSGVREGLPTDLARPLAVGQRVIACHPRTRELHDGNILTVDNNRCRVQFDRPELGVEFVMDIDCMPLHPMENESLRQKNIVNKYLSEVKLEDQMNDLGSGGAARFASNVNVNCGDAAFQIPSSHPVGTVDSIVQAKATVNEVAIAAQQAMYNQPCSLSQIQEREADIRALAELSRALDKKEALLVELRHMNEEVSRKQKDGETVRVEAFQDAICYGACAAKRF

SEQ ID NO: 62590 - protein, 403 aa, Zea Mays
MWRGTRMYSLLGVLLLLALAYLNWHPGHGPSAGGPGGFKLPMPWLQPRMSFVGRAGTHFVDTLTGAPIYINGWNSYWLLSARSPSLSVEMLRRGRRMGLTICRTWAFSDGGPGALQISPGRFSEPVFQMLDYVIYESRRNHVRLILCLVNNLDNFGGKAQYVQWAQAAGVNVTNSTDSFFFHPTIKGYYMEYVKAILTRRNTYSGIKYCDEPAIFAWELMNEPRCVSNSSGPYIQSWIEEMAAYIKSLDRKHLITVGTEGFYGPGRGERLGVNPGDWAASVCSDFIQNSAVKDIDFASVHAYPDSWLPKASMEEKVKYLSVWVDSHLNDSEYVLRKPVLFTELQAGSGALIWQLMVEGTQMYHDDFSMVARDRPSTYKLMKEQSCRLQSLYGKEGDPTWKCSP

SEQ ID NO: 62591 - protein, 147 aa, Zea Mays
MTFISEFSHRSAVTSFPSSSHPSRPPPPGSRRRQFLGPDRDTPAILHQVPRPSPIKEIPDSSYLVSGSFDQAVLTALSVADEIHMASLESASDQDELLEMLESAGMVLVQALKELRRASEMFAQLKMMFGSVPSVPARVFLTGRIYI

SEQ ID NO: 62592 - protein, 360 aa, Zea Mays
MNKIISFDNVNGILTCEAGCVLENLSTFVENEGFIMPLDLGAKGSCHIGGNISTNAGGLRFIRYGSLHGNVLGLEVVLADGTILDMLTTLRKDNTGYDLKHLFIGSEGSLGVVTKISVLTPAKLSSTNVAFLSCNDYTSCQKLLLAARRSLGEILSAFEFMDHHCIDLAMQHLEGVQNPLPASPYKFYVLVETTGSDESSDKTKLEAFLLRSMEDGLVADGVIAQDISQASNFWRIREGISEASVKVGAVYKYDLSITVEKLYDIVEEMRCRLGDNAEVLGYGHLGDGNLHLNIVSSKYDDNILAQIEPFVYEWTSAQRGSISAEHGLGLMKAEKIHYSKSPEAVSVSILPCQHLEVCCT

SEQ ID NO: 62593 - protein, 323 aa, Zea Mays
MSYCGQNAGGVLLHMTDLFTTMTSAPSAFLKPKCALWDCPRPAVGSERWHDYCSMYHADLAVQEEGPPGTMPVIRPRGIDLKDGPLFAALSAKIQGKNVGIPICEGAATAKSPWNAPELFDLYIFEGESIREWLFFDKPRRAFVSGNRKQRSLPDYGGRGWHESRKQAMKDFGGLKRSYYMDPQPSNSYEWHLYEYEINECDAFALYRLEFKSSDAKKIVKSKLACNPLNEIQQQMVRLSADSPVDNKRTARGRQHANPTDVDTNIYSVPNTTAQANVPNAYQPGSQVDQMTYLNGSVVYGPHLPYGYSTERSDFYWNSADGT

SEQ ID NO: 62594 - protein, 644 aa, Zea Mays
MAAEAPPSASASSSSAPRPPAAAASASGGGAAGSAESYIGSLISLTSKSEIRYEGVLYKINTEESSIGLRNVRSFGTEGRKKDGMQIPASDKVYEYILFRGTDIKDLQVKSSPPPPPPQAASLHNDPAIIQSHYSQPASTSSNLPSAGGAVLPDLSSQAVQYGLQRPTFQSNLPLYQPGNAPRGSSAAPPAGNAPWGSSAEPPAGTTLSVPSMYWHGYYAPSSGLPPHLQQPLLLQPTPGLSVPQNLQYPGLNPSLPSGMQKLSELQPSLMPPINSQGSSGILPTTTAPASATLLAPESSKPQVPNMGSLFTPATSLGATFPYPSQPTPVAETSATVSQNITSFSSNKATALPGSTLSYQTASQSVSSTIAPSSSAQVEMAVPLLASSGQLLQNTSSMLSSSHSMQAPLQVASKEVKPVEPKAKVAEPLLPDPLLPDPPSQSLPENKEPILPLPKQTPQKYNGSGLHNHHNFRGRGRGRGSASVTTFTEEFDFTAMNEKFNKDEVWGHLGKKSQSRDKDGEVGDDVFDEDLEVEETDNPELSVKPVYVKDDFFDSLSSGTFGRGGPNGRGRPSERRRVDTETFGEFPRHRQPYRGGARGYRGGGRSRGSYYGGRGYGNTGTGGYGNTGTGGPGNSYSHRGYGRD

SEQ ID NO: 62595 - protein, 271 aa, Zea Mays
MNGGEYGRMEEMARQLVARLAATPDSALRGLPFLHRVLTLPLLSAASAVLRLSLLLSRLRSRRALPVPVVSVGNLTWGGNGKTPMVDFLARSFHRLGVSPLLLTRGYAGGDEPKMLRRRLSDTSAKIGVGANRTAVASSMLQEYGFIHHFQNTFAEKKLSSVCKLESGNRIGVAILDDGMQHWSLLRDVEIVMVNGLAPWGNSHFIPRGPMREPLSALGRADIVVIHNADMASEMQLKAIRSAIEDNNATCSVFYSRLAPSHFFENSVLKA

SEQ ID NO: 62596 - protein, 74 aa, Zea Mays
MGKQMDHGGKHGGQNSNEVSFSLKADGGRKHPAVRPRASAVCAPYHPRAERVLRPPPARNENNFGFFRFFENRF

SEQ ID NO: 62597 - protein, 279 aa, Zea Mays
MTFLAPIPTFYRIYKSKSTEGFQSVPYVVALFSAMLWIFYALIKSNETFLITINAAGCVIETIYVVMYFVYAPKKAKLFTAKIMVLLNGGVFGVILLLTLLLFKGSKRVVLLGWICVGFSVSVFVAPLSIMRRVIQTKSVEYMPFSLSLSLTLSAVVWFLYGLLIKDKYVALPNILGFTFGVVQMVLYVLYMNKTPVAATAEGKDAGKLSSAADEHVLVNIAKLSPALPERSSGVHPVTQMAGVPVRSCAAEATAPAMLPNRDVVDVFVSRHSPAVHVA

SEQ ID NO: 62598 - protein, 515 aa, Zea Mays
MHLVAGAIGNLAPKLLRLLRDEYSLQKGVRKQVQFLSEELESIHAALRKVAAVPPDQLDEQVKIWARQVRDASYDMEDALDTFLVRVEGRPEPNCGHGRLKGAAKRMGRLFKKANAHRHVASVIAGIKMQLQEVAERRARYRVDEVVATRPAAASAIDPRLEAMYKQATQLVGVDGAMGDLVLLLSLEAEEASNCKLKAVSILGVGGLGKTTLAKAVYDNLKSQFDCGAFVSVGRNPDLKKVFRDILIDLDKHKYTAEVNLSIFGETQLIDEIRELLESKRYFIVIDDVWEKQPWEIIQLALVENNRGSRIMSTTRNSEVTSGEVYRPRPLSDKNSKRLFYTRIFGRDGKFPGNQVDEVSDRIVQKCGGIPLSIITMASLLVDKPRAEWSELCSSTGFRDKDIEQWIAEDFVHKKPGTWLFEVGEGYFNDLVNRSMIQAVVSKRDGIIDGCRIHDMENFVTVLDSESDEGTSSMSRARRLAHQRSSMDAHWDNRHKGMQKIRSFIAYRCHDGTSG

SEQ ID NO: 62599 - protein, 57 aa, Zea Mays
MKVGEVAKITCKSEYAYGAAGSPPEIPPNATLIFEVELVACRPRKGSSLENLRSNGS

SEQ ID NO: 62600 - protein, 158 aa, Zea Mays
MDRDLKLHKSIDCFFSGTTAVAVIKQEHNLIIGNLGDSRAVLGTRDENNQLIAVQLTVDLKPNIPSEAQRIRQRRGRIFALPEEPEVARVWLPKYNSPGLAMARAFGDFCLKDHGVISTPDVSYHHITEKDEFVVLATDGVSRLSTYAPFIPSVFRSF

SEQ ID NO: 62601 - protein, 781 aa, Zea Mays
MASPRRIPSVPARSGNKENISQDGEAPLDFATLPKEGPATTRRKKKLAGFNLRKSIAWNPAFLTEEGVLDNSELSVLTGSQPMANRSPGSGVSSIMSPSCQSGRYGNTYVRKEAAGNSHGKLPARYHRAESQGRKLFSSAKTPQGDNQKESAGTQNRSSARIIQICTPRVPAGSIQKKVQNSSASTSQMSRIPKQLRPSLPKVPRSTSSVTNNLESHKKIAPVKAELVHRVTGFPARLKINPVSSGPSIEKAVVPAVTAIHEEATVKCKKNPAHPQISPSTPFDSTVSKLAKPSALRLPSPSLGFFTQEKAHVPHGDAAKRNVGRCFSSNTSALDRPPRYRQSEESRLHLAKQLSTNGTVASNLVLPVTREGHLKSLVVPENESSSKVIITYLEKSGNVNNQAMPKADFLLAGTGATDTTQPMNLEKKDDAGNSETLLVEGMDDIKEIEPLDNFYAPEAICSSTIRPVEDSFSLEASYSSTKPIVESKLSLSCISSKVHSSSELSCQGKSVSDPSAAMDMENSNVGDTALSASLSKGRSCTPALDLLQGFYSFDRQNIECPMLMESVSTICADQLPHCDSLSDETPALAGSHSDLNDSLCDEAKPALSKEPNTEGEMELQTNSTIAVKETPLLDVGCGHIHNYRTTDCSTRLEAPTPCVERRHALLVEPNMEEKMVLDTNRLSAIQYTPHIEKNKALERSPANTIRKDHLKNLIPFTEEWLAVMESCGQEVLEQKTGAVQNSPPDKTPPEPSPWSPVKRKAQDVGPFDCTKYSKSIRTSGT

SEQ ID NO: 62602 - protein, 65 aa, Zea Mays
MKKHLDRDPLPPLYTLHCKHTCPCLIYITCLRTAVSFLLFAPLLSLHATNLICFLLFSHGHLLTS

SEQ ID NO: 62603 - protein, 232 aa, Zea Mays
MQTLRPAPASFLVPPAPQLLRTAPPPAPRANAAALAAASHGWFPSPHRACRRRRRVTRSASSGAASATVASVDDAKKDVLIALSQIIDPDFGTDIVSCGFIKDLEVSEALEEVSFRLELTTPACPIKDEFEQKANEVVAALPWVKKVDVTMSAQPAQPVYGGELPEGLQKISNIIAVSSCKGGVGKSTVAVNLAYTLAGMGARVGIFDADVFGPSLPTMVSPENRLLVMTYL

SEQ ID NO: 62604 - protein, 118 aa, Zea Mays
MLRPTVVLSPMWTHLLLELLCYLNGHEGPLQKNNEQTPDHNSQALVDGAKHALVERSNLNGGGTKLDMVGSGWGILFVEKLVPIIANLFLEAPPNERFSVSPEVIQGLGRYLLFMIYI

SEQ ID NO: 62605 - protein, 74 aa, Zea Mays
MSPSTTTLIGVVVPTPVGPLSVSPFSLETISSPSLRSGSPSSPAPAPRPSTAPWPMASLRRCGFVSCSRSCTVR

SEQ ID NO: 62606 - protein, 201 aa, Zea Mays
MPETAAEANLRRQLEQTLAAEPSSPLHHYNLGVFLWDRAEAEQEGDGEEARKLRAEASEHFLAAAKLNPNDGVPFRFLGHHYARGGDNQRAVKCYHRAVTLNPDDSEAGDTLCGLLDVEGKESLELAVCKEAAGKSPRAFWAFRRLGYLQVHQRKWSEGIQSLQHGIRGYPTCADLWEALGLAYHRLGMFTAAVKVCCFQL

SEQ ID NO: 62607 - protein, 62 aa, Zea Mays
MVLILVLITSPVLLLVHLRGYLVSGQLRKLVTLFLQKDMENLLHYFAKAHVLQNSDILRSCT

SEQ ID NO: 62608 - protein, 430 aa, Zea Mays
MPRGFLPTNDTLPKTLDALLSPRSRTYARLPSPGCRDASLFPSCSPPPNPRCAASTEPQPEPIPPSMPDHAPSPPTVPQTLDARLQRSPSPSPSRLQRRILPHHHQRRCQASGSSADDVKWSNIDVQEFIAFDPVYGPQTIYSELEHRTLRKLFKVDAADYMLSLCGNEALMELSSPGKNGSFFYLTNDDRYMIKTMKKSEVKRIAIAYLLAAVCEIWLKGDDDVDSGYGLLRRYRYQLFVGLVLSIAYSILLYGIYVPDWEYQIAGPGSSSTKKSFFVKCGVRGDTRPACNAVGMVDRTILGIDHLYRRPVYVRTKECSIDYLENGPLPPDAPSWCQAPFDPEGLLSFVMAIVTCLIGLQFRHVIIHFEKHRGRIASWLVPSFSMLALAFVMDFVGMRMNKPLYTMSYTLAAGAAGLLFPGIYVLVGPS

SEQ ID NO: 62609 - protein, 129 aa, Zea Mays
MMAAFLVERRGAARGGGCGDTTTGRGGVRSMDADMGMSSHAAANKPAPGPAPFLTKTFQLVEDHRTDHVVSWGEDGATFVVWRPPEFARDLLPSYFKHNNFSSFVRQLNTYEDRGRQVGVRQRVLQEGR

SEQ ID NO: 62610 - protein, 145 aa, Zea Mays
MTPNSASYLPGTPGGQPMTPGNAGMDMMSPIIGGEGEATWLLPDVLVNVLSGGDDGPGVVREVLGDGSCRVALGSSGNGDMVTVLPNEVEVIRPKKSDKIKILNGSFRGHTGKLIGIDGSDGIVRLDDTYEVKILDMVILAKLAT

SEQ ID NO: 62611 - protein, 119 aa, Zea Mays
MQSSSMKREISEAHDTIRFGINAGVKADLAPPHPLQSTIQSETKFWADKKKFGTDAIYGSALNIRKDLDAQILSRFQRPPGALPSSLLGYEALTGSLDDFGFEDYLNRRPFEVKLIYLA

SEQ ID NO: 62612 - protein, 255 aa, Zea Mays
MKENLLDSWSMVCRWMDLSDWLAYRATGDDTRSLCTTVCKWTYLGHAHMKQWKESDSRDMEACGWDNVFWEEIGLGDLLEGNCAKIGRSVAFPGHALGSGLTPTAAKELGLLPGTPVGTSLIDAHAGGVGVMESIPDAGSKAGLSDEHAICHRMVLVCGTSTCHMAVSKDRLFIPGVWGPFWSAMIPEFWLTEGGQSATGALLDYIIENHVASPLLSNHAASQSISIFELLNKMLLSMSQEQNSPFLSALTQDTQ

SEQ ID NO: 62613 - protein, 371 aa, Zea Mays
MDVGRRLSLARVPAVAALMVMLSLSSSFCVSSSAARAVARPGAAEQLQRHPVVLIPGAGGNQLEARLTEGYEPSSLVCRVWPLVRGRGGWFRLWFDPSVLVAPLTRCFAERMTLSYDADADDYRNAPGVETRVSDFGSTSTLRGGPRPQSQAPHGVHEHSGEHAGGGRLRGRPRPVRRAVRLPVRAGRAGAPVAADRREQPLAAADAQRVRQHHAGAVAGPQPLLLRQEHDAVPPGHRLRGRRGAVPRADTAARRGPAGARRAPDVPRGHRRRHGGEPRVRRPRLRRGPREGGLWRRRRDGEPGQPHRPDQGVVGLAGAGRRGGGAAQGVAFRHAQRQERAGADHKDHRFYQPERHELSSFLLECFALVDN

SEQ ID NO: 62614 - protein, 91 aa, Zea Mays
MVFEYSWQNFMVYKIPSFHLQKIGQALLPLPGDAKSQPALATATQFAATNICTSRGRYRRSHHGIRSCNVHSSFTLYKLPRLWCPTRWGVV

SEQ ID NO: 62615 - protein, 73 aa, Zea Mays
MRPPCPGWQLALECSSFGSFLCGRLVSCCGPLSSLVSLWLAPCEVNAISCLVLLQCFHLLLLWMGHSAFSSVM

SEQ ID NO: 62616 - protein, 375 aa, Zea Mays
MAFAASEGNLSPALPLATLIGRELRGDGTERPHVRYGHSGFAKRGEDYFLVKPDCLRVPGDPSSSFSVFAVFDGHNGVSAAVFSKEKLLEHVMSAVPEGISREDWLQALPRALVAGFVKTDIDFQRKGETSGTTATLVVVDGFTVTVASVGDSRCILDTQGGEVSLLTVDHRLEENAEERERVTASGGEVSRLNLCGGQEVGPLRCWPGGLCLSRSIGDTDVGEFIVPIPHVKQVKLPNTGGRLIIASDGIWDALSSESAAQACRGLRAELAAKLVVKQALKTSGLKDDTTCVVVDIIPSDHCSTPPALSPKKNQNKLKHLIFGKRSHSSVGKLSKSASLGSVEEIFEEGSAMLEERSLRFLDAVCARMEGLSNY

SEQ ID NO: 62617 - protein, 1149 aa, Zea Mays
MEMNLRAESPLCSRGRPALVVRPAAAATGLALSVVRCSRFTRGGLVRCMVSSSDYPKRNPRRASTSKSKGVASGGYASRPTAESSTKKIEQSRNNEGDFSRANGSLYGEAAEQASTAEESSQVYMTGDILSGAERDGAGTEEEADQNQSSALPSASMDDDSIDRQLDEYRGKISALVSSKPEPSSLASVAGQNESVGGFHGQHEPITGSEEHGSSIVDAPTKGRLFAEAVVGHKDFTESAAGKASSENEEGQAVSLEDDVGISTDADEELPVSEDDPEVLLRRLQELADENYSTGNNCFVFPEVVKADSMIDLYLNRSMSALASESDVFVKGAFNGWRWNRFTETMHRSELRGDWWCCKLYIPKQAYRLDFVFFNGDTVYENNNHNDFFLEIESDIDEHSFEDFLVEEKRKELERLAAEEAERKRQAEERHRREEERAAMEADRAQARSEVEMKKEKLRQMLSSASRYAENLWYIEPNTYRGGDRVRLYYNRSSRSLMHNTEIWMHGGYNNWIDGLSIAERLVKSHEKEGDWWYVEVTLPERALVLDWVFADGPPGNAWNYDNNGRQDFHAIVPNNISDDIFWVEEEHRIFTRLQQERRERESAERIKAERSAKMKAEMKEKTMRAFLLSQKHIVYTEPLEVRAGTTVDVLYNPSNTVLNGKSEVWFRGSFNRWTHPSGPLPPQKMVKAENSSHLRTTVSVPLDAYMMDFVFSESEEGGRYDNRNGMDYHIPVSDSVAREPPMHIVHIAVEMAPIAKVGGLGDVVTSLSRAVQDLGHKVEVILPKYDCLILSSVKDLHYQQSFASGGTEVKVWFGKVEDLPVYFLEPQNGMFWVGCVYGKNDESRFGFFCHSALEFLLQKGSSPDIIHCHDWSSAPVAWLYKEQYALNGMGNGRIVFTIHNLEFGAHHIGKAMAHCDKATTVSDTYSKEVAGHGAIAPHYYKFHGIRNGIDPDIWDPYTDRFIPVHYTSENVLEGKSAAKKALQQMLGLQQTDSPVVGIITRLTVQKGIHLIKHAMHRALERNGQVVLLGSAPDHRIQGDFTNLASKLHGEYHGRVKLCLTYDEPLSHLIYAGADFILVPSIFEPCGLTQLIAMRYGSIPIVRKTGGLYDTVFDVDDDKDRAQAQGLEPNGFSFEGADSSGVDYALDRL

SEQ ID NO: 62618 - protein, 155 aa, Zea Mays
MASRKRTLPRVVPSSPHLLLSPFRICAAIAGVAGAGRPRNPATGGRRVDAGAHKVSLLEQLHARRLAVLKALTSCSTSSSEMMEKLNEIVFDILEKSIIRGNLQYASLSALRRHPLDLGNQAFLHRAVEGNMTPEAALDHVRSIRPRVLLAPSQC

SEQ ID NO: 62619 - protein, 522 aa, Zea Mays
MQGQRNSVEHFADVFGFDIASSSGNPVMDQQSYWNNVLGSVESQNLQGYQMNHSDAAMPYGNETQQDGTFLGFWESGEASASGSSNNAKTEHLSIGGGLRIGERRLVADNGISLDVDINLNANVNDLCGQSSNVNCTSQGPEHYGGGDRSVVNSQPTDLRLHPYRTFLLDAEQADSFTLNPSENPLCDFSLMQESIDQRPGSSLDGRRLACKRKNVEGPNGQSSAGASTSFSHRNDNAFHNIASSSYNPAPIRNPSSPNCLPVPSSIDDQLPRYGTNAGLSAGTYDLNGGVNNAGNSQRSFRARITTSQQIAPCSVWPSSNAIRLPNSWNHQPPHFQSAFDDTQEVIPVVSSLNLQYQHPVNVSSVPPAANRFTGHGASSSRAGSLENRILGSQEAPTRNVVPANYSDLVPPSVVDPRRLLPEPSNWSSDVRGTAISGSIPPVSRANNSATVNPPAGFSHQNLTRRHPRNLSEEIGRLSGALRGHQPPRLRPGFLLERQGDGVWGVPLSTRGREGRRLMEVR

SEQ ID NO: 62620 - protein, 73 aa, Zea Mays
MEAKFFRFLKLVGVGFKARSESQGRELFLKLGFSHEFAGAIRSSKAPEVYKGKGILYIDEVIKLKPGKKRKNK

SEQ ID NO: 62621 - protein, 217 aa, Zea Mays
MTEDRAHKVADEPAASGRQRPERKKRKWDQPAEDLVSAAVTAAAVSGMPVMNFGALPGVVLPGVTAYGAATLPSVVPVPYSLPPHIAPSVLQNAAAAAQKLSQAKIPDEVIAREIVINDADPSVRYKLTKRQTQEEIQKCTNTVIITRGKYHPPNLLPDGEKPLYLHISAGSQLKDTAERIKAVDRAASMIEEILKQGTTSESISVPFSSSTGQIHH

SEQ ID NO: 62622 - protein, 234 aa, Zea Mays
MADLTALPEGAWYCSTDCVRINQTLQDLLNSGGEPVLAMDLDVIKKKREVKGFNDDDADLDVRWRVLKDKSSDDSKLVLSKAVAIFHETFDPIIQVSTGRDLIPAMVYGRSARDQDYTGMYCTVLTVNNIVVSAGLFRIMGSEIAELPLVATSRDRQGLGYFQALFSCIERLLSSLEVKHFVLPAAEEAESIWTERFGFAKISQDELREYLKGGRTTVFQGTSNLHKLVAKLEC

SEQ ID NO: 62623 - protein, 469 aa, Zea Mays
MPEPGGRCLGDLGGQRQVLKGWPDLWLVGDKPGLRALSTAAMAAAPQPPPLEADQTLALPDVLLLRVLACLPEPQLTGAASLVCRRWTRLAGRLRRRLAVRDWAFVAHRLPYRFPDLADLDLFPASIAAPTTAVPHGAAASPLLTCGVVSLTLDTSADPPLGACRFIDDDALDRGLAAVAASFPNLSRLSATAASESGGLMAIAVGCPTLQELELHRCTDLALRPVSAFAHLQILRIVAASPALYGTAEGGGVTDIGLTILAHGCKRLVKLELQGCEGSYDGIAAVGRCCAMLEELTIADHRMDGGWLAALAFCGNLKTLRLQSCSRIDDDPGPAEHLGACLTLESLQLHRCQLRDRSALHALFLVCEGAREIQFQNCWGLEDDMFALAGLCRAFLQSQRAEVAARQQVTSCCKPRWHWDGKEGQGIFQKAYLTCPSTNQREGAQQFSRCCCLVGLLVETRLPHKVPSS

SEQ ID NO: 62624 - protein, 181 aa, Zea Mays
MFNKGQGKTMGSYYTLLNALIEDGRIEEAEELFGMVFSRYMEGLPRTFFMRMISFYYSVEAYDKMFEIFADMEELGVRPDGSIIRMLGDVFQKLEMMDKYEKLKKKYPPPKWDYRHIKGKRIRIRVYPDSNPEVAAKGDPDTDELEELESTHLNNELDEAASSGLDRSVLDDAASGDLEYM

SEQ ID NO: 62625 - protein, 137 aa, Zea Mays
MSFADLEAGALRAPLGRKARGGPNDARALVFQITTAVASYRRLLNSLGTPKDTITLRDNLHKTSQNILQLAKDAKDKLQKAAEADKSTDTSADKRIADMKLAKDFAATMEEFRKLQSLAIQRETAYKPVVPQNTQSK

SEQ ID NO: 62626 - protein, 411 aa, Zea Mays
MGPAVRSSVVIRATVVGLVLVGIALALPLAAALRPLREHVASIGAAASAGSWGDEHAFYKRDENDIGPYSWNITGTYKGSWTFAGATNGSSRFLEFVESKGDSVLELLSTPTKISGVHYVQGSVTFHDVIDNAHNGGVAQIRLEGVYIWPFRQLRMVANSGADGEPLQEEDYFLSNPYHLLRIFSSQVFQESSEEKNRRKNSLTYDMEKHCNTEIAAKVVRVSSNPNDGEHEKYRLEGLMESPAVDDDGECFSPILLNATSLNVEVYYNKAVNYTLMVTFISFLQVLLLIRQMEHSNTQSGAAKVSILMIGQQAIMDAYLCLLHLTAGILVESLFNAFATAAFFKFVVFSIFEMRYLLAIWKASRPLNSGEGWEIMRRELSVLYSRFYGIHEIQVAAHVQVQCAEGVRLIL

SEQ ID NO: 62627 - protein, 135 aa, Zea Mays
MMKGIKGSFADAASSAKIFAVLAGVQSLVACSLRKLRGKDDGINAGVAGCCTGLALSFPGAPQTLIQSCLTFGTFSYIIEKLNKQQPALALLPATGVMDPKAGQSVLPSFTLPPLDTMDEFSKFQNFLSSKFRGN

SEQ ID NO: 62628 - protein, 1493 aa, Zea Mays
MAGELGQQTVELGAVVRRAAEESYLALRELVEKSQAEAEGKGIGAGANGSWQRSDTEKKIDLLKFITRTRQRMLRLHVLAKWCQQVPLVHYCQQLGSTLHSHETCFTQTADSLFYMHECLQQARAPMFDVPSAIEVMLTGGYQRLPRCIEEIGSQHKLSPDEEKRALRKLDASVRYRVLVTPRPKEVSNVSVTDGIAVFRVDGEFKILLTLGYRGNVDLWRILHMELLVGEKKGPIKLDESRRFALGDDIERRMAASENPFAVLYAILHEFCISLAMDTIIKQANVLRQGRWKDAIRSELISDSATVQTGNTPLMQLVQDAEFDSSGFKIPGLKVNYWLDEKSTSTAEPDSSPFIKIEAGLDMQIKCQHSSFILDPFTDKEASLSLDLSCIDVEQLILRAVSCNRHTRLLNIQRQLCKNVQIFQSPKDVVLTRDVAAAKDPMMNAEKGFSDCFGNEVLQVRACGQAYVSLGINIRSGRFLLQSPENILPRAALMDCEEALNKGSTSATEVFSSLRTRSILHLLAATGSFFGLKVYQQSQGTLKIPKTLLHGSDLMVMGFPHCANAYYLLMQLDKDFRPVFHLLETQCDANGNTNASGDVKEAIRYNKINIGQMQILKNEMNENPFDVKLQALQSLVDSADMMESDLPVQNAIEPLPLLPACSPSFSSIVDEVFEYERGSTAAQNRCLPVDIQGINARVVSPMHDGCLSYTQANNNMNVHPNVSLNSYFPSNFRHLQGANKSLQLVPSSNDNSNQIPAQSSHSGNLGNATPGHLIGSSTTTGGLGKLITAGSDGASRKHYLSDFLSSIPSLRGLQPSEPRKRRKKTESVQSLLPLQAHSSNLQSRGSLTYGDVLAERNNCVPATIYASVLLHVIRHCSLCIKHAQLTAQMDSLAIPYVEEVGLRRPSSNLWLRLPFAQDDSWNHICLRLGKAGSMSWDVRINDPHFRELWELNGGSTKTQWGVGIRIANSSEMDSHISFDSSGVVLTYNTVEADSVQKLVSDLRRLSNARSFALGMRRLIGVKFQDKLDDNQLTMEVKSQSVNKGNSDAADKLSEQMRKTFRIEAVGLMSLWFSYGTMPMVHIVVEWEIAKAGCTMHVSPDQLWPHTKFLEDFVNGGEVASFLDCIRLTAGPLLALGGAIRPARMPVAVSSGYSSMPKQPNIPTQGPLVNGSSSTIHHAPGPSNAASAHLGSHNLHAAAMLSAVGRGGPGLVPSSLLPFDVSVVLRGPYWIRIIYRKKFSVDMRCFAGDQVWLQPATPPKGGPSVGGSLPCPQFRPFIMEHVAQGLNALEPNFMNATQASGHLNNNAGVPQTAPSANRLNATPGVSMVRPTSGVANHVAASLSRAGNAMLASSALASGISGTSVRLTAGAGLPVHMKGELNTAFIGLGDDGGYGGGWVPLAALKKVLRGILKYLGVLWLFAQLPELLKEILGSILKDNEGALLNLDQEQPALRFYVGKCTSGSTASTSFECEKISPPATAAAGSKQCSGRASSS

SEQ ID NO: 62629 - protein, 68 aa, Zea Mays
MGKKELMGGKDFYHVEVQSGYDQAFIIGVMAILDSIHGERHGTNRRHLKLSKADASRGYLLSGHMIDA

SEQ ID NO: 62630 - protein, 345 aa, Zea Mays
MVRRRPVMASKSRARASEANRNPSSSSVGEPAQTAANVGVAAGELGVDAGELGVGVGCGAAGESATIPFVVYGGELGDAVAAECAPPLASSSSAKCSSRADCWKHMVKKEVIEDGVVHFFAVKFLKYFEQISHVYCFATIFDPRKKLDGLQIALEGIGDALDMDFSDAFNHAKDDLFRVFGYYYKKYGESEIDSPAVEFGAEISDTSLTAHLWKRAKGKENVASSQRWNPNAELNHYLSTNFVGTDRALRGEKVKLLEWWRDHKYSFPVLSQFARDILVIPVSTVSSEATFSTVGRIIEERRSSLAPKTVEAITCLKDWNRAEERKQHQLEDPEIEFAAADLDID

SEQ ID NO: 62631 - protein, 2163 aa, Zea Mays
MSTAQGTALKSAPIGAGHRARRGRPVVPPYRSGWQAYGGVSLEGSGFLGGLQRTEERVATLAPRAAARDAEVVRPLSKLPNSSIGLYDPSFERDACGVGFVAELSGDYKRETVNDAIEMLERMAHRGACGCEKNTGDGAGIMVALPHDFFKEVTKDAGFELPPPGDYAVGMFFMPTDEKRREKGKAEFKKVAESLGHVILGWRPVPTDNSDLGESALETEPVIEQVFVTKSSRSEAEFEQQLYILRRLSIISVRASLNIKRGGERDFYMCSLSSRTIVYKGQLKPCQLKGYYYADLGQENFMSYMALVHSRFSTNTFPSWDRAQPMRVLGHNGEINTLRGNKNWMTAREGLLEAEKLGLSKEQLARILPIVDATSSDSGAFDNVLELLVRGGRSLLEAVMMMIPEAWQNDGNMDPEKKALYEFLSALMEPWDGPALISFTDGRYLGATLDRNGLRPGRFYVTHSGRVIMGSEVGVVDVPPEDVLRKGRLNPGMMLLVDFENHTVVDDEALKAQYSKAHPYGEWLKRQKIYLKDIVESVPETDRVAPSISSSLPAKNENKDHVGINGILTPLKAFGYTVEALDMLLLPMAKDGVEALGSMGNDTPLAVMSNREKLTFEYFKQMFAQVTNPPIDPIREKIVTSMECMIGPEGDLLETTEKQCNRLSLKGPLVSIDEMEAIKKMNYRGWRSKVLDITYPKKSGRKGLEETLNRMCAEAREAIREGYTILVLSDRGFSSDRVAASSLLAVGAVHQHLVANLERTRIGLLVESAEPREVHHFCTLLGFGADAICPYLAIEAIWCLQNDGKIPPNGDGQPNSKEELVKKYFYASNYGMMKVLAKMGISTLASYKGAQIFEALGLSSEVIGKCFEGTPSRIEGATFEMLARDALRLHELAFPSRTPPAGSADAKALPNPGDYHWRKNGEVHLNDPLAMGKLQEAARVNSRAAYKEYSKRIQELNKACNLRGMLKFKDISDKISLDDVEPASEIVKRFCTGAMSYGSISLEAHTALAIAMNKLGGKSNTGEGGEQPSRMEPLPDGSMNPRRSAIKQVASGRFGVSSYYLTNADELQIKMAQGAKPGEGGELPGHKVIGDIAVTRHSTAGVGLISPPPHHDIYSIEDLAQLIHDLKNSNPGARISVKLVSEAGVGVVASGVVKGHADHVLISGHDGGTGASRWTGIKNAGLPWELGLAETHQTLVANGLRGRAVLQTDGQLKTGRDVAVACLLGAEEFGFSTAPLITLGCIMMRKCHMNTCPVGIATQDPVLREKFAGEPEHVINFFFMLAEELREIMANLGFRTITEMVGRSDMLEVDPEVVKTNEKLENIDLSLILKPASEIRPGVAQYCVEKQDHGLDMALDNKLIDLSRTAIEKQVRVFIETPIQNTNRAVGTMLSHEVTKRYHINGLPAGTIHVKFTGSAGQSFGAFLCPGVTLELEGDSNDYLGKGLSGGKIVVYPPRNSSFSPEDNIVIGNVALYGATMGEAYFNGMAAERFCVRNSGAQAVVEGIGDHGCEYMTGGTVVILGKTGRNFAAGMSGGIAYVYDVDGKFSARCNNELVDLYHVEEEDDIITLKMMIEQHRRNTESVLARDILSDFDNLLPKFVKVYPRDYKRVLENMKLEKSVANHAKEPKMVNGISVTTKKVQPDQSASRPTRVANAKKYRGFITYERESISYRDPKERVKDWKEVAIESTPGPLLNTQSARCMDCGTPFCHQESSGAGCPLGNKIPEFNELVHQNRWREALDRLLETNNFPEFTGRVCPAPCEGSCVLGIIENPVSIKSIECAIIDKGFEEGWMIPRPPLQRTGRKVAIVGSGPAGLAAADQLNKMGHFVTVFERADRIGGLMMYGVPNMKTDKIGIVQRRVNLMAEEGVTFVVNANVGSDPLYSIERLRSENDAVILACGATKPRDLTIPGRELSGVHFAMEFLHANTKSLLDSNLEDGKYISARGKKVVVIGGGDTGTDCIGTSIRHGCTSLVNLELLTKPPSNRAADNPWPQWPRIFRVDYGHQEAATKFGKDPRTYEVLTKRFIGDENGKVKALELVRVKWEKVDGRFQLKEIQGSEEIIEADLVLLAMGFLGPEASIAEKLGLEKDNRSNFKAQFGDFATSVDGVFAAGDCRRGQSLVVWAITEGRQAAAAVDKYISRHDQNVAGDITPFGAGLVQPVGA

SEQ ID NO: 62632 - protein, 557 aa, Zea Mays
MPEPQAILPLRALPPDAPLPFPVPAPFHPQAPGPGGTAPATPPNPTPPQPLTPAAPPSSSSTRPPHPWEISARAWLESFPDGRPPTEPEVDAYIDVHRPELPSLPRSQLHQRLLALRGDQVLDADQSAFPYRFQRTDLWKPVYQWLESLELDSLVATQQISDWLTSNPKIMDRMVEKHSKYHLIHYTQRMHLKMLKKKGKLPKTLQLSAARATVRPIAAPFTPEENIVPLQKTITPVTGRQQSGTTGRFSSASSGRQQSCTPGRFQGGNATLRDKKTSLSKKKEALLKYELLTDLQNQLTAVLLKQCRTVAIKETDSSYVESPNPETNMSIQGTTTANASAPSEAKNVFINEQSVPAGATESEPGHKRKRNPIIVTPAWCYSEASAGTLQNEINPSSNSDVSRNFNIWRGHANPLVSHRDTKKNILFCLEGRETGVSCSQAASYGGYAGRNCERWTPFLEGWNSPAFQFEGPAVHVVRKSYLSWCPTSCAYTSSAPSAQPHGRQGIRKVLDVKFHPEGLPQLVSSSNEAPNELLLFNLLSGRAIQLRGHNTKSKEQV

SEQ ID NO: 62633 - protein, 197 aa, Zea Mays
MRIALEAAKGLEYLHEHVNPPVIHRDFKSSNILLDKDFHARISDFGLAKLGSDRAGGHVSTRVLGTQGYVAPEYALAGHLTTKSDVYSYGVVLLELLTGRVPVDMKRSPGEGVLVNWALPMLTDRDKVVRILDPASEGQYSLKDAVQVAAIAAMCVQPEADYRPLMADVVQSLVPLVKNRYNQKSCNPNVQPSKPLD

SEQ ID NO: 62634 - protein, 830 aa, Zea Mays
MDNLSPATLLNSISCLGALTSDVSTARPKPIHKYCKNVYDISSIVTPLLEDLCKSPEEQLDEVLRDLDTAVNEASGLIGNWHQTTSKMYFGWRIESVISDIQGCSLQLCQLVNSLLPSLTARACMCIEKLQDINHEHVFDLVKEVAMELAATSAVSSVNLLKLSSLLSLSTNMELYTEAVSLENLKTRALRCESREELDLAEQMIPLVNYMHDHLLKEKQQLSINGVPIPADFCCPLSLELMSDPVIVASGQTYERVYIKLWLDEGFTICPKTLQRLGHSNLIPNYTVKALIANWCESHDIRLPDPMKSLKLNFPSAASFLEDLSAADGSPLHPIVVSRANIPGSPEVDVYLRNLNGASPPHSLVNQNSHAHANRHGHEVSTSQTSEKTNGSVPDVSRLSLASSEARESSLEGRRGGSIGQISEHSTEEAFQSSNLDRDLQDNLANSSLNGSLPNSGQLDGECDNGVTRVPSDRTNYSSDASGEVTNGGGAPVASSVPQREHLIPPRLGMGTKQFIRRQPSDRGFPRIISSSTMDARSDLSAIENQVRKLIDDLKSDSIDVQRSAASDLRLLSKHNMENRIAIANCGAVNLLVGRLHSPDAKTQEHAVTALLNLSINDNNKIAIANADAVDPLIHVLETGNPEAKENSAATLFSLSVIEENKVKIGRSGAIKPLVDLLGNGTPRGKRDAATALFNLSILHENKARIVQADAVNHLVELMDPAAGMVDKAVAVLANLATIPEGRNAIGQARGIPALVEVVELGSARGKENAAAALLQLCTNSNRFCSIVLQEGAVPPLVALSQSGTPRAREKAQALLSYFRSQRHGNSARR

SEQ ID NO: 62635 - protein, 662 aa, Zea Mays
MQLRNKEIDIEKGVNRRPLYESHPLSSFSWTRTDSMDMGDWSKKCKEALSKFELLKEGKSKEDIVYEKAVQILHGTKDEVHDIVQSALKSSDLKGLHAQCLTDIWIGRERFAFVDLSAGPFAWGPSVGGDGVRTELSLPNVAKTVGAVAVTEEEAEEKLQDTIRERFSSFGEDYHAVDILLAEIDVYELFAFKHCVGRRIQLALCKELDERMHDLKKELEGYNTGDFDETNKKKALDALKRMESWNLFRDTSVEHHSYTVAHDSFLAQLGSMLWGSMRHVIAPSASHRVYHYYEKLSFQLYFVTREKVRSIKQLPVNVKSIRESLNSVLLHHQNSMFSQNMLSLSEDPSLMMAFSMARRAAAVPLLLVNGTYKSTVSTYLDSAILQHQLQKLNEHNSLKGRHSNHRSTLEVPIFWFIHNEPILLDKHYQAKALSNMVVVVQSDDDSWESHLQCNGRPILWDLRKPVKAAIAATAEYVSGLLPPHLVYSHAHETAIEDWTWSVGCNPSAVTSEGSQLSEFQQDVIARNYIITSVEESIQVINSAIQQLVIERTTEKGFKIFKAHESKMVEKYNAVVSLWRRVSAMSKGLRYGDAVKLMSMLEDASNGFSSAVNSTISSLHPVQCTRERKVDVQLDLTTLPAFLAVFLLLWFLLRPRRPKPKIN

SEQ ID NO: 62636 - protein, 1744 aa, Zea Mays
MEALNELCDLVAAHPDLLLADKLAWLSSRCAAAPGAAAPQRASRAHLHSLLALARLLPAGGAGAGAEGDAAPPAPLLFFLASHAFLSPAFWPQSFAPAPFLARLLPLLAAAPSSPALSSALSAALLAALDVADPTSAPLARAFLSAAAAAAPLPLLPADAAPIAARLLLEFLGSEEEPIRAKGKGEDTLGEENGGAKEVVRRFEEEEVDELERKEVAFRLTVHMLGGEGGLETEQIGKVRNAAARQVRSLTDFLKIRKRDWREQGTQLRARINTKLMCCQAAVGVLVRSVSTMDTDIKSSKDMLQQTLAWFIEATKSCILSSWRKLKICEELFCTLLNGISQITVSRGGQLLPVLLIPLKPLVVSTCSQADMAGSSPGALFEAVVKLSCEIIEFGWTKDRALVDTFVMRLAAYVRERNDYEEEDGKGKEAVPVIRLNVIRLLAELCVCLKKWEVVDMILPLFIEHLEEGDASSPSSLRLRLLDAISRVACLGFEKSYRESIVLMTRSYLDKVKALGASENNTVPSEATTERTETLPAGFLLVASNLTSTKLRSDYRHRLLSLCSDVGLVAESKSGRSGADLMGPLLPAVADICSDFDPVSTVEPSLLKLFRNLWFYVVLFGLAPPIQNNEAPTKPVSTSLGTAESSSAIALQAVAGPYMWNSQWSVAVQRIAQGTPPLVVSSVKWLEDELELNTLHNPGSRGGNGNENSAVGQRAALSAALGGRVEVAAMNTISGVKATYLLAVAFLEILRFSCNGGILSATSTLNRSNSAFSCVFEYLLTPNLTPAVTQCLTAVAHRAFETVLSWLDDRISDIGEGADVRESVLSVHACFLIKSMSQRDEHVRDVSVKLLTQLKEKFPQVLWNSSCLDLLLISVHNELTSGPVSDPAWVATVRSLYQKIAREWLTSALSYAPCTTQGLIQENFCKPSGVQRTQHTADVVSLLSEIRICSGKNDWNGIRTANVPAVMDSAAAASGAKKEAPDFTLEVLSTAVVSATVKCNHAGEIAGMRRLFSTMGGINMGMSPPGTQSLHPHQSFDEVFVSKFVSLLQNFVVAAEKQPIDNSQFRETCSQATALLLDHMVSDSRANLEGFSQLIRLLCWCPAYISTPDAMETGIYIWTWLVSAAPSLGPLVLAELVDAWLWTIDTKRGLFASDMNYCGPDAKLRPHLIAGEPEAPPEKDPVEAIIAHRLWLGFFIDRFEVVRHDSIEQLLLLGRMLQGTMKSPAHFSHHPAATGTFFTAMLLGLKFCSCQSQSNLQKCNMGLQLLEDRVYRAALGWFSYAPEWYESPNKTYAQREAQSVSVFVHFLQNERTSGPVDSVSKLQGREGEPSMADHIHPVWGCVDNYTNAREKRKQLLLTLSQNEADRLEVWAQPIHTKDTTTFRGKISSDKWIDHVRTAFAVDPRIALSMPLRFPTNATMQSEITQLVQTRLLELRTIPEALPFFITPKAVDENSVLLQQLPHWAPCSVTQALEFLTPPYKGHPRVMAYVLRVLETYPPETVTFFMPQLVQSLRYDEGKLVEGYLLGATRRSNIFAHILIWHLQGEYVDESEKDAAALKGSAFQSLLPAVKDKIIESFTPEARDMFEREFDFFDKVTSISGVLFPLPKDERRAGIRRELEKISIPGDDLYLPTATNKLVRGIQLDSGIPLQSAAKVPIMITFNVVDRDGDPNDVKPQACIFKVGDDCRQDVLALQVIALLRDVFQAVGLNLYLFPYGVLPTGPGRGIIEILEVEIKWVKQLMVVY

SEQ ID NO: 62637 - protein, 172 aa, Zea Mays
MKSSNVLLDARMRAKIANFGLAKTGHNAITTHIVGTQGYIAPEYLADGLVTTKIDVFAYGVVLLELVSGREAADESGEPLWADAEDRVFRGRDERLEARVAAWMDPALAEQTCPLGSVATVVSVARACLHKDPSKRPSMVDVAYTLSKADEHFADYSGESVSVDGSGEIAAR

SEQ ID NO: 62638 - protein, 268 aa, Zea Mays
MALEPVARAVAEEVARWGAMRQTGVSLRYMMEFGVRPTERTLLLAAQFLHKELPIRIARRALDLDSLPFGLSTKPAILKVRDWYVESFRDIRSFPEVKNQEDELAFTQMIKMIKVRHTNVVPAVALGVQQLKKDLGGPKAFPPGIHEIHQFLDRFYMSRIGIRMLIEPGVIGLINTKMSPMTVARIASEDARAICMREYGSSPNVDIYGDPGFTFPYVTPHLHLMIFELVKNSLRAVQERYMDSDKLAPPVRIIVADGAEDVTIKPKE

SEQ ID NO: 62639 - protein, 2770 aa, Zea Mays
MRLSTEHQSHCLHFTCSNSSSSTPLHPFPATVNICGLLVLARAGEQSSSAMREEMDLGDIVLSWSVQEITNDDLYKTKVERIPFSFGSLDDYLRSYMTPLIEETRSCLNSCLELIAEAPSSKILSFKVAGKSGLHSMDVDFWDNGAGFSTETYTARNGDIFVLSNMKPEAADDFNRYGLTYCLAMVTEVSMNDEYQKGFKVKVSNSTGLEGDFSKLVHATFLDNIMANMRIWKALCFDSSMNNNFTIIKSLLAPRNMGEDVCSVCAKKDDCLMSSAELPPVNLNQSQLDAIESIISAVRCRHLNLTKLIWGPPGTGKTKTVSALLWALACLKCRTLTCTPTNVAVVGVCTRFLQNLKEFSKQIDICGLPLSLGDVLLLGNRDNMDISEEIQEVFLDYRVDELTECFSLLSGWRHIIVSMISFFEECGSRYDMLLECDGGSDSVCFLDFLKKQFDVAAKAVKKCMMTLWVHLPKKCFSHENVSNISMVLRLLEKINAFLCDGDLTDESAKRGFDFRSTENSIYEPISYIEKELGDARSLCLKLLKDLQSSLNLPVASSSYRLHNAEIAPLDMLIVDEAAQVKECELVIPLRLCWLKHVVLVGDDCQLRPLVRSQVCKEAGFGISLFERLVILNFEKHLLNIQYRMSPCISLFPNAKFYDKKILDGPNVHSSYNKDCTGLLFGSYAFINITDGREQKEGAGNSWQNLVEVAVVMHLIRTIFKSWRKRDQGISIGVVSPYSSQVAAIKDRLGKKYDTSDNFHVRVKSIDGFQGEEDDIIILSTVRSNERGNVGFLADIQRTNVALTRARHCLWILGNANTLYKSGTVWTDLVSDAQRRKCISNATTDPELCKLILHVKNELDELDDLLCSSSAVFSNTRWKVVLSDNFRRSFMKLKSPLLKKEVLQKLVKLGGGWRIPIKNLDVTDAFQLAKAYRIRDLYLVWSIDLEKNERYFQMIRVWDLLSQQHVARTVQHLENLFSMYTDEYLDHCRSVQTEGKLEFPIVWDAEHDIVRYKKDCKVDDQVDHDHLDFSCALENTKVSESFLLMKFYSLSSGVAHHLLTATDGTEIEIPFELTDEEEAIIRFPLTSFILGRSGTGKTTVLTMKLYQIEQHSFIASQGIELEVDLSVVDPKDRLAMDTRKGESFVKQVLITVSPKLCSAIKNHICRLKRFCSGDVSDQPNPLHMYDVIDDPEEFTDVPDNFSDLQHEHYPLTITYRKFLMMLDGTMKSSFFDMFYGDFNPSIERGHSKTRAMQAFIESKEVTFEKFAAFYWPHFNGELTKKLDASTVFTEIISHIKGGYRANMPCSGKLERLDYVMLSDKRFSSLNSKMREKIYDVFLDYESMKRTAREFDLSDFVNSLHRSLVSEGYNGALVDFIYIDEVQDLTMSQIALLKYVCRNFKEGFVFAGDTAQTIARGVDFRFEDVRSLFYTSFISESEACNQVIKHGNHAHLTDMFQLSQNFRTHCGVLRMAQSIMSLLYYFFPSCVDKLNPETGLVYGEAPVLLESGNDENAIMTIFGESRGEHADQHGFGAEQVILVRDVATKKQIVNLVGKQALVLTIVECKGLEFQDVLLYNFFSSSPLRNKWRVVYDYMKTRDVTSSSEVISHPGFDRNKHYLLCSELKQLYVAITRTRQRLWICENADDYCQPMFDYWKKLCIVEVRLLDSSLIQAMQTGSSTDDWRLRGTKLFNEGQFEMATMCFEKAGDAYRENWARAAGLLATADRVISTNLERGQANLQKASEIYESIGMHEKAATCYIKLGDYKRAGMIYMEKFGTKRLEDAGDCFAITECWSLAAEVYFRARCYTKCFSCCSKGKALSLGLQFLRQLEKEQCENFSSDFVAVRKTYLESCALHYFKCGDIKHMMPYVKAFNNVDHIRAFLSSRNLLDELLSIEMEMGNFLEAAGIAQRKGDVLLEVNILEKAESFVNATHLLLLYVTANSLWSPHSRGWPPESFEKKEQLLTKVKEMAKKVSEDFFCLACFEADLLSDSHRSLASLTCSLLEGRKCGNMLVELISARYIIDVHLQSQTSRYNLELEPVSDQLCYNMMACDQMSLETLSCIWNQWKLILVKVLAHLNPSEDIKSNDSAAVCEDLCAKLFGLRKDSDNRYVVLNVDSGWLTNTGRSSLEQDGNRCWLHTVHCQSCARTFMVNELSSVGLSVLRKLESIIETSREIASSPYAQWRSIVILYEIAMFLKEFCLANSLRKTVNFCEQKFFELLFRAWGDETAECFSDILDSSPAYGLIVDSVGSYTMAGNQNLTHGHLGRIAMFLLYTAKYGDMLNLTLEQYLNRDAEWAQFFQSLKSFLDTGVGRCSLVQTFKVALEFTTNVKWWIEKDYMSPICYMNLMECLGFFAMSCFMVNGCALCTKSLLVKMLKCRTSKAFLGNCLVSGLGDQDMDLDCMTFSPGVFICQSIRSILTNKHAIQEWIREIAPAIRYVPVLLRLVIMLYLLTLTLQLGDCYEVTDFLAKHRIFEDLPPDFSKKIVPTLKFRNGTVAHFTRVFGDALAAIGDTMVILGLPKGPLISSGLKAYRFSYTDLSDISKVMALLCPEEQKFSMQKDTKAWNDTCGNLSIARIQDNEMVSRIETHLSDESITFWEKFESFQVFMHDQKDSRVIILFLESLLSWLERRDLPENMDVQLFVEIRHICSQFQEKYLRDKKVYLTVEDLYSTWDDGENKLQKIISFLRYEKTSGKESVKRKDKAPAAQFPTHMADEWSGCSDNDEPDTAGMDAVEPAKEEDVTSCSTATATATKRTQNKKGKKKSRKRGGKK

SEQ ID NO: 62640 - protein, 399 aa, Zea Mays
MANLQCLPPSVEPRVSDHIDEIINMIKQILDNSCAYVVGGDVYFSVDSFPDYGELSGRKLDDNRAGERVSVDERKRNPADFALWKAAKDGEPWWDSPWGPGRPGWHIECSAMSAHYLGHSFDIHGGGEDLIFPHHENEIAQSRAACCDSTINYWIHNGFVNVNSQKMSKSLGNFVTIRKVIEMYHPLALRMFLLGTHYRSPINYTIEQLNVTSDRLYYTYQTLLDCEEICQQQQSNTGNSLPANTLNYIQKLHEEFETSMSDDLHTSVALAAISEPLKVMNDLLHTRKGKKQDKRLESLSALEEKIRVVLSVLGLLPSSYHEALQQLRDKALRRASITEELVVQKIEERTAARKAKQYEKSDEIRKELAAIGIALMDGPDGTTWRPSLPILEEAVVAKT

SEQ ID NO: 62641 - protein, 121 aa, Zea Mays
MGTYGFGVVLLECATARDPVDYSKPADEVNLIEWLKMMVTSKRAEEVVDPNLNVKPPKRALKRTILVGFKCVDPDADKRPKMSHVVQMLEAVQNAYHEDQSKLSQVGSQQSLEETSNSADA

SEQ ID NO: 62642 - protein, 600 aa, Zea Mays
MWISEGLVHLEKEGSLFEVGERYFKELVNRSMIQPIQGKNSWFEEEFRIHDVVFDLIRKLSKDEDFVTLLDSNRQHSCPDSLRREKKTGVPRSDWKQRRLVILNQRVHSRGVEVSMDMPEVLRTLNIVHCNVTIMAPLHNFRVCRVLCLVGSYVPISLKHLGKLLHLKFLQISDTTVDELPKEIGHLRSLQALILGYTGLDELPSTVSSLTQLMCLTASGFKRLPADRMGNLTSLEELRLESIVGQCAAQSLVAELGKLTRLRVVSITFSEELEESLQEALVKSLFNLRGLQELSLSSKMWQQGSTMWGDWEPPRQLRGLIVQGIVFSRQPRWINRSCLPHLCFLCLMVHAVEAQDLDNLGRLPELRYLKLEGVIWPPRYAVSLDNFKNLRFCDVGTTLEFHMGAMPRLEELQFEVYAGYWSWEHNGVLLEQFPTKDVIEDLDLGLDNLLSLEQVIVKVNCLGATAAQVQELEAVAMRAVENHANRPTIKMDRLYEENILSDEKLEALLQQHIQLEGGVLQLKDKPDAFFISQLRLYRHLQKAVISYDCAGASMCEVLKVEAACRHAAEVHPNHPSIELIRTNTDEMASSSDHPSTEPRN

SEQ ID NO: 62643 - protein, 241 aa, Zea Mays
MVIRRGSSYAVAALLALASVAAVAGEVFFQEKFEDGWESRWVKSEWKKDDNMAGEWNHTSGKWNGDAEDKGIQTSEDYRFYAISAEYPEFSNKDKTLVLQFSVKHEQKLDCGGGYVKLLGGDVDQKKFGGDTTYSIMFGPDICGYSTKKVHTILTKDGKNHLIKKDVPCETDQLTHVYTLIIRPDATYSILIDNEEKQTGSIYEHWDILPPKQIKDPEAKKPEDWDDKEYIPDPEDKKPGL

SEQ ID NO: 62644 - protein, 102 aa, Zea Mays
MPTDERSAKPQPPFPPPRRAFHPQPAAESSVPSSASPRPASLPAAHHSRSAPPRRRITPGRQARFPRPPRFPSRRSLKGSIPRPHPAHSIAQSPLAQGTRSH

SEQ ID NO: 62645 - protein, 338 aa, Zea Mays
MGPRPSDLFGRYTWKIENFSKEKKREMKSEPFEAGGYKWYILVYPQGCDVSNHLSLFLCVANHEELLPGWGHFAQFTIAVGNLDPKKVKYSDTLHKFWKKEHDWGWKKFMELSKIQDGFLVDDVLEIIAQVQVIREKADRPFRCLDRPYRRELLRVYMTNIEQIYRRFVEERRRKLIRLIEDKMRWSSFRAFWLAIDPTTKHRMSREKSDIILKMVVKNFFVEKDVTSTLVMDALYTGLKALEACSNGKKGMVTSIDLEELSASMVHVDMDMFVLAGDFITLIERAALEPLSCQSLSPKGDKCSQTRAKDGGTGEINKVPIELQERRLTELGQKILKY

SEQ ID NO: 62646 - protein, 155 aa, Zea Mays
MQWTIQLKDKQIAVMSEKLNSHLVLFSSVEKEVAAVKQVLGDVHCLVGEKENVVADLKDKVQRISVLEKDFVENLNFLESKISAYQLELRSRARIIYELKNRLQDEKLNSSFQPHLEELNKTLLVKDYAIDRLTSENQVILLPMFLISGCLEDPN

SEQ ID NO: 62647 - protein, 174 aa, Zea Mays
MLSMVTVRCGHCTNLLSVNLRALMHSVPEQDQLQENIRVHGTLREHHQCGGGHHLELGSSSSSRFRLPMMMSYAPQNEHLLQEQTLNNARPAPEKRQRVPSAYNRFIKEEIRRIKANNPDISHREAFSTAAKNWAHYPNIHFGLNSGREGGKNKLVDEAVAAVAVAPKKIQGFY

SEQ ID NO: 62648 - protein, 117 aa, Zea Mays
MAGLWCSRHGSVARHGGQHMTAGTARRGYAAGHVRGITTKQHNAEENENEEQRRELNGDEGLAEEEGLADVDVTTWMHSAIQEAGACKYIDEVVLQAVVNFVVARVTSDTCVKRATI

SEQ ID NO: 62649 - protein, 849 aa, Zea Mays
MYASPPSAGGMWSQPRRNHDEDYATARDHRRHDTDYRNDGKHHEFDSYRGVDRLHDNYRATDNYYESGSHRDFGADRSKRIGSRERAEFHGEFEDRYRSSHQSREDSYERDHEYGRYGYDSDYERGKRDSSWRRRDSCDSERERSGLSREREESPYTRHSRSRSHGRDDRSRSRSRSRSPRPRSHGRNQRDGLYYDNRFDRRREYDWDDRGHGDSVAPSATVVVKGLSLKTNDDDLYKILAQWGPLRSVRVIRERNSGMSRGFAFIDFPTVEAARRMMEATGENGLEIDGRNVFFQYSKPTGGMGGPSLGQENFTRPTYGHRTAAAPCDWICTICGCMNFARRTSCFQCNEPRTEDALPADATGSASHFGRRGSELGPTHVLVVRGLDENADEEMLRYEFAKHAPIKDIRLVRDKFTHVSRGFAFVHFHSVEDATKALEATNGITLEKNGQVLRVAYAKSTHGPASGGSQSNSLAAAAIEAASFAQQYDAIGWAPKEYNPDDKQNNNSESQKDGSTAQSGFVWDEKSGYYYDSASGFYYDGTTGLYYDSNSGVWYSYDQQTQQYVPCNDQSNTKAAGEAASENTKTSDSNSGKKVVISAPAATIKQSEKTSLPDAVQAAANAALAAEKREKEKAKEIKLASKNSLIANKKMSNVLAMWKQRNQEGQAARIVLDDKEPANSDDKFSHSRSGTGFSLKSKPNSDLENAMGNSLGQGMTSTQTLDSVVKPRPVSNSLGTTVMGVIRGSARGVIKSDTTFHALSDAGSTDSRTTITTRASGLMTSSEALITPAPFKTDVSALVSNTPSGVSGSGKRRFSEAPGQSQYRDRAAERRNLYGSSHGTDTVGLDSMR

SEQ ID NO: 62650 - protein, 1838 aa, Zea Mays
MASSTSRRRRGGGLERVADNWERLVRAALKRDRDHLRVGGAPAAVGGQRLADAVPASLGRTTNIEQILQAADDIEVEDPNVARILCEQAYTMAQNLDPSSEGRGVLQFKTGLASVIKQKLAKKDGAPIDRQNDVQVLWNFYLEYKSRCRVDDMQREQERLRESGTFSTEMGNRAMKMKKVFATLRALLDVLENLVGQSPTDRLHRQILEEIKRIKRSDAALRGELMPYNIVPLDTSSSVANIFGFFPEVIAATAAIQNCEDLPRFPFDTPQLRQKDIFDLLQYVFGFQEDNIRNQRENVVLMLANAQSRLSLQIGSEPKIDEMAVTDVFCKVLDNYIKWCRYLGRRVAWTSLEAVNKNRKIILVALYFLIWGEAANIRFLPECICYIFHNMAKELDGILDSSVAETAKSCTTEGSTSFLEKIITPIYDTMAAEAENNKDGKAAHSAWRNYDDFNEYFWSRSCFELGWPPAEGSKFLRKPAKRKRTGKTNFVEHRTFLHLYRSFHRLWIFLLLMFQLLAIIAFHHGKMDIDTIRILLSAGPAFFVLNFIECCLDVILMFGAYKTARGFAISRLVIRFLWLTAVSTFVTYLYVKVLEERDTRNSDSTYFRIYGLVLGGYAAVRIMFALMAKIPACHRLSSFSDRSQFFQFFKWIYQERYYVGRGLYESISDYARYVIFWVVILACKFTFAYFLQIRPLVEPTNIIVQLHDLKYSWHDLVSRGNKNALTILSLWAPVLAIYLMDIHIWYTLLSALVGGVMGARDRLGEIRSIEMLHKRFESFPEAFAKNLSASRIPSRRIDRVNESEITTKTYASIFSPFWNEIIKSLREEDYISNREMDLLMMPSNCGNLMLVQWPLFLLTSKIMLANDYASDCKDSQYELWDRISKDEYMAYAVKECYYSTEKILHSLVDAEGQHWVVRLFRDLNDSIAQGSLLVTINLKKLQLVQSRLTGLTGLLIRDETAGRAAGVTKALLELYEVVTHEFLSQNLREQFDTWQLLLRARNDGRLFSKILWPKDPEMKEQLKRLHLLLTVKDSATNIPKNLEARRRLQFFTNSLFMDIPQAKPVSEMIPFSVFTPYYSETVLYSMSELCVENEDGISILFYLQKIYPDEWANFLERIGCGESSEDDFKESPSDTMELRFWVSYRGQTLARTVRGMMYYRRALMLQSYLERRCLGGIEDGNSAAEYIDTQGYELSPDARAQADIKFTYVVSCQIYGLQKQTKKQEAADIALLLQRNEALRVAFIHEEEIISRDGKATTREYYSKLVKADVHGKDQEIYCIKLPGNPKLGEGKPENQNHAIIFTRGDAVQTIDMNQDNYLEEAMKMRNLLEEFHNAHGKHGIRKPTILGVREHVFTGSVSSLASFMSKQETSFVTLGQRVLAYLKVRMHYGHPDVFDRIFHITRGGISKASRVINISEDIYAGFNSTLRQGNITHHEYIQVGKGRDVGLNQIALFEGKVAGGNGEQVLSRDVYRLGQLFDFFRMLTFFFTTVGYYVCTMMTVLTVYIFLYGRVYLALSGLDYSISRQARFLGNTALDAALNAQFLVQIGIFTAVPMIMGFILELGLMKAVFSFITMQLQFCSVFFTFSLGTRTHYFGRTILHGGAKYRATGRGFVVRHIKFAENYRLYSRSHFVKALEVALLLIVYIAYGYTKGGSSSFILITISSWFLVMSWLFAPYIFNPSGFEWQKTVEDFDDWTNWLLYKGGVGVKGDNSWESWWDEEQAHIQTFRGRILETILSLRFLMFQYGIVYKLKITDHNTSLAVYGFSWIVLFVMVLLFKLFTATPRKSTALPTFVRFLQGVLAIGIIAGIALLIVLTSFTVADLFASALAFIATGCWP

SEQ ID NO: 62651 - protein, 182 aa, Zea Mays
MSSSQESTFTSASAAAQVNASALDLLPVYAKELIAGGAAGAFAKTAVAPLERVKILLQTRTEGFQSLGILQSLRKLWQYEGIRGFYKGNGASVLRIVPYAALHYMTYEQYRCWILNNSASSIGTGPVVDLLAGSAAGGTAVLCTYPLDLARTKLAYQVLSTMISEAYFFYFVSLIVVKSLDQ

SEQ ID NO: 62652 - protein, 246 aa, Zea Mays
MAGRGGVVANRWDGVVPGDCAPSPAVLRLSPDLRWEEAREPLHAGIDAANHAVGVGPGMAFANALLRSGRAGGAVVGLVPCAVGGTRMAEWGRGTELYAEMLRRARVAVETGGRIGALLWYQGESDTVRWSDATEYGRRMGMLVRDLRADLGIPHLLVIQVGLASGLGQYTQVVRDAQKGIKLRNVRFVDAMGLPLQDGHLHLSTQAQVQLGRMLAQSYLNYGHAHSPTPKPWWLQIVLVFCFIFV

SEQ ID NO: 62653 - protein, 519 aa, Zea Mays
MDLVASPSRSKSKPRSSPAKPVAAPAESRMDLCTPSKPTPRRKSKTTASPAPMSPATPSTVRRSRRLLETPTKASPEVQVKATPISRAKRTAPSPKTPVQRETKRQRRHPRKRAYYRKVVYDGGEFEVGDDVYVKRRETAESDAEDPEEEECRVCFRTGGGVMVECDACLGGFHLRCVRPPLRRVPEGDWACPYCEAERAGKVVERPRPPEGKRVVRTAKEKLLSSDLWAARIESLWREPDGTFWAKVRWYIIPEETAAGRQLHNLRRELYRTNDLADIEMETILRHCSIMCPKDFRDANNGGDDVFYCEYEYDIHWHNFKRLADIDDEPETKEDLSDEPYNAGDDYNSDTDEDSDYDEEEESTSSFSVRRNQSHESAANSRKGRIYGLQKIGIQKIPEHARCHQKTELEKAKATLLLATLPKSLPCRDKEMDEISIFVKDAICNNQCLGRCLYIHGVPGTGKTMSVLAVMRRLRSEFDSGTLRPYCFIEINGLKLASPENIYKVVLKLESKQTSQLFC

SEQ ID NO: 62654 - protein, 343 aa, Zea Mays
MTPANGAPARAAEAGPHEVESEADAFRRQVDDLVSKTDVLERRVKEVADFYDGKKHGSGGRKGGGGGRYGASSRGMPDLMRQFGVLLKEITSHKDAWPFLEPVDVVTLQLPDYHNIITQPMDFSTIQKKMERKDGTCYTNVREICSDVRLIFANAMKYNDDQNVIHLMAKSLLEKFEEKWLHFLPKVESEEKRQKEEESKGVAATNTSREVAIVKLAKDTDDEINKKLEELRKMVVHRCRKMTTDEKRKLGAGICHLSPDDLSKALEIVAQDNPSFQTKAEEVDLDMDAQSETTLWRLKFFVREALERQANVASGKMDENAKRKREICNALAKTTSRRIKKQP

SEQ ID NO: 62655 - protein, 513 aa, Zea Mays
MRYYYQGVCSWQWFYPYHYAPFASDLKGLAELEITFFLGQPFKPFDQLMGTLPAASSNALPKYYGDLMSDPDSPLKSFYPKDFEIDMNGKRFAWQGVAKLPFIDERRLLAETRKLEDTLTEEEKFRNRTMLDIIYVRDTHPLITQIIFLYQNYYHLSRTDPYVIPIEPAASGGMNGFLCLSERNWYSVTVTSPVKGFNGIAQNRVLNAAYLNPQYHKHIPEPPAGVIIPAKILKPSDFKPFPVLWHQDNSRRQVRERPQVSGALSGSLLGEAAHRLVKNSLQIRSGNAAGLLYMPYRGAPYGPGNRPRPAGPLGYERGFVDNPYHAHMSRSVPNPHAQFFGDSQANRQPMRILERPDSRSHDAGIRASMSKLTIQEGPRPHQNNRMQNSGYWPNQPHPTHFTGPPAQRPMQNISFTPQRPFQTGGFPQQRPVNGAPPPLPPSNWIGKQPSGCHMSVSPAKLDPRTAPDRQPKQDNPRSQQDKRQQATKVYRVKTQATNVNGLSEPGKQEEPEG

SEQ ID NO: 62656 - protein, 310 aa, Zea Mays
MAGGAGNGSNEAVQAKGSGGDSSAAKPLPPCCVKARAAAPESEAKCHATVVSGWFTEPRSHCGKASKVQYYNNPMWPGEAHSLKVENILYQGKSPYQEVLVFESSTYGKVLVLDGIVQLTDKDECAYQEMITHLPLCSIPSPKKVLVIGGGDGGVLREISRHSSVESIDICEIDQLVIDICKEFFPHLSVGFEDPRVQLHVGDAVEFLRNAPEGTYDAIIVDSSDPIGPAQELVEKPFFETIARALRPGGVLCNQAESMWLHTHLIQDMLSICRETFKGSVRYAWASVPTYPSELVAALVHLPVIGYFRL

SEQ ID NO: 62657 - protein, 231 aa, Zea Mays
MKTGIVESDLVLTVSPHYVKELTYGPDKGVELDGVLRTKPLEIGIVNGMDVYEWDPSTDKYTSVKYDATTVTEAKALNKERLQAEVGLPVDSSIPVIVFVGRLEEQKGSDILIAAIPEFVGENVQIIVLGTGKKKMEEELMQLEVKYPNIARGIAKFNVPLAHMMFAGSDFIIVPSRFEPCGLIQLQGMRVSSSLCYSSDLSARKINISSHLFLSCYILIPVKQKVLENTA

SEQ ID NO: 62658 - protein, 188 aa, Zea Mays
MGSKAPFCLTLLLLLAAACGPAAHAHDAVELPHHGLALKEQISSTKIPARLKSGSGLCSACENFTSEAVTYLGKEQTQDRIMEFLHDACSQSFSFEQKCVELMDSYATLLFAKITEIRPEAFCKRYGLCRDTALLSGVGSDSTCVFCHHLLDEIMSKLKDPDAEFEIIQILVKECNKIEGHVQQRVKF

SEQ ID NO: 62659 - protein, 861 aa, Zea Mays
MRSLARLILGLSLRSGAEHLSQVLHGAVPDGFWDSGAHMASSEVAVHILDHLFKKLNEVCLLEDGEGEPFHMLLVIFTGSLLPYLQCLDSWLYDGILDDPYEEMFFYANNAVTIDQPSFWEMSYMLRVRGSRVDSSTTLTESESIKKKGSSNKESTTAGACLKVNNQGCVYILCPTFLKDVARAIVSAGKSFQLVEHVQDVHQIQTHKSTHRSNLYQDTNCSGQQKFWPDMSNLRIHDGPPRNKDALEVSTSQFGNDSREMGLLTLSEIFLICISGLLENGDHVYEYLRTLHADNVPNNNAFMENESNLKETEGTCTGNIIEKTWVKLLKDATSGRKCNGMEETIHAVIDKAGFASGCPKDASSNVVEGVFTLSCYENPAITACREVLMRNPASWSELNISESFHLPPLNDGNMRRAIFADGHSAGTSTDYKFGFQFDDLEHVRQEDDRRTLEDLYAFPTLLPCAKENALLSEILPMQKDSTLASRVLKFIQNMSMKDPLQPVGIIQECLSKCIKRQVDLIGNQILCKLMGEWRLMDELFVLRAIYLLGSGDMLQQFLITIFDKLDRGNSWDDDFELNNLLQESIRNSADKMLLTAPDSLVVSLAKYDTHNGEEGISTSKKGRALGFGIDALDMLNFTYKVSWPLDLIINTEALKKYNQVMGFLLKVKRAKFVLDETRKWMWKARGRTAHNFKQHLIVAQKLLHFVDAFHQYVMDRVYHSAWTELCDGMTAATTLDEVMEVHEAYLSSIQRQCFVASDKLWALIASRVKTILGLALDFHNVEQTLSTGGTASAVRTRCEMEIDRIEKQFDECVIFLLRILSFKLNVGHFPHLADLVTRINYNHYFMSDSGSFSAIPGSRPR

SEQ ID NO: 62660 - protein, 1289 aa, Zea Mays
MRGSYRRSPYRGGYGSDFSRNHPEQPPPPPPRRSPLRSVAVPICYDSPGNRVDRGDRDNLPRVTPWRRRESRSEPADAVGLLSVGQTTRLSASGKEASAQPLSVSGPHGTEDEAPRKKARLGWGQGLAKYEKQKVQGPVDPAEAVADGSPADGELKTTSPVPVPVHPVPVPVPYVAPAPPAAPVLAPAPAPSAAPALLSAPMQCSSPVTGPPYCSSAPEDKSCEMMPNAVTNSTKDVLEADDTTFNNEFLIKLDQLGDDPVISLGNMLVELIQHEDSCSGDSNGPTSTYKLLLLKESISKEIEKTELEIDSLEGELKSVNTEAATTLEGSPTGVTHTENLSPSSGTSKVPGSVEICDTSDMIKEPGELIGSPKVPVVQYDDVKSADMMEIETAPVHNAKTVPSEAGAISPVVAEGKACAAADLSSLKASEEAGSQNDIDNGRLETSSRQANADSMKIEISDDLPVKKWTYHDHKSDLLSSVTSANSAIAKEINEVLFKSLPADTPRLDLFASSHLLSQRKSDLIVKERLGVCKTRLRLKEQMLTMKFKAYCHLWKDVQLFSANKQRSKSNKRTDQSNRTSQIGSQRQRSSNRSRLTMPAGNLSTFSTPEMSDVAMRLFSEFKIKRCRNYLKMPALIIDEKEKEWLKLMNKNGLVEDPVLVEKERVMINPWTQEEKKIFMELLAKFGKDFSKIASFITHKSTADCVEFYYKHHKSDSFREVKKLLDLRQQQPTSNFLGAKSGHKWNPESNAASLDMLGVASVVAAHGLEYAKQVEKISAKSLIRTAYGPNVTSVANKSSDKECIDHVPLHERESVAADVLAGICGTLSPDGMGSCITSSADPGQKISMKRVEHVLSQENDKTVEEEDTLSDQECEVDPVDWNDDEKSIFIEAMNNYGKDFARISSCVKSKSYEQCKVFFSKARKSLGLDLIHQGAADVSMPASDTNGGKSDTDEACAVEMDSAICSTQSCSKIAMDVCPTEGAIGGPNSVIISKQAEAYISNGCNADVKIEEDEKVADKNCSIVDAKRSSDATHEAGPIDINCPGSTDKLQGTDDVVDLVNMHSNSGISSSAKHAVAIHSEMRSTLHSVEVLQTDKGEGTGTDLSWVEECSHHALDNTPMKNGNSGAPAFLASDSGIKDNVRISNITAASTVSPAFTSSYQHSVPGDMPLPKPKPLVTPLTPKDLMPVQFSSVLPDPTAIRFEGIASITTPNFEDTGNRVSGALGAKEMSKYPAFRDPSGGSVDPNKIAEWQVQQLVPSKQFRWHSMAQRPRRRTGRLFEALLSQYKLRG

SEQ ID NO: 62661 - protein, 125 aa, Zea Mays
MARRASPWTNAEQERDPGWEMGRDGARPNGCQQGELLGCSITASACSISNTAAAAGTRRSASEQRGATGAARAGAGTRHGRDADLGPGAHRELRPGRGWGAQGEKAERQPGRRRNERSQENLATG

SEQ ID NO: 62662 - protein, 165 aa, Zea Mays
MGGASSSIFVFLLFPPWPALPPPPPKPPPRQLRPDRAASSPSPSAGAPSGSCPTAGRSCPPRRCRRPSSGVSIGGNGDDASGGVIGRVEGPRRWNGLGARLSHPASPNTSGGGGKAGSKRASGSCDLGRGSPENGSAESHRKEIIGFLPLTMLSSFYNYHCVYEL

SEQ ID NO: 62663 - protein, 137 aa, Zea Mays
MQTPATRTITTVRIQLVLLGRMGHGHGGCWRLLTPPGTPLFSSLKVEPKRSLVSQAGTPKARPTALKSRQLDVVMEEGQGEELEVMLSESDDSEFDHDDEFPPSTDGDELSKTEKTKRGGKRSRAGIQLSPSKCKAN

SEQ ID NO: 62664 - protein, 495 aa, Zea Mays
MKALASPAASFLPGIPSPSHLARALPRSAAAALSRPPSGRSIAAAAAAATGDHWGADHQHYHGGRAGASEAGPTASARGVKCDVDVVSWRERRVLASVPVAADVDTLWQVITDYERLADFIPNLVQSVTIPCPHEGRIWLEQRGLQRALYWHIEARVVLDLQEIPDSDKWDGRSSSAVLLYEVNVIPRFNFPAIFLERIIRSDLPVNLRALACRAEKIYLENQGCGSRKFFVEDLKPSYTSQLNNFHSTTVETSKFKQAPPRSGVSSVLPSPSSELISKWGVYGNICRIDKPCVVDEIHLRRFDGMLEHEGAHRCVFASITVKAPVREVWNVLTAYENLPEFVPNLAISRIVLRDNNKVRIMQEGCKGLLYMVLHARVVMDLREKHEQEISFEQVEGDFYTFKGKWRLEQLGDQHTLLKYMVETKMHRDTFLSESILEEIFHQTCVQSVIILKRLEPRVAIPQVILMCPQIQIQMLIMMKAGNLSKRVCLAHPVP

SEQ ID NO: 62665 - protein, 100 aa, Zea Mays
MEQPTKQELYPCSCRGAVSTLYSIRSVPAPARRPLRIRPLPRQHDVNRDTPPPMRPRHASAFASVHWLRGIDYGVEAWDYYLLHPNFYTLYYVQIWSLDS

SEQ ID NO: 62666 - protein, 134 aa, Zea Mays
MNLPTSIRRTRPAAAENLGSRHRLYHATTKLAFGLPFCVTSDAHHSYLWPRYDGTTIWGGEFPVGSREVVWNLALPQACGYALQISCGHEDPKNHPGNWNLKCEASCALDHFHLPNNILYCHLFMHRFNFDGIQ

SEQ ID NO: 62667 - protein, 193 aa, Zea Mays
MVYPHVQSPMSSPVQARGDWGAFGNKNHQDISNEVPIRNAGHDDKGGTSLSSRSQYRTDVPPQVSQGDSSAVHFDFETQSQNPPFKGLSRNDVLDGSDSAEAQNTQEPSTRWGLGDSSNLASGLEDANPSYPYLPTVLEEPGSSFSEAAEDDPLPGIEGLRITGEPFPGQELQAVGAPFRRRLSKFHRRSKAA

SEQ ID NO: 62668 - protein, 268 aa, Zea Mays
MQGFGDQHAAFGARGMGGFQMPEPPITPGPFAPGLSRNEGTIPGIGVAMTLAGQSFDGSDGEQRPSIPGLPPGQPPLPPGPHPSLLGQQQQYQQIPQQQHPQFSQPPPPNMPQLQAPAHMLSHSQGSRPTLPQLPPMGGPSVPSQVNPPLPPMPHPTAMHGSQSQMMPQMPQHMMGLNQMHAGSVPPGTVPPMGGFPSGMGNIQGASGSSGVQNFPMGGMYNRPQGQMAPQGQMTSIPGLSSYQGMGNVGLTPPPPQHPPPRGGSATQ

SEQ ID NO: 62669 - protein, 518 aa, Zea Mays
MAPEVMQAQKYDAKADLWSVGVILYQLVTGRPPFNGGNQIQLLKNILRTCEIRFPSDCDLSHGCIDLCRKLLRLNSVERLTVEEFVHHPFLSEHAPEKTLSLTQSDIRDGFPRNNSSPTRHSNHSSQEDCMPFPLDDESSGQDEGPVPDSKSLMKSYGFPMGKRLDKTSGQKSPPKHNSLFSRYVLGNNHAPSSQHHGHSGKVTKESKIHEVQGQKVVYPEDQEYVFVSGPHLEGSSSSTNASQQLNVPAKYDNSSVSPPKLTFMSAPMPINGLPINRQQLAGTGSFDSHCSPASGTSQGSADISDAMDQPPSDYLTRIRLLEQYASAIAGLVRDEIKGGRHLEAFSIQLIVLATWKQAIHIGNTFVASPARESPSQDIPMKGHIAGASHLPANSKLADDACMQIEKQFLSEVEYAEELASIVGQIADGTEMPDAIEMIFQSALLIGRRGGVDEMFGKAADAMTGYMRAVSMLRFLLVEAPSLALNPPLTLTRSDRNRLRTYIDALNTRLCQMQSQRH

SEQ ID NO: 62670 - protein, 193 aa, Zea Mays
MEPDAPSLPLHSHRRRHSFSLLPALATRIRSRGPATPGRAPLPECAERATPPGSPSRDPARRPAALRPDALQPAPLQRPSRPMRLVTPSRRSPCRTRPAPASRTRCSASGRPRPNHSPRRDNTDASAGPEIEAVIPLPSPFLSPLMAAPASSNVVTRACAHRAGARPRSTSAPAATPRARRRAPAHVVPSSPS

SEQ ID NO: 62671 - protein, 206 aa, Zea Mays
MGQQSLIYAFVARGTVVLAEYTEFTGKSNNKFTYNCDGHTFNYLVEDGFTYCVVAVESVGQQIPIAFMDRVKEDFTKRYGGGKAATAAANSLNREFRLKLKEHMQYCVDHPEEVSKLAKVKAQVSEVKGVMMENIEKVLDRGEKIELLVDKTENLRSQAQDFRQQGTNVRRKMWLQNMKIKLIVLGIIIALILIIILSVCHGFKCH

SEQ ID NO: 62672 - protein, 479 aa, Zea Mays
METYTTDDALTLMGFGKFQALVLAYAGMGWVAEAMEVMLLSFLGPVVREEWNVSPQDESLLSSVVFAGMLIGACAWGFISDRYGRKTVLLLSTLLTSGLGLLSALSINYLCLLVLRFFVGIGVGSGHVFSSWFLEFVPAGNRGTWMVIFSFFWTIGTVLEASLAWAVLSALSWRWLLALSSLPCFLLLLFFRITPESPRYLCAQNRMTDARFVLERMAIANQAALPMGVLTYHQETKTECITHVSEDEHLIPVREKEHTDRNAISSKSGAVAVLHKLLSHNLLKSTLLLWFVYYASSFAYYGITLLTSQLSDVNRSCKSDLVFEVHQNNGNLYKDTFITSLAEIPGLILSALLVDRFGRKATMSCLMFACCAFLGPLVLHQNELLTTTLLFGARACGTGATTTLCLYAPEVYPTYVRSTGVGIATAIGKIGGVICPLVAVGMLRSCHQMEAVLVFELVLFLAGVSCILFPVETKGREMD

SEQ ID NO: 62673 - protein, 542 aa, Zea Mays
MGWRPHVVSVSSSALLVLLQLLVLLMLPADASSSSQTTTTTIYVVYMGEKKHDDPSLVVASHHATLASVLGSKDEALSSIVYSYKHGFSGFAAKLTQPQAEELKKYPGVVSVKPNTYHHVHTTRSWDFLGMSYGQQQSSSWSSSSRLLRKAKYGEDVIVGVIDSGIWPESRSFDDSGYGYGPVPKRWKGVCQTGQAFNASNCNRKVIGARWYAADVSEEDLKNEYRSPRDANGHGTHTASTIAGSPVRNASHHGGGLAAGIARGGAPRARLAIYKACHAVGGSASCGDASILAALDAAIGDGVDLVSLSLGGLGEIYQSLHAVAAGITVVLAAGNDGPVEQSLNNALPWGITVAAATMDRTFPTVVTLGDGEKLVGQSLYYHNRSAAASTSDDDDFAWRHLILFPSCDEKNLGSENITGKIVICRAPVFWSDYPPPRQLSRASRAAIAGGAKGIIFEQYSTNSLDTQVVCQGHLPCVVVDRESIFTIQSSDSTLPTVYPLPAMWPRFRRRRPWSDPRSPRRESRRSRRGAPVLSFPPYSSPT

SEQ ID NO: 62674 - protein, 240 aa, Zea Mays
MEPGLASRVARSAAQPLSGCLSRHSLSPWLKIQNHIYPMPSLCHKVPSTGKCHASMTTSYIRETSDVTDLDWENLGFGLIETDFMYVAKCGTDGIFSKGEVLPFGPIALSPSAGVLNYGQGLFEGLKAYRKTDGSILLFRPEENAIRMLSGAERMCMPAPTVEQFVDAVKQTVLANKRWVPPTGKGSLYIRPLLIGSGAVLGLAPAPEYSFIIFVSPVGNYFKVRIAFPFTSNSTKICRH

SEQ ID NO: 62675 - protein, 239 aa, Zea Mays
MSGLLAEALGAAAGGCALLLIVIIIIVLCLQHRKRTSDSSESGFSDQALPESQEARCLSLEELNFATRNFSNGNLIGQGTFGEVYKGLLQDGTIVAVKRRHSPPSQEFIQEVNYLASLCHWNLVKLLGYCQEDGMQMLVYEYISNGSVSTHLHGNSHALGSRLEFKKRLSIAHGTAKGLSHLHSLTPPAVHMNFKTSNVLVDEDFAPKVADTGIPGMLDRLGVTGLSSRTFNDPFVEPR

SEQ ID NO: 62676 - protein, 88 aa, Zea Mays
MINGSRVIYRWQQAASSSLLSGILAFLNFAYTLLVLNYSCIGFQVLSFKETLASYRSVYYVGTIVPIVCLLLGNVIKPARKAKARKTE

SEQ ID NO: 62677 - protein, 788 aa, Zea Mays
MRKNIACCMLHEVIRGKCLRTSLRAIRRLKEHLLNELPPKRRQIIRLKLKAPDIRAATSSCGKRVNPNSCNGTLTIELPSKSNDDENTKEEEEDDCKKSPRSLTPQEIGIAKLSGFSEWFSNHFIMNGFDANHNLDPQSSCQKTIIFAHHLKVLDGIQVFISENEIRFVRIDGSTLQRERKEAVDSFRLDPEVKVAIIGITAGGVGLDFSSAQNVIFVELPKSASELLQAEDRAHRRGQRNAVNIYIFCGKNTLDESHWLQLNQSLFRVSSLMNGKKDAVREIEVDQVCQLEEIKDTEETQRKLHPLENHNADLTHVPKKLLESDDLSIDGFLGIEDLEFDLDFTIRTIPLEFEDENPGTSLKNNPTPTVLEDRSCIDVSLSPAAVFCSVLSSCKSIKSRKRLSGNSGSLSQAASVPDFPIQVESLRFEVSRHTGRIHLYSCVPGHDSRPKPLCENFLPEELNSPLCSPSDVKTRTLLLKKIPSFCNVFNAFIKEWLALRPIDQNKLLGKPLQLPLNLELCFLKDSINHSTEGILKGGSKRRAASLNDVSNPLPENAEWRQVVLRNGTCKERQYTQGWTIDDEPLCKLCQGLCNGRLAKSPEYFEDLFCSLACFQEYRLRTSGRALRQALFQIERGKCSQCKLDCCKLVKHIKLLPLGKREEYIRKVAPNIASRKKLLDKLVREPIDGNAWHADHIIPVYKGGGECKLENMRTLCVACHYEVTRTQHKELKEIRKKAKEHLKNALNKQKDKPSEATEELDDESLLIAVPGSAYSLGFPGNGSDEKAAE

SEQ ID NO: 62678 - protein, 428 aa, Zea Mays
MPSKSCKSIFCKPQFIRIFHSNLSEKMMLPARFVKDYVSEECLNSRIAIIFSPIAKFWRVELKNDQSGIFFTGGWSQFLDFHGIKNGEVLLLKYEGNMVFKFKAFGLSGCQKDFKNQNAGIQLNTKKQQETPPIRKRKSNDEKSSSEENKRLKTPVTSPSPSDPSLEKPYQIGTSSWIKKRINTYALEQFLALSVKFCNSIGFRMACTITLKTATNSTRSWQVRGTAYKWHRYIIGVGWKSFCQDNRLKAGDLCTFNIIETTLWHVTITRSALAADTFNKQKKPPCSSSRDKKGSSSREGAKRPKPSMAHFSKVQVPPSYARRCAYDVGPPPWIRKQMNASTIRNRLCLAPAFCNQIELRRRCEIVLKTSINSNHSWRVGGLSQKKGSYIIGPGWKKFCTENRVKVGDVCTFNVIETQLWHVVITRRC

SEQ ID NO: 62679 - protein, 73 aa, Zea Mays
MIDDLNIIVFLVFIWQQLYLSRAAKKSEWNWCSFPSKTRSRCWNRWMKRIAFTIPCARCCGGVVRPQNMWLGS

SEQ ID NO: 62680 - protein, 910 aa, Zea Mays
MDAAEASEVQARLAAAVHALNHDARPEARLAANQWLLALQRSPQAWAVATSLLATPDPLPPADLLFFAAQMLRRKIQSPGPALLGLGLASQLLDALLLAARRFCAAPAPRQLLTQICLALAALALRAEGGVDGLFARMPHLPPPAVLELLTVLPEEAAQDQGGDTGVDAAARCRFTRELLAHAPSVLEFLHRQSEKAPADDDGVPLDERNRRILRCLLSWVRVRCFSETPAASLARHPLLTFAFNSLQVSFSFEVAIEVMTELVSQHQELPEAFLSKTPYIREALLLPALANRNEKIIAGLACLMCEVGQAAPALVAEGGSQALALTDGLLRCVAFTSEDWEIAESTLQFWCSLAHFILGIDVKSAKRNVVQELFVPVFSSLLDALLFRAQMDTDEHGSDGAPCIPERLTQFRMNLEELLVDICLLLGAPAYINRLFSGGWDFSSQTIPWKEVEVRMYALSMVADTILQDEGSFDFSIIMHFVNILSSRTPVELNGNLFLVYKSFGDVVGSYSKWLSSSQCNIKPLLLFCASGISKSVSSNACSLALRKLCEDAPSFIHEPQNLEILFWIGEGMNKGNLQLEDEEEIISAITHALSSISEKELKKSSLARLLCSSYSAVEKIIDIDRDQLLRQNPAAYTQSLDLAVRGLYRMSALFHHLATSVTSGLVDDDIIIVLLGIFWPLLESLFRSSHMENVHLSAAICRSLSSAIHSCGHHFHILLPKVMECLSANFLLFQRHDCFLRTAANVIEEFGHKEEYGALCVRTFEILSSASSISALNSSYTCDQEPDLVEAYTYFTSMFIRCCPKEAIVASSSLIELSFQKAAICSTAMHRGAALAAMSYMSCFLETALAAVLESPECIPNGSPGVALIQILARCGEGLLSNVLYALLGVSALSRSEPYLGFQTSLLT

SEQ ID NO: 62681 - protein, 1270 aa, Zea Mays
MVPGGLFGWASPHVQPLTPVSEVSEPPESPSPYGDGPAGDAGVGAREGEGAGAGEEEVEDDEVEPPPAAVSFWRLFEFADGVDWALMAAGALAAAAHGAALVVYLHYFGRALNLLDSERVGSSLYGRSDELLSRFKEHALYIVFIAAGVFVAGWIEVSCWILTGERQTAVIRSKYVHVLLNQDMSFFDTYGNNGDIVSQVLSDVLLIQSAISEKVGNYIHNMATFVGGLIVGLLNCWQIALLTLATGPLIVAAGGISNIFLHRLAENIQDAYSEAASIGEQAISYIRTLYAFTNETLAKYSYATSLQATLRYGILISLVQGIGLGFTYGLAICSCALQLWVGRHLIHRGKADGGEVVVALFSVILSGLGLNQAATNFYSFDQGRIAAYRLYEMISRSTSSTNQEGTTLPQVQGNIEFRNVYFSYLSRPEIPILSGFFLTVPARKTVALVGRNGSGKSSIIPLMERFYDPTLGEVLLDGENIKNLKVEWLRSQIGLVTQEPALLSLSIRENIAYGRSATFDQIEEAAKTAHAHGFISSLEKGYETQVGRAGLALTDEQKIKISIARAVLSNPSILLLDEVTGGLDFEAEKAVQEALDVLMLGRSTIIIARRLCLIKNADYIAVMEEGHLVEMGTHDELLNLDGLYAELLRCEEATKLPKRMPTKNSREHKSLQSEDALVSQYFQESSSPKMAKSPSLQRTHGTIGAAIFGSFNPLLAYTIALIVSAYYQIEIRDMRHEVNRWCLFIVGMGVITVLVNWLQHFYFGIMGEKMTERIRRMMFSAMLRNEVGWFDKDENNADTLSMRLANDATFVRAAFSNRLSIFIQDTAAVSVALLIGMLLGWRVALVALATLPVLVISAIAQKLWLAGFSKGIQEMHRKASLVLEDAVRNIYTVVAFCAGDKIMELYRLHLGKILKQSLVQGLAIGFGFGLSQFLLFACNALLLWYTAISVDRQRLTIATGLKEYILFSFASFALVEPFGLAPYILKRRKSLTSVFEIIDREPKIDPDDTTGLKPPNVYGSIEFKSVDFSYPVRPDILVLSNFNLKVSGGQTLAVVGVSGSGKSTIISLIERFYDPVSGQVLLDGRDLKSFNLRWLRSHMGLIQQDPVIFSTTIRENIIYARHIATEAEIKEAARIANAHHFISSLPHGYDTHVGMRGVDLTPGQKQRIAIARVVLKNAPILLLDEASSAIESESSRVVQEALDTLVMGNKTTILIAHRAAMMKHVDNIVVLNGGRIVEQGTHDSLMDQNGLYVRLMQPHFGKGLRQHRLV

SEQ ID NO: 62682 - protein, 113 aa, Zea Mays
MIAVASSFPSRAHAAPFGSGTLPPPSTRRSTSLRHPRVSALGGGLEGEPGKILDPRATPFQILGLDAAAGYSAAELKAAFRARVKEFHPDVCKDPENADLIMRRVIEAYQEQC

SEQ ID NO: 62683 - protein, 77 aa, Zea Mays
MVSLQMCARCFWTWTVNYLKSASSSIWINKQKPKRCRSNENQHGDNWKLLLLPRLLGMTWFWSTSWHDSLQSETWHS

SEQ ID NO: 62684 - protein, 80 aa, Zea Mays
MERLLSQGQGEEHNALTFVVGINDYQWSCANTILAKLSVAVAPPPFMGVYWFILWLQLVDSQTTKSKKTGPGGLGGSRCS

SEQ ID NO: 62685 - protein, 526 aa, Zea Mays
MPPDDLVVTDGISENSGYYVSGECPRTKVPQTCHVTCNTKKDPKRVERVVGSGPVAQDISGNLIGPQCKTKGTPLCSKGKTVIMIIDSEDSEPSAHEKEDTMKLATSGPDSDISLVAVNTNEDPIRAQSGIGNGPSAVLADEKGNFPEIECGTKCISATCSEVKTVSQIISATALLDLHDSDENLGRKQRTNAIPLDSRTTAEDYHNYSKMIIIQNFNRKYEAPGGFRCLEKWRKDVVNNQTALDCTAPIKHENPQKTDGMLVDGYGLIELNPVDEYICSEGNHECVQPVFTMPIKEPSSADRVIDCGRDGTEINYSINEKDGGSIEKTSSPDEISKCKNSMMETAHNVNGKGGGTTAQFETKMDQAEPARSGVRSKICNSVVPANESEHRSTKQEGRMSSNREVPESLLPTKDEIPEPDHHSPPEINFQLCIPDTTQKWLDLSKSLSNAVRRQRRHDYDVIMLKDPKKRLWPVVYHDSLLFVGFTAGWKHFVASNDLRAGDVCELVKEPDDGEPVYSVRMSDHKI

SEQ ID NO: 62686 - protein, 969 aa, Zea Mays
MNSPKMELSPWLVFSLGFLAQALVILADTNAQDASGLNGIQDSWNKKPSNWRVGTDPCGDKWNGISCTTSRVTAILSSLGLSGSLSGDIQSLSELQTLDFSYNKDLGGPLPASIGSLSNLENLILVGCSFSGEIPKELGQLTKLRFLSLNSNKFSGSIPASLGRLSNLYWFDLADNKLSGGLPVFDGTNPGLDNLTNTKHFHFGVNQLSGTIPSQIFNSNMTLIHVLLDNNNFTGRIPPTLGLLNTLEVMRFDNNYQLTGPVPSNINNLTKLAELHLENNQLTGPLPDLTGMIALSFVDMSNNSFNASGVPSWFTTLPSLTSLYLENLRVTGQLPQALFSLPAVQTLRLRGNRFNGTLTIGSDYSTQLQLIDLRDNQISQITVGGSQYNKQLILVGNPICSPGTGSSEKYCASPGQSNQAAPPPYSTPMNCSGLPPPCLSDQLVSPGCVCAVPYRGTLFFRSPSFSDLSNGSYWGQLETGIRAKFRSLSVPVDSVALHDPSVNSVNNLQLALEVFPSGKTQFSEQDISDIGFILSNQTYKPPSVFGPYYFLGQPYSFANVVLIPSKSKANNRLPLIVGASVGGAVLVAIVLALVTIVARRKKRPKQNEERSQSFVSWDMKSTSGSSVPQLRGARTFNFDELRKITSNFSEANDIGNGGYGKVYRGTLPSGQLVAVKRCQQGSLQGSLEFRTEIELLSRVHHKNVVSLVGFCLDQAEQILVYEYVPNGTLKESLTGKSGVRLDWRRRLRVLLGAAKGIAYLHELADPPIVHRDIKSSNVLLDERLNAKVSDFGLSKPLGEDGRGQVTTQVKGTMGYLDPEYYMTQQLTDKSDVYSFGVLMLEMATARKPLERGRYIVREMKVALDRTKDLYGLHDLLDPVLGSSPSALAGLEQYVDLALRCVEEAGADRPSMGEVVGEIERVLKMAGGPGPESASNSMSYASRTPRHPYGGDSPFDHSNSGLPSARVEPK

SEQ ID NO: 62687 - protein, 319 aa, Zea Mays
MLLVVSSGELLHTWHAHYRAVRCLGLYDYLLVSGSEDGTIKVWDLITVLDEQSRLEVQTPYLYSFSQHALPVTDIACFLGAIAISSSEDRTCKIWSLSEGRMLRSISFPTSIDSIALDPRSHIFYAGGRDGKIYVTAMGVDLSFHGRDESSILGALDDHSKAVTSLASSRDGLLLVSGSEDGNVRVWDTRCQQVTRKFKHSQGPVTNVLIVTPQRVNLPPLQPLRKVRSANGEAERQAVLLHRPENDVPIPGNKTFIFMERYLDELQKHGGSSRLFDFGPNAQNGTPNQQGTEWRDRYLELQDLFVHEVLHQMPSSRNP

SEQ ID NO: 62688 - protein, 496 aa, Zea Mays
MSCLDENKAFLSTADSAVQLLTEATKPVSGWKGIEYRAAFPLHKPPGANFYPPDMDKAEFELWKSKLTDKEQNDATGFFTVIKRHDSLSSSSLTQSDGSDQTKTKDDLFIVPYSKEYRPFLEKAAELLEKASACSDSPSLKNLLRTKANAFLSNDYYESDIAWMELDSNLDLTIGPYETYEDSLFSYKATFEAFVGIRDDTATSQVKLFGDQLQDLEKNLPMDNIFKSDSISAAPIRVINLLYNAGDVKGPQTIAFNLPNDERIVNERGTSMVMLKNISEAKFKHILKPIADACIREEQKEYVDFEPYYTHIVCHECCHGIGPHSITLPSGKKTTVRRELQEFHSALEEAKADIVGLWALNFLIKKGLLPKSLSQSMYVSFLAGCFRSIRFGLEEAHGKGQALQFNWLYEKGAFVLQSDGKFSVDFTMVEDAVESLSREILTIQAKGDKPSAQSLLQSRATLTQPLRMALERIEHMQVPVDIAPVFSTANKLFADI

SEQ ID NO: 62689 - protein, 211 aa, Zea Mays
MFTPLPRHWRHIRSRLTPLAQHPLLLPNPSTSVLRPPQLRRWPPPRTLRRSSASRETSRCSSRHRRSTRARGPSSLRPRRALAPRTPLNHHRRRQPLRPRLFTQYPRRSLSRWSPRRFPPRSSPDPRWSRCRHCSSGRLRQDQMDRCLRSSGTRLHACKKHTRAWTSTSRDGSGWTSPSTSGRSTTIMRGPGRSGLRRSVWHPEVDLTARV

SEQ ID NO: 62690 - protein, 659 aa, Zea Mays
MSMDFGAPADDPKAFRNICRDRILKDLLKPDKDKETKSSWKVLIMDKFTVKIMAYACKMAEITDAGISLVEDLFKRREPMPSMDAIYFLQPLKENVIMLLSDMSGRCPLYRKAYIFFSSPIPKDLVTYIKNDSSMNLEFFTIDMQGFVTDHDTALIDLYGPSEQNSKKFNDTISTMATRIATTFASLKEFPCVRYRAPKGDASTTTKFDMVPKWLATAVWEIVSKYKSTIPEFPQKETCELLIVDRPIDQIAPVIHEWTYDAMCHDLLEMDGNKYIYEVSKMGSEPEKKESLLEDHDPLWLELRHAHIADASERLYEKMNNFVAKNKAAQLSRDGGEVSTRDLQKIVQALPQYSDQVEKLTLHIEIAGKMNRCIREYGLRDIGQLEQDLVFGDAGAKEVISILRSKQDMSPENKMRLLIIYAIVYPEKFEGDKGEKLMQLAKLPHDDMDIINCLGYLDGSNTKKSSRTGTFSLKFDAQKKKNAARTDKQDGEETWALSRFFPLIEELIEKLSKGELPLKEYPSMSEPSSASASQDATQTASSTARPAQNPQPMSMRSRRTPTWAKSRNSDDSSSDSSVLRHASGDFKRLGNRIFVFMIGGATRSELRTVHKLTMKMKREIVLGSSSIDDPPQFISVKTQFLFFRFYYYMFMQQLCKCRS

SEQ ID NO: 62691 - protein, 458 aa, Zea Mays
MSFFDSTPSGRILNRILGTVILMSHVAWQVFIVFVPIITASLWYQQYYIDAARELQRLVGVCRSPVLQHFSESMAGSNIIRCFQKERQFIRYIGYLVDNLSRPSLYNAAAMEWLCFRLDMLSSFVFSFTLILLVSSPSALIDPKTAGLAVTYGLSLNMLQGWAIAVLCSLENRMISVERMLQYTTIPSEPPLTISERQPNRQWPTKGEIEFLNLHVRYAPQLPFVLKGLTCTLLGGKKTGIVGRTGGGKSTLIQALFRIVDPCIGQVFIDGTDICTIGLHDLRTRLSIIPQDPVMFEGTLRTNIDPLGEYSDEKIWEALDSCHLGDEVRKNELKLDSTVTEKGKNWSTGQRQLVCLGRVILKRRKILVLDEATSSVDPITDSLIQKTLKQQFLKCTMITIAHRITSVLDSDKVLLLDNGEIAEHDAPAKLLEDSSSLFSKLVSEYTMGSDKWRMQESS

SEQ ID NO: 62692 - protein, 307 aa, Zea Mays
MTMELDFTREAKNSERTASCFRKNSVVKVPYVFWQLTTREVLTMEFCYGHKVNDLDFLRKTDISPTKVAKALIELFGEMIFVHGFVHGDPHPGNILVSPEGHGKFSLVLLDHGIYRELDQKFRLDYCRLWKALILLDSNKILELGEQFGVGKYAKYFPVIFTGRTIESKSALGTQMSGEEQRRLKEDLNSLGMDDISSFMESLPPDFYVILRTDGLLRSILGNLGAPRHVRLLTYARCAIHGLEKQHKMESGAIRRMFLNVKTNVSYLRLRVIIAVLLAKANGAKQKVVNKLRQMLQETSQGFHRRM

SEQ ID NO: 62693 - protein, 201 aa, Zea Mays
MDAFLQRLKRLDAYPKVNEDFYKRTLSGGIVTLVAAVVMLLLFISETRSYFYSATETKLVVDTSRGERLRVNFDITFLSIPCTLLSVDTMDISGEQHQDIRHDIEKIRLDAHGNVIEARKVSIGGAKIERPLQKHGGRLDKGEQYCGTCYGAEESDEQCCNSCEEVREAYKKKGWALTNPDLIDQVYQLFYLDFFIRKVYI

SEQ ID NO: 62694 - protein, 1291 aa, Zea Mays
MVTVGRRRGFVTFAAAAIALMQISYLLFPISAQQSNGSRVVPAEGYCSMYGICAQRSDGKVLNCANATKAVKPDTLFSSRIQSLCPTITGDVCCTVDQFDTLHQQVQQAVPFLVGCPACLRNFLNLFCEMSCSPNQSLFINVTSVKQINSTMTVDGIDYYVTTNYGEELYNSCKDVKFGTLNTRAMDFIGAGAKTYKDWLAFIGRQANLNEPGSPYLITFGSDFSDSSGVKPLNSTIYSCGDPSLGCSCGDCPSSSVCAGSLLPQLNTETACSVKMGSLKAKCLDFSLVVIYLALLCAFLLWGLLYRTRGRTASPLQAKPLRNSDNKSNMNKNGKSPHDSVQVPEAASSTAKPSNPSIVQTYMSIFFRKHGIFVARHPLRVLCVSLLVPVLLCIGLFRLKVETRPEKLWVSPGSEAANEKNYFDSHLAPFYRIEQLVLATSASGGSEAPSIVNDNNMKLLFEIQKKVDDLRANYSGSKVALADICLKPLSTDCATQSVLQYFQLDPKKFDDSGIDHAKFCFQHYTSEETCLSTFQSPVDPSTILGGFPGSNFTEASAFVITYPVNNKVQTTGKENGKAMAWERAFINLVKEEIRPMVLAQNLTLSFSSESSIQDELNRESTADAITIMISYIVMFAYISFTLGDRPSRWLLLFVSSKVLLGLSGVVLVMLSVLGSMGFFSAIGVKSTLIIMEVIPFLVLAVGVDNMCILVHAVKRQPDQSNLEERISDALVEVGPSITLASFAEVLAFAVSAINPMPATRVFSMFAALAVFMDFLLQVTAFVALIVFDIRRAQDGRIDCVPCARITPSTGAGDGGDGQRLHLLARYMRDVHGRILRNRAVKFVVITVFVGLTFASIALSTRLQPGLEQQIVLPRNSYLQDYFDDLAKYMKVGPPLYFVVKDFNYSSASVDTNQICSISQCNSNSLLNEISRQSLSPETSYIAKPAASWLDDFLIWMSPEAFGCCRKFVNGSYCPPDDQPPCCQLDQVSGSCMTSKTCSNCTTCFLHSDLDNGRPSTTQFRDKLPWFLDALPSSDCSKGGKGAYSTSLDLSGYESGIIQASAFRTYHTPLNKQSDYVNSMRAARDFSSKMSRDLQMKIFPYSVFYIFFEQYLSVWKTAIMNICVCLGTIFVVCFIVTSSLWASAIILTVLAMIVLDMMGVMAILGIQLNAISVVNLVMSIGIAVEFCVHITHAFMIGTGDKETRARQALSTMGASVFSGITLTKLVGVIVLRFAKSEVFVVYYFQMYLALVIIGFLHGLIFLPVLLSLCGPPTKWAKPKEQSQPPSASSERT

SEQ ID NO: 62695 - protein, 1015 aa, Zea Mays
MASSSFAPDDQTDADFFDKLVDDDDPATDLPRAVSATSVADDPPPVLEPQVPAPAPSEGSGKGGAGVHTAVKQVQWASFGGGVDDGPDPFADLSGGAGDDDGFLGNTAGTQAALDHAAEVTDQDFFAGSSSSDQQNVHGQHDQGRGSAAVDSADPKSLEAMYPGWKYDEASQQWYQLDGSVNSTGNAAQALDDSAQNAHHHQQQLDAAYLHNSAHAGLGTIAEESTTAAGAANSWGQGAAPEYPPSMLFYAEYPGWYFDTNTQQWHSLESYQQAAVQAGTSSTGQTVVASDDVVATSSLTGHNAGQTEDLVAHNQVTQRNSSSNSFTHQNQWQTTDALGNNVQSESLASSFYGFEQHMNAETTSSSTSQQTGFHTAETITDHYGGRKAFESSSLQSGYSSSDSQQSSHKAFEPSTGYQAGYNGFEPASGHHTAFEPAMHNQSGYKAFDPSTGHHSASWGFMPSTGQQTDFKGSRASTVHQAGYEEFEISRGYNTNFKAFESSSSQNAGYNGSQPSSGHQPNYMGFDTSANHHGYTDVNGVASTQGFVPMQTTYQGQKQANATSQGHLSNSYLGTDNSMNFNQQQFLGANASNLQFGHSPHEGRSSAGRPPHALVAFGFGGKLIVMKETTSMPASFNSGNQGNSSSTVSVLNLLEVVFDKVDPSSVTNGSALSYFHALCRQPVPGPLVGGSAASKDVNKWLDEMIARYESSSSEFHRGDTRKLLISLLKILSQHYGKLRSPFASDPSQEETDGPEMAVTKLFSSCKRSTVHMGDYGSLVPCMKSIPSESQMQAVAQEVQSLLVSGRRKEALHCAQAGQLWGPAIILALQLGDKFYVDTVKKMAHFHFVSGSPLRTLCLLIAGQPADVFNVENNVNSDYGASHQPVEPGPNMLDDWEENLAIITANRTEGDVLVITHLGDCLWKEKNEVAAAHSCYLVAELNIDSYSESARLCLIGADHLKCPRTFASPEAIQRTEVYEYAKVLGNSQYILLSFQPYKLIYAYMLVEVGKVSDSLRY

SEQ ID NO: 62696 - protein, 480 aa, Zea Mays
MAKQYSPSAVERSWYAWWESSGYFGADSASTKPPFVIVLPPPNVTGALHIGHALTVAIEDAMIRWRRMSGYNALWVPGVDHAGIATQVVVEKKLMRERKLTRHDIGRENFVSEVLKWKDQYGGTILNQLRRLGASLDWSREAFTMDEQRSKAVTEAFVRLHKESLIYRDYRLVNWDCTLRTAISDIEVDHIDLKEDTMLKVPGYANPVQFGVLISFAYPLEEGLGEIVVATTRIETMLGDTAIAVHPEDERYKHLHGRYAVHPFNGRKLKIICDAELVDPTFGTGAVKITPAHDPNDFEVGKRHNLEFINIFTDDGKINSNGGAQFDGMPRFTARVAVIEALKEKGLYKDTKKNEMSLGVCSRTNDVVEPMIKPQWFVNCSTMAKAGLDAVRSKKIEIIPQQYEQDWYRWLENIRDWCVSRQLWWGHRIPAWYVTLEDDLDKNLGSNNDRWIVARNESDAKLEAQKNTCKDGDDGNATWW

SEQ ID NO: 62697 - protein, 64 aa, Zea Mays
MRTRAAWTRETTSVCNSWAAGIGVVGHRRRVRAQQTRATASAVAWDEREERESMCGAARGSEGG

SEQ ID NO: 62698 - protein, 146 aa, Zea Mays
MMPFWPVPPPMAGPATTLNMGVDYWGTPASVPMHGKVIAAPTSAPSSNSRDIVLSDPTIQDGRELKRQKRKQSNRESARRSRLRKQAEWEEVANRADLLKQENSSLKEELKQLQEKCDGLTSENTSLHEKLKALEDEKSNGNWYKD

SEQ ID NO: 62699 - protein, 457 aa, Zea Mays
MFKFLKEVVAGSGSGLKDFPYTIGEPYASAWGSWKHHRGTSKDDGSPVSIFSLSGSNPQDRHMVAGRNGVKRLRTVRHPNILSFLHSTEAEAADGPAMKYTIYIVTEPVMPLSEKLKELNLGGTQRDEYFAWGLHQISKAVSFLNNDCKLVHGNVCLASVVVTQTLDWKLHAFDVLSEFDANNEASGSPMLQFEWLVGTQYKPMELSKSDWASIRKSPPWAIDSWGLGCLIYELFSGAKLARTEDLRNTASIPKSLLPDYQRLLNSTPSRRLNPSKLIDNSEFFQNKLVETIQFMEILNLKDTFEKDSFFRKLPNIAEQLPREIVLKKLLPVLASSLEFGSAAAPALTVLLKMGSWLPADQFNIKVLPTIVKLFASNDRAIRACLLHHINQFGESMSAQIVDEQVFPHVATGFSDTDGTIRELTLKSMLVLAPKVSCFYPPVGYGFISEMYYKLARS

SEQ ID NO: 62700 - protein, 701 aa, Zea Mays
MPAFRDVIDVPLVVRRLHRSRTEVRKELGIANDVKVVIFNFGGQPAGWELKKEWLPDGWLCLVCGASDTQELPLNFIKLAKDAYTPDLMAASDCMLGKIGYGTVSEALAYNLPFVFVRRDYFNEEPFLRNMLEHYQCGIEMIRRDLLTGHWKPYLQRAITLQPCYDGPINGGKVAAHILQDTAVGKKYISGKLSGARRLRDAIVLGYQLQRAPGRDVGIPYWYSHSEKEISVGPAPTSHDMNGSDESSFEDFEILHGDMQGLTDTMSFLKSLSGLVGNDLRSPEKQTRERAAASVLFDWEEEIYVARAPGRLDVMGGIADYSGSLVLQMPIREACHVAVQRSDPTKQKQWKHTQARQLANGGAVPVLQIVSFGSELSNRAPTFDMDLSDFMDGDKPISYDNVKEYFSRDPSQKWAAYVAGTIFVLMAELGVRFKDSMSILVSSSVPEGKGVSSSASVEVASMSAIAAAYGLNIAPRDLALLCQKVENRVVGAPCGVMDQMTSACGEANKLLAMVCQPAEVKELVNIPTHIRFWGLDSGIRHSVGGTDYGSVRVGTYMGRKMIKCAASNLLSELLLSCTSTQPGDSSPDEYEGHGVDLLKSEASMEYLCNLPPHRYEAVFAKEIPETITGDAFLEKYGDHNDAVTEVDPKRSYCVKAPTRHPIYENFRVEAFKALLTAAKTDEQLSALGELMFQLQRLRARL

SEQ ID NO: 62701 - protein, 172 aa, Zea Mays
MNYTSWQRLRSACYLLGRFGLFSGFYRSTHPTWRIAGICYPQRHNQELSIAALLPPTTTFPLNTQESCYLPITYKPAYKLGCQTTTTTTTTTTKPFWARVEIQQKPQVKDSRLPNNPTTLGLFGNNVSQNHGFTILYFARVWRSWAPPKCCFFIWLVAQNRCWTVDRLAKGD

SEQ ID NO: 62702 - protein, 443 aa, Zea Mays
MASAAAETLASFPIASPSRSLLRPFPRRPAGARTGAPSIRISAVPPRGLGLALVHRRCPPAARANVERDGDGASGNGEPSSSSGDGDRDAAAESGGDSTSTSTTSTAATPPPPSSKRNENKWRRRLTKGGGVGRWLWEPIVQGREMGFLLLQLGFAIFALRMLRPEIALPGSEPRPQTTYVSVPYSDFLASINKDQVKKVEVDGVHIMFRLRPEVESQVRVEQTPTQRGADYVIDNAGVSRRIVFTTTRPVDIKTPYEKMVENMVEFGSPDKRSGGMLNSALVGLIYVVLIAVVLQRLPISFSQQSPGQLRNRKNSNSGGAKVSESSDIVTFADVAGVDEAKEELEEIVEFLRNPERYIPFISCSASEFVELYVGMGAARVRDLFAKAKKESPSIIFIDEIDAVAKSRDSRYRIVSNDEREQTLNQLLTVGQCPFLFLEHSPN

SEQ ID NO: 62703 - protein, 70 aa, Zea Mays
MDFLYFFGNIFDPRHMRISIQGSGIYLNRERGQSIDPIHIDDPHCPANNVGRNCFRIHQCIKNTIDDRVE

SEQ ID NO: 62704 - protein, 691 aa, Zea Mays
MKLWDWDDDWKCIQKFGREHTDSILQVAFSPNDSFASVSSDHTIKLWCLKSPTSECTLHGHSDKVNCLDFVTHDGQQYLISGSQDCTAKAWALKEKECVQTMDVFMSPVVSVISLPDTPYITTGSADGTIHLWSSANFRLERILSLGLCGPVWDLRLIGPTRIVIQPNNYEISVIMDIDTGSEASSSAPSNELIQVDPKELRFPVAQEVSSTLEIRNVTDHHVAFCMWSLNHTANYIPVPNIEVLSPQSMRQVVITRIARREPVPADPVDDIVYVKGTTVVQGTTSADVTYDMFDGTRTGQILQPAMELNVVLVADSEIIHKARLPWALDVHPTMPWIMMAQGDYQIRIWNYKTRAITSAKFIMHKQWILAGCSSGLVYVYRYEPEKKKSVEKIRVLQGHSNAINSLAVHSTKPCVLSASKDGKILIWDYENEWELMKTFDVKSPVQHVAFSPKDSNMFASAQDKTVKIWDWHSGNCKSTLSGHSDLVLCLDYFSQGDQLYLITGSRDKTAKIWDCKTRSCVRTLEGHTDVVNVACCHPDLLILITGSLNGSVRLWDLNRSTTFRYELIFDLGEVYAIASLKGTRIVIGHEIGLALVDIDLEGKKDGYVKSNVAIMDSKNDTDQNMKELSPTASSSEVQKVSSIIALETLYKMKSSESSIDVHPTETWMVITSDKYVHIWDYHTRSDWLNL

SEQ ID NO: 62705 - protein, 171 aa, Zea Mays
MSGRRQAWQFAAALVFFHGSEYVLAAAFHGRQNVTATSLLISKQYVLAMGFAMLEHLTEILILPEVKEFWFVSNIGLLMVIIGEIIRKLAVVTAGRAFTHVIRTYYEDQHQLITHGLYRFMRHPGYSGFLIWAVGTQVMLCNPLSTVAFTLVLWRFFSKRIPIFLEAVLWL

SEQ ID NO: 62706 - protein, 103 aa, Zea Mays
MLSSGWIQVSNGKEYALSDVIDTIKHAFGGSPQIVCKRGSIEELRLCFDKELKPRDCLTTSLANGSVSKSKHCPRYITLPTYDPLEIMTQFDEFEVPAALYTA

SEQ ID NO: 62707 - protein, 844 aa, Zea Mays
MAVAPVVRQQSLTEGLISCRTDVQCLHRWQKVLNPELVKGPWSKEITTDVKHFDVTSSFRWHNHLNPGINKDAWTQDEEIRLIHAHQTYGNKWAELTKFLPGRTDNAIKNHWHSSVKKKVDSYRSSGLLAQSQGFTPVEYTAGGLNVDSSSAITNQISEGSGFNVFREAEDSMELSQSSFAKGSCSQEEQNDVTLGSHLHVHESLCPDGSTNDGNGASGLPDIHHRLCTSDMDQDKHLQEGMDLDKHLQHEFSQGTDLHLDVDEVPNNFVIKGSQSSNELAVQFHDTEIMNSSKNDGVSLVPHAITPCVPILPSVSGCVHNINVIYEMGIKNDNCFQSEKCQDISIQSGAYSSEAAGSFLAPLYPLQTSEPAIMMGGPVYYQSSVMSLPPGFISSDGASNASGVKSETSYYPVSRQNLEIKTCHNASGDPEQNSYISSEDDRNKTSEPMGRISESEKKQQVDVEQSCLEPAACIGKEALSSHGDTILSKKEDAGALCYEPPCFRSFEFPFVSCELVNSSDLPEYSPLGIRELMRTSLNFPTPVRLWGSPTRDGSPDAVLKNAAKRFMCTPSIMKKRHRDLLSPVSDIRTDKKPNTERDFMSSGISSTRVGKSCMDSADDSADLVSPKESAFQKKLKLCHENKENLNEIADQGENEANAKHSSGILTPSSVDNHNTHKHGPNFRIQELNTTVQALSNSKDIIFSRSKPSEHVEKSAACIDADYEYLNILADTPGIKRGLESPSAWKSPVFTPFQDAYFMSPASRAFDALGLVKQINEQSASAVEEAHEVLANGSPWKQHNKENSDKENIENTALKHEHVTSKPPSILMPSSSLRLLEISNKDYGC

SEQ ID NO: 62708 - protein, 387 aa, Zea Mays
MCWLLFTNLGGEKRFASIVAKRLESLGALTQGDRRAGPSLSAFNYDSNYGKKALTMMYRGIMEQDSFPVVPPGCSDDETSIQEFINEAKAALVSVGIIRDAFICNGKDPGKLSGRIVDSDMHDVARFLNRLLGLSPNIQNRLFDLFTSILDIVLHNARIEGQLDSGIVDIKAKNVEMTESPRTVHTDSLSGALTVLFTFTIDRGVTWESAKTMLEEREKFGAGTSIDGFYESRREWMGRRHFILSLEGSTEGMYKIIRPAIGEALREMPSSELKSKYRKVSSIDKVSKGWQEEYDASSKQCMHGSKCKIGSYCTVGRRLQELNILGGLILPVWGTIEKALAKQERLIHKRIRVVRLVTTNDSQRIVGLLIPNSAVESVLTGLQWVGH

SEQ ID NO: 62709 - protein, 336 aa, Zea Mays
MKLLEEGFDLCAHLLALRRYHFMEIADWADSFIASIYQKKWSFVKSEQKRSEIQGLMDLALQRSSCDSDPYKERLFIYMRESPVDSVDASPCGLDLLDDILLGYKAEWPMNIVITVDALKIYAEIFCYLLQVRFAVFSLTEVWRFLKELTQFIGRSSHSRSDVLKKLNFVMKLRHKLYHFLSTLQQYLHCHLSDISWRRFQHSLKNQVRDILDLEYVHICYITDALDICFLSDESKQVATIIKSMLQLALELRSCFQSGDTCDLSVNQLSNLQYLINFSQVDVIRTKFEDNIKDLYILHSKSSKYTELGLSRFWGYLNYNEYHSTKVSKDMDNFYF

SEQ ID NO: 62710 - protein, 1538 aa, Zea Mays
MMGSPDGRLVELFGAVKSWMPRRGDHSPPPALQSDAAAGQPLPHDLSRDFWMPDQSCRVCYDCDAQFTILNRRHHCRHCGRVFCARCTANSVPRSPGDAAREDGERIRVCNYCFKRWMEEEPAARGAAAGQQPSSPSLSAASVCSDKSSFTGTNGQMSSYANISYSEFPVHGEGNCGEDDGYREEQQPAMDPAPTMEPAAYADNSSDRFNFCLQRSDDEDDDYTVFRSDLEEQHMQNSDKYYGPMYFDGHHVSCSDDAKESTSPRKKLTTLVDSLGADKNEDHNVDECCNARSSSMYSMEVLDNEPVDFENNSLLWVAPEPEDGEDDHDGEHDDDEGVDATGEWGYLRTNSFGSGHCRSRDKSAEEHKKAMKDIVDGHFRALVSQLLQAEKVPLVDGSGKESWLDIVTSLSWEAASLLKPDTTSKGGQMDPGGYVKVKCLACGHPSESFVVKGVVCKKNVAHRRMSSKKEKPPILILGGALEYQRVSNLLSSFDTLLQQETDYLKMAVAKIKAHQPSVVLVEKSVSRYAQDLFLEKNISLVLNIKRPLLERISRCTGAHIVPSIDCLSSEKLGRCDLFHVEKYVEEHGTAGEGGKKMLKNLMFFEGCPKPFGCTILLKGANGDELKKVKHVLQYGVFAAYHLALETSFLVDEGATLPELPLKSPIIVAFPDKPSSADRSISTIPIIPIPSASPPNSCLQAFGLQNDDLTFDGTKRMEQTALGVPYEQTASVQINSQNGHITGFLDMVPQSSVGPLFQQSDIHCPDGTGGVNRKMNLQGSLPGTTRNVLVNDFSHSVSTAHPTNLVSAKGDGSLAKNPEIGDKIADKPAAPLNVQISHDDESIKNNSVAKTDEIPASPAENQSILVSLSSRCVWKESLCERPHLLRIKYYGNFDRPLGRFLRDQLFDQSKLCQSCELPPEAHVYCYVHPQGSLTISVRKLSIKLPGNGENDGRIWMWHRCLRCPRVNGLPPATKRVVMSDAAWGLSFGKFLELSFSNHAAASRVASCGHSLHRDCLRFYGFGEMVACFRYASIRVHSVYLPPPKLDFTSEHQEWVEEEAKEVDDSAELLFSEVLNALHKISGGRPITGSFDGNLKILELRRNIGELEEILVAEKTDFMESLKNLLKTDMRKEQPFIDILDVNKLRRHLLFLCYLWDQRLKFIANSGGKYCDALAGLRIGSGNSDFNGKPVGAAPKLEKGSKATVLSIAKEGSLQQSSCPSHGEDEGFNQANEYNENISRNAAELSGTEDSIAKINHATSADVKDRLDNQESRTGVRRVVSDGQFPVATDIPDTLDAKWRGQNEPAPDSNLAKPPLSVEDTTVDVKSQAKAVHTFTFTVRSGDAAEELLRWIKMPYMTSNSSLNTTSSSPLRFTSLAEYIPKYVELFCDLSQKGGARLFLPTGANDIVIPVFDDEPTSVISYALVSPMYCFQLSDDSSKNRDKESSLPLPVYDSGNFNPFHLFEEFGSHYDVTSSVSGVRGSFAPDQVHLSVSFEDGGPLGKVKYNVTCYYAKKFEALRRVHKHWKPYMLSKNFGDLSGY

SEQ ID NO: 62711 - protein, 73 aa, Zea Mays
MYDYDLCHFKFSSCSALNSLVCLCSSPYTAAAVMMSMLLVLVLYSFPDWQLAAHSLAVGSLFLDSLLSSRLFL

SEQ ID NO: 62712 - protein, 108 aa, Zea Mays
MVGKKRGVISPLDHLAGLLEVRVVRGVDLAIRDLRSSDPYVVLRIGKAQKVKTRVVKKSINPEWNEKLTLSIEDPAVPIRLVRLRFHLSFPNSTSILSKRVTEEIIYC

SEQ ID NO: 62713 - protein, 749 aa, Zea Mays
MSEFLDLELQDGIRMPWNVIPGTKQETVNCVIPVSAIYTPLKPISDIPVLPYSPLRCRMCRSILNPFSIVDYVAKIWVCSFCFQRNQFPQHYSSISENNLPAELFPQYTTVEYISSTETGPIVPPVFIFVVDTCMIEEEIGYLKSALAQAVELLPDNSLVGFITFGTYVQVHELGFGLLPKSYVFKGTKEVTKEQILEQMCFFAGKKMPTTGVIAGTRDGLSSESISRFLLPASECEFVLNSVIEEIQKDPWPVPADQRASRCTGAALSVAANLLGVCVPGSGARIMAFVGGPSTEGPGPIVSKSLSEPIRSHKDLDKDSAPLYDKAVKFYDQIAKQLVHQGHVLDLFACAVDQVGVAEMKVAIEKTGGIVVLAESFGHSVFKDSLLRIFQSTDDNLGLSFNGILEINCSKDVKVQGIIGPCSSLEKKSPLSSDTVIGQGNTSAWKMCGLDRKTSLCLVYDIAKKDGPDSIAQSANNQFYFQFLTYYQHNEGQMRLRSTTISRRWVSGDNHVEELVAGFDQEAAAAVMARLVSFKMETEVDFDPVRWLDRALIRLCSKFGDYQKETPSSFSLSPRLSIFPQFIFNLRRSQFVQVFNNSPDETAYFRMMLDRENVTNTVVMIQPSLISYSFQSGPEPVLLDATAIASDKILLLDSYFTVVIFHGVTIAQWRNAGYQDQEGHEVFAQLLKAPHEEANLIIKERFPVPRLVVCDQYGSQARFLLAKLNPSVTYNSDNPSPGGDVIFTDDREN

SEQ ID NO: 62714 - protein, 365 aa, Zea Mays
MCPEILADIPYGYKSDIWSLGCCMFEILAHRPAFKATDMAALVNKINRSSISPMPPIYSSALKQIVKSMLRKNPEHRPTAGELLRHPHLQPYLSESSNCSPIYLPVKPTKGNLVDKQSKKPSSGRKRAVKANGSNGTLETAAEHAVEARDSSTNFSDVSTIGTQEALILQMPVDPDAGSKEEQNVDVVPFQHAAENLMATTDRQVDATIRLKAIRTSNAKEAAPVTVADQKFNEAPIPNEELTIGVVQEQRKDVKPRSYQAGKPEMCDTTVTEESSPISTLKLAHTESAPAEWDHLNIVQQRADALESLLELCAKLLEQERLDELAGVLRPFGEGAVSSRETAIWLTKSLMTPPPKFGESPTKLL

SEQ ID NO: 62715 - protein, 294 aa, Zea Mays
MVACSRGLAWPPFDLTTARGAASWPRRRAAIRCCCAGADAQPQRRLSRAAAVAPERAEEWRIDGNKPSAAAPGRRRTSLTAMPPLPFPAPRSRRQVKQPDFYPRCTPRGSAPQSRDTPPKRDTGIASEKEWGINLLDEAVKESGINEDGSTWYRESGDDIGENGYRCRWARMGGQSHDGSTEWKETWWEKSDWTGYKELGAEKSGRNAEGDSWWEKWKEVLYQDEWSNLARIERSAEKQAKSGIENAGWYEKWWEKYDAKGWTEKGAHKYGRLNEQSWWERWGEHYDGRGFVLK

SEQ ID NO: 62716 - protein, 272 aa, Zea Mays
MYNPRGACSNSSRHMGSSSHRSPQVKGPKRIGALYVTCQLFKIYFRLGTVNLCRSVIRSIETARNFDFEDFPVKDKVTYMYYTGRLEVFNENFLVADQKLTYALMHCNPQSESNLRRILKFLIPVKLSIGVLPKRTLLERYSLLEYADVVTALKRGDLRLLRQALDRHEDQFLKSGVYLVLEKLELQVYQRLVKKIHIIQRQKEPAKAHQIKLDVVVKALKWLEIDMDVDEVECIMACLIYKNLIKGYFAHKSKVLVLSKQDPFPKLNGKPV

SEQ ID NO: 62717 - protein, 585 aa, Zea Mays
MARTRSGIPDERSHSTGIPQSQKARQNPLGGYPSLPMATAAAAAVAAPEQPRRRKPAPGRGGVALPAGLSEEEARVRAIAEIVSAMGELSRRGEDVDLNSLKSAACRRYGLARAPKLVEMIAAVPEADRATLLPRLRAKPVRTASGIAVVAVMSKPHRCPHIATTGNICVYCPGGPDSDFEYSTQSYTGYEPTSMRAIRARYNPYVQARSRIDQLKRLGHSVDKVEFILMGGTFMSLPAEYRDYFIRNLHDALSGHTSANVEEAICYSEHSAVKCIGMTIETRPDYCLGPHLRQMLSYGCTRLEIGVQSTYEDVARDTNRGHTVAAVADCFCLAKDAGFKVVAHMMPDLPNVGVERDLESFREFFGSPAFRADGLKIYPTLVIRGTGLYELWKTGRYRNYPPELLVDIVARILSLVPPWTRVYRVQRDIPMPLVTSGVEKGNLRELALARMEDLGLKCRDVRTREAGIQDIHHKIRPDEVELVRRDYAANEGWETFLSYEDTRQDILIGLLRLRKCGRNVTCPELVGRCSIVRELHVYGTAVPVHGRDVDKLQHQGYGTLLMEEAERIARKEHRSKKLAVISGQL

SEQ ID NO: 62718 - protein, 115 aa, Zea Mays
MTSSLVRWSACPCLPWLPVSPCDAPARIQLSSPKSLMAAHGVLVDVVLVGISLCASLLPCARTLLLSSAVSISPRSVSSSLCVPLQARQPPLSCHRTPNAVIHGRDLAKCVRRLT

SEQ ID NO: 62719 - protein, 94 aa, Zea Mays
MPVDSVTNREYHAGAAPSRKYLTLSQLPLPCFLSSALAPPCNVPPPWNSPAPPLRDSPSSRGVLLGHLASVRGSFWRGLHPDWGEFLAALAAPS

SEQ ID NO: 62720 - protein, 277 aa, Zea Mays
MTTSASPLFPNPRKRHLDASPLPRHFHGPQSQTRLSQRHRRRFFLPLPPKARSFASDMGNHMSSAFGWPSDDGRGLLCCWIGKARGLTVAMDVEAGTGLHLVDRRRVTDSRKTTLKEEAVKPPQWKKRRPFYKEALEAAATHYDPRLEAIGIEIRLQKEKLAYIPKSDKAAKEDMSELFKPLTAEEENDVHDCLYSRGSSSKVLVLHEPSNIEVSKEKFQCLRRGCWLNDEVINLYLELLKEREKREPNRMFASFFRTKIGIFLCILLEEVFCFVSK

SEQ ID NO: 62721 - protein, 527 aa, Zea Mays
MSGPKNMTEQTQGVNYRALGDLFKLAEQRKGTFIYDIAVQMIEIYNEQVRDLLVSDGLNKKLEIRNNSQNGLNVPDASLVRVASTMDVMELMNVGQKNRAVGATALNDRSSRSHSCLTVHVQGRDLTSGTIFRGCMHLVDLAGSERVDKSEVTGERLKEAQHINKSLSALGDVIASLAQKNSHVPYRNSKLTQLLQDSLGGQAKTLMFVHISPESDAVGETISTLKFAERVSTVELGAARLNKESGEVRELKEQIARLKSALAAKNLGSEQIISHDSEAFNIKMPSPGFSNTRQGSCDLLSSQSNFRQPMEDVGNIEARANHTLRQKKPSFDLQDLLTASDSPSWPDSNLRVNFQMGDEREAIGGDWIDKVVVNNNNSASDWEGDNTALPDFFYQRYHSGMREKQYQRNNMRQKDDHEYEQQRPRFYSTNTDDSDDIDIATSDSSESDALWQLNVQSMNNSISESGSKVKKPQIKLRDGSDARTPIHSQIPSGSRKVANGSSRSVRQPLSRSDSRRLSSNGRQTGAK

SEQ ID NO: 62722 - protein, 136 aa, Zea Mays
MKRDPDHPGGEAGKLIPIIKELFLFNIFIFSRHEWNTISLLVTFIDFWRGCMERHVERAGSKRISHGDRLTTEIVIHLPLSPGQLMNVSRNVPAHREKGCNPMSQPGSHAATTTSTMTTTTWSGRATTRRMMGGTS

SEQ ID NO: 62723 - protein, 624 aa, Zea Mays
MVRKLRDVYDPNNKIDVKVKILSGSPPGAVAKESKRVQAAWVVLDKELKHEEKRCMEELQCNIVAMKRSQPKVLRLNLVGSHSHEREESSRPPPPPAPSPPPPEPSTSPSPSRVPSSATPSSSPESEEAPFDTSTTDVGASCVSSSDSDTNSFSTNKGTTTTTTTAAAKDSVQRSDADSESEASSLEPWMATILLQTPADRLVGNRPRPRRTPTADSLLEKIAKLDLLTEISAIRSRSDLNFRGNVRDAVALDRSAPPGPPPLCSICQHKAPVFGKPPRWFSYAELEVATGGFSRANFLAEGGFGSVHRGVLPDGRAVAVKQHRLASSQGDVEFCSEVEVLSCAQHRNVVMLIGFCVENKRRLLVYEYICNGSLDTHLYDRNKETLEWAARHKIAVGAARGLRYLHEECRVGCIIHRDMRPNNILVTHDFEPLVGDFGLARWQPDGDMGVETRVIGTFGYLAPEYAQSGQITEKADVYSFGVVLVELVTGRKAVDINRPKGQQFLTEWARPLLEECAMDELLDPRLGGRFCENEVYCMVHAANLCIRRDPHLRPRMSHVLRILEGGGGDMVVDSAGSRSWRMQQHQRWQEQSSPAAQRDSSQRGQETAGSPWSRERRQNLCHRY

SEQ ID NO: 62724 - protein, 91 aa, Zea Mays
MAMASRSSTTGTAVLCFLVVVSLFLAPSLFVAGTEAAAAYGAGAGAGRKMKQAAAGAVATKQDGYGYPATSSPAGYPAVPCCPHPPEGGRG

SEQ ID NO: 62725 - protein, 143 aa, Zea Mays
MLVRETAALQLQRRRADWAHSRPVLALDIAWNVAFAAAAAAVLSSSAEESPVKPLRLWVVGYAAQCLVHVGLVCADTRRETRRARRSASDVESAGAGTDSSDADSEDDERAEGRSSYTGRCETMNTLISFLWWIIGFYWIFSG

SEQ ID NO: 62726 - protein, 54 aa, Zea Mays
MEDLTNDVYGTVKCTHSDVTISVVGLPQLPKSMCSRVYPPAVHAALYDGLRGHR

SEQ ID NO: 62727 - protein, 569 aa, Zea Mays
MPRLYSEEGAGADEATAAATVRLANKIRKRRAVSSSGGSDPAAVGRRLRSRRPAVRLPRHRTSAGGDMSESSRSRHCRGSGNRVAEGTLPSASARRLVDAFWQNMGSGGLLDGDAAAARRSLVLWSGASTKVSKRSRSKSKVLEADGKGSRRNGHPRWFSADLMSNGSAMEVGTFSQDDVSRCPEKTVNLDDLQNSLIAAKELVKVLAHIWGPGELNPSSASLISALRSELDVARSHVRKLIKEQKSDAFEIEDLKLQLTEELESWKVKQKEKVGNALRFVVSELDTEKKSRKRAEKTNKKLSIALANTEASLQAVTKELERERKYKRRVEKICNELIRGIDEDKAEVQALKRETEKAQEELQKEREMLQLADEWREQRVQMKLLEARVQFEEKNAAVNQLRDELQAYLDTKKEQEPLNDPMELSHASEIGNTAADLVPDRNGGNISEDASEGSDIHSIELNVDGINRTYTWSYTPSSKGRQRSPSRHEPFSDRGMDGVNSWRLEQSFRDMDEELEGDWAEGCSNGMLNLDHDEERYLAIKNLREQMLAGSGFILSQGRENAKREYCGL

SEQ ID NO: 62728 - protein, 334 aa, Zea Mays
MCHDISPQSMSHTLISLLRHDVTSTKTDWGAGEGATSPSNIALLLNGVRGLMLDMYDFRNDVWLCHSYGGICQNFTAFQPAVNVLREVERFLSRNPAEVVTIFVEDYVESPMGLTRVLNASGLARYVLPAWRMPKSGGDWPLLSDMVRDNHRLLVFTSKAAKEAAEGVAYEWRYVVENQYGTKGMVKGTCHNRAESAAMNDLSRSLVLVNYFRDLPNLPAACKDNSAQLLDMVTACHDKSGDRWPNFIAVDFYKRSDRGGAAEATDKANGGLVCGCGSISACNANGTCTPRHGRTPRGIFNASSDAAAWRPPPPVLQWQRLILLPSLLALLLGL

SEQ ID NO: 62729 - protein, 621 aa, Zea Mays
MELSPLPMLAASRFLSLSPLLAPTCPQRTAPSVRVATQTLEAPEAPKPPRPSPRRSAVAEVKGALDPIAALNRFEEVLQTQDCNIILRHCGDIRRWDDLSKVFEWMQEREMTNAASYSSYFKYLGLSRDPARVLRVYGAIKDRTLRVHVSVCNSVLGCLVKNGRLDSSFKLYDEMIREGLSPDPFTYSTLLAGCMKLKQGYTKAMGLINEMKSRGLQMDIVIYGTLLAICASHNYCEEAEVYFQKMKDEGHSPNLFHYSSLLNAYSENSDYGKAELLMKDLRSSGLTPNKVMLTTLLKVYSKGGLFEKAKGLLTELEASGFAQDEMPYCILIDGLVKGGKIQEANILFNEMKEKGVKSDGYAFSIMISALHRGGHHQESKQLAKEFESENASYDLVMLNTSLRTYCSTNDMESVMRMLKKMDESNISPDNITFNTLIRYFCNAKELCSHVMVQLGKAGFPSEAFSVYNMLRYSKRTVHKSLHEKVLGILVPAELLKAAYIVVKDNADLISPSSLEKFAKSFMVSGNINLINDVMKALNRSGWRISQDIFGRAIKRYIQKPDKKQLLLCLLDWMIGQGYSVDSSSRNLLLKNAQLFGEKQVIAEILSKQQIASRTIGLRHKK

SEQ ID NO: 62730 - protein, 206 aa, Zea Mays
MPEMFWSIIWFTASYAVIPFLLGTMFFYQTEVLRLDSSVIGLSKVFGQVALLAWSMSYNKYFKTMSARKLLSVLQFVTALVMLSDVLFVQGVYRKVGIPDSIYTIVFSGLLEGLMFFKVLPFSVHVAKLCPAGCEGSVMAFVMSALALATIVSGYLGVALAAFMGVSGDDFSALPACLLIEAACTMLPLCCSSLIKERREKEKKQE

SEQ ID NO: 62731 - protein, 1236 aa, Zea Mays
MPRSSRHRSHRSHRRGGSADRSESDGEESAPVAGAREEAAAARVSRDPEPERRRSSSGQEAVRSGNGYAEHGKKRKERVEEAVVDVVSDRWNSGVCDDHLVDKRSKSETFGHAEVEKLADRSRGSGDESKRSSRRAVAVDDRAEEVLSKSDSGKRRSEKQKDVGRKESTGHYKDNRDRENERERGEEWERQKERDRGRSRDREREKERAREKEREREREREKDRDRERDREHERERDRQKEREWDKKDHDSKHERYEDGGSRKSGLKMSRTEQEAYSYRRDTDVNEISAKEKYNNPDMQAEKHSRRKDDSEDTDKWSTDNRDSDDRKTLSRYEHGKSRSSKEQRFDDDKYKEKYKDDYVRDKRQHDDKFSNERVARSHESDRAEYKSAKDGRRSSESHYRKDAVQDVDHYEDYNNRYKESRGKKRPPEENDDQYDLKPPSTRDQRVHLEKSSGSGRLDSLTERARPDRSSSPSKIHSRSSPSPSSYHDKDQSRHGSKVVDHGKREIPYDERNNRPRASSGRERTPASRLRDRDAENWSSERLKQKDDYQPRDVTLEISTSHYDRTPSKDKHTSPKQLSEKSPSSGDHRFSGRLSGGRSLDNKGERKSLTKYRDRDGDIAQERSHHQDRMPAKVPFREPTPSNSSISRGGHFLGSSPNNPLPPARNGDPSFQGPHDDDRRPQNGDRRFHGHQKRNDMNSVRGHGHGWNSQPNWPSPVSNGFVPIQHGGAPGFHPPVHQFPGPPMFNLRPQMKLNQPGVSYPMHDAVDRFSTHMRPFGWPNHLDESCPPHMQVWNGGSGVFPGEPYIYGRQEWDQNRPHAGSRGWELTGDVSKGPNDVPDAELLVAKKDPDSAITAVSDSGGQHNLQPEADQKEIGRLTAENFEAKNHTKSSKSLEAPQGAQLVTSMLSKNSVVFCKNYLSRISVSHDLVEPELYKRCISLLGDLDVTKTSHLVRNEIQDNGNIGKMSTKYGNLNPFSSRYLKSDNTIFERALALHKNQTQKGLTTASASVKMEEKMAVPEDDHDMELLEPVVSNPAPQRHTDVMEEGSVSKHELGDGIGRTIAATIGSGVLDAPPEISLPQPEVVVATTVITQPNKHMEDVLPPAIEDGALQATLEHAVGIPEVTPADVLLDVAPSAVGESGDDMEIIPSAMAEPQLGKEPAPVASPDSQEKPFMLDSETGMEVEVKVIDDNPGDGRVSSILGTKLDFAAIDGDSEALLVESRVNLSRIPNSPESTH

SEQ ID NO: 62732 - protein, 593 aa, Zea Mays
MVAMTEPRDPPTGCALFGIYNGMFRRRRSASMTSLHRINGAEAEAEAAAPPNQKPAAHRDSSLARRPSAMPVPAAAQNGRSRPAAKAAPAAEPAAEYSGMAAELDRMILDHQRVKGTAQLVRATSGNMMLHRNLGNLNAGGRAANERKAPHGYASSGMGNIVREPRPAPAAGGQLCRALSHRTDPEKLKEMGNEEYRQGHYAEAVALYDQAIIMDASRPAYWSNKAAALAALGRLIEAVADCKEAVRIDPSYDRAHHRLAGLYLRYRVHLADFQIRERHSLQISAIHCLAPPSCHCSSNSASTLRHQLCGEPDKAIYHMKQSSNESAGADVSRAQSVKSRIARSNDARRLKNWITVLQEAQAAVADGADCAPQVMALQAEALLRLQRHDEADSLLSGAGAPRFGVDESTKFFGTFGHAYFLIVRAQVDMAAGRFEDAVATAQTAFQLDPSNREVSVVQRRAKAAAAARLRGNDLFKAAKFAEACAAYGEGLDREPGNAVLLCNRAACHAKLGRHEKAVEDCSAALDVRPSYSKARLRRADCNVKLERWEASLRDYQVLVQELPENEDVKKALSEVEAKLKGQRHGAAAARSQH

SEQ ID NO: 62733 - protein, 401 aa, Zea Mays
MNDGPPRQHIPVEDVNSESTPASILPSNIFRTSGLRVCAGCRSPIGRGRFLSCMDSVWHPECFRCYACDRPISEYEFAVHENHAYHRPCYKERFHPKCDVCSSFIPTDKNGLIEYRAHPFWMQKYCPSHENDGTPRCCSCERMEPKDSQYITLDDGRRLCLECLHTAIMETNECQPLYIDIQEFYEGMNMKVEQQVPLLLVERQALNEAMEAEKSVHHLPETRGLCLSEEQIVRTILKGPIGPGNRIIDMVTGPYKLIRRCEVTAILILYGLPRLLTGSILAHEMMHAYLRLKGYRTLSPEVEEGICQVLAHLWLESEITSGSGSMSTTSDASSSSSTSSSSKKGAKTEFEKRLGEFFKYQIETDSSVAYGDGFRAGMRAIERYGLRSTLDHIKMTGSFPC

SEQ ID NO: 62734 - protein, 338 aa, Zea Mays
MRIFSKALEGSVLRYLNISDNALGEKGVRAFSELLKSQESLEELYVMNDGISEEAAKALSELIPATEKLKVLHFHNNMTGDEGAMYIAEMVKRSPNVESFRCSATRIGSDGGVALSEALGTCTRLKKLDLRDNLFGVDAGLALSKTLPKLPDLVELYLSDLNLENKGTIAIAKALEQSAPQLEVLEIAGNEINAKAAPDLAKCLAAMQSLKKLTLAENELKDDGAVIIAKSLEDGHIDLKELDVSVNMLQRVGARCFARAVANKPAFELLNINGNFISGEGIDEVEEILKAGKKPLKVLGPLDENEPDGEPDDDDEEVEDNEDELNSKLQSVKVEQDD

SEQ ID NO: 62735 - protein, 1165 aa, Zea Mays
MRLRNTDRAPRSSGRRNNVLSWISEVKDTSNVGVRKKRGRRAPPSAKRLRDKRVDKAIESDGAVDSDSDDTDGQVDKNQPSAHIEEHVDGRTGDDLATAGHSGNSSNGPSSASEEQDHSTNSKDKLQKASSQNTKKVFGNSTNGKQGASNLEQECANEDGSHVLVAAVYKDIDNERSSQKIRDDQVSDAQLDTASSDDKSSEEVEDVKVCDICGDVGEEEKLAVCSRCNDGAEHTYCMRVMMEEVPDSEWLCEDCQTAVESENENRLQKSQVKAGTSKELSLEGEINKPAIAAKGRSSSDCELKAGNIENKESNTTNERNGTVKTRTEEDAVTTSSTRDIFSETGGLYMGADSRKRMEPSHETFVSDADKGKQPSHQVSTSLVVNALKNQAPQSRGQLSKSTSFNNSKVPKVKQLLNEVPQKPKFLKESWSSIINKKEGPISMTTKSATFKKPKPCEPTNKAKSSVLSPVEEPRVPNQLASHNVTNGQCSILGPPSATSSMVAPVLRTDSTTQLLSTRNNTVDSNNLGSVHLQGNSELKKPRLAKVPGSMMLSNAERSAGGILGSGAHREVIQNSDPSHRDAKIKDQTGFRQGASSSNRTIRCQRCNEYGHSTHFCEVEKLRLSSGKPLSERNLKDASAKRNKTSEVSTLASSEKTPSREPEHVVKCAINQNLINGPNDGIPAPFSHVKKHSLSPRANVSIPGSGVDCSKPKFKNNDPSLSGTAGIFVHNGRIMPNDHRDEPAQGFSAGDEPTSSTVPELGWIWQGGFELQRTGSSPELCDGFQAHLSCSASQLVLDAVKKFPSKVQLEEVPRKNSWPTQFQKNGPTYDNIGLFFFARDVQSYENHYSKLVENMLKNDLVLRGSVGTVELLIFPSNILSKNFQRWNMLYFLWGLFRVSKKDSSNLPSYLSTSRVERNFNDDLQAMDWMPSTHSFSQNRSDLAEPDPDLLKSTNFEPSLEASREVCLDGENSLNQLVRRRALDDHLDSDAKACSTISNGAMGSSAMSMQRKHQKPDYPEHQDKKRDTFGGNVSERDFDVNTVPVTCSVSLTHLQEEPGKLSTAIDLMDIDHGVSAGALDRSHASGGAGKRSFETAEVAAEVPEHKKTKLDNNVVPISSGPRENACTNDGNSDKLMPGSSSSDGKRVFPLDLNAVGDEDIVNIPAFR

SEQ ID NO: 62736 - protein, 134 aa, Zea Mays
MPASLLFLAGFGISRHKEYPRLRFAPSSSSSHTSPTNCSISCVVHRHHYSGLEDGNTGHHHGERAVLPLQSQHHQDPGKPQRRRRFNLHSSLCNRIRPSFVMCARHGRAVKRCQFRGVLLLRSPVSTSVRNMWN

SEQ ID NO: 62737 - protein, 177 aa, Zea Mays
MCAPSSKRLKPCLPQVNPEIVLPNGSVSSDFAGSARFHKVLQGQELLGFKTHDGPAISASQATEARNLQYSDERSNNNLGIPRLGVRSPTGIPGFPYHCSGFGESQRFQKVLQGQEVFHPFRGGCLADGHIRTAGMYQPDGRHVSGAAYKWSAPQGRSNRRMYWNCEYALPRQWCRA

SEQ ID NO: 62738 - protein, 343 aa, Zea Mays
MEEVEVANMAAVESCHRVLALLSQQQDPALLKSVASETAEACAKFRKVAALLGSASGGGGCGHARGRFSRRVRPLGLVNQKSPLGIATGSGNPLEMMPSTAAAAGSPSPPQSTSYAQMRARLSSAPESSRGLDLACSSSRCSPHPFGAPKLVQPLSVQFQIGSVAHRYPFHQQQSRQKLQAEMFRRSNSGISLKFDSPSPSGGAAGTMSSARSFMSSLSIDRSMASLDGKRPFHLVGTPVASDPADAHRAPKRRCTGRGEDGRGKCATTGRCHCSKRRKLRIKRSIRVPAISNKIADIPPDEYSWRKYGQKPIKGSPHPRYEPNKKYSTNMKNVYQILCSHND

SEQ ID NO: 62739 - protein, 53 aa, Zea Mays
MNISDRCKCLLIVSPFENISVHTNVKCLLVAQLRIECLLDSAGPRPQGGSAPR

SEQ ID NO: 62740 - protein, 92 aa, Zea Mays
MMAIFFSLTAPIGIALGIGISSSYNGHSTTAFIVEGVFNSASAGILIYMSLVDLLATDFNKPKLQTNTKLQLMTYLALFLGAGMMSMLAIWA

SEQ ID NO: 62741 - protein, 349 aa, Zea Mays
MNVNKVKLYDADPRVLTAFANTGVEFIIAVGNENLQTMAGSPAAARQWVAANVRPYIPATRITCVTVGNEVFSGNDTATMASLLPAMKAVHAALADLGLGGQATVSSAHSVNVLAASFPPSSGAFREDLAEYMKPILDFHAQTGSPFLINAYPFFAYKASPGSVSLPYVLFEPNPGVRDPSTGLSYDNMLYAQIDAVYAAMKAMGHTDVGVRISETGWPSRGDEDETGATVQNAAAYNGNLMQRVAMSQGTPLKPNVPVDVYVFALFNENMKPGPTSERNYGLFYPNGSPVYALSAGSGGGSGPGGSLNPYYTSMFSSSSRSAVSATFLTERVMLLLLLQATVILRHYC

SEQ ID NO: 62742 - protein, 562 aa, Zea Mays
MDRSRSKRGYHYDQDSPPPRSKQRFDRRSGGGQNANSSYHRRGPLGGGGSDRRGFLPPAPAPPPPPPPPPLPPSSATAGGGAGPTTTTTSFRILCPECKAYGFPPGFVAKVRDDSGALVTVHPPFAGDYVRVIETVDGARREADGRPPMFSPAQEALLMVHRRILETDADDGDEDGEYGPRGKDSRDRGKTTTRLIVPKMHVGCLLGKGGKIIEQMRMETKTHIRILPRDQHTPRCVSLSEEVVQVVGDGNCVKKAVAIITDRLKESLHRDRGPFRGRMNSPEPRISQEDDYLGVSQMPAYEESLGRSDQIRNNTSMEPPGYEFDSNDGKVIEHPDILYDDIIFRILCPNDKVDNLVATNDGILEMLQADVGVDVRLSDIIAGSDERVVIITSREGPDHELFPAQEAVLHIQTHIVDLGPDKDNIITTRLLVPSSEIACFDGREGSLSDIQRQTSANVQILPKEDLPLCALESDELIQIVGEISAARNALIQVTTKLRSFLYREMSGPIQVGNINVHGAISPVAGSPGGPNLGNDMPMSAYHQASQLATSWHSKFGVPLQGI

SEQ ID NO: 62743 - protein, 151 aa, Zea Mays
MRPYCSLQCSIAQGDISFEPHETVVSMEYLLGLVLALLGGSVKMQDYSDERKSQILDVVKSLAGGFDMDVIFTRTDGFTMTQEWLLLDCLDLNLRHGWIAARDLLTGPEVSFESLTLASNEPGFPHAWFRCKKTLLRMFRAFCSGTSITIL

SEQ ID NO: 62744 - protein, 669 aa, Zea Mays
MQKLMDKSGQHGHLLLSFTIKHIDHKSIAKNSVKQINIVKVASHLARHAKLKASVTIASAISDLIKHLRKCMHFAIEASNANADCDKWYSALYVALEECLVQLTEKVGDVGPILDMVGVMLENLSHTATIARTTISSVYRTSQIAASVYKSSYHQKAFPEALFHQLLLAMLHSDNKTRIGSHRVLSTIVAPSMACPWSDISFPIPMKGDDSHNLHLLVLSAFSSEAIINETRTKNKIQESLQENNKSEAIVDPENGYTQTEPDKRKYSGGPCLNEHYRTAFNDENLKFMKLNDHQIVLLLSSIWSQASLDDNLPANFEAMGLVYSIALLCSKPKSSSHVTRIRCFQLAFSLRRNSLSPESDLKPSRRRCLYTMASAMLIFSAKIADLHQIIPLVKAAAPEKMVDPHLRLMDDCQLVNTSAESSNSEMVYGSEEDESDALAFLSAINKPDTELIETVMCHFREKFENLPEVNGIEEQLLQEFSLDDSFPLGAPLFMEMPHSCSMYAEKDEECFDEDTVPSELDDDDIIFEHSGSQSDRKTSGSMASSDVLTVNQLIESVHETARQVANVPVPANPVPYDQMKSQCEALVMEKQQKMSVLLSLKHSRTDSHGSAGVDGLETNESSLLSEPELQSTRKGRMRRCDSASSESDCSFRLPPASPYDKFLKAAGR

SEQ ID NO: 62745 - protein, 251 aa, Zea Mays
MTGVNIFIYDRPAKRLRAFRDNASSYWEMIPLFPETWLSKHKEKVPAVIATRQLKVTAESKMGSMLLQLLEVVPHRPHLGLAQLLSAAGIHLDSKMHGPGITFCTYIIHGMHQWWLQRYQLGLCRVTCLSVLLLCSVTVTEARELNGLEVALTPSGCVLDVVHHPTGRSRLGHGCWSLWRGRKAVQREKEEAAARRDRRRQTLLSPACSSRAPTTGYCIPSMGRSPNLEVNLLSANSSIICYCIAFSLLHF

SEQ ID NO: 62746 - protein, 276 aa, Zea Mays
MAGRRWSDGLHQAIEAKEGVPIQNETITLASISYQNFFLQDDSDVVFRATNGKWRAVLVEISRMNKVGRPVLVGTTSVEQSESLSKQLREAGIPHEVLNAKPENVEREAEIVAQSGRLGAVTIATNMAGRGTDIILGGNAEFMARLKLREILMPRVVNPIDGVIVSKKQMPPRKTWKTNESLFPCELSKETLSSVKDTVEMAVKEWGDKSLTELEAEERLSYSCEKGPTRDEVIANLRNAFVKIADEYKVYTEEEKQKVIWHYKRNIDSSICCCSV

SEQ ID NO: 62747 - protein, 193 aa, Zea Mays
MAGYPPPGSGYPYGPGGGYGAPPPPYGSSPAPSAPPYGEKPPKEGKTSTSSAPPYYGAPPPSYGAPPPSQPYGGGGGGGGGYGYGASQPPPYGGAPQQQPPYGGGAPAGFGSPFASLVPSAFPPGTDPNVVACFQAADRDGSGMIDDKELQSALSGYNQSFSLRTVHLLMYLFTNTNVRKIGECARRRRPTSP

SEQ ID NO: 62748 - protein, 107 aa, Zea Mays
MYESIIRMEMFFGSFLSESVSPQNLFGHLDVERCPFLRNINGATTFSLSSALPVAAQGGKGPIFEEGSGFESAFKLFHGRDGIVPLSERSYVSDENHNESIDVKLYT

SEQ ID NO: 62749 - protein, 73 aa, Zea Mays
MKRLGPGAYTYSSSFFFRVTFTFIHQIQLFFQWLVLTRAVARQILSAANCQFSCSCKRETIQKPEHVCSLLVM

SEQ ID NO: 62750 - protein, 77 aa, Zea Mays
MFTKRPDIIFKWLGPHGSDCGIVNVNIPTNGAEIGGAFGGEKAAGGGREAGSDSWKQYMRRATWREVLEAVSHLFTP

SEQ ID NO: 62751 - protein, 505 aa, Zea Mays
MYMPFGFLLLQNLARTDDNSWKERETAVLCLGAIAEGCIGGLYPHLPQIVAFLIPLLDDKFPLIRSITCWTLSRYSKFIVQSLDHPNGREQFDKILMGLLRRILDTNKRVQEAACSAFATLEEEASEELVPHLEVILQHLMCAYGKYQRRNLRILYDALGTLADAVGAELNQAKYLDIFMPPLITKWQQLSNSDKDLFPLLECFTSIAQALGPGFAQFAEPVFQRCINLIQSQQLAKIDPTAAGAVYDREFIVCSLDLLSGLAEGLGAGIESLVAQSSLRDLLLQCCMDEAADVRQSALALLGDLSRVCPIHLHPRLQEFLTVAAKQLNPQSVKDAVSVANNACWAIGELAIKIGKEIAPVVITVVSCLITILKSPEGLNKSLVENSAITLGRLSWVCPDIVAPHMEHFMQAWCSALCTDDFEKEDAFHGLCAMVAANPTGAAGSLAYICQACASWTEIKSEGLHNEVCQILNGYKQLLGNNGGWEQCMAALKPDVVQKLARYGV

SEQ ID NO: 62752 - protein, 344 aa, Zea Mays
MGFIGAHGVETLKRYRYSGEDRSVVAKYVLQPFWSRCVTLFPLWMPTWLCFPTFQITLTGFSFLVLSALLGYICSPHLDTAPPRWVHLAHGLLLFLYQFEALALGSTLMCGGWTLCFWVVAAVPFYLATWEHFFTNTLILPTINGPTEGLMLIYVSHLFTFFTGAEWWAQDFRKSLPFFGWIPLPFLSEIEIPLYVLVLILMIVCAVIPTVRSNVSNVQEVVEARKGSMALALAMILPFIVLLAGVAIWCYLSPSSIMRNQPHLLVIGTGFNFGYLVGRMILAHLCDEPKGLKSGMFMSLVFLCFPIANALIAKINDGSPLVDELVLLLLYCAYTVCYVSVFWD

SEQ ID NO: 62753 - protein, 427 aa, Zea Mays
MIAVRWAALLVALVVACGSAAAGAAAGEGPNWLGGLSRAAFPKDFVFGTATSAYQVEGAASTNGRGPSTWDAFVHTPGNIVYNQTADVAVDQYHRYREDVDLMKSLNFDAYRFSISWSRIFPDGEGRVNPEGVAYYNNLINYLLRKGITPYANLYHSDLPLALQNKKLFTDYADFCFKTFGDRVKHWFTFNEPRIVALLGYDAGSIPPQRCTKCSAGGNSATEPYIVAHNFLLSHAAAVSRYRNKYQAAQKGKVGIVLDFNWYEALTNSTEDQAAAQRARDFHVGWFADPLINGHYPQIMQDIVKERLPKFTPEQAKLVKGSADYIGINQYTASYVKGQKLLQQKPTSYSADWQVQYVLERNGKPIGPQANSKWLYIVPEGMYGCVNYLKHKYGNPTVFITENARKLDSWPVPARHHKGAILQRLPR

SEQ ID NO: 62754 - protein, 824 aa, Zea Mays
MHPFCCAPLVPVSPVASAAAASSAVAGAPAVMPPPQPPPPPPPPPRSNPASGGERRARAAGVSGGGGGGSSPPEGVKLNEIVGGGISGILYKWVNYGRGWRPRWFALHDGVLSYYKIHGPDRIILSRETERGAKVIGDDSLRRLNRPSTSSSSHSNGHHHPRNPIGEIHLKVSTVRESRSDDRRFSIFSGTKTLHLRAETREDRAAWLEALRATKDMFPRMSSSEMVGPGDTAAAVAVSTERLRQRLQQEGVSEAAIADSEMIVRAEFEALHKQLVLSKQKHALLLETLRQLETEKVDLENTLVDESQRQSKEYGSASKPRHEKYSEGSASESDDYNEPQDPAEETDDDENLYFDTRDFLSSSSFKSSGSDFQRSEAGSDDEDDYPMDGIDPSMKSIGISYPYVRRRKKLPDPVEKEKGVSLWSMIKDNIGKDLTKVCLPVYFNEPLSSLQKCFEDLEYSYLIDRASEWGKRGNSLMRILSVAAFAVSGYASTDGRSCKPFNPLLGETYEADYPDKGLRFFSEKVSHHPMVVACHCEGTGWRFWADSNLKSKFWGRSIQLDPVGELTLEFDDGEVFQWSKVTTSIYNLILGKLYCDHYGTMRIQGNREYSCKLKFKEQSIIDRNPHQMSLRRMSLPLLVDHQSLAVWRYGGKEVQGVVQDRNGRTVATLFGKWDESMHYVMGDCFGKGKGTEQLSEAHLLWKRSKPPKFPTRYNLTQFAITLNELTPGLKEKLPPTDSRLRPDQRCLENGEYERANAEKLRLEQRQRQARKMQESGWKPRWFAKDKATDTYRYVGGYWESREKSSWEGCPDIFGQVPNDLMVTD

SEQ ID NO: 62755 - protein, 528 aa, Zea Mays
MGYGYVDPFPPPQQPQQAAYVAPQQGDYGQPQPQPAPRPPACPYSSSASAPPGSASYHFSPPAPSPPPSHSNSSHAASGSGKNIEISREAATTIVALAGLAMLSFIGATIWFVKKKRRRIEPPATLPTQQPAPPPPPNYIPSSAGSSLASDGFYLRSPGYPFMRYSTGSHGFPYSPADSGIGYSHMLFTPENLAAITDDFAEDNLLGEGGFGCVFKGILPDGRPVAVKKLKIGNGQGEREFKAEVDTISRVHHRHLVSLVGYCIAEGQRMLVYDFVPNNTLYYHLHVSETSLDWRTRVKIAAGAARGIGYLHEDCHPRIIHRDIKSSNILLDNNFEAQVSDFGLARLAADSNTHVTTRVMGTFGYLAPEYALSGKLTAKSDVYSFGVVLLELITGRKPVDASQPLGDESLVEWARSVLTKAIEHREFGDLPDPRMENRFDENEMFHMIVAAAACIRHSAAMRPRMGQVVRALDSLADSNLNNGLQPGRCEVFLEPQSEEIRLFRLREFGSPDGSEELSQASWRSRRDL

SEQ ID NO: 62756 - protein, 448 aa, Zea Mays
MNDQELRNMISMTLTCRIDKSENCGDKMEQFLKRCFYQSGQYNSEEGFAELDRKLKEKEAGRLPNRLFYLSIPPNIFVDVVRSASRTASSSSGWTRFIVEKPFGRDSESSGELTRSLKKYLVEEQIFRIDHYLGKELVENLSVLRFSNLVFEPLWSRNYIRNVQLIFSEDFGTEGRGGYFDNYGIIRDIMQNHLLQILALFAMETPVSLDAEDIRNEKVKVLRSMRQLKLEDVVVGQYKGHSKGGKSYPGYADDPTVPKGSVTPTFAAAALFIDNARWDGVPFLMKAGKALHTRRAEIRVQFRRVPGNLYRRNIGADLDKATNELVLRVQPDEAIYLKVNNKVPGLGMRLDRSNLNLLYSERYRREIPDAYERLLLDAMEGERRLFIRSDELDAAWAIFTPALRELEDRKVAPELYPYGSRGPVGAHYLAANYNVRWGDITSDDDGAF

SEQ ID NO: 62757 - protein, 653 aa, Zea Mays
MVFQKWSSSSEMESCGGGQVPEMPRVPKSARGKRSVRKKEAQSPAQMSAIDLLATVAGKLFDEGAGSLGNTSAGAPALAAFAKDALVKQEQCDEQMKLFKHEATDQDSCNESAILPHIVLQRVVNNARNEDPKAKSEVQDKESSMISYTKAELGCNFGVIADRWSPESVESGAFTGDAVARLMMTAPAGFHKNAPEMYSLLDSMDVDVKPPPLVSSDSTGEMPLHGDKIHRSTSLPRAPKGVGFFAVDRDDDDDKSSGCTHPSTATNKDFTSNCKAEYNRVRKLLTSKHRKVAPARIHKSDLSYSDVERKPSFRYKKMHTRQRTQRSTFKRRKLFDRHLALASEFGTANGKGNTKVAGRNSNAVSLEANKGTNSMPFQKSCGSNDCHVKLRIKSFNVPELLVEIPDSATVGSLKKTVLEAVTAILGGGLRVGVLHHGKKVRDDSKTLIQAGIGQDDMLDNLGFSLEPNCTQNPQVQAPEDVSFLENIDTTEPLARITPADSSSKLGEVDVSQELALTPLAMNYQGSDHDSVHSPGAVSSRDKDSRALFLVPAADPNAGAVVPANKTKRSPEQGHRRIRRPFSVAEVEALVLAVEKLGTGRWRDVKLRAFDNAKHRTYVDLKKFKVLLDQARLRLPVFGFSCEEVAASFLYSRS

SEQ ID NO: 62758 - protein, 428 aa, Zea Mays
MSASRSGRRRTGSVALGDLLQREASAERAALGCGERPSVAAGQACRAKKGEDFALLKPACERRPGAPSTSFSAFALFDGHNGSAAAVYAKEHLLGNVLSCVPTDLAWDDWLAALPRALVAGFVKTDKDFQTKAHSSGTTVTLAIIDGSVVTVASVGDSRCVLEAEGSIYYLSADHRFDANEEEVGRVTECGGEVGRLNVVGGAEIGPLRCWPGGLCLSRSIGDQDLSNAGGRLIISSDGVWDALTAEMAFKCARGLPPEAAAEQIVKEAVEAKGLRDDTTCIVIDIISPEKPKRTIQSQRTPGKGLVLLKNFFLRKTTSDSLSLPDKDNYPEPDLEEVFEDGCPSLSRRLNSEYPVRDMFKLFACAICQIDLESGQGISIHEGLSRPGKLRPWDGPFLCHSCQEKKEAMEGKRHSRDSSSRNSGSSES

SEQ ID NO: 62759 - protein, 741 aa, Zea Mays
MGGVGAASLALLPLPLLLLLLVRAEASALHGTILPNPAPSPSSPPEARSFGPRISPSYPPRALSPGSPDIDVRSHSHKPPHHRESNQGPSPSSAEGCSSYICTEPLTATPIGSPCGCVEPISVIVDLDLAPYLLFMSIAELEVEVAAGTFLKQSQVKIMAAVASIQDDQKTRVTIYLVPLREEFDTYTASLISDRFRDKKVQINSSIFGDYKVINVSYHGLQSPPSSVPGGSDPSGTEDPITAEVPDQMKKHKKSDILIVVVALGSSLGLLLTCAVVLILLVRWKKLGRLHEDMNPATTPTVNRRYGARSTLSTGMVSSASASAFSTVATCTTSVKTFSLGQLQKATDGFDSRRVLGQGGFGCVYHGTIEDGNEIAVKLLTREDRSGDREFIAEVEMLSRLHHRNLVKLIGICVDRSKRCLVYELIRNGSVESHLHGADKAKGKLNWDVRMKIALGAARGLAYLHEDSNPHVIHRDFKASNILLEEDFTPKVTDFGLAREASNATQPISTRVMGTFGYVAPEYAMTGHLLVKSDVYSYGVVLLELLSGRKPVSISESKDPENLVTWARPLLSHKEGLEKLIDPSLEGNFNFDNVAKVASIASMCVHADPSQRPFMGEAVQALKLIYSDPDEACDDSYSPRNSSDQDGGYDGDLVFGSGSWGFGASGSGCLDYRNSLPFVTMDYSSGRIEGPRDPRAALSAGSHAQPPVLQNRSGPLRVKKKLAASYRSRGSVSEHGHLPRH

SEQ ID NO: 62760 - protein, 132 aa, Zea Mays
MGAPKQRWTSEEEAALRAGIARHGVGKWRTILKDPEFSSTLCYRSNVDLKDKWRNMNVIVSTSSSRDKAKSALKRIRTIPKNNEHTMAITRVTSDIDDEIVDEKPIVSLPSEAKNTSSSKKSHSCHLSIELK

SEQ ID NO: 62761 - protein, 377 aa, Zea Mays
MLAFSTLLSSGSGHQCTTAGGQTCAPSTIKDNIGWGLGFGIPCAVMAAALAVFLLGTRRYRYYVTAGERGLFARAGEAFVEWRSRRKALQHGDRPVAEGAPGFSAGVDEEEQAAVSHDAGLVKETKDILRLFPIWATCLLYAVAFSQSSTFFTKQAATLDRRVGRHLQVPPAALQSFISITIVVFIPLYDRVLVPVARRYSGNPSGITMLQRIGTGMFLSLLSMVIAALVEKHRLRVAVDAGLVDKPMVPLPMSLWWMVPQYVLFGAADVYTMVGLQEFFYDQVPDKLRSLGLALYLSIFGVGSFISSTLVSIIDSVTTARGGSWFSNNLNRGHVDYFYWLLAALSALELLAYVFFAVTYKYKNKATVHATVVGQSL

SEQ ID NO: 62762 - protein, 252 aa, Zea Mays
MRGFERKGVRQYNRSEVPRMRWTEELHRQFVEAVECLGGQDEATPKRILQLMGAKGVSISHIKSHLQMYRASISSSSSTHHQPSLQKSTSTAASNNKRVFFTREDCASQEGNAPASDKNIYTTTVRGCGQYSSPYQIPSLQQVFRCWEQKRGRVAWNSDVLTTEKGVIIRPSHTRKHETQQHTGCDLTLSIGLWEDASSSDDADGSSSISEELLPAPAAGGARRVAAVVKEEEESKPAALNLDLTISSSWLA

SEQ ID NO: 62763 - protein, 93 aa, Zea Mays
MAGRYHQDQGGDGGASMEVVSTPNQELALTNCAYVSPADLRRFPNGLALVADAWVFTLRDHNAVASGRIALNAIQRRQAKVSAGDSVTVSRSY

SEQ ID NO: 62764 - protein, 176 aa, Zea Mays
MFLRRPSKHPIHSLSLLCSPRTTGHHHKPDATHARKIIRRSQGGGKPETRHATREGEEQRQRGRGDTARTERDAAAEEGQRRAPPRVPATMDTFFLSHGSPTLSIDDNIPARHFFKSWVPAKVAGDQPPRAILVVSGHWDTATPEVNVIRGSNDTIYDFYGFPKPMYKKRSDAEHW

SEQ ID NO: 62765 - protein, 618 aa, Zea Mays
MFGIFFEEINHAGAGGLWAELVSNRGFEAGGSNTPSNIDPWLIIGDESNIIVATDRSSCFASNPIALRMEVLCGASETNACPSGGVGIYNPGYWGMNIERTNVYRVTIYIRSSESVELMVSLTSSDGLQNLASHTIMGDKEDFVEWTKVEFDLQSNYINTNSRLQLTTTKSGIIWFDQVSLMPSDTYMGHGFRKDLASMLANLKPRFLKFPGGNYVMGNYLINAFRWSETVGPWEERPGHFNDAWAYWTDDGLGFFEFLQLAEDLGACPVWVVNDGASIYEGVPSATIAAFVKDVVNGIEFARGDPETAWGSVRAAMGHPEPFQLYYVSIGNQECSKYYYKDNYVKFYSAIKASYPDIKIISSCDRSAISSDNPADLYDVHVYTSSGDMFSKSRMFDNTARTGPKAIVSEYAVTGNDAGRGTLIAALAEAAFLIGLERNSDVVEMASCAPLFVNDNDQRWNPDAIVFNSWQHYGCPNYWMLHFFKDSSSATLHPSTIQLPNYDQLVTSAITWNNPHDGNTYMKIKVVNFGSKAVSLNISVTGLETDIQTFGSIKTVLTSGWLRDENSFQQPDKVVPAASPITNAGKQMGVILNSYSLTSFDLLLDSESQVRASIQAYD

SEQ ID NO: 62766 - protein, 420 aa, Zea Mays
MLHRSNSRNQRNRGSRIKTLLQATLLIGVIFWLLYQGRKEKAGSYSDSNIQMVDDNSDVTTKPEERDADHHSDTFNYNEKTGETVFDKDSTNLNEDDKRNTERSEAEGQVNSADGNTEVNNNNNEDETTGHAEEGKHDTESNSAAESKSEVNSTGDDMSRNNYAQEENTGEASGTSHEVVQGEQSTSASGSGNGSDGDGEKNEAVDIKSGSESLPDDAKAEATDDRATVSLPDETGNIPSVHTDNSQNDASENQGDATYTTSDSSEHGIVEAVHIETGLEDESATASSGTGSGDDNGNSSDSASAEENTETVSGDDEKGMGTGTTTEASYSIQQNSENSSVSAEAENSQGDSSSGVNGSSEETSNKGDGATETYNKGEQVDPKIETSTSTNAEHNESQGADGSSGSNGNGPEQTGKSESQ

SEQ ID NO: 62767 - protein, 56 aa, Zea Mays
MGPIASGESCGIPWEALRVLGVSPGENGDRNPSTTSSCEFNRDSYDGGVNTPQDPR

SEQ ID NO: 62768 - protein, 252 aa, Zea Mays
MDPKVGVALTLSLVGGLSTSLGALLAILNHAPNNRTLGILQGFATGLMLSMSFFDLAYDAVNAIGFLRGNLWFFAGALLFSTIADVFPEPDCSAADENGKQQGGKELMMRHRRRVIFSVIVTAIVAGVSLQNFPVGTAAFLGTTKGFRVGLNLALAIALHYIPEGISVALPAYFATSSKWQAFKLATLSGFAEPLGVIIVAYLFPSNLNPEILEGLLGLGRKDAVKAVFVGMAFMSMSLYFLDASLPKEMSA

SEQ ID NO: 62769 - protein, 61 aa, Zea Mays
MTKLNENKICCQLNNCKSIISELSGISSSSKSSAYSLSLFKKKVLEELHDTPTSQLFNLRP

SEQ ID NO: 62770 - protein, 162 aa, Zea Mays
MSSGKRSFFAPKKKATNPFDSDSDDDKPQQRPARASSVPPPDEQRGSSSLFGAGDRGGLFSSAANHHYRNDFRDAGGLEGQSVQELEGYAAYKAEETTRRTRGCVRIAEEMRDTASKTLVTVHQQGQQIHRTHMMAVDIDQDLSRVTIAFSNFFRLRCGISL

SEQ ID NO: 62771 - protein, 339 aa, Zea Mays
MPARIVVTIWRVMKTRKFRRPNAADLSDYGCFVVLALGVASLQMIDISLIYHVIRGQGTIKLYVVYNVLEIFDKLCQSFGEDVLQVLFNSAEGLSACSTDNVTFELMRFILDEAIAVVAFVVHSFVLLAQAITLSTCIIAHNNALLALLVSNNFAEIKSNVFKRVSKENLHNLVYYDIIERFHIMAFLLFVLAQNILEAEGPWFDSFLINASLVFLCEVLIDAIKHSFLAKFNEIKPVAYSEFLEDLCKQILNDKPDDRQKDLTFIPLAPACVVIRVLTPVYATLLPAGPFIWRIFWILLWSVLTYFMLAIFKIIVGLILRCLANWYVNLRLTRKQHVD

SEQ ID NO: 62772 - protein, 76 aa, Zea Mays
MAMSAGRGLLVLFFSAAVVAELASAANGPFLSDSVFQSSAGSTGRSLLQAKNIASCLGGWATRQHGSWCNSSSYLG

SEQ ID NO: 62773 - protein, 112 aa, Zea Mays
MSPTLPPSSRCLGLSSPSPSYRIVLRMRCSVRVPSLSIRRDPQQREGGVPDRPHLQVRQGHRALPLQEEDQSPDVHGVVGEVPEDPEGGTAGVPAVPRAGDQVPGRTELQGS

SEQ ID NO: 62774 - protein, 72 aa, Zea Mays
MGKKGCKMKTHKRFRVTRKDKIMRRCAGKQHLLAKKNTKRKKRLSKMVFFFPPLLCRSNFVQPLILSRRSFQ

SEQ ID NO: 62775 - protein, 2706 aa, Zea Mays
MDHRGGGGGGGNKNRTDLLAAGRKKLQQFRKKKGKRGPGNKADADADAEAGEGAPKAAEESVPEPKSPVGLKLLAGEGGGGSTPFEEAERSQAEQCNGEGPGTAESSSVESSNAVQEQETVQEQETDDVSDAHHVGPSEQGISEHPESQTAGGRDLSLQATSGDSIGDDNVGRAQLGDVDSMELNASSEGNGADGDCNQLGEHQQVEMDAVERPTSSSFEEFTELPIHSQGIEADNIHGEGAQEMVMDVSGRPLDGDIQHDIEPTASAEIDAETALEESTVAASIVIPESTARGTEYERDTGYETDGVDKEALLEDPSMVHVSDEAVTIDDLSVQAKPTASADMPLCEQKGDPALSRSAVLQGIMPLHFEDIQNHMFSATLSRDFLQLQLDEAAGLYSDFTQQSSDNTTQLRVLLKETEESKLAVDRELHQCRHELSKVNIEKGQLELTMASLKEEINTSNTRCTYLESELHSSKESTEQIHSELANSRLLLEALQKENMELTASLAFEKEAKKEVEEQRDHLSSDNRKLLSELSGLELSLASVKEEMDASSSRCNVFECELRSSNENMNHTLTELANCQALLETLQKDNLELSANSASEREAKMKLQEDNLYLCNEKGKLSSNLRELNDKLEVSYAKHKQLESHVKDTETYFGQLTEQLIEENLYTSISIDIYQSTTKDLDTKYNIVLGQFQNIMRQELHLDSSEVTTENAERAIMTPRHDSHGNNQCLLNLVNANDSCNSTALLSLKGHLEVAKSDLHNLEKLLERISSRSDGRVLVSKLIKSFESKGSDDDTGLSEGEHDNLQKSTREMLSCLGEKFIAMSSDITKTEEYLAELCNKIELYVKSTVQHDRDRQCTVVLEAKMDELAGKLSNYKETIDNLHNQVAIVQQDANSNAGKLIDQAELLQKDAVERISILENERMSLSDLLSEVTNKLTSLGDAVFPSGSSEIEGLNFCTLSCVDLVARSFQSLQEKLEAAQIDNAQLNSSLVELRKAIGVAQERSEHADGIVKKLYDSLQELLCDSLGSSNEFGARYSVEEPIESQYGRLIAHLKNLLHDHHSALSTNAELELSLLSKCEEVEELNMRCSSLLKKLDEVCILNEELKSASSSKNVTLDKLHSRCLTVAEMLASCSANHSSTVQLISDIGEGSSKEDHILTTLLPCIEADVASCIEKFENAAEEIRLSKICLQEISIFDQISFEKWSYPLPTLIKEEVLPKICDLQDRFDQLNALNIQLETEVAVLKDGMKELDEDLGTSRSELQKKVSELEQLDQKFSSVKEKLSIAVAKGKGLIVQRDSLKQSLLEKSGEIEKLTQELQLKETLLKELEAKLKSYTEADRIEALESELSYIRNSATALRDSFLLKDSVLQRIEEVLEELDLPEQFHSRDIVEKIELLSKMAIGTPFTLPDGDKGSSVDGHSESGVAMNVIDDEQNSNSNSVSDEVKSKYEELNRRFCELAEQNNMLEQSLVERNSLIQKWEEVLGQISIPPQFRMLEAEDKLAWLGNRFLEVEQERDSLQLKIEHLEDSSEMLIADLEESHKRISELSAEVVAIKAEKDFFSQSLEKLRFEFLGLSEKVVQDEFVRDKLRMDLSELRDKFAEKTEESRHYHEMDTEVHKLLNLVQNTLQDSTNSEISSGGISAVLCLGKMLKKLLDDYGTLLYKSTEGNFAERDIQLEDIKPSKDASKSDTGAYEKEMELNSLNNELDHAHNNLALAQQECDEAVEKAQSLMMEIETLHAQISKLQESDAEQMQKKEMELNSLNNELDHARNNLALVEQERDEAVEKAQSLMMEIETLHAQISKLQESDAEQMQKYQSLVLELESVGKQRDNLQERLNQEEQKCASLREKLNVAVRKGKGLVQHRDSLKQTMEEMNVVIEKLKSERKQHIESLETEKSSLMDRLAENEKSLHETNQYLSGLLNALNRVDVAREFDMDPITKVEKMAKFFLDLQSTVASSQNEVMKSKRATELLLAELNEAHERADNLQEELVKAEAALSESSKQYIVTESARADAVRQLELIMHAQSQTRRRQADHLLELNSTSSQLREVCFELSHCLVNTFSKDVDLICYVVNFMRSSGKLMDDTNTMDIPIASKHVLSNRTNNKAHIPNAPLEIKTDDTDDSQFLHHLAIACHALSDCVKDCNDLKRNIDEHDFSVEQKATELFDVMSTLKNRFTSQHNELESLRAKFVELQSEMEERDKEIIFAQRNMSLLYEACASSVAEIEGISDIYPGKHSYAVEHSADECIKSIVEQLVMAVKTSQNSNEGSTKELKAIVLELQQELQAKDVQISTISSDLSYQLRVAESSAKQFSVDLEDARMELQNLEKQVDVLQNQKKDLETQLNELKNMESMASEQHGRIEKLTDELSRKDQEIEGLVQALDEEEKELEILENKSLQLEQMLQEKEFALKTSEVSRTKALAKLATTVDKFDELHSLSENLLAEVENLQLQLQERDSEISFLRKEVTKSTNELLTTEESNKNYSSQLNGFMKWLERELLQFGFHSESANDYDYTQFPVYMDMLDKKIGSLIAESDDLRVTVQSKDSLLQVERAKIEELMRKSDGLEASLSQKDSQIGLLRRDRASNQQSRSINLPGTSEIEQMNDKVSPAAVVTQIRGARKVINDQVAIDVEMEKDKPFDDEDDDKAHGFKSLTMSRFVPKFTRPVSDRIDGMWVSGDRLLMRQPTLRLGVLIYWIALHALLASFI

SEQ ID NO: 62776 - protein, 801 aa, Zea Mays
MMEVGLNPGEELDFGDNQEDDDDAGDISPASKELAAMVAAAAAAETVELDDGGAGVEAAASAAAAASSSSAAARYGDDRTPRDGMVFKSYEEVLNFYKRYALRTGFGVCVKKSSFTKAGLCRRLVLVCNKWGNGKEDACYQARPTAKTNCQATVVARLLGDDLLHLTDVNLEHNHALNPSAARFLRCYKTLPSGLSKDLVVRAARGECSVAGDIDVPIFDEWGRLKTGQADVLAINAFFTQMQAKLPNSFYVMDFYVEGHLRSVLWADSRSRAAYQYFSDAVWIDTACLRNKYHVPLVSFLGVNHHGQLVLLGCGLLSDESTESFLWLFKSWLTCMKGQPPNAIVTDECVAIKAAVREVFPKTRHRISDWHVVRSISEKIGDLPEYEAMRTNLVTVIYDSLNDNEFEARWKNWIDRFSLQDNEWITFLYENRHLWAPAFLRDTFSAGLCTVSQRESPSTFFEDAVSSETTLVTFLASYMTLLDNKYKMEQQDDFDSLNSSRLLISKYQMEEQLSRLYTLNMFMKFQDELKATMHCQVQLDGSASSFIVIDLTEAGSEMLNKKYEVVHCMATNRMECNCGLFQFHGIVCRHALSVLKWQQVYDIPPCYVLNRWRADFKQLHYLDNPSKDLATSNHVERYDYISLQFLRLVEIGMVSDEKYRHAVRLLKDMKETLLDDNLCRDLEQKLTPAERAIVNGDNHTQPGSSEGGAAKKRRGRPPKKNKEINMDSMDPLLVSSDVTQKDTFHSASTTSNLGTHVRTHGIVDLMEEVNPSELSFDSRYGVQSGHSHHFVWPIYISSRAV

SEQ ID NO: 62777 - protein, 241 aa, Zea Mays
MSKEDVLKTLMLRVNIHCDGCEKKVKKTLHKIDGVYQSSIDAEQGKVTVSGLLDPDTIIRKLNKAGKPAQLWGSKPGIPQNAYHGGGKAHSKEAGGGKAHSKDSGGGKGHSKDAGGGKAQKGGAGGGGHKGPGGGGGGGGGVGNPKMVMPQPTPQQLQQLQQQLQMKGLKLPPHLLGGNMPAFPAAAPMKDPESVKFALPEDDFRRLRPRSSTMTSTTASTTTRTTTTTTAWTTTSTATPR

SEQ ID NO: 62778 - protein, 53 aa, Zea Mays
MAIGSLIASTFARSSHALPAAAASAISQAPRSQHTASPLLSGLGAAARAFRWF

SEQ ID NO: 62779 - protein, 490 aa, Zea Mays
MVFVIESDNLREGLWPIRKRVDKVQYFLEHHNGFFYILTNAPVNDTETTTEGYYLARCRAEKSLVDRWQIVTVPDSDCTIQDMDIFHDNLVLFLRKNGTPLFCSISMPIDVDVQEPKELDDLNPWFFPIPSELCSIVAGSNNDFMSSTYQLVISSPVIPDLTVDYDLRKKTFTILHQEEVTTISANLGGLGFQSNVSSIQQNMQLVKTSQNWSDLSKLFSCERVEVISHDGVSIPLVILYSWGAHCHGESPGILYGYGAYGEDLDKSWCSERLSLLSRGWVLAFADVRGGGDLSWHMAGTKANKMHSIQDFAACGRHLIKQGFVHQNRLCAIGCSAGGLLVGAVINMLPDLFSAAVLKVPFLDICNTMLDPTLPLTVLDYEEFGDPNSPDEFEAISSYSPYDNLAPDVCYPPVLVTASFNDTRVGVWEAAKWVAKVRDVACPSCSQSVILKTNMQSGHFGEGGRFTHCDETAFEYAFLMKALGLDDVAMM

SEQ ID NO: 62780 - protein, 450 aa, Zea Mays
MLALRWTQGSVWTSLPPLNNGSTEHPKPLILAIASQDSASFFRDRSLGSDSPISGLIALLTAVDALSHIHGLSKLKKQLVFAVFNGEAWGYLGSRKFLQELDEGAASVNGISSLKIDQVLEIGSVGKAILEEYPSFYVHAEGNPSASKEILDALQSASKSLGSDNVKVKQAASSNPGVPPSSLMSFIRKNMSTSGVVLEDFDSHFSNRFYHSYLDNSVNINSSSIAAAAALVARSMYILASDDSVVDLITLNTIKVNVSLVEELIGCLLTCNPGLSCGLVKRFISPSNPCPSHYVGVFLDDPSGTQLPSYADDTSRFVWNFLADRTNSAGNKSSCTGKCGDEGEVCVGAEVEGGGRCVVSTTRYVPAYSTRVKFEDNAWHVLPANSSDPMGAADPVWTESFWNTIGLRVYAVQDPAYDWLILLAGLGITAASYCAVHFGRAYISKVAKLD

SEQ ID NO: 62781 - protein, 312 aa, Zea Mays
MTSGQRVPFEFYGTNYVFTVNQALLEGQESSTPLDRGFLSSDTYIIFEAAPNSGIKVINQKEAASSKLFKHKEFNLEKLGIGGLSAEFTDIFRRAFASRVFPPHVVSKLGIKHVKGILLYGPPGTGKTLMARQIGKLLNGKDPKIVNGPEVLSKFVGETEKNVRDLFADAENEQRTRGDQSDLHVIIFDEIDAICKSRGSTRDGTGVHDSIVNQLLTKIDGVEALNNVLLIGMTNRKDLLDEALLRPGRLEVHIEINLPDENGRLQILQIHTNKMKENSFLSPDINLQELGTLRQGSRESLATQNQIPSSPM

SEQ ID NO: 62782 - protein, 436 aa, Zea Mays
MTRLLHHHVRHFQSIQISLADMVHKVTDLRVMVPLLSWGHALRIMAMDTHLEVCLHLKTTTHPTVATHRRDRQEVAWAGTRGRAHQPILRTRVVVLTTTSRDLSHMIASHPATLLGQGITTVMGNPRALTMANLSIRNMHLNRTTAMAMVILDTMPPLRTSSTMVSHRWPRSKAILNSQIPMLGLHTVDLVNGPPGVLPPQMAPTRRHLHLMGHRLSNLLLMGKHMVQQRDLMGMVNRVTHSRVARYQLHMVRVHQQLQDILSKARSKVAMHSTRRPNQHMVIKQLKPMRTMGTRELQQIPTTEVRTHSSQGMVLLVRQLVRLVMHPLRQRPASLCMARLDIPSHLQILQVMISLQHQRRLRAVMLRPLQIHNSLLQQKGSRHSLLLLLLLDMVLAGSGRHEPRLPNFDDSKVRLDIRFWRVFECLHLLDVCGRIM

SEQ ID NO: 62783 - protein, 149 aa, Zea Mays
MDFAGRVSVLLFFLVARTVANDQIFTTSGLPFGRSSREPRYRVEFHPVDSPFHPENGQESVPMASHEGKRYKCFLPVEETKTMKSMLPQNATNIIIESERRIKPKEPDELLEVLKDQCFYRHEGWWSYEFCYYGKIRQVHVEDGKCKNC

SEQ ID NO: 62784 - protein, 234 aa, Zea Mays
MTPEESESLTMAPRSAKAADENPVQVRGHPPKKTKASWPNTGIHMATTMEPMTPARPRRRWTAASQDRARWRPRLSMARYVMIMFLICACRYICSGKAQTKEKSTGMYQSATVPATAEMSGSCPSATSSGSVNRYTGSCTTAHADRMIHDRCSAPGRTPTTRTCWNRAVVDQSTPGCLAIFFAEEGKKKPPPRPRGKKRKQQPREQLEHDCWDRHEMSSRRRQALLIPMFFFSI

SEQ ID NO: 62785 - protein, 168 aa, Zea Mays
MTLYYNGAKNFWVHGTGPLGCLPQKLAAPRPDDSDLDYNGCLKTLNDGAYEFNGQLCAACDGLRSQLRGATIVYTDVLLVKYDLIANHTAYGFEEPLMACCGYGGPPYNYNANVSCLGPGFRVCEDGTKFVSWDGVHYTDAANALVAAKIFSGQFSTPQMPFDYFCQA

SEQ ID NO: 62786 - protein, 275 aa, Zea Mays
MTVSHMHTILSASTLKGTCGLRHGVRGGDEVEAGRWRVQRIGLGHHGQVTTTINNLILGRVYCHHHGTMNISGNRRYSCKLTFKEQSFLDRNPRQVQGVVNDADGSKVATLMGKWDESMHYIINNDASKTNSHGSHEGSGATLLWEKNEPPVNPTRYNLSTFAITLNELTPELKLPPTDSRLRPDQRHLENGEYEKANAEKLRLETRQRMARKMQESGWKPRWFQRDSEDGTYRYVGGYWEAREQRTWVGCNDIFGNLSSSPKLPPSGLNTSSSI

SEQ ID NO: 62787 - protein, 210 aa, Zea Mays
MADCFPPESDDFHRRWLPREILADIGIADPEAVGAETPPEAAAAAAVEELAAQLAGILGGGAKAWPLGPPPTPPTPAAPPAAAAAVAPCYGAKVGSGLVNHGGVLDYPVLPPAALPCHVPPPANLRGGTGVFLPRIEAYRYAAAPPATAKGGAATKPWAGTGSRPATGKKQERQQAEQAAPAAKHPQKQRQQQQQATGAALALPQDWCYR

SEQ ID NO: 62788 - protein, 580 aa, Zea Mays
MASSPQPPPPFAAQNPTAQGSGQGPPGSGVGALPGAFANLQISRGAAPPPGAPRGLTPQQAPPTLAARPGPPPSAARPAFPGSPPAPPFVRAPTPSTSASPPFGGQPGVMSQPPPPFGGPPGASSQPPPPFGVPPGVVSQAPSLFGGPPATASQASSPFVGHSVAASQAAPFGAPPVAGSHPPPFGGPPGAGPQPAPPLRQTFAGQPGPMAAAAAWTQPPPPSFGAPQQPPPPFGSRPAGQPLFATQSAPAAQQLPFMGPPRVNAPAFGPPSWQTQGAGSGAMQPPLRMPGIPGSMQPNTLGPPGTPTIPYSPHAGTQVSTPSKIDPNQIPRPMRESSVIIYETRQGGQATIPPAASSEFIVKDTGNCSPRLMRCTVNQIPCTGDLLTTSGMPLALMVQPFSLPHPSEEHIQLVDFGEMGPIRCSRCKAYINPFMKFVDQGRHFICNLCGFRNDTPRDYMCNLGPDGRRRDADDRPELSRGTVEFVATKEFLVRDPMPAVYFFLIDVSMNAIQTGATAAACSAISQAISDLPTVASRVSPERRRAFVWEWMQLPELRWSREKIGGGSHRHVSKAGWPPVV

SEQ ID NO: 62789 - protein, 292 aa, Zea Mays
MCADCHLPGTLCMWTDCTTCFEGCATTAGECGGCLGGAGEAGLPLLLIMGVIVLGLFTVIGIFYSVLVATMVGQRIWQRHYHILAKRMLTKEMVAKDKAQAAPASHDEVDLDELMDDPELEKLHAERIAALKKEVEKREVLKRQGHGEYREVIEGDFLGEVTGSERVICHFYHREFYRCKIMDKHLKALAPVYVGTKFIKLDAENAPFFVAKLAIKTLPCVILFKKGIAVDRLVGFQDLGSKDDFSTRALENILKMKGIIDEKKKDDDDDDEESESKNRRIRSSTAQDSDSD

SEQ ID NO: 62790 - protein, 552 aa, Zea Mays
MLQVIEPTFKEAIKRNVSIELSAGRYPKNGATDMIRANYHSEVGSSSSTPSATSDSITAYSDSFKVELGRNDFEKTAISKRADIFLKWMWREFYNQELTCAMKYGKKRCSELLHSCNCCYQIYLAEERHCSSCHKTFKSIYNFSDHTTQCEEKQRTEPFWNMQNTDYSVPIGMAYIPSEALQPFWTDVYRKSWSVKLYTTKSIAEIFQLLTVLEGAIRPDCLSSDFETSECLNSQVGSASVLPWVPDTTSAVMLRMLDLDSAILYVQNQKMDRDDGGFMKFPSRYTVAKSKQETTPETAGLDLYDGRWLPGSGRRGRGRGSRGGSRGGRGRSRGGRIPRGVSSSSRIEFKGGIVASDKAPRKNVRRGRGRGRGRRRGRRTVRPRQPSVGRARSIPKENLLGSFSMLSSSKAATIEESPRSSGADEWGLETRTTYTECDENSSGSQSEDNEENGQPMDDDYEDQVPDYSIGYSTGSRHHVMMSMMDHDSDEEDEDAEGDENVEEDADLAVDDADVEMDEDDEIGDDGEDGGVGGEMNADEDPDATSYSSDYSD

SEQ ID NO: 62791 - protein, 443 aa, Zea Mays
MAKPCLLIYTWRTYFCATSLRLRIYIVLLTSCQLEKLQKTDVADQFHFQIQHSQDDNSIAAQEIPEVSYGNDPPEDDSNVPSCFEPARSSAHMPFCQTEEAQKEIWAATIIQTAFRAFLARRARRALKGLVRLQALVRGHIVRKRAATTLRCMQALVRVQARVRARRVRMALENQTDRQNTSPEHTIEARVREIEDGWCDSIGSVGDIQAKLLKRQEAAAKRERAMAYALAHQWQASSRQPTAFEPDKNSWGWNWLERWMAVRPWESRFLGTYGTDGIFVVNETRQPDRSATKTPYRKPVKKHDSTLQSNMLNQKVFPSNSEGGGSSTNRSSGLVSTKSRLKVLPREGSEEASSHPSVIVRSTSNPKERISSINSKERTGDLDFQVHKRSSLPGIGPEAGKHLTKKGMVNRSLKATKDSQILGSRHHLASSIDPVPTRVELET

SEQ ID NO: 62792 - protein, 314 aa, Zea Mays
MSSADINAKPPNATLSPYVGSAKSVPIEEAPKRAAENIDSQYWRYDVKRQRHGEAGGGGLCFKFVSSGSCQRGSRCSYRHDEEAVEHYQRNVCFDFLNKGKCERGPECKFVHSLSGETALRDARPPSERRRVESSCWFCLSSPDVESHLVISIGEGYYCTLAKGPLVPNHVLMIPVEHCPSTLMMPPEAEAELGRYKIALSKYFEKQGKTAVYFEWVSPRSHHANLQAVPVPLSKADAVNKIFHLAAKKLGFEFSMVNPDGAKTARESLMSQCESKSGLFYVELPEGRILLHMVDSNEKFPVQFGRELAVLHFH

SEQ ID NO: 62793 - protein, 505 aa, Zea Mays
MQKSPVDEQLVVLLYCLFIGDLEHTHLVKGLGYALLHKVRSEIEKKPEAEDGKDAKSRATKEDQAVSFRTATAKSVYQWIIKPQSIIKENELFLPGRMSFIYNLEEVVTNDIPTTLHRSKADCPVQEEMVTVSVDGSVLDRIAKIMTYLRLGSSGKVLKKKKKERDIKGKNNLASGDCDESVKPSKINGSTQKHQSDMPPPPARPPQNNNFTGKEKQPVPVARADDDDIFVGDGVDYTVPNEEMSQSPVSDMDESPHNHQKQSNFIEPMYGPVPPSEPAQAWQQPNGYDAVQAQMAAAGYQGDWSSYVYAEQQLGYPEQYVQQSTQEYDVLADPSISQDPRFMTQADKDRGLGSVFKRDDQRLNQLREKDERERDPNFISDSYSECYPGYQEYNNEIAGSDDEDDLSKMDMGGRAKGRLHRWDFETEEEWAKYNDQKEAMPKAAFQFGVKMQDGRKTRKQNKDQKLTNDLHKINKILARKKGEKDGAEDGGHYDDDLPSSKKQRG

SEQ ID NO: 62794 - protein, 310 aa, Zea Mays
MTCAAYSIRGPLMLAARRSSDVFASSKSCNGKSSVSYPVIQWWSSNCSSFTMRHVASHHHLIVKASATWHSKASATDAATASGREHALCYALNRSPSCAAVLCAPGNAGIAQSGDATCISDLDISSSDDVISFCRKREVGMVVVGPEAPLVAGLVNDLVKVGIPTFGPSSEAAALEGSKDFMKKLCDKYNIPTAKYRTFTDAVEAKKYVKNEGAPIVVKADGLAAGKGVVVAMTLDEAFEAIDSMLVEGSFGSAGSLVIIEEFLEGEEASFFALVDGTNALPLESAQDHKRVGDGDVGPNTGGMGAYSPA

SEQ ID NO: 62795 - protein, 220 aa, Zea Mays
MGNMIDKDLLVEMLSDPAQLERLMKEYGALKHEQSTNSSVAPMVQGPPPQMTASVPVSFPDHTTTFHNINSTLPPPPVLNRLPPPAIPSAVTINPPASSSQAISFPTGRTSGLNYYQTLIHQHGGERQEPQPLQQHGMHFPMHHRTVASQSSATDIVSSGTMPARDTKQRPTRPCAYFNSARGCRNGANCTFLHDVSAARKEQPKGSKRIKLDSRIAGRY

SEQ ID NO: 62796 - protein, 323 aa, Zea Mays
MCDFKYRKCCGFDFYSYNEPKLLRVTEDFSCPFCLVPCGSFKGLGCHLNSSHDLFHYELWISEECQAVNVSLKADAWKTEFVAEGVDPRHQTFSYCSRFKKRRRLETTAEKFRHVHPHIMESGSHEDAQAGSEDDYVQRENGLSVANTSVDPSQPVHGSNLSPPTVLQFGKSRKLSAERSDPRNRQLLQKRQFFHSHRAQPMPLEQVLSDHDSEDEVDDDIADFEDRRMLDDFVDVTKDEKLIMHMWNSFVRKQRVLADGHIPWACEAFSRCHGQQLVQNPALLWGWRFFMIKLWNHSLLDARAMNACNTILQGYQDGSADPK

SEQ ID NO: 62797 - protein, 696 aa, Zea Mays
MAAGGEPSPLSPAKYSRLPDDAQPDASPKRRKRHHRHHHHHHHRRHRHADSPIPEAADEEVEEGEILDDASSVSAMEVNAESAAPQSSLAPEHFGNGADINTDATKMQAPAPPTLPSSKDRRRSLHGAPESESGGILSSDAEDNKGHGRRQSQSCSKSPKPRREKERRHKDGHHSSSSKDHYPKNRSRASPYSRHQSEAHSRDHLRSGERGDDTNGSDRESNDQNGKSGRHTTGTQENERERSSSHGIHDRHGDRHNDRHGSQERYRDDRTYRDKIDSLEATWKHRERSRSHSRSDLRESTRLRDQSRESERRIGSSMHRDHGSKRDTSKHRESDRVNSAYERERGRDAGDREWHRVKGSETHRAKEGRDKVSDSDRYRDSTRSKYSVSDGYKERTRSGEKGRDVDRKNRKFEEMKENYLKEEDEEKYQEKIEQQLAMQEEEDPEKIKEEARRRKEAIMAKYRQQQSQKQDMEAKPSSNDEEVRAMDGNVTMHQKDDNGSSSTGNDKAENKHDSSEVFDGKTDFSVGKSPAQNDTSTSTGAFTDERTIDVSGLGEGSPKSERSADMFCDDIFGESPAGVRKSGKGDGLHVERNALHDNWDDADGYYTYRFGELLDGHYEIIAAHGKGVFSKVVRAKDLKASKDDPEEVAIKIIRNKETMYKAGKQEVSILEKLASVDREDKRHCVRFISSFIFSSP

SEQ ID NO: 62798 - protein, 215 aa, Zea Mays
MDVAASEFFSEKDKTYDLNFKEENNDGSNKISGDSLKDLYKSFVSEYPIVSIEDPFDQDDWTTYAKLTGEIGQQVQIVGDDLLVTNPTRVAKAINEKTCNALLLKVNQIGSVTESIEAVRMSKRAGWGVMASHRSGETEDTFISDLSVGLATGQIKTGAPCRSERLAKYNQLRLGSRKSSVLPQSTPERSSEHQWSPTEPRVPRAWRKKMRMFPH

SEQ ID NO: 62799 - protein, 351 aa, Zea Mays
MASAVVVDAGDAPEPTVRNLLDQESLKWVFVGGKGGVGKTTCSSILSVLLAGVRSSVLVISTDPAHNLSDAFQQRFTKFPTLVRGFTNLYAMEIDPKVENDDLSNEGMEGFLSELTNAIPGVDEAMSFAEMLKLVQTMDYSVVVFDTAPTGHTLRLLQFPATLEKGLEKMMELKNRFGGLLNQASRLFGLGDELNEDAMLGKLEGMKDVIEQVNRQFKDPDLTTFVCVCIPEFLSLYETERLVQELAKFEIDSHNIIINQVIFDEEAVESKLLKARMKMQQKYIDQFHMLYDDFNITKLPLLSEEHFLTPYKSTLKRGTVEELEQRITILKSALQEAETELDRVRKGKQSV

SEQ ID NO: 62800 - protein, 2024 aa, Zea Mays
MQPSGGASGSSRGSPASSPHPDHQQPPTPASAQQQAQQLGFRGQGMMHHHEQQQAFHSGAPHGMMGPGGVNFPQSSGPVSSFQGQRNLPLSSGGPQGMVGGQMHNQVAMQQQFLKLAMQQQQQQQKAAQGMLLQQQAKMNMAGSSSRDQDMLNNPAKMQELMALHQAQMYKRQCEQKEQGQSSGSEQRSGDMRPPMPPQGVPGQQLPSMGMIRPMQPIQGQVGMGSAGGNPITPTQFQAIQAWAKEHNFDLSNPANISAISQLLPIWQSNRMAAMQKQNEANMAAQQQQALPSQVNSDTPGHVNAPSQGALLKPRQPLAPSSISGGEEAKVVNSSNLQLQQQFPVHNRDGSNERAVRSLMTGGNGAQTTHIPQSSGHVNKIPEQPNPKNVLANSEAMQMQHVRQMQQLNQAAAPTSTPIEAGGSQVPTSAQPQTGQTGFTKNQLHVLKAQILAFRRLKRGDRLPPEVLELIVSGRPPDSQGQQQVSGPQVTHNRERPTVSNADEHGKQMESGGKAPEKPALLKGPCLPKVEVSTSEDKASPASGPGPAQVMKASPKEPLKIGPVSVPEHCNTTVIKSEQDLERNIQRTPGRSDYNAERGKSVPAESGSVDVEQAKRTGSTSSAPVPRDVPRKYHGPLFDFPSFTRRHDSMGSANYNSNLSLGYDVKDLLAQEGMIVLGRKREDNLKKISGLLAINLERKRIRPDLVLRLQIEEKKLKLLEHQARLRDEVEHEQQEIMAMPDRIYRKFVRQCERQRVELVRQVQQMQRASREKQLKSIFQWRKKLLEAHWAIRDARITRNRGVAKYHERMLREFSKKKDDDRNKRMEALKNNDVERYRQILLEQQTSVPGDAAQRYNVLSSFLTQTEEYLYKLGGKITATKSQQQVEEAANAAAAAARAQGLSEEEVKAAAQCAGQEVMIRNTFSEMNAPRDNTSVNKYYTLAHAVSERVTKQPSLLRAGTLRDYQLVGLQWMLSLYNNKLNGILADEMGLGKTVQVMALVAYLMEFKGNYGPHLIIVPNAVLVNWKSELLNWLPSASCIFYVGAKDQRQKLFSQEVMAMKFNVLVTTYEFVMFDRSKLSRVDWKYIIIDEAQRMKDRDSVLARDLDRYRCQRRLLLTGTPLQNDLKELWSLLNLLLPEVFDSSKAFSDWFSKPFQRDGPTHNEEEDDWLETEKKVIIIHRLHQILEPFMLRRRVEDVEGSLPRKDSIVLRCRMSAVQGAIYDWIKSTGTIRVDPEDEKRRAQRNPMYQVKTYKNLNNKCMELRKVCNHPLLSYPFLNHGKDFMIRSCGKLWNLDRILIKLHKSGHRVLLFSTMTKLLDIMEDYLQWRRLVYRRIDGTTSLEDRESAIVDFNRPGSDCFIFLLSIRAAGRGLNLQSADTVVIYDPDPNPQNEEQAVARAHRIGQTREVKVIYMEAVVDNISSYQKEDELRNGGSGDLEDDLAGKDRYMGSIESLIRNNIQQYKIDMADEVINAGRFDQRTTHEERRMTLETLLHDEERYQDSVHDVPSLQEVNRMIARTESEVELFDQMDEDFDWTGDMTKHHQVPKWLRVNSNEVDAVVASLSKKPSRNMSSGGIALDTNETLEKRRGRPRGTGKYSIYREIDDEDLEESDEDSEERNTASLPEEGEVGEFEDEEDNDDSVPDNKDESEEEEPMNDDVYEFTEGLRGRKANRMEEAGSTGSSSGSRRLPPPVPSSSSKKLRSLSALDARPGTLSKRTPDDLEEGEIAMSGDSHMDLQQSGSWNHERDDGEDEQVLQPKIKRKRSIRLRPKPNAEKQEDRSGEGAFPQRAARQQDAVHPIVKQKRNMSSRKVSPASRSGKLSHLSGSGEGSAELSKENWSSKAIDSTAPEFGGTKMSDSMQRKCKNVISKLWRRIDKEGHQMIPNISSWWRRNENSSFRGPAGSTLDLQKIEQRVDGLEYGAVTEFIADMQQMLKSVVQHFSYRHEVRIEAETLHNLFFNIMKIAFPDSDFMEAKNAMSFSNPGSGAHSDHQAGASSSAPGIGDIQWAKPAKRLRTDRAGRGGRA

SEQ ID NO: 62801 - protein, 227 aa, Zea Mays
MIALQLMRTQFPKLDKVLAQPFILQSQLYSSVKDRTQVDRDLESFKKDKVLRIFKLSSGQDDHAIMFMDDYLKQVSFAIKRSGGKDQDGSEVFEWFERYVVPSKLDVSITQLELCSLLSQGGDVTDKHITLLMNAGLLTRQLIDPNIYWFSIPRIGPILKGLSQGRNEILSLLNRRKYKEMPLSSLENTKLRLSPLDTRFLLRDLIGSGHIKTVQTPTGLLARVSRD

SEQ ID NO: 62802 - protein, 2208 aa, Zea Mays
MEAAAADLIAALSSPSSFAGLYSRFAAYLQPFTPYLHSSNPNTKPPQKRATKQNKQPPPPDAATLRPLAKRFLPFLGRALHLLPPLVRACPVSGDKGGEAADELLEIYGLLLDCLEAISPCLAGKPYSVLLQRGRFICCLESRGHFARASAEAAATLDALRSALSPPTTSTKSRRGAAGVDPVLLPDPGSAGEAGTDPEVTLLAVELTVCLANCSSKGKVKEPTPYERLISLFKQLKPWLRILTNEVSRKYLPLLMNAMSRCTLFLVSESSLFNTDLVHGFCRYTMQECVGEGMIELLPAIARKICSSVDLTWGGSTQLLLHVLKTVTDSVVRLKDDLPKSVNELLVFVAYFCRFILSANRDLSVGASELLYKQGGYFSEVSSPTASMLLLYATGLYLSAQQAESEIPPYLSVGIPKDQKYLHALEKGLGTLARCPHDNTSLVTYLDSLEFISKILSQQVNTLWKDFSEGKPTHYSGNMDYVLTALHQFIDSSFTSFSCRQMSQGDNERQHEQHGTLLTVLVSAIKFSFLTKKDIQKSLGFIVCAISSKWFTLEELKFLIPSLGNIGVTLHNTGHVKEAPKALELCCQTIWAHISLFYYRLSSRTKGNDIMTDLSMDTLKDMDIILDAFSRIAKMVDALCRCGTEIETPLVIVAKSLSIMLPDGDNSEYNKCSFILIKAWVKAVHKDFRDTKVDDAPLLYPFLLKYRSPWPIKLIGLIVEQELLAYGLTEARSIEFCSKMQIRIIDVLLHKIYCTKEHFLERSRVLIRKAGALRASGVENIKNCLESLRDAISLLQKISHDSTRTNTTANNQLAIAYCLYAQCAQEDKLGGEVIFDSAEKALNLWLDMEAFDHSSSDMVLQQPSKTIVPLICFLVDLLSMKGCFELQFKLCKVMIMIWKQEKLPIEKLLSLLFTSGRLSHACCYLPLDERFLSIAKEHLGVCCHDIEFWINCFKGDHPSLCMFLQRTLPSALFIPQSCKHPFGRQFSFVTSVDEVSKVASSLVSGDTSNEQSTFLAGCLYYDLSEKVFSRGQLFQAFSYGNKALHLRKKLLKKKFKINSGISGNMERQHCGQDISLEVCGPTIVEIWPNSSSSVNTKDFFLTPWNVLRCYLESTLQVAMMHELIGNGAEAEVLLQTGKEISNFHGLSVFCIVFTSFLGQLYCKRQLWDEAESELNYARDLVKNDATISCKLCSLTLGISVDMQVGDLSWSLFEKKIHKQITAGLSNTLGMYQSAIDKLNSTNLEYCNGSFDRHTTGYLVCSKDCIPSKYEACNLGAEPLTSNDGLLSPCSVCMVIQVRRKNSGNAEAGPPLDAKARRSSRNSSRLAKGQNVETLAKTRTRSSKRNACMKSEKVLTELNSKNNVTGSKELAADASVCGEAECFPDGIDHSKDDLCNMFGCWSCLFIKSLNSGCIQNILQLRLDYVHRHYLVSLLLKKARALGSHSNGDCEVHSVYWKCISLLFFRSLPQDCCRTYGPYLIGLIMDRSIGDFLPLECAEILFNMSFFLLKSPLSEQSRDICCIFSSVTMADVVPWLLKAFVLSRESPSLVQEVCKLLACIFLLSTTDSSIQLPLGSHKESLSLNHWATYFHQVSVGTNLNCHYFASLQASSEEKVPKDTYKDFRNETDDNVSKFLRLSSRDIKYIEKHMTEFFQKLPDVPVLCISMLGGDYVNALLKFHCHPPFFPAWMLLSRFDSTNEPTTLLLPVDSISEMQFEDSCTKDLGNPTRVLDKWQCPWGYGITDYVAPVFRNILEENFMSLSSATLTIDDVNADRVRWWSHRMKLNNYLANTLKDIEDSWFGPWKCLLLGHQLSDEHIETASSMIITGLDTEFEFEVNPMLIKAILGGAVSVDEVQECFLQLILYKGYFGRGGCCGKDRLKAFSSCQMDDGSMETLKRIITDASYELPQPADRDPVILVLDVNVQMLPWENLPVLRNQEIYRMPSMGSIFLALSRTNNDYKDHSSPFPVIDPFNTYYLLNPSGDLSSTQEEFVQLFRNYEWKGVAGNSPKADELVLALTNHDLFLYFGHGSGTQYISSKEVEKIDNCAAALLMGCSSGTLHCKGSYAPRGAPLSYLFAGSPAIIANLWDVSDKDIDRFSKALLNSWLHDKSLDGNNCSKCCQLTMELESMSIASKENGKARRQGTRGKKQQHINDSTKCCSCKQRRIASYISEARRACRLPLLIGASPVCYGVPTIIRKKVMTDSTTREMT

SEQ ID NO: 62803 - protein, 654 aa, Zea Mays
MQGFTEKIVGMMKSENLFASQGGPIILSQASIIFSLDLIENEYGPEGREFGAAGQAYINWAAKMAVGLGTGVPWVMCKEEDAPDPVINACNGFYCDAFSPNKPYKPTMWTEAWSGWFTEFGGTIRQRPVEDLAFAVARFVQKGGSFINYYMYHGGTNFGRTAGGPFITTSYDYDAPIDEYGLVREPKHSHLKELHRAVKLCEQALVSVDPAITTLGTMQEARVFQSPSGCAAFLANYNSNSYAKVVFNNEQYSLPPWSISILPDCKNVVFNSATVGVQTSQMQMWGDGASSMTWERYDEEVDSLAAAPLLTTTGLLEQLNVTRDSSDYLWYITSVDISSSENFLQGGGKPLSLSVQSAGHALHVFVNGQLQGSAYGTREDRRIKYNGNASLRAGTNKIALLSVACGLPNVGVHYETWNTGVGGPVVLHGLDEGSRDLTWQTWSYQVGLKGEQMNLNSIEGSSSVEWMQGSLIAQNQQPLAWYRAYFETPSGDEPLALDMGSMGKGQIWINGQSIGRYWTAYADGDCKECSYTGTFRAPKCQSGCGQPTQRWYHVPKSWLQPTRNLLVVFEELGGDSSKIALVKRSVSSVCADVSEDHPNIKNWQIESYGEREYHRAQSALKMCTWAVHFRNQIRKLWDTYGNLWRFPARRLPLS

SEQ ID NO: 62804 - protein, 67 aa, Zea Mays
MDYQGKNKLVFSLTDPKSCTAQGRDCTIVDCTRKIVAQVCRAFLILNPLQLCFCSALSLQIPFVVTD

SEQ ID NO: 62805 - protein, 219 aa, Zea Mays
MVMGAFIPGLRRKYAFQEYVSAVMLVVGLILFTLADAQTSPNFSMAGVAMVSGALVMDAFLGNLQEAIFKMNPDTTQMEMLFCSTVVGLPFLAVPMVLTGELVTAWTSCSQHLYVYAVLVLEAMATFVGQVSVLSLIALFGAATTAMVTTARKAVTLLLSYLIFTKPLTEQHATGLLLITMGIVIKLLPENKERRPRRLPKNDDDDKPRESREAGEETA

SEQ ID NO: 62806 - protein, 73 aa, Zea Mays
MQLPQLVKLSLGPAFNSWDSKLMFGQDKDITTLCNGLAFDKLECGGGLLLQALLLAYKSGFQVWDVEHVYDVR

SEQ ID NO: 62807 - protein, 290 aa, Zea Mays
MASLLRRSAVPARQLLLLPRHFAAAGSAPALSRSFSRFNPRDDSSMFDPPEPPVNWGVSIVPEKKAYVVERFGKYLKTLGSGFHLLIPAVDRIAYVHSLKEETIPIPHQNAITKDNVTIQIDSVIYVKHIEWRDCMSVNLNLPSAINEAATDWGLKCIRYEIRDINPPAGIRQAMEMQAEAERKKRAQILESEGMKQAQILESEGKKTAQILESEGAMLDLANRAKGAAEAILAKSEATARGMRLVSDAMTTEGSAKAASLKLAEQYIEAFSNLAQKVIVPAQHLSWPRQ

SEQ ID NO: 62808 - protein, 417 aa, Zea Mays
MNSMDEINLLRQAQRQHQHHLMVRGIGEEIDLEIGPVDDPSFSGASLVAVTSTHDTVVHADDHKSLLIPCSQPGAADGLAPQQHLSQGEEHDGMLRSPSGHTKKKKKVVKKWREEWADTYKWAYVAVHDTTTRIFCSVCKEYGRKHRRNPYGNEGSRNMQMSALEEHNNSLLHKEALRLQMASKEKLQPPEIEGPVYVKALSKTAASILECVLRRDPHEAEYIQSIQEVVHSLEPVLVKNAQYIQILERLLEPERCFIFRVPWIDDRGEAHVNRGFRVQFSQALGPCRGGLRFHPSMSLSVAKFLAFEHTLKNALSLYKLGGAAGGSDFDPKGKSDNEIMRFCQSFMDELYRYLGPDQDFPAEDIGVGPREMGYLFGQYRRLSGHFQDLKFSGQGQVFEQKLLDMVWCFLHVFYLLK

SEQ ID NO: 62809 - protein, 373 aa, Zea Mays
MADLDFFIGDEALSRFRSSGLYTLRSPIRHGQVYDWDTMERFWQQCIFNYLRCNPEEHYFLLTDSPVSTPESRECTGEIMFETFNVPGLYISVQSVLSLSAGYAYLKSLSDDDSDTRSDMTGVVVDIGDGAPQIVPVVNGYVIGSSIKSFPSSGSDVTQFISQLLQERGELLAPEDSLDISRKVKEVYCYTCSDIVKEFKKHDKKPDKYIKHWSAVKPKTGVPYTIDIGYERFLGPEIFFNPEIYSADFSTPLPELIDNCVQSAPIDTRRALYKNIVLSGGSTMFKDFHKRLQTDIKKIVDDRVAATNARHRVEVRPIEVNVVAHPIQSYAVWFGGSVAASNPEFFEFCHTKEEYEEHGASICRTSPVFKGMY

SEQ ID NO: 62810 - protein, 667 aa, Zea Mays
MFVNLSAVMLRLCEPFLDNMESKKDKIDVKYLFCNNRIDFKDLTAINASSEEVSSWIESINNEHAQNNASGEARFVESQEATSSGKNSASSQLRCSKKNFSFVCECFFMTSRVLNLGLMKAISDFKHISQQLARFEDDLESNRAVRDQGGGSPQLEQDITRLEKIVEILSQDKLCYEAQILRDGAFLQRALSFYRLMILWSVNLVGGFKMPLPSQCSKEFACIPEHFLDDAMDLLVLTSRIPKALESFVLDDFLSFIIMFMGSTSYIKNPYLRAKMVEVLNCWMPQRSGLSSTASLFEGHQLCLDYLVRNLLKLYVDIEFTGSHTQFFDKFNIRHNIAELLEYLWDVPSHRNAWRQIAKEEEKGVYLNFLNFLINDSIYLLDESLNKILELKEIEAEMTNTVEWERRPAQEREERLRVFHQWENIVRFDMRLANEDVGMLAFTSEQIPAPFLLPEMVERVASMLNYFLLQLAGPQRKSLTVKDPEKYEFKPKQLLKQIATIYVHISRGDKESVFPAAISKDGRAYNDQLFASAANILWKIGGDPKIIQEFMQLAGRAKAAASEAMDAEAILGDIPDEFLDPIQYTLMKDPVTLPSSKVTVDRPVIIRHLLSDSTDPFNRSHLTQDMLIPNTELKLQIEEFVQSQQLRKRTAAVSEIGQADGADDMAE

SEQ ID NO: 62811 - protein, 328 aa, Zea Mays
MLMSFAGSAPDPTILMFSESWPGLPRGVEFNPSDSDLLWHLAAEVGNALAERHPFINEFIKFVDDVREFICTHPQHIPGVRQDGRASYFFHRSFEPYINENDVNNCWKKIGSPRSIILDGTLTGCKEVFALYADMPSDKRSQETDWRLHQYHLQNTVKAESEIVASKIFLASRNSLCELAEETHIESEWDVSTHKDSSVECAKGFNPEICTETDELDHISLKERYRILLADKSLGLTTVSAGKSIMHVETSRASPKRNHEGKISKEDIFSMLQEISSAPSIIESNPMDDDSNRRILGEDLPGTQMSFRECLVGSSSCHKLIGHWTATL

SEQ ID NO: 62812 - protein, 214 aa, Zea Mays
MAPNTLSAPAAAPPPGSPPPLGVQACPTMAAPPPSPPSPPGYPDSMAAAAPAISLVADLAPAPATAPPSALLLQALSPSHGTRRNPMIWGKTKSKHNPRQSLDEKSKPKPSAFSWVPEGFYVGKDDMASRPKLSGIQKQVLALYRGFLRTARLKAPEERRRIESVILAEFRDNARSVDRRNFVHIEYLLRRGKKQLEQLKNPDITGLATLVVKK

SEQ ID NO: 62813 - protein, 157 aa, Zea Mays
MYPDRTPSIQIPPPSSSRLVILLAPHLHPLVIISPDSKSHLRFTRPQSRRRVLRADDGGGCRGRRRGGGGEGARALPRRPPPGGAGALLRRAGCGAGPRAAHRAPQQPRRLLPKAPRLPQGSTRVYICPRVGYGACWSSDVTCPDSRHSEGLSVSSV

SEQ ID NO: 62814 - protein, 583 aa, Zea Mays
MSAFDLLATVAGKLLDEGVGSLGNMSAGAPALTACAKDVRVKKEQCDEEMKQFKHEVTDQDSCNESAILPHIVFQRAVNNARNEDPKAKSEAQDKESSMISCTKAELGCNFGVIADRWSPESVESGAFTGDAVASLMPPAPAGFHKNAPEMYNLLDSMDVDVKPPPLVSSDSTGEMPLYGDKVHRSTSLPRVSKGVGFFAVDRDDDDDKSSGCTHPSTTTNKDFRSNCTAEYSRVRKLLTSKYRKVAPARVYKSDLSYSDVDRKPSFRNKKMHYTRQRTQRSTFKRRKLFDRHSVLASEFGTAHGKGNTKKVTGRDSHAVSLEANKGTSSTPFQKSRGSNDCHVKLKIKSFKVPELLVEIPESATVGSLKKTVLEAVTAILGGGLRVGVLHHGKKVRDDNKTLIQAGIGQEDMLDNLGFSLEPNCTQNPQVQAPEDISFLETIDTAEPLARIAPADSSSKHGEVDLSQEFALTPLAMNYQGSDHDSVHSPGGVSSPDKVSTNSRALVPVPAADPNAGAIVPANKSKRSPEQGQRRIRRPFSVAEVEALVLAVEKLGTGRWRDVKLRAFDNAKHRTYVDLKAMD

SEQ ID NO: 62815 - protein, 275 aa, Zea Mays
MATLAAISSVSYDTDTDSDSSRCSEASTWDSQVLSRHAECLELEELTAISVNPSLLPALNQLLLEAYAILRPKPLDYDQRNTLVDVFRKMVNQRFGSNSGSPVVEPFGSFTMDLFTPHSDLDLSINFSANTDEQYTRKQMISIIKKFSKVLFSYQRSGIFCGVLPIVSARVPILKVIDRGTGVECDISVENKDGMTRSMIIKFVSSLDERFQILSYLVKFWAKVHDLNTPRQLTMSSMSIISLVAFHLQVPWVNYYFGLVIKLQVTVPLPFVLIN

SEQ ID NO: 62816 - protein, 453 aa, Zea Mays
MARNEPLDFENEDDPLLPAPRPAKRSKVIGMDDLLLDYFQSGKKDKLKVKAAKSKHGPKGGYDSGEEDDRATQQEITVCKIFEEVQQKGKVMDARDDVPPWGQQFFRCQNPPSNLSNGGVENCHLLQSFSAIEDIGFDLEMHQGEGFLEGMLLDGWLLNLVRICGFVEDSVASWTLTNLLHSPNEKLQVSAADFWDGILSLDEAGEPLVNLGYFPSYSVLKRAMLSYGYLFDTSGTKASISGSTAAGGPDDSLPHNIIAWLRVVSACCKIRKVHSIFSPSEAEELLAIAISLFLDRRLEGLLLVLGDCLNSLILYFNTSEWETSCVMVAESIAQRVTLDLNCLRVVDCITGTNKRSKILRSQVALQLLKISFGLKVANVEKILKLVTSINVKEKECDFFRLYVYLVLMDNLLFSSDAFRDKTGMVDAWRNYLRNCSTQIGCTDWRFYAPKVQS

SEQ ID NO: 62817 - protein, 635 aa, Zea Mays
MTSNSSQNMSSCSTGGSDAAVGGGSWLGFSLSPHMAATMDGAADGVPVQHHHHEGLFYPPVVSSSPAPFCYALGGGQDGLATAAANGGGGFYPGLSSMPLKSDGSLCILEALHRSEQERHGVVVSSSSPKLEDFLGASASTAMALSLDSSSFYYGCGHGHGHDQGGYLQPMQCAVMPGSGGHDVYGGGHAQMVDEQSAAAMAASWFSARGNGGYDVDGAGAGAIVPLQGHPHPLALSMSSGTGSQSSSVTMQVGSAHADAVTEYIAMDGSKKRGAGNGASAGQKQPTIHRKTIDTFGQRTSQYRGVTRHRWTGRYEAHLWDNSCRKEGQTRKGRQVYLGGYDVEEKAARAYDLAALKYWGTSTHVNFPVEDYREELEEMKNMTRQEYVAHLRSGFSRGASIYRGVTRHHQHGRWQARIGRVSGNKDLYLGTFSTQEEAAEAYDVAAIKFRGLSAVTNFDITRYDVDKIMESSTLLPGEQVRRRKEGADAAVSEAAAALVQAGNCMTDTWKIQAALPAAARADERGAGQQQRQDLLSSEAFSLLHDIVSVDAAAGTGTGGMSNASSSLAPSVSNSREQSPDRGGASLAMLFAKPAAAPKLACPLPLGSWVSPSAVSARPPGVSIAHLPVFAAWTDA

SEQ ID NO: 62818 - protein, 303 aa, Zea Mays
MALSEDGLLQAWGYNEYGQLGRGRTSQGLQGARVLNAYARFLDDAPEQVKIVRVSCGEYHTAAISENGEVYTWGLGSMGQLGHCSLQSGDNELIPRRVVALDGIVVGDVSCGGVHSCAVTEGGALYAWGGGHVGQLGVGPQGGFFSCSLNGSDMLLRNIPVLVIPSGVRLATCGHSHTLVSMKDGRIYGWGYNSYGQATNEKSTYAWFPSPVDWCVGEVRRLAAGGGHSAVLTDACSLKELCEFKLAETVNLSNAQLIEDVASRTGADALARLCEKVREHLDKEGECEFLEKQVAEEVNTIGS

SEQ ID NO: 62819 - protein, 490 aa, Zea Mays
MSQPAATVAAAAQPQGRGPAGRQGGLGQSIAGIVRMAVFWYFASKFFGPKRPPADPGMLMSNLFQKGEPMDMWMYLSENEKFNDFANEDALIWHEANIPYAVWGPTSTRTRYPNNNVPPIVAPYLNVDPVTGDYYPTVFFNEFWLLKDKLIALNETVEELPLNLEVGPISMTKWQLFLQIEQSFQVHRSYGSMLEGEADELKRVFLEGNPYLLGLTMVVSLLHSLFDFLAFKNDIQFWNKNKSMEGLSAKSVVLNFVCQLVVFLYLLDNDTSWMILASSGVGVCIEFWKIGKAMHIEVDRSGKIPMLRFRDRESYAQNKTKEYDAIAMKYLTYVLFLLVVGFSIYSLKYEKHKSWYSWILSSMTSCVYMFGFIMMCPQLFINYKLKSVAHMPWRQMTYKFLNTIIDDLFAFVIKMPMLHRLSVFRDDVIFLIYLYQRWKYPVDKKRVNEFGFGGEDEPAAQEAVEGSDSAAAPQLTEAGSETSTEDKKTK

SEQ ID NO: 62820 - protein, 144 aa, Zea Mays
MVRGKTQMKRIENPASRQVTFSKRRNGLLKKAFELSVLCDAEVALVVFSPRGKLYEFASGSAQKTIERYRTYTKDNVSNKTAHQDIEQVKADAEGLAKKLEALEAYKRKLLGERLEECSFEELHSLEVKLEKSLHCIRGRKLVF

SEQ ID NO: 62821 - protein, 643 aa, Zea Mays
MPMKELIAVAQARRFSRSTSFPDNFLNAKSPFDNIQQKKLAAHGANAARRSFKDFLSTLTRTKESISRATRLAMECAKFGIAGEAIDIIVEHLEKESNLYKRVDLFFLVDSITQCSRNQKGGAGDVYPSLIQAVLPRILYAAAPPGNSAWENRKQCLKVLKLWLERKTLSEYIIRHHIREIETINEASFGSSRRPSRTERALNDPLRDNEGMLVDEYGSNAGFQLPNLICTKVLEEEEENSSEGRSLSFEAVTPEQDAPYNDDNEESQMPVEKHHHILEEVDGELEMEDVAPPSDIGATTKCQPEQSDTNRAPSDQRPSDAGPPLPVDRPPSPPPLPSSPPPVPVPQSAQMQPKLQMASDPMAPHPQRATYSVQSQQQHSIAEHPGNMNSSVAPLPPPPFNSSGYGGQQNQIPPPPPMAPLNPPGPHGSFPAPPAPYHGNNYHRPPTTSMPNEGYHQQPPPPPPPPNQFPSVPPEHQHRPHHWGNNCPPYPERYRYNGHDRGNHRHDRRHHGHDRQHHYDDRGYHYDDRGYHYDDRGHYFDDRRHHFDDRGHHFDERAIRGPMHNDAADQGRYSFPPGPPRIPDHFEAPPAPMHYGRPSDPPPRPCAGWSRPPRISDNYSPSRHSVEPPVSHTAGGHGGWRPR

SEQ ID NO: 62822 - protein, 194 aa, Zea Mays
MSSAHAIFITAVSLYIVTSTDLFSDCVKGPITFRNSIISTSALGVSVGYFITDLEMIFWLYPSLGGMEYVLHHTLSLVAIAYTMLSGEGQFYTYMVLISETTTPEINLRWFLDTAGLKKSSAYLVNGILMFVAWLVARIFLFMYVFYHIYLHYSQMHAFGYYLTFVVPSVLFVMNTMWFMKILKGVMKTLAKWS

SEQ ID NO: 62823 - protein, 110 aa, Zea Mays
MRCLDEGVLHLLPLLRAVDGEEVPGEVVVSTEKLARGMTNDLILPVQYFVLDAILDVFCSTVSMSTSQNPVEQAGKLHAAPSPNETYLHEKVALAIAGVLDDLEALTVVY

SEQ ID NO: 62824 - protein, 89 aa, Zea Mays
MSGASAQEELSMWHHLWLRHSGLRDAEGLYLASDSNKRLLIYFPFMQVKLHSVLFKGPKDDGKICNSLSVWVCELTDLCQIVSLYVQSR

SEQ ID NO: 62825 - protein, 176 aa, Zea Mays
MCHEEALLLRVGLQGDQAPLRAPLMAAPREGEALQVLRPCRRRLLHALNNLGSVYVDCGKLDLAAECYINALKIGHTRAHQGLARVHFLRNNRVGAYDEMTKLIEKARNNASAYEKRSEYCERELTKTDLQMVTKLDPLRVYPYRYRAAGMCFWLLISWSVLSCYYYYYTTRRSGL

SEQ ID NO: 62826 - protein, 474 aa, Zea Mays
MGNLDGTLGVDASNPTLQHGGTVIPDTQENDSSRGSNTLTRSTSKIPFVQGKTNDFSIINSLKNVRADVLRENTEAVFAACDAAHGRWAKLLGVRSALHPRLRLQEFLIIYNITEEFIAATEKIGGRLGYNIRGILHQQSKQFVDYQHNVRMTKIKAVLDQETWVAVDVPEEFQAIVLSLSSTYSSVNGMEMPSTDDNSKFSDHRSTSQEPTYSAKNIADNGKVTSGTGENKVEFTSQTENNVAGNLKSTLQTIVHGGVGYHMVNCGLILLKMLSEYVDISKCLPSLSLEVVQRVVEILKLFNTRTCQLVLGAGAMQVSGLKSITSKHLALASQIISFMHSLIPDIRRVLFLKIPEARKHLLMSELDRVAQDYKIHRDEIHNKLVQIMRERLLANLRKLPQIVEGWNGPEDNDVQPSQFAKAVTKEVTYLHRILSQTLLEVEVQTIFRQVVQIFHSHITEAFSKLEVNTPSGKE

SEQ ID NO: 62827 - protein, 71 aa, Zea Mays
MLKIVDGDIKKCADNCGHVMAVQNKPNFKKDKSQKKNDKAKDTISKPNQKPKAGPVVDAECFYCKAVLGLY

SEQ ID NO: 62828 - protein, 524 aa, Zea Mays
MAALVALTLALALTAAVTATAKECTNIPTELSSHTVRARLQAAPGGAAEWRWRELFHEHLNPTDEAAWMDLMPPPGAAAAAQHQQHHRQEELDWVMLYRSLKGQQQQQPVGGGTAAAGSTPFLEEVSLHDVRLDPDGDVAYGRAQQTNLEYLLLLDVDRLVWSFRSQAGLPAPGTPYGGWEKPDSELRGHFVGHYLSATAKMWASTHNGTLAGRMSAVVDALDECQRAGGTGYLSAFPAEFFDRFEAIKPVWAPYYTIHKIMQGLLDQHVVAGNGKALRMLVAMADYFAGRVRNVIQRYSIERHWTSLNEETGGMNDVLYQLYTITHDQRHLVLAHLFDKPCFLGLLAVQADSLSNFHANTHIPVVIGGQMRYEVTGDPLYKEIATFFMDTVNSSHAYATGGTSVSEFWSNPKRLAEALTTETEESCTTYNMLKLAGFAPSVQMDEGDRVRGLLRASADQRRAEHPEGQGPRSDDLHAAPGPREIQGEELPWLGNSVRIVLVLLWHWDRIVLQAGRFHLLRGER

SEQ ID NO: 62829 - protein, 597 aa, Zea Mays
MATPCRSRGFERVELRCPRELDPRPSWTLGDVLAELDALDATRRAAPPTPLKQPPDWANGGGEKAFVMRVDDDDEDDTEDEDDGTSGGKSRALVAKGARFSCNDLASSDSEDELDGQVAPYHLMEKRDLAKSILLELEHEHHLKVQEEVRSKLASLEVCHQNEIRRTISAFARLQKYAESRKEIDRRLDVHFQRRMDHEQKSQIVERRIRDDAALEEAKRKEQAVKEEKLRQERAQQEAEARQKEAAKLAAEARKTAFEAAKKEAAEKEAAEKEAAKLRDAAASQPSPNSQNNTAEGIKVFGDKYALEAESRRHALVQNQVPENIHHSKEFSKYDRQIAKSISKLMPTTDSVRTRASELVKALNGQDCPRPISCCLFANKIISIVKSRNTKDKTFGNLAFACGYVMLLVTNQVPDAMDYLLAEFNRVCIYTVPKHMHALNAQARNRDYYRLIGYQEENGQLESTESYLTYVVAYVKLYAAMIQTEIKGVRHPHGLAEGWKWLAMFLNSLPATTATACALHAFLKMAGFALHKKYGSQFMKILDVISRCFLPALKEQGNKMQAEAVNNLQNYLNDKIYLEEPEGQYLVQQLLSKELFM

SEQ ID NO: 62830 - protein, 350 aa, Zea Mays
MGRPHLIVMKRRLPHQANNKIVRTFGEKRVEENLKNHVDLCRMLDIVALEKGADVAGGRGFYLKDEGVLLNLALINFGLAFLRKRGFKPMQTPFFMRKETMAKCAQLAQFDEELYKVTGDGEDKYLIATSEQPLCAYHLGDRIYPAELPIKYAGYSTCFRKEAGSHGRDTAGIFRVHQFEKIEQFCITSPNDNDSWEMHEEMLKNSEDYYKEIGLPYQVVSIVSGALNDAAAKKYDLEAWFPASKTFRELVSCSNCTDFQSRRLGIGYGQKKNDEQSKQFVHMLNSTLTATERTLCCILENFQKEDGVEVPKALQPYMGGIEFLPFKQPLDVKQASDSKSNKSKSKGNAA

SEQ ID NO: 62831 - protein, 731 aa, Zea Mays
MASGRAATSSSILVNAAGTSKTLSASLWWDSFVVLSDDLDRATAGPSVPDALAKRIKSHHAWLRGSVSMFGKPNDASRSALEVGEVAVGERRLTVKPELKEAALRASKCLNLDEVQSYILVKRSSEVSPTIRDADAEEFLHLVSVRYYLERQCLLKCIRRIFVHASDVSDSTDPIRDEASLLISEEIDRKLISIIEDSFSTASSVKAEAEFTISSLEETLIEVNLILDILFLTFYDNFSRCNGRQWITLCSIFKDILCGSYGVGKFVASVEAKNSFHYAKAQLLLILIETLDFENLLRMIHDEVPLSGGCSAFSVGDILEMDVEISKLPEFSLVESGPLILAWAVFLCLVLSLPESNTNLEIDHTSYARRAFEFAPFNYLLGVLCSSIFRESDGPVSGYRGILRTFISAFIASYEVSYQKEHSSFDMISSILCEVYDGEESLCMQFWDKDSFVDGPIRSVLHMLEEEYPFQISELIRFLSAVCHGTWPANCVYNYLERMNGVTTIYTIPCVADGVGYGHQIESHHPVSIPSIEGITIPQGTHGYILKVLQEDTTLVRWEFPHSGVSFLLITLAQELHSCNYKKACDIIGLLYRMVSSNKDLCFALMHVDKSLAVQTSNNLGQIEKHVRIDIAKVFCNSIFKYVRDVNNADILSKTFGLLAEMMKCAPYHVFDAAFECNIFTSQLSSPSSDWLLSGALARMLFAAYEGNGDCSSLTSSVSDPWMARYICFET

SEQ ID NO: 62832 - protein, 251 aa, Zea Mays
MCTRGHWRPSEDEKLKELVALYGPHNWNAIAEKLQGRSGKSCRLRWFNQLDPRINRSPFSEQEEALLLASHRVHGNRWAVIARLFPGRTDNAVKNHWHVIMARRCRERMRLSNRGGAAAGQHGAVDTGAVEDGSNPRNAKKLRPDASSVASFLDKYRREFSVVVPFAINHDRKQQDYCSTTNEADANKSVEFYDFLQVNANSSDTKCGSSIEEQEENRDDQAEGQVQFIDFLEVVMLCERRICCKWQSSAS

SEQ ID NO: 62833 - protein, 477 aa, Zea Mays
MNPAPVANGAAAGAGVGMNRLGGRLWYAAAGALIVALLAVAVSYRSFPDIPSSSPGSCGCPAARKYTGMVEDCCCDYETVDAINEEVLHPILQELVKLPFFRYFKVKLWCDCPFWPDDGMCKLRDCSVCECSENEFPEPFRKPYSGLSPDSMMCQEGKPQAAVDKTLDSKVFKRWVETDNPWTSDDETDNNEMTYVNLQLNPERYTGYTGDSARRIWDAIYKENCPKYPSEELCHEKKVLYKLISGLHSSISVHIAYDYLLDESTNSWGQNLSLLYDRVLKYPERVQNLYFTYLFVLRAVTKAADYLEQAEYNTGNPEDDLKTESLVKQLLYNSQLRSACPLPFDEAKLWQGENGPELKQEIQKQFRNISAIMDCVGCEKCRLWGKLQVLGLGTALKILFSVDGDSHLNQPLQRNEVIALFNLLNRLSESVKFVHEKGSSVEEVINEQSPSTVQKGASKTNLKGLFGYSQYTWIGWD

SEQ ID NO: 62834 - protein, 367 aa, Zea Mays
MTATSKAPRRPRIRPRGPPPAPTPIRTARGARTAAADERVLAEFLEASLRVPDLSLPPRKRFSFPPPPAPEPDGIPSHALVSGDADAEQRAIAAAAETGAFRVTSAVDAREARDAVEAASELVFAAPEEVKRGLERWYRRRDREPREEFVWFRPMSADEDRAMAAAFPGSTYRAFREKVDTLASKMEDIAKAVIRVLHDNVKNPKASAEPREAAPSILRLALYSSDTSSTCWNELDSTTAPNSHALSVHLCGQDRRICLRRSLGGSTVSTLPAGCMLVTVGKQIQEWSNGQFKAAVGGEVVLFETTDEPGPFVSAELIVYCYCPHDLRLSEAGRYASRRVDRATIVSFRDQILVALVLLSLFYLFRG

SEQ ID NO: 62835 - protein, 243 aa, Zea Mays
MSTLFQTQLMKAREQQHQQQQQIPQQRQQQPQHIQMQQMLLQRAVQQQQQQQQQQQQQQQQQQQQQQQQQPQQQQQQQLQQQQLQQQRRDGSHLLNGSANGISGNNPLMRQNQSTANVMATKMYEERLKVPSERDSLEEASLKQRYGENAGQLLDSNEASLLKAASSAQSSGQILHGTVGGLSGTLQQVQARSPQLPGPAQGIKTEINPILTPRAAGPEGSFIGAQGSNQAGNNLTLKGWPLT

SEQ ID NO: 62836 - protein, 186 aa, Zea Mays
MAGIYGCIELGLVILMLLQKRKGVGGWLGGMRGLFSGSGKRRQVSAEKIVLDLTPLQEQRLQSLKERLNVPYDETRTDHQESLRALWNASFPDTELTSLVSEQWKDMGWQGVNPATDFRGCGFVSLENLLFFARTYPASFKRLMLKQQGMRTTWEYPFAVAGVNISYMLIQLLELNSVRPEVFARD

SEQ ID NO: 62837 - protein, 111 aa, Zea Mays
MAMDAAVAVKSGGGGAGSTGVTAAASQSPQAATNGGERRSRFQRICVYCGSAKGRKPSYQDAAVELGKELVERGIDLVYGGGSIGLMGLVSHAVHDGGRHVIGSLASLLGK

SEQ ID NO: 62838 - protein, 348 aa, Zea Mays
MLEMIHCHWRRQEICKVRCRGVPTVDMKNLCYHLEEKSGGKVIHRVGGVVFLYRGRHYDPKTRPRYPLMLWKPATPVYPKLIKEAPDGFTKEEADEMRRKGRDLLPICKLAKNGIYITLVKDVRDAFEGSDLVKIDCEGLNPSDYKKIGAKLRDLVPCVLLSFDDEQILMHRGKEWKSRYSKPLTLIPKVPKNNLAMTSVMNSSDEVSDANTQVAIREVLRPKMFKLWKSAVDSSLALLLDDAEANNLTPDSLLTLVEEFSVTSQAVEHSFPALLVTNGDASTDSLSAEYMNDEPETSVAGNEEGQLEQSPDLRDDEHFDVDMFERLESSVPLGSLPIDSMIERLNSE

SEQ ID NO: 62839 - protein, 452 aa, Zea Mays
MAFNYYRSTWCGSAAANKNNEEIEACAVLVATLRKKRRWGGSVVGHKMKKRDRIGGDIQLNNDYFIERSLFNPEQFRRRFRMQQSLFLEIEDKLAAANKFFRQKRNAAGVLGFSSRQKCTVALQMLAYGAAEGTQAAATPDVCAARLLVPGAQAINLIGKQGATIKAIQESTSATIRVISVDEHERPFYVTDDERIVEIQGDTEKVLKALQAVSNHLRKFLVDHSVLPLFEKTNTTVSQDRNGDGWSDMSRPSIGSAQVNQLPSVLDDYILQVKRDPLYLERESLVDHNIHRSGVSLYGRDPALSTLRPSAVHGAGSLLTQITQTMQIPLTYAEDIIGVKGANIAYIRANSGAVVTIQESLGSPDDITVEIKGTSSQVQAAQQLIQDSLAAHREPVRSSYVGAGLDSVYRSSYSQYGSSIYPSSSLPSYSSIDDVSRYPSSGLGGYGSSYRY

SEQ ID NO: 62840 - protein, 681 aa, Zea Mays
MFGTDLTSSSEKSEIRVFCDKAFSRLKGSDRNLPQVVGIQSLLRRGIGVHHAGLLPIVKEVVEMLFCRGVIKVLFSTETFAMGVNAPARTVVFDSLRKFDGKEHRKLLPGEYIQMAGRAGRRGLDNIGTVIIMCRDEIPEESDLKNLIVGKPTRLESQFRLTYTMILHLLRVEELKVEDMLKRSFAEFHAQKNLPEKEKLLLQMLRQPTRTIECIKGEPSIEEYYEMTLDAEAHREYITEAIMQLPNSQQFLTPGRLVVVKSDSDDDHLLGVILKNPSALLKKYVVLVLTGDCSSSALAPEFNKNEKGPVDFQGGQFIVLKGKRGMDDEYFSSVSSRKASGVININLPYKGDASGMGFEVRAIENKEIISICSSKIKIDQVRLLEEPNKTAYSRTVQQLIKEQPDGTKYPPALDAIKDLKMKDMYLVESYRAYHILLQKMSENKCHGCIKLKEHISLMREQKMYKDQLNELKFQMSDEALQQMPEFQGRIDVLKVIHYIDSDLVVQLKGRVACEMNSGEELISTECLFENQLDDLEPEEAVAIMSAFVFQQRNASEPSLTPKLAEAKKRLYDTAIKLGKLQSEFKVPVDPEEYARDNLKFGLVEVVYEWAKGTPFADICELTDVSEGIIVRTIVRLDETCREFRNAASIMGNSALFKKMEVASNAIKRDIVFAASLYVTGI

SEQ ID NO: 62841 - protein, 288 aa, Zea Mays
MVSASAPPPPPQAQSDAAGSGEEASKKVRKPYTITKSRESWTEQEHDKFLEALQLFDRDWKKIEAFVGSKTVIQIRSHAQKYFLKVQKNGTSEHVPPPRPKRKAAHPYPQKASKNEPNYGLKTDSSSIHRNSGMNVSVSSWPHRSIPQAVASSMVKEDLGAGTLGPNNFCSSSTEGPPRTWQPGETNGPINQIPSLRLMPDFAGVYSFLGSVFDPSTSDHLQKLKEMNPIDVETALLLMRNLSINLTSPDFEDQRKLLSLYSASDGPELGSSRSSALATSAPFMIKGG

SEQ ID NO: 62842 - protein, 119 aa, Zea Mays
MRRDGDLGSELQRRPPPPPPPPPPPHRSPPWPWLGWPPGDLSSLPQTTPPSPRISFSFSPFQTFRSRRCQPPFARRVSRRSSRRILTCLHRAKESRWLCALAPLLGGHHRPSTTQMQTD

SEQ ID NO: 62843 - protein, 925 aa, Zea Mays
MGSEKGGAKVIGGGGGGGGIFNLFDWKRKSRKKLFSNSPEASKLVKRSEETLLSVRLHLGDEDEGIGVSSFKGSSDYSCASSVTDEEGREMKAPGVVARLMGLDAMPTLGVPEPYCTPFRDTISFRDSHSLKRSPEYSTNDQFGHVPRRVDGYIRKPLDFRAPKMPSSPIERFQMEALPPRSAKPLPMSHHRLLSPIKNPGFTSARNAVQIMEEAAKILQPRAQTSSREKVCSFSPARIPLRVSEPRENIPFSQRAVPLKPQSSRTAPELPNVRISRAQQMNRSWNSEEDIVIFRPSVDSYEINNPSCSKNNKGKSVSLAVQAKNNVQKREGATGSGRNSRVQKEHDEKRVNQPFRSQSNLQRNKQQKKPSSSGTSSPVLWQNNQKQNSLVTKGKVALNKTVSTQQGRKVMAGDSSSGKIKSGSKNSKVGRKDIVESISGDREGSSSNNKDFPQKKRLIERNSTNEKGTFVPENPVGKLLKQVQPNVVMDEHIKWNKECKDTTDVVSFTFTSPLVKPSAGPSRLAGKWDTRSNLDMDAGCDKDDSDNKAQGLSSVGLNFVNGDALSLLLEKKLKELTSKIDPSITFTRGDTFAPATFTLEEPPTSSCSNWGSESGAFDCSPSELKPSQYDYCPSAQSSTKGQNFRGSKIKVEEQEECSSISNARKEQENEDLSPLSVLEPTTSLSESCWSSECSDSSGGKVYPSLFDVKNGQGNFLINPASVDIEAKTTDSASSASADTSDVSDITQCSKRSRHTELEYIADVLSSVNLTTDELGSLFVNQDRSALHPLLFEKLENTHAYTQGKEPFCHRGYRRLLFDCVNECLETRRTTYFRAGYAAWSKGAATLGMEEAQVCSEVTSWKRMGDWTEDELVDKDMSGGLGTWVDFRVEEFEAGEEVENHVLSSLLDEVVGDMVARRRRPGVFVI

SEQ ID NO: 62844 - protein, 987 aa, Zea Mays
MLMDPPVMQMDCKLKNAMDKTPQIAYDRKLTVSHDDYGWAGSDVHLKDDTIVCSPVDLSDACQSGMDRVLDSASKNSSLNLGDLSQGTELREKNSDSSYSDVKLQLNLSAGNYNGLQTDDYSFNKQSFGKKDMHHPQEEIHSSPNTMSLPSPCRLNGDVTPCEAEKIAEDRGKVDGIVDAVSKEVKTDLVGCHARQEELQCTLQDLSEIACSIDLVRNKSSPQEEKKSVSPLNDMGHNVDNNSCNGDTNYKGQELNMGNVGDEDHAVALWVKWRGKWQTGIRCCRADCPLPTLRAKPTHDRKTYIVVFFPRTKTYSWVDMLLVLPIEECPLPLVNGTHRKWRKLVKDLNIPRRFNIQNLAILMINLIDELHIEAVVDNARKATTWKEFALEASCCRDYTDLGKMLLKFQNFRLLDVPQRPSGQSAQQTEGMSGLPLYDSHNVEDENGSQKFVCRLCGLKFDLLPDLGRHHKVAHMVSGAVGHIPLGRGKYQLNRGRHYYSAFKKSLRPTSTLKKSSSSGIDKNLKFQISGLTSQIVESETSSLGKLQDFQCLDVAQTLFSKIQKTRPHPSNFDVLSVARSVCCKTSLLAALEVKYGPLPENIFVKAAKLCSDNGIQIDWHQEGFICPKGCKSRYNSNALLPMQLTAVDFLEAPVDSRNDDEMWGMEEYHYVLDSKHFGWKPKNESVVLCEDISFGREKVPIVCVIDVDAKDSLGMKPEELLPHGSSLPWEGFHYITNRVMDSSLIDSENSMPGCACSHPECSPENCGHVSLFDGVYNSLVDINGTPMHGRFAYDEDSKIILQEGYPIYECNSSCICDSSCQNKVLQKGLLVKLELFRSENKGWAIRAAEPILQGTFVCEYIGEVVKADKAMKNAESVSSKGGCSYLFSIASQIDRERVRTVGAIEYFIDATRSGNVSRYISHSCSPNLSTRLVLVESKDCQLAHIGLFANQDIAVGEELAYDYRQKLVAGDGCPCHCGTTNCRGRVY

SEQ ID NO: 62845 - protein, 1211 aa, Zea Mays
MKMVSLMGANFSKSLAANIITHLICYKFEGEKYELAKRVNIKLVNHRWLEECLKAWEILPVDHYTKSGWEVEIMGAQAKDSEDETEYAGTCSLSSRRIDRRTPIREISTKSHVDSALHAPSGGPTVSASNVVGATGKHLSTPEQFMKAHDASTKSSDIRTDSGTAPDTKCAAMSVDNDTLKPTRSHIYHNENDEVPADKASRDEAKDDHRRELDTRDSTLRTPSVHKSIAPTIPGDNIENTNRNCFHGFSQINVNSDLQLNSSEENFSKKILHSTNLSRKVDQKDDGHVPDPKPNISQSSVEENLNMCEFNPRSEGNSASRNDQPLGYSRRRSSKSGSLNVHRKKSILSSVSSKAPNEAPDSGSGISSATASDVGRSPTEPTKVDGHVNSGPTMNSTENQMSGCKSNLLSYRRTSLKLVSSAEVEKLPENSVNDKNMVEPDVVKTPALHEATTEEPSPSVCSEVRKESLGVHQNRDAEMTDAQLLSKTEDAAPCSKPDKVVSCQNSGLEGCKDVPVNKITDEHGIFPSKISTSRVKKVGAKRSRNAGSKAASEFTNSRSEVAALKPKHDKVASHENVEAQQGEGCCSPNAAECTPPSPAEALNNKSTNEVLTSSQGPNHKTNESLVASKAESVNMTLQRNKKGNRRKLPNTSNADENQRSSSRTVPNSKSGNLVAKGSRTADFNISDSPTVDETETVPSNSSFNEAVPPGNGEEKHKRLSSSANADDPEACTANKVPNNRVRKVVAKRKLSDVQSHKSGSEPCKTAKVLVSEVKVVSPARVAQSSRNANKVTVVQDLQNTNTGRTNDTVGSFCKDVTEDCSKDMQSSKTRSSRRQKIADLVDGSTDHDKENILVDSNFTSNTKRGNNSMSSKSNTKTLQSSKAVLDESSVIKRNGYGTLDVPEPTWFILSGHRLLRKEYRAILRRLRGRVCRDSHHWSFQATHLVTTEMRRTEKFFAAAAAGRWILKPDYLTASNEAGKFLEEEPFEWHGEGLNIGDTISLDAPRKWRQLRQRTGYGAFYGMQVIIYGECIAPTLDTLKRAIRCGDGTILATSPPYTRFFKSSVDFAVVSAGMPSADAWVQEFMRHSIPCISADYLVEYVCKPGHPLGKHVLFNMHDLAERSLQKLMKNQEDAPGSCSACGSDNREVPMLVCGGDGRSQSSGCGVRTHADCCNPPVEGCDGGEWLCGRCDQQKSAKKAKKTAAKPRVLKQR

SEQ ID NO: 62846 - protein, 1156 aa, Zea Mays
MSLCQRRPDISPQTAQPAVSSHWKVFDDGNVRGSSSSDMSIDEPLVDLSESKNKSTVSGSGSQVHRLSNIQGLESAAAQQPKPTIQQAVDKQEAETDASPAPSKGELSRRLSVKDRINMFESQKKEQTPSSGNSNSAGTGRVVPGKGEHRRVPSGASMEKLVRRWSSVSDMSIDLSNNESSSLNDKKDNGTPAGTPTSTDLEADSKVRANEDSNGQKDSITSHSWPCQKDNVPMDLATTDLCPPSILSNTLAPHKESIYGDGAENDMVMNSSIESEASFGKEPGVIQGHTRMSNHATSNVSTQDRLKSSAKSVEEALLKNKVIVTSASSEEHVCMIDKEITAVAHEVPVASEQIPQNDIRGLHTKDIHTEAEVTGRKDQPSRSFGRVSGGVNPKPKASSNSRANAKGSSVRDAIASTETEFRDVSLQRNRLPRKSEDVGKKVTAGSDSDCSGRQGKNLSRQSSITDQELNLQARVTRPGKGNQDRHGELQMKANELEKLFAEHKLTSSRRGKPTDVQVESTPMVSEVKPTMVLHETIHTKQVVKESITVNDFDAGELLKMVNNQEFNISTPQKLGILSLEESRGKFYEHYMQKRDAKLKEGWKLQREEKEAMLKAMHDSLERSKAELLTKFSRSADVPDSTYVSHCSQKIPPSRSARKNKDQGVGSFLVEEEMNSDYLSGDGSSRSADSRKHFSNKVASTQNASAGPIHKRSSRTASSGYANRRNPPENPLAQSVPSFSDLRKENTKPSPGVSRVSARVQQKSFARSKSIIEESKSILKEDQSRRSQSMRKNQIPDELKDISSGNDDIYNWAPSRISKNQSEGPFAYSTRRSGPPKPFLRKGNGTHPVIGIAGFQAAAAMMANALQHGDSGDFEDQQEDSPDDAKEEEEYESMEENLRESDFPADSDSENPRVSHEFGNSDDPGSENGDADFPSKTPAIGSTKFTAFTGNVHNPAGDVPAPWSSRLPQLFPYTNDNSDGDAFADSPSGSPSPWNSHSLDEITDADVSRMRKKWGSAQMPFAGVNAPQQPRKDVSKGLKKLWKFGRKTRGGDGLVNDWVSASTASECDDDMEDGRDLVVGSSDDFRKSRMGYLASYDGFVENEVFSEQEQSLRSSIPNPPANFRLREDQLTGSSLKAPRSFFSLSTFRSKGGDARLR

SEQ ID NO: 62847 - protein, 1149 aa, Zea Mays
MMDLLIAQITTDLRSSDALRQSSALLQALQQCAAGRDVSALARTAATEILSAPSSAVCKRLALDLLRALPLPPDLLDPLLLSSLRSDLSFPDPDVAASSIASFPSLPSHLLPSLLSSAHAEIANALSSPAESLRLAAVTSLSSLLPRDDLTLMCSTNPSLMAHATTWWGRLAELALDSADAVSAGAFEALARLFQELEGRRMSRLAGDKLVDGEGALAVRAQWAADAIDFIWSRRNMLIARSMVMPVESFRVTVYPLVHAAKMVASGVVNTLRRVAKPGDTTIADSVESSAEKLVGVSDIVSHLLPFLSSLDPPLVFEVGINMLALADVPGGKPEWASAAIIAILTLWDRQEFSSMRETIVRAVVTNLHLLDLGMQVSLFKRLLQMVRNLRAESDRMHALACICRTALCVDLFAKESVRRGQKPVPGTDVISLFEDVRVKEDLNSVTSKNLFREELVASLVESCFQLSLPLPELKNSGTESRVIGALAYGTGYGALNWTEPALDVVEVCRPCVLWDCDGRTYAIDCYLKLLVRLCHIYDTRGGVKTIKAGASQDQILNETRLRNLQLQLIRDLREVHTPRISSRLIWAISEHFDLEGLDPLLADDPEDPLNIVISNMHKILFNTDSSATTSNRIQDVQAVLICAQRLGARNARAGQLLTKELEEFRASTSADSMTKHQSRYVLQVIKYVTNHPDNRWVGVGDATGDYPFSHHKLTVQFSEASAAQDRKLEGLVHKAIRELWRPNPSQLILLQTRGIGALHKELPKACALTGSSDPCYIEAYHLADPTDGRITLHLKILNLTELELNRVDIRVGLSGALYYMDGFSRTVRHLRNLVSQDPVQSSVTVGVSHFERCSLWVQVLYYPFYGSSGSTDYEGDYAEEDSQMMRQKRSHRPELGEPVVLRCQPYKFPLAELLLPLECSPVEYFRLWPSLPAMVECTGTYTYEGSGFKATAAQQYDSSPFLSGLKSISSKPFHQVCSHFIRTVAGFQTWFGGFVGMMIFGASEVSRNVDLGDETTTMICKFVMRASDESITREIKSDLQGWLDDITDGAVEYMPEDEVKSVAAEQLKISMERIALLKAARPKVPPAKTDQEEEEERKQSEELDGFGNPKGPSTLSKLTAEEAEHRALQAAVLQEWHQLCKERAMKAQ

SEQ ID NO: 62848 - protein, 234 aa, Zea Mays
MEWIEGVKLNQQAVIESQGLKVLDLVNIGIQCSLRQLLEYGYFHADPHPGNILATPEGKLAFLDFGMMSETPEDARVAIIGHVVHLVNRDYEAMARDYYALDFLEPDVDVSPIVPALKNFFDDALNATVSELNFKTIVDGLGAVLYQYPFNVPAYYALILRSLTVLEGLALYADPDFKVLAASYPYFAKRLLTDPNPYLRDALIELVFKDGKFRQVPAHLYIFYTLHRSKHHSG

SEQ ID NO: 62849 - protein, 1252 aa, Zea Mays
MIIDAIDWLVLSTTEKVRNIYDDLFEVPSKVMQTAITPRDATSSINFYWNSKGSSLGYIPVFHFSEVLQAGAGVVRQFNININGKRFTSHDYYTPRHLESGYVYGTRPYTNQIRYNVSIVKTDTSTLPPIINADEIFIVISTTNVGTDSEDVSAMKAIKAKYQVKKNWMGDPCVAGTFRWDGLTCSYAISDPPKITALNMSFSGLTGDISSAFANLKAVQSLDLSHNNLTGSIPSSLSQLPSLTTLDLTGNQLSGPIPSSLLKRIQDGSLNLIYADNPDLCTNAGDSCQTAPQGKSKLVIYYVAVPMALIVVALAVLLCCLLRRRKTRGLADVSVKPRDKTPTSLASMAADEHRLSSLRLENRRFTYEDLEMITDSFKRVIGRGGFGYVYEGFLEDGTQVAVKMRSQSSNQGAKEFLTEAQILTRIHHKNLVSMVGYCKDGVYMALVYEYMSEGSLQEHIAGKRLTWGQRLRIALESAQGLEYLHRGCNPPLIHRDVKTSNILLNAKLEAKVADFGMSKALDRDTYASTNTLVGTPGYVDPEYHLARGDIEVVVDASMGGNHDVNSVWKAAEVALQCTEQASAQRPTMGDVVAQLLECLDLEKGRSANESFCDGDDSGSATASLSHSSAFVTGRIFGTVPMVETGPATRRALVCVSLSPLSPLPRARLPSAPPWDESAFLAMAASHLPPAATLVKKYPTLLHPFGAKPHAQRLIFRCRATSSEGADDGWASFVDELKRSLQVDPSDAVISNAGAGLTSNNDLVTALPLEPSAGPAAGDATTAAAGAVSELLGVDASGAVATPDRLLSSLLHLDASNPVASVAGGALSRLDALTSGLSDAQRWALFGFLAATWLYLTARPGVLSGAVDMYVLAPLQLALDSVLGRRSLKMSDFVVGERIGEGSFGVVYAGAVVPKNGAVVEERSGKAKTSLQNDDRYKEKVILKKIKVMTVGAKECGDYEEWFNYRVSRAAPESCADFLGSFVADKNKAEFVKGGKWLVWKFEGDRTLANYLSERGFPSNLERLMFGRVLQGLGPLEREALVVKQVMRQLITSLKRIHATGIVHRDIKPSNLVVTRRGQVKLIDFGAATDLRIGKNYVPDRALLDPDYCPPELYVLPEETPEPPPEPIAAILSPILWQLNSPDLFDMYSAGIVLMQMAIPTLRTQSGLKNFNAELRSAGYDLNRWRQSARRRPDLQILDLDSGRGWDLATKLISERGANGGGRLSAAAALRHPYFLLGGDQAAAVLSKFSLSK

SEQ ID NO: 62850 - protein, 475 aa, Zea Mays
MEQRNVLALGEHVLKATVWKRKHKTAMEHPEGNDVMVFSQHDQRKHPVIFDDRAKCKKSKLISCGSGVILESYWNFKTSGLPVRVLFYQHGDWSDFPEDVVNLAQQDFQLKKPITTAVFQNKHILLDFIHMICIDYEMTIDKPLAWVDDNGKRFFPDLSAGLYTSKPSQHENGEADECDGTPTSVAESSSSVSVGEVVSHGKRINDIAEDNMRAHNILYEAVGENISGPSFHLNEYSSGTIQATGKPNDCRRIDSAVRNLLLKGLGQPFSEEDIIGIYRTPLLDQRGQVRCGLFQKEIEETRSRRGNANVRYAWLPCSRYTMEQMAMRGALEIAKPHKGSICGVGTCLAPANCTNSCARYSDFHEDGIIRMMLCRVIMGNVEVVLPGSKQFQPSNGSFDNGVDDLQNPQNYIVWDANVHKHIYAEYAVIVQAPLVTNECSGLKDSVPNISEIISSGSRDNLTKVYLLGFGLCGCI

SEQ ID NO: 62851 - protein, 193 aa, Zea Mays
MMLELFISMLALHLKHWFLLLVNFWFTSLSRDILNRAFMAMQQEEFRQEIRSIIRDEFEKYCRTQPIQNSVSTTEHRKLHVADEPTALKSKDMKMANSGLTNLHNQAMTYARLSEAPGLKMDSSLSGNYKDQSKEMDGLLTVLPISAESAGLLPSRPDKPTGSDLVLEAVLEAEVAENAKLFVSQPHDQLPKE

SEQ ID NO: 62852 - protein, 917 aa, Zea Mays
MEGTLVQSAVVPTVYRSSSGRFRVRARARTNATMVRNMPTRTLTLGGFQGLRQTNFLDTRSVIKRDFGSIVASQIARPRGSASRGVVRAMFERFTEKAIKVIMLAQEEARRLGHNFVGTEQILLGLIGEGTGIAAKVLKSMGINLKDARVEVEKIIGRGSGFVAVEIPFTPRAKRVLELSLEEARQLGHNYVGSEHLLLGLLREGEGVAARVLESLGADPNNIRTQVIRMVGESTEAVGAGVGGGSSGQKMPTLEEYGTNLTKLAEESFGRQDQIERVTQILGRRTKKQPLPNWRAWCWKRLLLLRGLLSVLPMGMFLKQFEGKKVITLDMGLLVAGTKYRGEFEERLKKLMEEIKQNEDIILFIDEVHTLIGAGAAEGAIDAANILKPALARGELQCIGATTLDEYRKHIEKDPALERRFQPVKVPEPTVDETIQILRGLRERYELHHKLRYTDDALIAAAQLSYQYISDRFLPDKAIDLIDEAGSRVRLRHAQLPDEAKELDKELRQITKQKNEAVRGQDFEKAGELRDREMELKAQITAIIDKSKEMIKAETESGEVGPLVTEADIQHIVSSWTGIPVEKVSSDESDRLLKMEETLHTRIIGQDEAVKAISRAIRRARVGLKNPNRPIASFIFSGPTGVGKSELAKALAAYYFGSEEAMIRLDMSEFMERHTVSKLIGSPPGYVGYTEGGQLTEAVRRRPYTVVLFDEIEKAHPDVFNMMLQILEDGRLTDSKGRTVDFKNTLLIMTSNVGSSVIEKGGRKIGFDLDYDEKDTSYNRIKSLVTEELKQYFRPEFLNRLDEMIVFRQLTKLEVKEIADIMLKEVFDRLKAKDINLQVTEKFRDRVVDEGYNPSYGARPLRRAIMRLLEDSLAEKMLAGEVKEGDSAIVDVDSDGKVIVLNGGSGVAEPLEPALST

SEQ ID NO: 62853 - protein, 355 aa, Zea Mays
MKLIKHPNVVQLHEVNSGRLGEDEARIYFHQLINAVDYCHSRGVYHRDLKPENLLLDSNGALKVSDFGLSAFAPQTNEDGLLHTTCGTPNYVAPEVLADKGYDGMAADVWSCGIILFVLMAGYLPFDDANLMRLYKLICQAYFSCPPWFSSGAKKFIKRILDPNPDTRITIAEILEDEWFKKDYKPPRFEQGEDVSLDDIDAAFNDSEDRLVAEKREKPESMNAFALISRSQGFNLGNLFEKEMMGMVKRETSFTSQCTAQEIMTKIEDACGPLGFNVRKQNYKMKLKGDKSGRKGHLSVATEVFEVAPSLHMVELRKTGGDTLEFHSFYKNFSSELKDIVWKAESDANNKQTNK

SEQ ID NO: 62854 - protein, 380 aa, Zea Mays
MMCQKDGTEQVHEKQKRQPAGKKLTKEEKDKLMQERKQKRQEDKLLKQALKDELAKKKKMEKAIQKWESGKFALECITVEIDNSVIQRGSIGGPLLSSLTENGLSYEPTKNRISGSILWKLDVPDDIAQAFSDLNNSCDMNQNPLSQVKYVAIVLEAEEFCNLISNGSFFDHVQRVCDGYPGFTICYIINKLMNYINKCEQSQYKNPSNTWRRPPVEEVLCKLATHYINVHSRQCIDEAEVVEHLVGLTSSLAKCKFRKPLTWLSVQANGAVIPKGFVHKDLAKKDTWLKALIAIPDIQPRYAFAIWKKYPCMRSLLNEYMDGSKTVAEKELLLSDLKWEDRLGDEGKRLGNKCSRRVYRMLMAQNGDLDADDPEAGGRS

SEQ ID NO: 62855 - protein, 272 aa, Zea Mays
MDMSSIAANLGLSGSRPVIRKAGELRRLCDVNFDSSVLGIGEVCKAIICLEIAASKLQVIFDRAEAVRMSGMSEKAYIRSFNSLQNGLGVKTTLDVRELGIQFGCVRLIPFVQKGLSLYKERFLAALPPSRRASTDFGRPVFTAAAFYLCARRHKVSTSMTDLCFDVFGIAKEKKDPKSIKGNRELLDVLPSKRKHEDGGDSSASDESSDNDQDELDLPTHKRRKKMEREAYKDWKSSVLSSNKKTKPDPAKPRRQAQLNFKKPAEVPPAAN

SEQ ID NO: 62856 - protein, 129 aa, Zea Mays
MSKGQVLTWTTYDTLLLALLMDKRVDEAESVWNTVIQTHTRSVPKRLFSRMILIYDIHQRPDKVLEIFADMEELGVRPDEDTARRIGKAFVASGQEEKEKHVLEKYLKKWKYIHFNGERVRVRRDGPLA

SEQ ID NO: 62857 - protein, 857 aa, Zea Mays
MLPDHPSDLGRSASLRADDHSLLKDDYPRGGPHRSIRKENELFANGDLTLRISATEMGRTSAMYSQDRRLSPPPPIYPYVPRETGFLTGGSAMKASDGYGAGTGSAQRLHDDDDFKYHKDAPHIERSRDIDRHYSGSRDLVVEKGGVAERYASADDLPSGRIRETESLYSSRGMLESDLVPCRQLKVLGDPSSALPAKDHHPYRMYTEPGYETSNRYIMEGLGRSSHDSLGHGSDHPHRFSGGSLEHVSGHGDETLLDIARQAHSKHTPRAASLEYDVHDTHSEPENLRGNVSMTSRHTSVSTSLRGLRDERINDNLRLSRRIEEDEGSIESMHQDTEHLIRHCYNGDASVQYQTARGGDDHYSHSPGTEPIGIARRLAHQHEFDSFGYSSDQEASLMVSRKRCRSPEYHDHEIDMYQADHGFAGHEHYDDDVVDEYDIPPPRMSRFDDEYDEIHDVLANRDVFSRISLPHETNQEWTDMDQGNHPHSNILGYGCSKHVPMHQRLSKPNYHSQFGETPMHGRGRGRGGLTKSAKKGLRTAPHQLHDGYPSGRNEFVRPNKFSKSSKDELNGSEVKHEDAPEYEDVPLQKDPPEGSEEFSKQVDEAFLKYTKILNESPAMQKKYREAPKGSLPCCVCGSVARKFLDLDALLSHAYDTCKAGLKTKHLGFHKALCVLMGWNWHVAPDTSKSHHSIPSEEVNAMRGDLMLWPPVVVIHNSSTGHEAKDTDAKIVSIEEIEGVLADIGVAHEKARVSHGRSANQSVFLVKFQPTISGFQEAMRVHTHFSTRNHGKEEFQLMKGSKGKKAASTDSLEELLYAHIGVVEDLGLLDEGTKKRCKVMRKKEIEANAEATLNLEVY

SEQ ID NO: 62858 - protein, 132 aa, Zea Mays
MLVASHVGHHPCCCLKVDPRWSFSSQLLSIPFLWHRLPQLKKVFSVNGLNKYYIHQIACLLPSLVDVLPNDISANHPGYACVLANVLEAATWILSDAKLASDSAADIIAVCTSLLDTLPAVTTPTENFSLMC

SEQ ID NO: 62859 - protein, 844 aa, Zea Mays
MLEDIGKIGEFKKCISHARQVTTFIYMHGKLLDATREKIWGDLVRPAVTKFVTSFLTLQSIYKHKQSLRCLFVSDDWTRSKLSSIEAGKKVTEILLSTNFWNSVQDCIRASQPLIVLPEVAAAMDMAKAKITSGFEGREAMKRKLLAIINRRWQDQMEVKLYGAALFLNPNKFFELQKKDPTKREVGKLRATFNEVLWKMVEDYDLQAIISKQADEWKKTKVDMNMYRKAAALWVELRVELLSAIEYYAEDKVNSAQIWRLYWASHQRFFRHMCMSAKVPAVVRLAKEALAEEKCVVIGLQSTGEARTEEAVAKYGIELEDFVSGPRELLLKLVEDNYPLPPKPDCFEQGEEKVQEFQHKRHYGSDMSLKGRVSKLGKKEDVSEDGGDEYPPPDSDHESTESDEDFYMCQICNTEEEKNSLFCCCICASRVHPGCLTPPSTDIVNDDWSCYGCKEKVKSYLKERDAYLTELSKRYDAALDRKSKILDIIRSLDLPSNPLDDIIDQLGGPDNVAEITGRRGMLIRASDGKGVIYQARNTKEVALDMINMHEKQQFMDGEKNVAIISEAGSAGVSLHADRRAKNQRRRVHITLELPWSADRAIQQFGRTHRSNQTSAPEYRLLFTNLGGEKRFASIVAKRLESLGALTQGDRRAGPSLSAFNYDSNYGKKALTMMYRGIMEQDAFPVVPFECSENQATLEEFITKAKAALVSVGIIRDPIMCNGKNGGKLTGRIIDSDMHDVARFLNRILGLFPDIQNRLFDLFTSILDIVIQNARIEGQLDSGIVDIKAKSVEMKESPKTVHVDTVSGASTILYTFTVDRGVSWEESCASYYKRGKLGEKNPLQL

SEQ ID NO: 62860 - protein, 1467 aa, Zea Mays
MLAPLPRLTSALRGHYDADQAYLLRKSALQALTLPRPHDEWKFARKIVPGWDDASSEVRQAYKQFIGAVVELLSGEAVSEELYQVAQTVYTLFGGDDTEYVGAKKVLSKRNELESLVGYTVQDSVLKKLAQLAQKLDSLQRASAYESVHRIADDVNENDRIEFGADFDFKPLARFIVDVSLDAPLESAELGSGPFEKWQYDAWSTSTTSHSTAVRGSVSLRWLKDQCALITKSGGSMLSGDELAMTLCRVLLSNKAGDQIAGELLDLVGDTAFEIVQDLLLHRKELVDAIQHGLSILKSEKMTSGNQPKMPTYGTQVTVQTESERQLDKIRRKEERRSKRSADSGNNDIGVDDFSSLLLASERKEAFDDVIGSGEGSDSFTVTSLPQGTTRKHMKGYEEVKIPPTPTASLKPNEKLIEIKELDEFAQAAFQGYKSLNRVQSRIFQATYYTNENILVCAPTGAGKTNIAMIAVLHEVKQHFRDGILHKNEFKIVYVAPMKALAAEVTATFSRRLSPLNLVVRELTGDMQLTKNEIEETQMIVTTPEKWDVITRKSSDMSLSMLVKLIIIDEVHLLNDDRGSVIEALVARTLRQVESMQSMIRIVGLSATLPTYLEVAHFLRVNPDTGLFFFDSSYRPVPLAQQYIGISERDYTKRSELFNTLCYEKVVESIKQGHQALVFVHTRKDTGKTARTLIDLAAKAGELELFSSADHPQFPLIKKDVSKAKSREVVEFFESGFGIHNAGMMRSDRSLMERLFGDGLLKVLVCTATLAWGVNLPAHTVVIKGTQLYDPKAGGWRDLGMLDVMQIFGRAGRPQFDKSGEGIIITTHDKLAYYLRLLTSQLPIESQVMGDPSMGAKQRTFIIDAARALDKAKMMRFDEKSGNFYCTELGRIASHFYLQYSSVETYNEMLRRHMSESELITMVAHSSEFENIVVREEEQDELEALARKACPLEIKGGPTDKHGKISILIQVYISRAPIDSSSLHSDAQYISQSLARIMRALFEICLRRGWSEMSSLLLQYCKAVDRKIWPHLHPLRQFDKDLSPQVLWKLEERNVDLDHLYEMEENEIGALIRFSHQGKLVKQYVGYFPYVNLSATVSPITRTVLKVDLHITPEFVWKDRYHGMSERWWIIVEDSENDTIYHSELFTLTKKMARGTPTKISFNVPIFEPHPPQYYIHAISDSWLHAETLFTVSFHNLTLPQTQITHTELLDLKPLPLSALGNKTYEDLYRFSHFNPIQTQAFHVLYHTDNNVLLGAPTGSGKTISAELAMLHLFSTQPDMKVVYIAPLKAIVRERMNDWRKRLVIQLGKKMVEMTGDFTPDLMALLSADIIISTPEKWDGISRNWHSRSYVMKVGLMILDEIHLLGADRGPILEVIVSRMRYISSQTERSIRFVGLSTALANARDLADWLGVTDDGLFNFKPSVRPVPLEVHIQGYPGKFYCPRMNSMNKPAYAAICTHSPNKPVLI

SEQ ID NO: 62861 - protein, 258 aa, Zea Mays
MLVVDPMKRITIREIREHMWFKIQLPRYLAVPPPDTAQQVKKLDEETLNDVIKMGFDKNQLIESLHNRLQNEATVAYYLLMDNRLRTTSGYLGSEFQESMDPSFSQVHAETPTSATEHRQHVFTESPGSGLRQHFASERKWALGLQSRAHPREIISEVLKALQELNVYWKKIGHYNMKCRWSPGCLESMMHNCDGFSAESAIIETDDLIAKSTRIVKFEIQLYKTRDEKYLLDLQRVSGPQLLFLDLCSAFLTQLRVL

SEQ ID NO: 62862 - protein, 545 aa, Zea Mays
MTIGISALILGLWPMHVIWTYYCIIRTKMVGPVVKLLLLIVATAVLVIWLIIGVVGSILAGLAYGFLAPVMATFDAIGEGKENPLVHCFLDGTWSTITGSCTVVRDMKDMLVHSYFSIMDEVRLHAPPDGKPYEIRLLQIPGAIFAAACGLVVDAIMFTLIALYKFPVMLFKGWKRLIEDLIGREGPFLETACMPFAGLAILLWPFAVIGAFIASVICSVPFGVYAAVVVYQESSLFLGLSYAISSVSIFDEYTNDVLDMAPGSCFPRFKYRTNEASSHGGSLSRPASFKDKHDGKKAPQRVTSFKSSFDEFNPFKLLDHLFIECKHHGKDLVAEGVITPKDIEGTKAGKASTGVLNVGLPAYVILKALLRSAKANSDGLVLSNGSEITSDNRPTSKIFEWFFDPLMVIKDQIKAENFTEEEEAYLEKQVLLISDPKRIKENLIRLPPLSERKQAEIEAFARRLQGITKSISRYPTSKRRFDALVKALSEELARTMGGNQSANGSQVRKIRSGIVRMLSQRSLGKTTGIPGDDHEAQLTSDGFTS

SEQ ID NO: 62863 - protein, 199 aa, Zea Mays
MRWGICDPLCEGRGTRRKMGLAFGKLFSRLFAKKEMRILMVGLDAAGKTTILYKLKLGEIVTTIPTIGFNVETVEYKNISFTVWDVGGQDKIRPLWRHYFQNTQGLIFVVDSNDRDRVVEARDELHRMLNEDELRDAVLLVFANKQDLPNAMNAAEITDKLGLHSLRQRHWYIQSTCATTGEGLYEGLDWLSSNIASKA

SEQ ID NO: 62864 - protein, 78 aa, Zea Mays
MFSHAMNVVVGAKEDRQLTIGLHKVADIYCSDCREVLGWKYERAYEETQKYKESSYLRSQRLSKKTGSVQIVTQQTFW

SEQ ID NO: 62865 - protein, 272 aa, Zea Mays
MRPSAFLAARRGDGSPSLPFPLPPRDAPHRGSVLSGCSLPFWFSAQLHCTRLREFLFFKRQSDSDLPSTACCIGLVFIAAIVLGRLWRRFIGVAASAPLFVLFNILLLWGVYVFVIRRETSSLLDMLINAECALLLWGFYRILSGDPGIVACDSSYLEEAGCKDFVEAIYSSEKLPMLSRVRQCTWCKANIRGYDHHCPAFGTCIGQKNHRLFMALLTGFVVAESTYTMCSTKYITRCISSGTIRSENPVSLNIVISTTLFSILQVLWQAVN

SEQ ID NO: 62866 - protein, 397 aa, Zea Mays
MVGCSRGSLPTWMTAAAARVDLSGGVTPSHQGSPSPPHSSSGPAPAAGADQQLGLFERALSAAGAAFVSAIIVNPLDVAKTRLQAQAAGVLYHQPAQMAALGPDAILSEFRCSPSCTRGLLLGSEPVCPPDCFQYKGTLDVFLKVVRQEGFSRLWRGTNAGLALAVPTVGIYLPCYDIFRNGIEDFTRSNAPGLTPYAPLVAGSVARSLACIACSPIELARTRMQAYKEFRPGLKPPGMWKTLVGVLPPLAGSSQNVQNYRVLWTGVGAQLARDVPFSAICWSTLEPIRRQLLGLLGEDGNAASVLGANFAAGFVAGSLAAGATCPLDVAKTRRQIEDTEKAMRMTTRQTLTEIWRSGGLKGLFTGVGPRVARAGPSVGSRRSEQCVVCTMYNLQAN

SEQ ID NO: 62867 - protein, 160 aa, Zea Mays
MTKTFKKVDCTYTFGGCAEESGCPTALLSHVRIEQVCERRGFGGEGGAPSPRVLLLPAPDGAAPFAVAFVPPAEAATAPRVADAPASLVVLEVPGVVAPGAAFFEPPPSAPGPGQVSVAEEVVVGARSVAAGSVAGLPPPPPPREGGSGLALLPAEVAAP

SEQ ID NO: 62868 - protein, 501 aa, Zea Mays
MGERRRRASTASLGGGGGAGGSGAVPARNEEDKAAEPPPPTLWFALKRSLHCRSELSEVHVPRANKASGPVVASGGHLSSIVTKRASARSGCSRSIANLRDVIHGSKRHPGQPPSCSPRSIGSSEFLNPIAHEVVLSTNSRCELKITGFGGCGGLAAVGTGAAAAHDACGGGDGGVVSSFVGTLRPGTPGPAWAGAGHGLPCSGSVRGGVRCTPPRSPCVLLERNGSVVSGHRASSCEETAKDGGAGKGSGGLSCHRCGEQFSKWEALEEHHLSSDGAGGRGLVAEDRGDHLPDEPAKVGEQLRPDRAGVQGAQHAADAVPLRGVPRGREAEGEQAAQEAPALPRRRQRAAALPRHHALVRARRRRRRRRRFVPPLRLRQVRRVPHHPARLLRQEGGQDRRGRVHHVHQRPRFRVHRGCRRRRGWRWQCQWHHAQGAAGVQGDRRPRAQAAGQPQGVRGADDGLRLARRQGRPLLQHRGAVPAEPEGAAPVLRGHLQTLAY

SEQ ID NO: 62869 - protein, 2054 aa, Zea Mays
MEKGDEDWNEFNDINKLIIRQPLRTEYRIAFPHLYNNRPRKVKLGIYHTPMIMYIKTEDPDLPAFYYDPLINPITSTNKVDRRERKAAEEEDDEDFCLPEDVEPLLKQTELYTDTTAAGISLLFAPKPFNMRSGRTRRAEDIPLVSEWYKEHCPPAYPVKVRVSYQKLLKCYVLNELHHRPPKAQKKKHLFRSLQATKFFQTTELDWAEAGLQVCKQGYNMLNLLIHRKNLNYLHLDYNFNLKPVKTLTTKERKKSRFGNAFHLCREILRLTKLVVDANIQFRLGNVDAFQLADGLQYIFSHVGQLTGMYRYKYRLMRQIRMCKDLKHLIYYRFNTGPVGKGPGCGFWAPMWRVWLFFLRGIVPLLERWLGNLLARQFEGRHSKGVAKTVTKQRVESHFDLELRAAVMHDVLDAMPEGIKQNKARTILQHLSEAWRCWKANIPWKVPGLPVPIENMILRYVKSKADWWTNVAHYNRERIRRGATVDKTVCRKNLGRLTRLWLKAEQERQHNYLKDGPYVTPEEAVAIYTTTVHWLESRKFSPIPFPPLSYKHDTKLLILALERLKESYSVAVRLNQLQREELGLIEQAYDNPHEALSRIKRHLLTQRAFKEVGIEFMDLYSYLIPVYEIEPLEKITDAYLDQYLWYEGDKRHLFPNWVKPADSEPPPLLVYKWCQGINNLLDIWDTSDGQCVVMLQTKFEKFFEKIDLTLLNRLLRLVLDHNIADYVTAKNNVVLSYKDMSHTNSYGLIRGLQFASFVVQYYGLVLDLLILGLTRASEIAGPPQMPNEFLTYADTKVETRHPIRLYSRYIDKVHILFRFTHEEARDLIQRYLTEHPDPNNENMVGYNNKKCWPRDARMRLMKHDVNLGRSVFWDMKNRLPRSITTLEWENNFVSVYSKDNPNLLFSMCGFEVRILPKIRMTQEAFSNTKDGVWNLQNEQTKERTAIAFLRVDDEHMKVFENRVRQILMSSGSTTFTKIVNKWNTALIGLMTYFREATVHTQELLDLLVKCENKIQTRIKIGLNSKMPSRFPPVIFYTPKEIGGLGMLSMGHILIPQSDLRYSKQTDVGVTHFRSGMSHEEDQLIPNLYRYIQPWESEFIDSQRVWAEYALKRQEAQSQNRRLTLEDLEDSWDRGIPRINTLFQKDRHTLAYDKGWRVRTDFKQYQVLKQNPFWWTHQRHDGKLWNLNNYRTDVIQALGGVEGILEHTLFKGTYFPTWEGLFWEKASGFEESMKYKKLTNAQRSGLNQIPNRRFTLWWSPTINRANVYVGFQVQLDLTGIFMHGKIPTLKISLIQIFRAHLWQKIHESVVMDLCQVLDQELDALEIETVQKETIHPRKSYKMNSSCADILLFAAHRWTMSKPSLVSESKDVFDQKASNKYWIDVQLRWGDYDSHDVERYTRAKFMDYTTDNMSIYPSPTGVMIGIDLAYNLHSAFGNWFPGSKPLLQQAMNKIMKSNPALYVLRERIRKGLQLYSSEPTEPYLSSQNYGEIFSNQIIWFVDDTNVYRVTIHKTFEGNLTTKPINGAIFIFNPRTGQLFLKVIHTSVWAGQKRLGQLAKWKTAEEVAALVRSLPVEEQPKQIIVTRKGMLDPLEVHLLDFPNIVIKGSELQLPFQACLKIEKFGDLILKATEPQMVLYNIYDDWLKSISSYTAFSRIVLILRALHVNNEKAKMLLKPDKTIVTEPHHIWPTLNDEQWLKVECALRDLILSDYAKKNNVNTSALTQSEMRDIILGAEIAPPSQQRQQIAEIEKQSRETTQLTAVTTRTTNVHGDELIITTTSPYEQQAFASKTDWRVRAISATNLYLRVNHIYVNSDDIKETGYTYIMPKNILKKFICIADLRTQIAGFLYGLSPQDNPQVKEIRCIAMPPQHGTHQMVTLPANLPEHEFLNDLEPLGWMHTQPNEAPQLSPQDLTSHAKILENNKQWDGEKCIILTCSFTPGSCSLTAYKLTPSGYEWGRSNKDNGSNPHGYLPTHYEKVQMLLSDRFLGFYMVPDNAPWNFNFMGVKHDPQMKYNMKLGMPRDFYHEDHRPTHFLEFSNIEEGEAAEGDREDTFT

SEQ ID NO: 62870 - protein, 614 aa, Zea Mays
MESKEYMEIRNALIVLTKISSVFPVIRKSGVNLEKRVAKLKGDEREDLKVLATGVAAALAARKSSWLSEEEFGGGHIDLKPATARSVLGNQSADLSMAKDQNARAKSVENRHERSEGAMKPDVQQKKSTVASNGSDILIQSSSVQGKSSVVARAMDEPPKPVSDEGVKVSTKSTSEFETRATQKRAGNAGKVMKHDVAKEDAKAGKPTSWNVNQQVSTVDREVSHAADAAQETSTTISNGNLHPAPHKVSSSSQRNAVTHNGAANPSVESTDMIDSPVRQQKRPPVEEQDRSGKRRKGENEPDLSEHHVDKEKSLDSRGGDKFRSVDHEKSANEEQNLRAGKIKEKSDDKYDRDPREKLDRGERRRGEDAIERSTDRLSDRRERSIERMQERGTDKALEKGREDRNKDERNKVKYAEPSVDRTHSSDERFRGQSLPPPPPLPASFVPQSVGANRREEDADRRGGSSRHVQRSSPRHDEKERRQSEENISSFQDDGKHRREEDIRDRKREDRDTLSNKVDDRDREKGTSLKEDSDPSNVSKRRKIKREQTLEAGEYAPSAPQPPSHGSGSSQLSDIRERERKGVISQHRISHADDLPRTHGKDMTSKSSRRESDQ

SEQ ID NO: 62871 - protein, 228 aa, Zea Mays
MLIRDPRKRLTAHEVLRHPWVQVGGLAPDKPLDSAVLSRMKQFSAMNKLKKMALRVIAENLSEDEIAGLKEMFKMIDADNSGQITFEELKVGLKKVGANLQESEIYALMQAADVDNNGTIDYGEFIAATLHLNKVEREDHLFAAFQYFDKDGSGYITADELQVACEEFGLGDVQLEDVIGEVDQDNDGRIDYNEFVAMMQKPPAGLPNKKAGLQNSFSIGFREALRMA

SEQ ID NO: 62872 - protein, 114 aa, Zea Mays
MLRRARVPCAAAPAPAPAVVVAVALLALSAVAAADFFSPLAPIFSPVINSICSTVACGQGNCTVAPGTLGYRCDCRPGWTQLHVGDSLRLHRQLMFQWFAGAGTGASADAFAAT

SEQ ID NO: 62873 - protein, 305 aa, Zea Mays
MTIVPVTIYNRTPKRIRQIPVHPSLSLPLLPFGLFFLPPMEALTARSSVLSPPGIAGDTSPSLPLPLRRASAAFLGPRRSPSALAISTRWLRAPPRRGGRLLAGEGEEVPPDPADDAAGRAEDFLVLENNVTLRQSNDMDTIKHDDAGTSGIGGSNTGGSRTGLFRTPISGGVHSATAVHDLPPPALAVRNLMEQARFAHLCTVMSRMHHRREGYPFGSLVDFAPDPFGHPIFSLSPLAIHTRNLLADPRCTLVVQVPGWSGLSNARVTIFGDVIPLPTEQQVCTKITTDVISFPEYHLSQCHVT

SEQ ID NO: 62874 - protein, 402 aa, Zea Mays
MLLRPFLRRGAAAAAAAVSSNGARAIALPDPPAALASLLLASRSYAKAKGGGKPASSTSNRGKVRAKDPRGVASADDAAGAEFSAGGGGDDIDTEFELPTDPLPPTYDPALDVGPGGRPLFAFTDTFGSFAHRDANIYVDFTLDEWNAMLPEGLPAGMMKEFQETRRCAVMVRKSFLDLRDNFRRIVDPAVTTNLKDTRKQIVLDGPRSCGKSIALAMLVHWARTEGWLVFYVPQGKDWTHGGFFYRNTYSDFFDTPVQAANILQNFLKYNETRLQQLPCQIFERIPLGEGAGVGMMKGVDTMEMPEGSTLYDLIQTGITQTHASVGVMVRLRKELSLVKDVPVLFAIDQYNSWFTFSDFQEPVTVRSCRSIHAKELTMVCCTEILHLVQATHSFMSFRNLL

SEQ ID NO: 62875 - protein, 116 aa, Zea Mays
MRRRGRMVVVTEARRPRVTRNGSLTRVGRRRKVTGAGWSGVTGNGSLTRIRRRRRSRGIVGFIKLLGFILRSNEWHTKFLLVPLIKVHREGGGWRRRGPRRQGMTRGGGITTKVLM

SEQ ID NO: 62876 - protein, 385 aa, Zea Mays
MEPEKAEWGFKALKQTVKLYYKLGKYKEMMDAYREMLTYIKSAVTRNYSEKCINNIMDFVSGSASQNFSLLQEFYQTTLKALEEAKNERLWFKTNLKLCKIWFDMGEYGRMSKILKELHKSCQREDGSDDQKKGTQLLEVYAIEIQMYTETKNNKKLKELYQRALSIKSAIPHPRIMGIIRECGGKMHMAERQWDEAATDFFEAFKNYDEAGNPRRIQCLKYLVLANMLMESEVNPFDGQEAKPYKNDSEILAMTNLIAAYQKNDIMEFEKILKSNRRTIMDDPFIRNYIEDLLKNIRTQVLLKLIKPYTRIRIPFISQELNFPEKDVEQLLVSLILDNRIQGHIDQVNKLLERGERSKGMRKYNAIDKWNTQLKSIYQTLSNRV

SEQ ID NO: 62877 - protein, 161 aa, Zea Mays
MKKGICLLYPSSVSFHPDTGQAGPLLPKTLESGAGVLSLSDSLLRGRRRRRRQRRKSNHQAAEREATRGRSPGGLSRVQRRSTESRFVSQYRLISRSRFRFRFDPVLLAHCCNLVLAQCSSSSTLLLLASLRCLPRCVESFRLAPAIAPTRLRPVFLLGSA

SEQ ID NO: 62878 - protein, 851 aa, Zea Mays
MAAAFSAAILFHLLLLLFSPSAAQPGFISLDCGGARDHTDAIGIQWTSDASFVSGGQAAQLLVQNGLQQTQQQLTTVRYFPADNRKHCYTMNVRNRTRYLVRATFLYGNFDNSNVYPKFDISLGASPWSTIVVDDATTPVVEEAIILAAAPTLSVCLSNASTGQPFISTLELRQFNGSLYYTTDETRFFLGLSARINFGAGSNDSVRYPDDPFDRIWESDSVRRANYLVDVAPGTERISTTKPIFVGTNEEPPEKVMQTAVVGQDGSLNYRLDLEGFPANAWGVSYFAEIEDLAPNETRKFKLEVPGMPALSKPTVDVEENAQGKYRLYEPGYTNLSLPFVFSFGFRKTNDSSKGPILNALEIYKYVQITMGSQDANIMASMVSRYPQEGWAQEGGDPCLPASWSWVQCSSETSPRIFSITLSGKNITGSIPVELTKLSGLVELRLDGNSFSGQIPDFRECGNLQYIHLENNQLTGELPSSLGDLPNLKELYVQNNKLSGQVPKALFKRSIILNFSGNSGLHIVSNGISHTIIVICLVIGAVVLLGVAIGCYFITCRRKKKSHEDTVVIAAAPAKKLGSYFSEVATESAHRFSLSEIENATGKFERRIGSGGFGIVYYGKLADGREIAVKLLTNDSYQGIREFLNEVTLLSRIHHRHLVTFLGYSQQDGKNILVYEFMHNGTLKEHLRGADNEKITSWLKRLEIAEDSAKGIEYLHTGCSPTIIHRDLKSSNILLDKNMRAKVADFGLSKPAVDGSHVSSIVRGTVGYLDPEYYISQQLTEKSDIYSFGVILLELISGHEPISNDNFGLNCRNIVAPDRTSRAGTSTPSLMSRWTEAAMTCSRCGRSRRWP

SEQ ID NO: 62879 - protein, 633 aa, Zea Mays
MPEIKCGAAEKVKPAASPEAEKPADIAGNISYHAQYSPHFSPFAFGPEQAFYATAESVRDHLIQEKDAALGNGGLGRLASCFLDSMATLNLPAWGYGLRYRYGLFKQHIAKEGQEEVAEDWLDKFSPWEIPRHDVVFPVRFFGHVEILPDGSRKLVGGEVLKALAYDVPIPGYKTKNAISLRLWEAKATAEDFNLFQFNDGQYESAAQLHARAQQICAVLYPGDATEEGKLLRLKQQFFLCSASLQVNGVAELHSNILKQELFADYVSIWPTKFQNKTNGITPRRWLRFCNPELSEIVTKWLKSDQWTSNLDLLTGLRKFADDEKLHAEWAAAKLSCKKRLAKHVLDVTGVTIDPTSLFDIQIKRIHEYKRQLLNILGAVYRYKKLKGMSAEEKQKVTPRTVMIGGKAFATYTNAKRIVKLVNDVGAVVNNDPEVNKYLKVVFIPNYNVSVAEVLIPGSELSQHISTAGMEASGTSNMKFSLNGCVIIGTLDGANVEIREEVGEDNFFLFGAKADEVAGLRKDRENGLFKPDPRFEEAKQFIRSGAFGSYDYEPLLDSLEGNSGFGRGDYFLVGYDFPSYIDAQDRVDAAYKDKKKWTKMSILNTAGSGKFSSDRTIAQYAKEIWDIKASPVV

SEQ ID NO: 62880 - protein, 370 aa, Zea Mays
MPAMPMLQPLDGGGGLGAGAGAGGGASVALPIRGIPIYNGPGGFPFLPPASGADGAPLHHHQQQQKLGFYGSYHPSTWPSSLGSTSPSPSPLAPGTPPSPLLDPASAAFLSPAAHHHHRMLSASGRLNGMLTDTLRGYGAGGVGGLGGIVGGHHHHHHHLHGAQPFGLGSRFMPKLPAKRSMRAPRMRWTSTLHARFVHAVELLGGHERATPKSVLELMDVKDLTLAHVKSHLQMYRTVKSTDKPAASSGANDGGSGDEDFAGGGQAGSGGENMCARPFGEHRSTSEGAASSVGGGGGGDMDQSSAGNGSTRWSNSSRDPWLSSNSCNMDAHRLAALSSPIELAGVEPGADEQPEPGVHAWEAGLAGHGS

SEQ ID NO: 62881 - protein, 104 aa, Zea Mays
MAASSALRLILGSSSASRRQILSEMGYKFTLISADIDEKAIRKENPEELVVALAHAKADAILEKMQNNGMMKEILDSQDTTLMITADQDHLQFEWLQCYHTEEV

SEQ ID NO: 62882 - protein, 704 aa, Zea Mays
MASSSPVHTQLIQALELQTRALLSELDKRLDSKWGTKWESRVGAIESRSADSTRAMSDFSSALHSDVEAHLTAADAATDSNLLQIEAELDPRVSALKSSVHALDLWCPRVDSSIEGLHASVDFISTEVSKMGILWNHDVCVDDLARPGLFGAHRSAACFDASASAPSIPASVIADNWGGFFDDGEQYCAALDALPNSIHSDLLNTFARHSHDHLFVLNPVAAQDSSAEEAMATMEAAADAGDPARLVQSSPSPSLLIAGNLLPPSLTMPQLQAEVVDKQYRVAMSPPPPLPVVDELYREEASPPPPIHDDAAGVMSLDSSAFKVLDQMSKSARADGLVVNPFEELESGSMALLAEATGEKVIVVGSVLLCRSPSLYPQSMSCDTRRCMAWLDAKAPKSVVYVSFGSAKCMPPIQLRQLGMAFASCPSPVLWLIKDADSLPNNIKDLLHEHTVADDVAGSKCLVVRGWALHVAILAHPASDGFMALCGWGSTLEVVAAGLPMAAWPFFAEQFINEQLIMDVLGIGLSVAVMKPIENVLIASNMGGAVVMIYAPVFWSCLTSFTLGIHGQIVGVLCLPFLMQQASLSFVTKTGWLVIILSLLLLQWDKPNLRGLNKSKCIQRGFRRCYVHACPSRWSDWLPSAEFWYNSSFHSATGRSPFEDLYGYAPRHFCITSCDGPSAGLNAFLQDKLVMTKLLQQHLLRAKQ

SEQ ID NO: 62883 - protein, 409 aa, Zea Mays
MDGPKRSQLRVRLRVTARRRGADGDGAGGAAGPGGRKRRMEAPVRNSVAKLQRREIGGRQLAARGGGPAAAVPERFRNMQLQEEFDTYDENAHLFVKLQFLKRRSKIIEIVAAKDIIFALANSGLCAAFDRVTNKRIAFLNLSPDEVIRSLFYNKNNDSLITVSVYAADKFSTLKCRTTPIEYIRRNQLDAGFPLFESESLKWPGFVEFDDVNGKVLTYSAQDGIYKVFELKNYSFLYSIPDENVQEIKISPGIMLLIYDRTPSYVPLKILSIEDGKQLKSFKHLLHRNKKIDFIEQFNEKLLVKQENENFQIFDVRSSELIEVSVSKFMTPSAFIFLYENNLFLTFRNRTVAVWDFRGELVTSFEDHLLWHNDCSTNNIYITSDQDLIISYCKSEAVAEDGTGAVLKP

SEQ ID NO: 62884 - protein, 584 aa, Zea Mays
MTLLDLSKRTGAYISTLQGILADLGEKVESEFDSISIDLAELVAMELGVNSRRMHTGEGKNEPRPAVVTVMGHVDHGKTSLLDALRQTSVAAKEAGGITQHIGAFVVEMSSGASITFLDTPGHAAFSAMRARGAAVTDIVVLVVAADDGIMPQTLEAMSHAKAANVPIVVAINKCDKSGADPERVRIQLGSEGLLLEDMGGDVQVVEISAVTKTGLDKLEEALLLQAEMMDLKARIDGPAQAFVVEARVDRGRGPLATAIVKYGTLVSGQHIVVGAEWGRIRSLRDTAGNITQSAKPAMPIEIEGLKGLPMAGDDVVVVDSEERARMLSHGRKKKQEKDRLRKIDEGMAEELEIKEETPERVEMTIIVKADVQGSVQAVTDALRSLNSAQVFVNVVHVGVGPISQHDIDLAQACGAYIVGFNIRSPPSPITQAAARANIKVLLHKVIYHLLEEMGKAIVEKAPGTAETQVSGEAEVLNIFELKGRSKSKGPDVKIAGCRITDGHFSKSGTMRLLRSGDVVFEGPCESLKREKKDAETVEKGNDCGLVIQDCDDFQVGDIIQCVEQVIRKPKFISTQSGSVRIEC

SEQ ID NO: 62885 - protein, 91 aa, Zea Mays
MASGGLAAASEVAVVFLIRPVLAIAFVFTLILLSWYVAWRTVLVHVPLVQEIAGLRPKKPSKPKPANRGRFAKFYQNQAEAAQSDGQVHRT

SEQ ID NO: 62886 - protein, 208 aa, Zea Mays
MQKVTHTRKPKGLSGLSRFADTKAGRYNPRMDPVIPVENWRKGSQWAVLIKKHAEVVVDDEVVLPEFQKHCRRRPLPEFWRDWDRPIPAEAWKAHNCIPDEHYVQTLLAQSGLEEELTRRSVTHSAWDLSASKDRERRGWHPVTYKVSDATTRLIKSIKDIDNIYYETENRREWCTSNGKPAPCFLFARKFTRGAGLKLLDSSLIASK

SEQ ID NO: 62887 - protein, 475 aa, Zea Mays
MTGEQIQAPSSPRDGEDVAITIGRPKESGPKFGTMMGVFVPCLQNILGIIYYIRFTWIVGMSGVWQSLVLVSFCGACTFLTSISLSAIATNGAMKGGGPYYLIGRALGPEVGVSIGLCFFLGNAVAGSMYVLGAVETFLDAVPSAGLFQKSVTVVNNTLVNGTETAGTSTISTPSLHDLQVYGVIVTILLCFIVFGGVKIINKVAPAFLIPVLFSLLCIYLGVFIAPRHNAPKGITGLSITTLKDNWGENYQRTNNAGVPDPSGSIYWDFNALVGLFFPAVTGIMAGSNRSASLKDTQRSIPIGTLSATLSTTAMYLFSVLLFGALATREELLTDRLLTATVAWPAPAVIYIGIILSTLGAALQSLTGAPRLLAAIANDDILPVLNYFKVSEGSEPHAATLFTAFICICCVVIGNLDLITPTITMFFLLCYAGVNLSCFLLDLLDAPSWRPRWKFHHWSLSLVGALLCVASSITM

SEQ ID NO: 62888 - protein, 285 aa, Zea Mays
MVYPHMAFMQILILITEKNRLKTSINLSLTPILNQYNLTCFEWQHYKFLHDLCGQFCIIICPFEIHQCILSDQWSICFHNAGVMVPLTWSIRMKIALGAAKGLAFLHEAEKPVIYRDFKTSNILLDEEYNAKLSDFGLAKDGPVGDKSHVSTRIMGTYGYAAPEYIMTGHLTAMSDVYSYGVVLLELLTGRKSLDKSRPVREQMLADWALPLLAQKKKVLGIVDPRLAEDYPVKAVQKTAMLAYHCLSRNPKARPLMRDIVATLEPLQQLEETPGDSVAVTLEGT

SEQ ID NO: 62889 - protein, 729 aa, Zea Mays
MNGRPASARTVSRTRRALRRLKGGGGLPVASLGPSPRRNRRVAETSSPVSPPHRSLSRAPLGSSLQVCLLLSFNMPASEMEAPASAHASAAAADDSQEDSAPTAAVAAAADEAQPAAAAVPALYVGDLHEDVAEEHLFEAFSKIGTVTSVRVCRDNATSRSLRYGYVNYFSRADAVVALDKLNHSLVLDKPIRVMWSNRDPDARRSGVGNIFVKNLSSSVDNASLQELFSKFGDVLSCKVAKNEDGTSRGYGFVQFTSQESADEAIGNLNGSLFNDRKLHVATFIKKSERSANNDDKFTNLYMKHLDDDITEELVKLKFSQFGSIVSVKIMKRPDGSSLGFGFVSFQNPESAIKAQSTMNGMLLGSKALYVARAQKKEERKQYLQRLHEEKRNEIMTRCNESNVYIKNIHDEVDDDALRARFVEFGNITSAKVMRDDKGISRGFGFVCYSTPEEAKSAVNNMRGVMFFGKPLYVAIFQRKEERKAKLQQHFAQLARMVGPANSMIPTGYPQVYFAHPSTHIPQGPPRHGFVYPPMGLSHEWRPSMFPPAPNLQQIHSPVMPNSPRHYRSNRGRMGGNMMPLPHAVHTMNYMTHPQPAKEFMSLPRQYFSNDVMANSLAIHQSDPVSTMNDSFSNYLASAPPAEQKNLLGNRLYPLVERHQPELASKITGMLLELDNSEVVTLLCSSEMLSVKVDECVQLLQATKPKAEDHEALHPGFMLEPRPPSVNAS

SEQ ID NO: 62890 - protein, 614 aa, Zea Mays
MVRVRAGAPVKQENHSFRLAESMPPMDAVFLAWNYMGNRDVERMVFHYLTTTAWAAVAKADVVLCNTFEDLEPDIFGAHSPAAASILPIGPLRTCQRRTSEAPAGHFWRADDEACASFLDAQPRGSVTYVAFGSLTVMSPAQLQELALALLASARPFLWVFRPGLAAELPPAFTDLLPRHARGKVVEWAPQEKVLAHPAVGCFLTHCGWNSTLEGVRHGVPLLCWPYFTDQFTNQAYICDIWKVGLRVVPDGGDGIVAKERIMERLTSLMGDSGVKERVKRLKELAERSMGPEGKSLKNINAFMESMTKRSPVLAPRHLVVGHWITASCNLQPGGRGPLDQRHIRGEESSEDPNDADGEAVTAEQRLLGSPAPGPGCWHLNSSMRSKKIFGLSISLVLINLASILERADENLLPAVYKEVSAAFDAGPTDLGYLTFLMNFLKSIASPLAGVLALHYDRPAVLAIGTAFWALSTGAVGVSQYFGQVAFWRAINGVGLAIVIPALQSFIADSYKDGTRGAGFGLLSLIGSVGGIGGSVLATIVAGGDYYGFPGWRLAFISVAFVSFLIGLLVYLYTVDPRKLSPSHFGGGEDNERYGLLIFFLGKSSYLAYSYFKR

SEQ ID NO: 62891 - protein, 345 aa, Zea Mays
MSKGGTRESITRMWDPVAYALGFIDCDNISARCMLTIFTLFATKTEASLLRMLKGSPDVYLSGPIKKYITDRGGRFHLRWGCREVLYEKSPDGETYVKGLLLTKATSREIIKADAYVAACDVPGIKRLLPSEWREWEMFDNIYKLDGVPVVTVQLRYNGWVTELQDLEKSRQLQRAVGLDNLLYTADADFSCFSDLALSSPADYYIEGQGSLIQAVLTPGDPYMPLPNEEIISKVQKQVVELFPSSRGLEVTWSSVVKIGQSLYREAPGNDPFRPDQKTPVKNFFLSGSYTKQDYIDSMEGATLSGRRTSAYICGAGEELLALRKKLLIDDGEKALGNVQVLQAS

SEQ ID NO: 62892 - protein, 219 aa, Zea Mays
MIEPELAFADLNDDMACATAYLQYVVKYILENCKEDMDFFNTWVEKGIIDRLNDVVEKNFVHLSYTDAVELLLGSKKKFEFPVKWGLDLQSEHERYITEVAFDGRPVIIRDYPKEIKAFYMRENDDGKTVAAMDLLVPRVGELIGGSQREERLDYLEARLDEQNLNKESYWWYLDLRRYGSVPHAGFGLGFERLVQFATGIDNIRDAIPFPRVPGSAEF

SEQ ID NO: 62893 - protein, 69 aa, Zea Mays
MGTFGYLAPEYATSGKLTEKSDVFSFGVMLLELITGQRPIDTTQLAMLAISTYVLPFACCIILIPIAKL

SEQ ID NO: 62894 - protein, 129 aa, Zea Mays
MPSVYLYIPNIIGYFRIIINFIAFAVCYSNKALFAILYFISFVLDGVDGWFARKFNQASTFGAVLDMVTDRVSTACLLALLSQFYRPGLVFLILLGLDITSHWFQMYRSVSSTILFSFCKFPVCFLVST

SEQ ID NO: 62895 - protein, 427 aa, Zea Mays
MPPRAAPALRVLPLALAAAIFSGLTAILFYLSGVSSSHSGSRLSEADLAALAALRGGFSKCVDANGLGLKAVTGEDYCRVVIQYPSDTVSKWRDPITHKAESLSFEFNLCEAVASWEHVRNSTTVLTKEYIDALPNGWEEYAWRRINKGILLNKCQNRSLCMEKLSLVLPETSPYVPRHFGRCAVVGNSGDLLKTKFGDEIDSYDAVFRENGAPTQNYTEYVGRKSTFRLLNRGSAKALDKVVELDETKKEALIVKTTIHDIMNQMIRELPITNPVYLMLGTSFGSSAKGTGLKALEFALSICDSVDMYGFTVDPGYKEWTRYFSELVKIHSPMRGDPGRTVRWLPTKATIEAARVASEKLLKRPGAGSDDPLGTCTMIKKRRKGKAPNRSGLRDAAMKHLEDMKGAARYPLERNAGGGYLCMINDR

SEQ ID NO: 62896 - protein, 54 aa, Zea Mays
MFWNQCSDDKLQTKHPFVLYLFFFAIAMRVKYIINVSPRHINRPHARPCPSVEK

SEQ ID NO: 62897 - protein, 95 aa, Zea Mays
MPSRSGPTCHKHLHPTIPSIPTRTNTPTIDSKIETARPSPPPRHGCSVHSNRTLLQRAVDTVDPHPHSWSLRPPMPRLRSVSELRGIRDQALATK

SEQ ID NO: 62898 - protein, 100 aa, Zea Mays
MCSTRFTSFCYQAIEIWNIISNGGYLYICGDAKGMARDVHKMLHTIVQEQRSLDSSKTESYVKSMQMEGARDERVDVLSTVKSNWRRLQFCITPTKNSQT

SEQ ID NO: 62899 - protein, 306 aa, Zea Mays
MASAEIPNSSPDATNPAPAAAAATGPDLSSSPPPLPPRKRRLSPSPPPTRSASRSRSPRSRSPHGRRSRSRSRSPQQYPTDGKRQRHNGLTVDACRDFLRDRDNKVTACADSLRNNCFRGMTCRYYHPPPHIQEQLLRSVGVEDPKVKTICRDFTRGKCSRSANECRFLHHSSVEDVAIVCQDFLRGQCNRIACRYSHVVAHPMPPMNHVPMPYPEMLYMPPPPPPPLGVPMMGPLPSPPIPFADNTNRVEVCRDFLKNMCNRESCRFVHPETHTTAVNANVEVCRDFKRGECNRSACRFFHPHTS

SEQ ID NO: 62900 - protein, 950 aa, Zea Mays
MSRFLSPSSPSNPLPLSEKKVILSGVQAPTRSGPPPPPPNKLGHAQQLMRSLRGVLIPLVLLAGLAFRVDDGGAALLPLPPPALPASPSRLALPGGTPKDDGAAASRSTEVVTAGVRSTEIVAPVGPKKQSLRELLVRPQPARHEPSSLVSGEAKAETRSVLQFYDNGTIQLVDKLSQSPLWEIATGPPLSDHITTTESGPNYLIYPFNGNENMNGNSTELWEVYNGNSVRLPWKLEEFVARSPYIRDSVVTIGSKVSTVFVVDADSGEIIYRHSIPSALKELEGPGVEGAPSKLNVRTSDDSDNIIVLVRTDYSLSASDLGNHLFNWTRTSFTANYYVKYKHPDMLDQSSCLQGDIPCIRTEGLPLALPDLNSANVIVLKDGTPFVSMHGSDALEPVQTPRKLPNTAGKSNILLDDSQNQTHDVARSHAISADPEATLNPTRNTSGWLFPLFPIFLVTGYLLSLISASKSCRQFMIQLIEPFTHNKKTVDIRGRSEGTPKKRKTRKKDGLVNSSETLTASDKECSDTGGSTEAPMKNSALTDALGGRQIGKVYVSNKEIGRGSNGTIVFEGSYDGRQVAVKRLLRSHNDIAEKETRNLIISDHDPNIVRLYGCDHDSDFVYISLERCHCSLADLIQKQSYLSSGESISNNEVSMSINSKISNVKGIDVELWTQDGLPSAQLLKLMRDVVAGLVHLHNLGIIHRDLKPQNVLISAEGPIRAKLSDMGISKHLQDDMTSVSHHGTGIGSSGWQAPEQLRHGRQTRAMDLFSLGCLIFYCITKGKHPFGEYYERDTNIVNNRFDLFVVDYIPEAVHLISQLLQPNPETRPTAVYVMHHPLFWSPELRLSFLRDTSDRIEKTSETDLINALESIGPVAFGGKWGEKLDAALVTDMGRYRKYNFESTRDLLRYIRNKSGHYRELSNDLKVCWCCTLLCSILSCCMNGVKLLISC

SEQ ID NO: 62901 - protein, 471 aa, Zea Mays
MDFSTIREKLLNDSYSKLEQFEDDVFLLTSNAMSYNSADTIYFRQARSIEALAKKDFENLRQPSDEEEPKPPARRGRPPKNPKTEGDVSPDLSNVKANKPEDNVDTFRKRSTGDRTRNTNTPMKDLSSFHDTFGSFSAKRTDKIGDYSGSSKWGKKPVSLDDDRRSTYDQHYSRNSSLFAALDDERKLLVPVGVQQPHAYARSLARFASKLGPVGWDVAANRIRRALPPGTSFGPGWVVDGEPPQNSQWAPAASTNPSSEPTAPPNMPSKNDVLDHKSGPSSNGDVTGEEHLTRTQTVASTSTSFDKSSDISSKVTKLENGVTESCGGTDNTGSAAPPMQQHSHSREIHSNINGFTAMSNAMSQYAGQGLFGSGIHMTHAQVLGMFSGMNGKVNGYIHRHPVTADSLKTAGQNGDVGKATVNPVQSAGQDPKTATENSSAHPGLNSRAQSSGSSPRGKLTNPKHPDLALQL

SEQ ID NO: 62902 - protein, 339 aa, Zea Mays
MTADGKIAASSGHASWISGKASRGRVFELRGRSDAVIVGGNTVRFDDPRLTARHVKGHVPVRIVMSQSLNLPEEANLWNLNDAYTIVATQRGARRDFQRKLAMKGVEVVEFDMLNPRAVMSYCYDRGYLAVLWECGGTLAASAISASVIHKVYAFWAPKIIGGLNAPTPVGELGMSQMTQAINLIDVSYEQIDRDMLMSGFIEPIPDLSPVIPSVEEIPSIDPEVSPYETNIISFYKTWDIFGAFSNFSPHSIQMPDENGDYFTWPTVEHYYQAHKFVGVDNPQARDIVQEIKLAKSPEEAARIGRTRQKGFPELVCPIIVFRPVQWWFRTGLDIWPAS

SEQ ID NO: 62903 - protein, 176 aa, Zea Mays
MPEQTHRSSPNPIPVAIRISGAAMAEKESNGVRVCVTGGAGFIGSWLVRKLLEKGYTVHATLRNTGDEAKAGLLRRLVPGAAERLRLFQADLFDAATFAPAIAGCQFVFLVATPFGLDSAGSQVKLAVAFAPFTVLLVNEWSGGDAPCCLFLILSCGKLLSLQRKNLIRLSMSKDQ

SEQ ID NO: 62904 - protein, 136 aa, Zea Mays
MSPQLAIERQVTDGGFQGRRNKLSDTCYAFWVGGVLKILGAYHLIDSCALRSFLLTCQSPVIDLRTSSISLIPFSDSSGYVFRSLLQQYGGFTKFPDDRIPDIYHSYYGLAALSLLEEEGLEPLCVELGILSAAAL

SEQ ID NO: 62905 - protein, 63 aa, Zea Mays
MNKPSCCQISCFSALGCVLWYWSTMVAQCLSYKKIFVACYILPDSSSSTRLGLFSLARKASPT

SEQ ID NO: 62906 - protein, 108 aa, Zea Mays
MTPEAALDHVRSIRPRVLLAPSQWYVTQVDLKLFFESICGELKVCRNGTIKIDLETNKIMDFIKFDVGNVVMVTGGRNTGRVGVIKNREKHKGSFETIHVLLGAFCYV

SEQ ID NO: 62907 - protein, 179 aa, Zea Mays
MGSEELETALMEMVEHDNRRMLSAKVEKLETEAYELRKAFSDKQEQEQVMLQILLRMEQEQKVAEDARIAAERDAAEQKHAAHLLQEKYEAAMTALSQMEKRAVMAETMLEATKQYQVGQVKANQSFTSSSPRADHVPAKINQEPNQTAPIRRIGLLSRGLGWLDKGKGRQNSNETSGA

SEQ ID NO: 62908 - protein, 444 aa, Zea Mays
MEKSATTGGGSSGGGGEAAEEAKVPLLQPRAAAAAAAAEEDHGGGGGYDGKAARVGGEQEAVGGGRAVHLHALRVVRRHRHQPGLHRPHRRHRARRLRARLHRPHEVQQRHPAGHGERAGDAVRAVVRGEAVPHAGHLPAAVVDHPVGVRRGAAPRVPVHGAAAGGAGAGPGHLGGGGDRGALLAFVFFGGCPLTWTGFSSAAFADLGAIVRLSLSSGVMLCLELWYNTILVLLTGYMKNAEIALDALSICLNINGWEMMISIGFLAATGVRVANELGAGSARRAKFAIYNVVVTSFAIGLVLFVLFLFFRGSLAYIFTESQAVAAAVADLSPLLAFSILLNSVQPVLSGVAVGAGWQGVVAYVNVTSYYLIGIPLGAVLGYVVGLHVKGIWIGMLLGTLVQTIVLLFITVKTDWDKQVVAAQERLKKWYMEENRRMQASRGNP

SEQ ID NO: 62909 - protein, 863 aa, Zea Mays
MGKRSQKRLIRRHQDGSIGCMAGLIRMFYSRHDANKLLLDRKQPGSRRHSFSAFSGRRGHSRKNSKDLDEIDEYGDYNMEEPSSSKPTVKRLMEDELRKLKQLKLPNDEVERILADLGHGACLDKSSAQNSKAKKGDQNHIRDFLGRIHRNCNNNGELCTEMKALIQTKIAELDNPPCTFAYEQQTSRGDEYDTAGGKHRCSSSKTQPKKFRDALEMLSSDTELFFQKSNSRILESAQRNQNRLIGNNLEPTKIADNTDSNKDPKSLNQHELATRRYGKESRNIFFWKKERSSPRQTAQGTSSSQPVNKIVILKPNPRREIGHAVAVSSTQAPKLGATESSKFSIKEVRRRFRIVTSEATKGIPSVSEDNLQKGQHWLNSSAFTIIKDTRQLAEQTSEGKFSSSVMKDFRSSNSGRQKKRKNDGPTEKNSSIITSSKDESVFYDEARKHLTEILKDKRQTTKQHPTLEISRSLVRMLSFPQSSTSSPRSSPRAKDCIYLSPEEASIRAIYKSNKDLLEEESQSGEFPENVVCDPSEALHEQAVQERWCVKEESQETTQEGAELDTLRTKEIDKLDCMGKNSNAWGTPAKQCTYKPSQDMVGEAEPGQRHVRTFPSSPENDFEKLECQEPTTPRPSAQIEQISQFSPDGNHEKQEQPSPQSVLDVFFLDGELHKDILRTRYNTTGDGSDQGIFWEDKHPRLCYIKELLELSELCANQNLEVWYLEDELISPCLFEEVHGGNQIDGTKLLFDCICEAVTEIQDIYFRNPPCLSSLTHSIRAPPPAGQNLISEINKRVERHLHYRFPSTLDQLVNMDLEGGSWMDLGSESGEVAVVIWDCTLDELLEELVYDLWISGFNLAAGNHL

SEQ ID NO: 62910 - protein, 154 aa, Zea Mays
MGRTAYVTPTPRNFQVGIGGDQVPSNQLGRSEPHHAGLGQQPHGPVLATKTAVPATAFLISRPSNPVSTIVPPAMQHASVVLDHDQFHVPAILLHHHDKFQPQQKLDRRSAGLEELIMGCTSSTSTKGDASIAHPQETEWPYTYWPPDNQDHHG

SEQ ID NO: 62911 - protein, 128 aa, Zea Mays
MAPNLLENDMDLHFDLLSLHFIELVRSKKFTEALDFGQKKLTSFQKVTKYIEKLEDFMALLAYEEPEKSPMFHLLSPEHRQNVAEGLNRAVLAHANLPAYSSLERVVQQATVVRQYLQQEVGKAFLSK

SEQ ID NO: 62912 - protein, 885 aa, Zea Mays
MEHLNLSSNGFTGSVPRAIAAFTKLRSLVLDTNSFDGTYPGSAIAGLSELETLTLANNPFVPGPIPDDFGKLTKLQTLWMSGMNLTGRIPDKLSSLTELTTLALSVNKLHGEIPAWVWSLQKLQILYLYDNSFTGAIGPDITAVSLQEIDLSSNWLNGTIPESMGDLRDLTLLFLYFNNLTGPIPSSVGLLPNLTDIRLFNNRLSGPLPPELGKHSPLANLEVSNNLLRGELPDTLCLNRKLYDLVVFNNSFSGVFPANLADCDTVNNIMAYNNLFTGEFPEKVWSGFPVLTTVMIQNNSFTGTMPSAISSNITRIEMGNNRFSGDVPTSAPGLKTFKAGNNQFSGTLPEDMSGLANLIELNLAGNTISGAIPPSIGSLQRLNYLNLSSNQISGAIPPGIGLLPVLTILDLSSNELTGEIPEDFNDLHTSFLNLSSNQLTGELPESLKNPAYDRSFLGNRGLCAAVNPNVNFPACRYRRHSQMSIGLIILVSVVAGAILVGAVGCFIVRRKKQRCNVTSWKMMPFRKLDFSECDVLITNLRDEDVIGSGGSGKVYRVHLPARGRGRGCAGTVVAVKKLCSRGKAEEKLDREFDTEVKILGDIRHNNIVSLLCYISSEDTKLLVYEYMENGSLDRWLHPKDNAATAALDWPTRLGIAIDAARGLSYMHDECAQPIMHRDVKSSNILLDPGFRAKIADFGLARILLKSGEPESVSAVSGTFGYMAPEYGRGAKVNQKVDVYSFGVVLLELATGRVANDSSKDAADCCLVEWAWRRYKAGDPLHDVVDETIQDRAVYIDDAVAMFKLGVMCTGDDAPSRPSMKQVLQQLARYDRTASVAGACQDDRGVELGHLPKGKQGRHQVAKRSLDAGSFLGGDEESGNFVAHPV

SEQ ID NO: 62913 - protein, 394 aa, Zea Mays
MEQDQSPAVDSADSGAAAFDFATGNAPSSAVTSGSAVAPDGGAQAADTSAYQAEHTELNGTTGDMSNYQSAGAAENGTAVTEIGEPVPEPSYEEAVLSAEEARLWSVVTANCLDFNAWTTLIEETEKNAENDILKIRKVYDSFLTEFPLCFGYWKKYADHEARLDGVNKVIEVYERAVLAVTYSVDIWYNYCQFAISTYDDPDIVRRLFERGLAYVGTDYRSNILWDEYIKYEESLEAWSHLAVIYTRVLEHPIQQLDRYFNCLKELASKHSFSEILTAEEASVYVVTSETSAQAPDGDTHPDDIDKAGQPELSSLADAENLAKYVSMREEMYKKAKEYESEIIGFELAIRRPYFHVKPLDNPELENWHSYLDFIEKEEDINKYLDEASFVMGC

SEQ ID NO: 62914 - protein, 54 aa, Zea Mays
MRTMDVMEFYSLLRIFPIQTRRHFWRCVMRNVLRAFRLLGSSARTVLLFDRRHR

SEQ ID NO: 62915 - protein, 760 aa, Zea Mays
MAMQSKTLRSNLPLKSTIAEWITRNEATRVRIARTALSMATTEAMVLEAIHELKVLARLRRKNRDQMHKIGITKFLARLLDHKDALIRCDSLDLLCLLVEDDTGKEIIAKTRAVSRTIKLLSSSSTDERHASISFLLELSKSELLLENIGSTAGSILILTTMKFNSSSDPIAAEKAGEVLENLEKCPKNIKYMAESGYLDPLQRHLVEGPEDVQMEMVSYLGELVQKQEMTINIAGSASEILIKMVCSGNTAIRKATLDVLVQISSHHPNAKTLVDAGAVPVMVEELFIRKIDDEPMGSKTEAAAVLANIVESGLDPEAITVNKEGHVITSKYSVYNFAHMLKCSMPDTLNLSIVRVLLALTALPKPLATVVSVMKEQDSGQTVIELMGSLTESLVIAAMRLLIALSPQMGHTIAEKLCKAPGQPGRLVKSIGLHGRIMERHAMSATLLAKLPYQHIALNLALINQGAMVTVLAKIEEMQRGETRASRHAKAYMEGLMGVLVRLTTTLYDPDVLLAAMDHNLTSVLTDLVRSAGSDEVQRLAAIGLENLSSQSPNLSQPPTEERRPKKKNILRRLREAHAGRVHDNRRPPAHSRVCPVHRGVCSPSTTFCLVEAGAVEGLLCVLESSENGRVVEAALGALCTLMDDAVDVTSGVAVLAEHDAARHVLRALRQHRDDGRRGGGGAAAGETVTRRCFWAVERFLAHGSERCVREVTSDRALPSLLVGAFHKGDAATKQVAESVLRCLHRMPDYSATYESVEL

SEQ ID NO: 62916 - protein, 94 aa, Zea Mays
MGPQGKWERCCLWLGRYYSLVLTSSRSASKVSFRVWSLHKLLQCQMAQPHRIRSLQDSRSEALPSKISSLAGGEDVLSLQIHSFVDRRKRLFIY

SEQ ID NO: 62917 - protein, 98 aa, Zea Mays
MDEHPGGDEVLLAVTGKDATADFEDIGHSDSARDMMEKYHIGQIDASTIPAKRTYVHPQQAPSHSDKNNDLLIKILQFLVPIMILGLAFGIRQYTKSE

SEQ ID NO: 62918 - protein, 634 aa, Zea Mays
MMSSGSSGISSEPKRHLLTTGWSVFVSAKRLVAGDSVLFIWNEKNQLLLGIRRASRPQTVMPSSVLSSDSMHIGLLAAAAHAAATNSRFTIFFNPRASPSEFVIPLSKYIKAVFHTRISVGMRFRMLFETEESSVRRYMGTITEVSDADPVRWPSSYWRSVKVGWDESTAGERPPRVSLWEIEPLTTFPMYPSLFPLRVKHPWYSGVAALHDDSNALMWLRGVAGEGGFQSLNFQSPGVGSWGQQRLHPSLLSNDHDQYQAVVAAAAASQSDGYLKQQFLHLQQPMQSPQEQCNLNPLLQQQILQQGSQQQMVSPDAQNIQSVLNPNAIQQQLQQFQQMQHAHNDQKQKIQPDQPYQVPSSAVLSSPTSLPSHLREKFGFSDPNVNSSSFISSSSNENMLESNFLQGSSKSVDLSRFNQPVVSEQQQQQAWKQKFICSQSMSFGGSVSLNSPTTKDGPVDNKIGRDVQNQTLFSPQVDSSSLLYNMVPNLTSNVADNNISTIPSGSTYLQSPMYGCLDDSSGLLQNTGENDPTTRTFVKVYKSGSVGRSLDITRFSNYAELREELGQMFGIKGQLDDPDRSGWQLVFVDRENDVLLLGDDPWESFVNSVWYIKILSPEDVHKMGKPGNDPRYLS

SEQ ID NO: 62919 - protein, 411 aa, Zea Mays
MRLWILPVLIVQLQKTAEIGEVFRKVSTSLPPPQPGSNFREQYTLFQKKKKELGCPSFIWNFAYFLVQFPCFILWMTSIRSMCLNNHPGFDNGGILWFHNLTEFPHGTLAPIFPILVAGLHYLNVQISFQGSQIKDHPGIFGLLAKGCLVYWTTNGLFSVAQQLSLRNDAVRKLLGLPDTRAQVGYRAQKSPLEVPEMMQWSQLEDANLQTKSMPSDKGTASESTTPNFAMGSMDGNISASSSPEELLEQALQYLGTGCRDQAIPLIRTAVERNPDLYTALIGMGQTLFSNRLFPEAAVCFEHAIPKIQEDDPLLVLAYFGAGLSNKRQGDNETAIKLLERLAELKEPEKPINKSRYFQGMLALASILYREGRNSEAAKYLRMAIAYDPSVERLLKECEEGMDDQPKPEEK

SEQ ID NO: 62920 - protein, 347 aa, Zea Mays
MLNDKGNFSQRGHLQRPDHTDMRYKFRTYARLLQHIKSLDKSCMMPLRKAYCHSLNMIIRRESRDFSNELRNSSKASKSSTPLFEGPAGANQPASITDSPADAYSKMITVFVPLLVDESAFLAHFMCFEVSALPQSDASSSNPNAESTITSSVALEASASIGKTSNNPAEMGALNECIQELLDGIQEDFYALVDWAFKLDPLSCISMHGLTDRYLSGQKAEVSGYVQVLLDDLETRITILFSRFVDDACYQIEKYERNVRQIGVVPYIPRFSQLAARMEQYINGSRDLVDQAYTKIVTIMFVILEKIAQVEPKYVDIVLLENYAAFQHSLYDLANVVPTLAKYYSSS

SEQ ID NO: 62921 - protein, 62 aa, Zea Mays
MFDIRHHFKAKLLSFGGSFGIRHRCFQTVSSSRGSSTERDRERPQNYFANDTFVLRTFGGEE

SEQ ID NO: 62922 - protein, 130 aa, Zea Mays
MAPPPRRNPPHQNPTRRKVLVVRQDLKMGAGKIASQCAHAATGLYAELLSSNRGLLRQWEQLGQAKIVLTCKNQQEMNRLKETAEHRGIPTFIVADAGRTQVLAGSKTVLAIGPGRKADIDSVTGKLRLL

SEQ ID NO: 62923 - protein, 578 aa, Zea Mays
MLRYEFAKHAPLKDIRLVRDKFTHVSRGFAFVHFHSVEDATKALEATNGITLEKNGQVLRVAYAKSTHGPASGGSQSNSLAAAAIEAASFAQQYDAIGWAPKEYNPDDKQNSNFESQKDDGSGTAQSGFVWDEKSGYYYDSASGFYYDGTTGLYYDSNSGVWYSYDQQTQQYVPCTDQSNTKAAGETSSENMISDSICGKKVVISAPAATIKQNKKTSLPDAVQAAANAALAAEKREKEKAKEIKLASKSSLIANKKKMNNVLAMWKQRNQEGQAARIVIDDKEPPNSDDRFNHSHSGTGFSSKSKPNFEFENAMDNSVRQGIASTQMLDSDVKPRPVSNSLGTTVMGVIRGSTRGVIKSDTTFHALSDAGSTDSRTTIITRSNGLMTSPVELVTPAPYKTDVSALVSNTSSGVSGSGKRRFSEAPGQSQYRDRAAERRNLYGSSLRTDAVGLDSTGHYPSRKGPSEIGSMPFPPGVGERSNGEIGNNENYEVITADSAIDESNVGNRILRNMGWQEGLGLGKDGSGIKEPVQAKSVDVRAGLGSQQRKADPILEAKAGDSYKTIIQKKAMARFKEMS

SEQ ID NO: 62924 - protein, 324 aa, Zea Mays
MNARRVHMFSPGGHIHRWMLMLSRNGIKEIQIKTRIWRNYKIPSSFFSCVELEYACLQGCIFQLPPLFAGFKRMRTLHFVEFCATENNIGELVASCPNLEELILSRLLSFADITIHSTKLKVLRVDGMFKHLNLVTPHVSSAVINLQVNTGYVKRAGSNFNLSQFIGSLLDIENISLLGHAFECAAHGIVPGKLPRSLNRLTEITLELDLGNLKEANAAHCLFQIAPNLRRMELQLMHRGYSAPTSSFWDSVDRQDCLFKNLYTVVMNNFTGSCAESGFLKLLLDDAPVLRSARIEDNNKLDKESLKRLLKMRRASKDAEIILL

SEQ ID NO: 62925 - protein, 270 aa, Zea Mays
MRGWATPGTSRRKNPSNRATGRRRRWATAAHGRRMPSSLRTRKPSKNANADRKHTCMSSDISDPSTPRKVEDAKNISIYNDVIAFTLFELETITKSFRVDYVLGEGGFGTVYKGYIDENVRVGLKSLPVAVKVLNKDGHQGHREWLTEVNCLGQLRHPNLVKLIGYCCEDDHRLLVYEFMFRGSLENHLFRKTATPLPWGTRMSIALGAAKGLACLHNAQRPVIYRDFKTSNILLDSDYTAKLSDFGHPQPQVHACCPGLQSAVMLLRFG

SEQ ID NO: 62926 - protein, 595 aa, Zea Mays
MDQAADSSELLRRIEELQREKDEKQNSLELLLRRIEGLQYEMDEKVDLVEVLTRQVENLQRERDELRKDIEQLCMQQAGPGYVSVATRMLTQRTAALEQDIENLQKKLGGCLRENQNLQEELAEAYRIKSQLAELHGAALSKNKDLEKQVRFFQSSVAQAFAERDSSLMECEKAKEREEAVSRKFADFEERMREYQSEIDEQKHLNDDLQRELTELKAHTELSLKVILKFYDLRCRDSGCSSSLTIEEKCSILLGDSADNWSFSSDGGTSTLKYIASLEEEKESLKAKISKLQSNLRMGLEIEQHLQRNARILEKRQALYDGFLRNGLSELQKFYTCQKAEIMKILEEESLRLMKVVAEIQDKLTEICINTEVSDHPADEIQCCDSSCKDVHVTKDISPSTCRKSDYPADLNSVSFDESKALAQALQEKMEALMLFSQEQERYLLEKQRDLIVIEELQKNLSQVKDEKVKVLMELTKLKEQYLLLKGSAVKEGHDTGDSSKLIPGHDQQGMLKTMLKRTSLRHWMRKESNTIGHGSSDGNDHTVCKEHSVDVARLRVENAMLLEGVGTVEHLTSSVHRLHIVLLKAGQDFFWLYY

SEQ ID NO: 62927 - protein, 573 aa, Zea Mays
MGYEESKKHLLSLSYPELQCLCKRYNLPAKKTHSQLASSLASLLEASPSPAPPPVQLANMKEASTCNHANNKRGPYNGRDDGKPLVHAKHQKGDQTPVDETSKKGIDTGTSIPPVSMNHGRPEYHGHLSSDLRTAHNLQSQCDVGIATNTTNLEFVGKHDCSPANVIDQICPPIIQKYPSNGNGQASTKFGRMNDNTEKGCRLSDKISANAAAVQFSVMSDEGIDLLVDLNSSSATWAKNFMAEMHITPPSEHGNFSSFISSLSTKDDHSTASPSGNIIVDIQNKGAENIVPSTDSSLASDVGESSRSVLYPVDTTTVNSVSSTSTVAGTPVELSGYQEGAPVVCSSCLTADVQNNVTSDMPGASDNEVLPPEPADVFLQSERITAPAVCGSVQPIGNKCTMSSGDEVRSGSNEDSCPKSSGKQTGDETLMENEPVKAVAVEENIGRDDSLSISYQLACKTVAELPVTDAQSPASSSGHFIAGNFDNTHPTSSATSDNAINSLTSKFGAELAQSHDSTDKKGQNDAEEVEELESMTPAAYSEPPRNIQLSLRSASAKVKPSTLPRRSARLLPK

SEQ ID NO: 62928 - protein, 265 aa, Zea Mays
MFSMCSTAGCPFGASCHFLHNFPGGYQAVSKMTNLGGPPVPAPPGRMPMGPGGPDGPPSPAVKTRMCNKYNTAEGCKWGSKCHFAHGERELGKPLQMDNPMGPPPMGPGPNGHFMPPPMPFPDMVPPSTFGASATAKISVDASLAGAIIGKGGTNTKHISRVTGAKLAIRDNEADPNHKNIELEGTFDQIKHASAMVTELIVRISGKPPPQAKNNPGRGPGSHAGGPGSNFKTKLCENFNKGSCTFGDRCHFAHGEGELRKPAAA

SEQ ID NO: 62929 - protein, 317 aa, Zea Mays
MSAMAAAGEAEYGECVQKGSLQQHQAPQPSPGALFYTHDGVAVYRNPVMPAFYQQPAGSNVVVPAAPGPAHSPASSEPFKRKRGRPRNPQSGGVVSRQASPAPAPASGAPDVKKRGRPSGPSSKKQQPQAAAPGPGWTGLKPHIFTVQAGEDVASRAMSFSGNGWAVCILTANGTVSNVTLRQGESSGGTVTYEGRFEILSLAGSYLLSESTGMSSRTGGLSVSLASPDGHVLGGAVAGPLTAASPVQVVIGSFLADTKMELDPGSAPEKHVFSRFQTTSSPSRGTESSGGHASPPNTTGSFSTSTQPGFPSFPTWK

SEQ ID NO: 62930 - protein, 61 aa, Zea Mays
MAPFMHPTVIPLEIRATALYPLEFCAFVSNWFDGFEFMIPKYNGRCLNSYWKMGNLSARHV

SEQ ID NO: 62931 - protein, 698 aa, Zea Mays
MGAGRPVPCRRGARVFLRMVDACMHGRHAGPTRIDKWKRMGITSNDAAPRAVLLRFLFLLCIGCKCLASEVEATQTATLAVDASPQLARKIPDTLFGIFFEEINHAGAGGIWAELVSNRGFEAGGLHTPSNIDPWSIIGDDSSVFVETDRTSCFSRNIVALRMEVLCDNCPTGGVGVYNPGFWGMNIEEGKVYNLVMFVKSPETTDLTVSLTSSNGLQNLASATVTVSGESNWIKVEQKLVAKGTNRTSRLQITTNKKGVVWFDQVSLMPEDTYKGHGFRTELISMILDLKPRFLRFPGGCFVEGGWLRNAFRWRESIGPWEERPGHFGDVWHYWTDDGLGYYEFLQLAEDLGTEPIWVFNNGVSHNDEVDTVAIAPFVKDVLDSIEFARGSANSTWGSVRAAMGHPEPFPVKYVAIGNEDCGKKFYRGNYLKFYNAIRQAYPDIQMISNCDGSSTPLDHPADLYDFHVYNDSKTLFNMKSTFDRTSRSGPKAFVSEYAVWRGDAGRGSLLASLAEAAFLTGLEKNSDIVSMASYAPLFVNDNDQTWNPDAIVFNSWQHYGTPSYWMQTLFRESSGAMFHPTTISSSYSGSLAASAITWQDSENSFLRVKVINFGSDAVTLTISTSGLQASINALGSTATVLTSADVMDENSFSNPTKVVPVKSDLSNAAEQMQVTLAPRSFSSFDLALAQSKLVAEM

SEQ ID NO: 62932 - protein, 298 aa, Zea Mays
MHQGYPKETLVRFLKAREWNVPKAHKMIVDSLDWRIENEIDSVLERPIVPVDLYRSIRDSQLIGLSGYTKEGLPVFGIGVGHSTYDKASVHYYVQSHIQINEYRDRIILPRLTQQFERPVVRCIKVLDMTGLKLSALSQIKMLTSISTVDDLNYPEKTETYYVVNVPYIFSACWKVVKPLLQERTKKKVKVLSGCGRDELLKIMDYSSLPHFCRREGSGSSKHSSADVDDCYSLDHPFHKELYDHIKEQASRRELIKMGSLHVSIPEPDPEDAKIVEVIQAEFQKIGEQDESTTGHKD

SEQ ID NO: 62933 - protein, 1704 aa, Zea Mays
METRSRKRAEASSSSATSSSRSSKRSRHNPNPNPPAGPSPAPKLVPLPPRTRRSTAVNPLPPMDSSGDNNSNPVPPPRRRGRPSNTDKVVHYGAVPCFCARLLTIEYMDLAEQSLQALKKISLEHPTACLRAGALMAVLSYLDFFSTGVQRVALSTAANMCRKLPSDASDFVMEAVPLLTNLLNYHDSKVLEHASVCLTRIAESFSPFPEKLDELCSHGLVAQAASLVSVSNSAGQASLSTSTYTGVIRLLSICASGSPLAAKTLLLLGISGILKDILSGSGLVAGTTVSPALTRPADQMNEIVKLADELLPSLPVGTISLPVYSGVHMKGCSVKKSTSSKQGEHGSTANELSGREKLLRDQPELLQQFGMDLLPTMTQVYGSSVSGPIRHRCLSVIGKLMYYSSAEMIQSLLSTTNISSFLAGILAWKDPQVLIPALQIAEVLMEKLPEIFLKMFVREGVVHAVESLICPELSGQVTPHVDSITSSHNRRNRRRNNAVNTGNNLPDGPKGSNSMIANSPPSMAEVPNNSLRALVSNHAKSFKDKYFPSEPGSSDIAVTDDLLKLRALCAKLNTTADTIKTKAKGKSKVVSDNSFDVLCNIEEQLDDIIAEMLSELSKGDGVSTFEFIGSGVVTALLTYLSCGTFGREKVSEANIPNLRHQAVRRYKTFISFALPNDKDGNKTPMAFLVHKLQSALSSLERFPVVLSHSGRASTLGGSRLTTGLGSLSQPIKLRLCRAPGEKSLKDFSSNVVLIDSLASLAAVEDFLWPRVQRTEPVLKPPMSSANNSGSGAASSTACAPSIPSETQSVRRTSLRSKSSAATSGAIKKDYQEGSINTSKGKGKAVLKLSLDEPKGPHTRNAARRKATSEKDVELKPSHGHITSEDEDLDASPVEIDDALILDDDDEDVPDDEDDDHEAVLRGSLPSCVPERVHDVKLGDADDSSVASLANDNQAQPSSGSSTKNTSSRGLDTAEFRSPATFGSRGAMSFAAAAMAGLTPVGGRGIRGSRDRNGLPLGARATEHYNKLIFTAAGKQLNKHLTVYQAVQRQVVHAEDDEDRFGGSDLPDDGNHFWDDIRGDVFTITYQKADNTAEKGSVGGSASVPKSSKSDSCRTLSEKQCTSLLDSILQGELPCDLEKSNQTYNILSLLHVLEGLNQLSPRLRLQSACDDFAEGKVATLNGLYDVGAKVPSKEFINSKMTPKLARQIQDVLALCSGSLPSWCYQLTKACPFLFPFETRRQYFYSTAFGLSRALHRLQQQPGNDNNTAFEREVRIGRLQRQKVRVSRNRILDSAAKVMEMFSNQKAVLEVEYFGEVGTGLGPTLEFYTLLSRELQRVDLGLWRSHSSDNSGMQIDANADDLIRSKNHESESLTESRNIVQSPLGLFPQPWPPTAAASEGSKFFKVVEYFRLVGRVMAKALQDGRLLDLPLSTAFYKLLLGQELDLYDILSFDTEFGKTLQELQILVARKQFLDSCSSESQKIDLCFRGAPVEDLYLDFTLPGYPEYVLKEGGENAEVNICNLEEYISLVVDATVKTGIMRQVEAFKAGFNQVFDISSLQIFSPQELDYLICGRCELWEPETLPEHIKFDHGYTSKSPAIINFLEIMAEFTPEQQHAFCQFVTGAPRLPPGGLAALNPKLTIVRKHSSVANNNSNATGATESADDDLPSVMTCANYLKLPPYSTKAIMLKKLLYAINEGQGSFDLS

SEQ ID NO: 62934 - protein, 246 aa, Zea Mays
MLAGAPVGGSGPHVVQIADIPVKQTTSSSSREQSDDDDMEGDAETNGNGNPVQQRQQRRKQSNRESARRSRSRKAAHLNELEAQVAQLRVENSSLLRRLADVNQKFNEAAVDNRVLKADVETLRAKVKMAEDSVKRVTGMNALYPAVSDMSSLSMPFNGSPSDSASDSTVPVQDDLNSYFANPSEIGCNNGYMPDIASSVQQDDNFVNGYQAAGKMGRTDSLQRVASLEHLQKRMCGGPASSGSTS

SEQ ID NO: 62935 - protein, 1285 aa, Zea Mays
MSIYLAPLLLWVHFHTIYMLLSFVSNVESDLSHGEHKIQKHGDEKGSRLTTSTTMSSSGSLKVQISLAQARIVLCFPSEFSWDLSHPSVLDKFLVIDHTSCLNMVETASHPQNEMQNEVHLSKSCTSIHLAVGDIDVYLVKPVNNVLVGRICSSSRQTFSAMKILSVTGSSYNDSGITLIRRKYPVTGPEILNNAWSLPKMHDEKITKNQNSKWAGISPSSNDLLETGSSMRQELLKSTELLFHVQLSCVSLRLSKKDCELLNKLLDHVIKGISNEQTSISGNSKDQSVLINDTFIQTSVLFECSILEICTELNETVEVGPLLQAELKGSWNSVKLNVSKFCLFSCSNVGGLNNASFLWVNHGEGELWGSVSAKNDKIPGESKDFLIVACKDSACRRGDGEGTNVLSIGAAGCSVTHIRNPKLKENYTSVDVRSGTIVAPGGRMDWINAICLLFSSGSDRTEKSDDSNTPNSYQSGEPYSSSLFIELADVAVSYEPHFKHSTLSAGAADRKFFSCLLAASSFKLHNKSASASAATDFDIQLRDLGVLISQSSGSTNGTCSYGVDYLRQAGYTKVVQNTFIEASLRLDSSFWKLEISDSQFDIGTCHDTTYGLIGLGSQLQQLYGPDMQDALDHLQSRWNSVQQANKQNMAADASDKSESSLEILVDSGDYQSDGLLDDIIENAFNTEDCMDTNFWENNYHHLFSSSETDDGFELNAATSHVFPISTPEGNVTQISLEQNVCPDQIIDSYCVPEFHQSLSTLCDEEHKCTSGDNSHRTLESEDAGWYNNVPLTIVENHVLKKKNEQVLQHKVSSVCSLNPDEYCNLKGKVHIHDIDVKWRMYAGDDWLLPQKDLTSLTCTDGRNRSSSLEFTVRGLNIQVDMYPNGDVSISRLSVAAEDITLCDQSIHAPWKLVLGCYNSKDYPRESCSSAFRLELESVRPEPQAPLEDYRLHLEILPLQLHLDQEQLNFLINFFKNDSCNNDPHLHCENDTVDVKSTSNGSNMVVDEALLPFFQKFDVKPLILHINYIPRQFDPIALSKGNYAELLNILPWKGIDLKLKHVSAMGIYGWNSIGDTVAAEWLEDISKNQVHKLLKGLPPIRSLVAVGSGTRKLVSLPIKSYKKDRKLLKGMQRGAVAFIRSVTIEAVGLGVHLAAGAHDMLVKTECALTTVPPPLASCEVKRTKHNIRANQPESAQQGMKQAYESLTDGFGRTSSAIIGNPIKVYNRGAGVGSVLATAICGAPAAAVAPISASARALHYALLGLRNSLDPEHKKESMYKYQGPSQA

SEQ ID NO: 62936 - protein, 227 aa, Zea Mays
METANGKVLLDFIRQINDDNGPMEEQRERYGPALYTLTKLVLAIRLYLHVSLARYGQRKIEKDDAAVLQQAVVIYTKEFLKFTEFIGEVFVNAPFFISAEDAGAVDARKSDEYKETIIPAGKTHEVILSVEAVNSYIAWDFSLQQGALNMVLDIGFHVEYISPSGEKTLILPYRRYEADQGNFCTVSSGSYKLVWDNSYSSFFKKVLRYKVDAVPPVVEPALSATEL

SEQ ID NO: 62937 - protein, 96 aa, Zea Mays
MGRLFLMHLDGNVYSCKHCRTQLGVASDIISKAFHCRHGKAYLFHKVANVTSGVKEDRMMMTGMHTVSDIFCVGCGSIVGWKYAAHEKSQRYKEGK

SEQ ID NO: 62938 - protein, 527 aa, Zea Mays
MIHDAKIKFSDHSILRIVQMLGRYGNWKCVLQVVEWLQSHERFKSYKSRYIYTTVLDVLGKAKRPFEALNVFYTMQNQLSSYPDMAAYHCIAVTLGQAGLIKELFDVIDCMCSPPRKKFKLSPLQNWDPRLEPDLIVYNAVLNACVQQKQWEGAFWVLQQLKEKNICPTNSTYGLVMEVMLVCGKYNLVYEFFNKVDKSSIPGALNYKVLVNALWREGKIDEAVMAVKDMESRGIVGSASLYYDLARCLCSGGRCKEALLQVEKICKVANKPLVVTYTGLIQTCIDNGGMEDAKYIFNHMCNYCSPNSVTCNIMMKSYIKHGMLEDAKDLLHDILNCRIRSKADSNQVATADKFTFNTFMEACAAAKRWNDFEYAFREMLLNGYHFDERRHLRMVLDAFRHGKEQLLDDLWHYLCRHSRVPPSPVIMERFCLKLMQGDTLAAISCVSSFHEGKICNVSSMSWLNLLSRNADRLKEEHVTKLAHELNSLISLRSSSDSISLSLYQKIISSCTAFLSGATVVEKAPSGQ

SEQ ID NO: 62939 - protein, 281 aa, Zea Mays
MPLAAAAAAVAACPSPIGLTRSLCRIEAHPRRRRRFRLEANSSASTSAPAPTAADEGGGAGLCPVVRFDMADFTVADRVSVGLHGRSDEMIFEATVCDPSSELYGSTVVLRQLKSLQAKRRGRRALEVLKKLARRQMMYHSYALQVHGYIAPCNAVEEEDVPLVLVHGYHGSHSLRHWLQLSDWIPTLEATLALDEEQVRRVGDDSVGGPAVTRQLRLIRILMRDLLIGVNYLHSHGLAHTELRIENVHVSPIDKHVKGTQVFNASPRAKFNCPSEEDLIC

SEQ ID NO: 62940 - protein, 688 aa, Zea Mays
MPAHPTPPAARLSGVTSRRHAELLLHSGVDGVSVKDLRLRRIVPPAAGSLDTSPKCVSPVKPGSVDSTPPEAVSSAAAAAAGDLDRKLAPPRSKLVRDPRSFGYRRLLPFLNEMTKNNSSIGKEVFLQDTAAHPTDELSRSDSRLADESIGVSHSEPDAMDPVEPAVVSTGGDTDGKATCGNVMEETKTAPHDLTNKPLLARCTRSRFVHHPSSFSYKRMLPFLMEDEIYAQESGRVKIRKVAEERQFAANKHDASANGQQCLAVSDDSSQEGNRAQFKIVEEEKPLKADVNHILDDRQLKPPVIEASPDCSATEVQNVMQQEALASSQVPLTSFDGELTSDGDNVQSIGQHQLVVSEESQEECKRDEVNRSIHDEAVQSDGGYALDSREFQPAASEVSCSENSMAGVQGAAQEEPLPLDGVQENSDMGDDVSTEQAQLCVTSESLSAQLQNNAEFAEVLPCQDLDSGCHDIGFGSPTKRVVPSLHRHCAQQPQDSVVSHDDQLLDDDIQMVGRLSDPCAADRSSSMEEMSGRILFTQSASSKAAISWPSGAHSMEKRARSPKELSPKKGILKRSTRGCKGICMCLDCCTFRLHADRAFEFSRKQMREADDIISNLLKEVDSLRSLLEKHAGQAARRQACRVQEVARNRCQQMFADLNSHCRIPGPRVRFAEYVEEKAASSPRRSSRR

SEQ ID NO: 62941 - protein, 200 aa, Zea Mays
MLVVDACLLQYVTGVQNCSRGVVLVPVHAYALRPFVGSARSLALHSYSVPFSVLLWNVRSIRAPFRPDAPAWSAKANPIDRPAPGGEPRMHERATGAGPAGHLLSGGRARAVEWSSGSARGTERSGGGRRFCPAEEARHVHAWREGGHGRWRDVQDRTGPDLGGGGGGGARLFAMGAGRHHWPRTALHHPHRTAAPPPHA

SEQ ID NO: 62942 - protein, 190 aa, Zea Mays
MERERGASAALWGHAHLPLLARAGSKESVEYILQALWRTRRTGLDAADRTVARDALQLSSDAELDPDDIPKLFPEEVPPELQKLLTLLLQKFQPEWQADAAKDQEAALHSSAAECQSNQNGDTSEHRDAANAELQNGAAPVKGSLESGQKEVKKSPLAKDSLDKMLKDLFSTRDQMATDGRNTGHELTMG

SEQ ID NO: 62943 - protein, 631 aa, Zea Mays
MPPPLPPDPIEPCAPAPAMDVALPAAVVATILSRLDVRSLLLAAAACRGLRACASHALEVALTHELLRPLLPPNPSLRSLRLDCARLEDAAIACLARAGLHELLLLNCDNISGRLLCELGTTCRDLRVLSLNSLGARRGLVVNFSDLQELLNGCSQLENLRLALDFSTFDDPNFGRVWASASERLSSLEIGYIPMTMLLELLVAVTEGQQCMDYVKTPVFFPSLQKLCLAVDFITDHLIGSISVALPSLTHLDLQDAPIVEPNSSSDLTNAGLQQINPHGKLKHISLMRSQEFLVTSFRRVNDLGILLMADRCSNLESVCLGGFSRVTDTGFRAIIHSCSGLHKLRVSHGSHLTDLVFHDIIATSLCLTHVSLRWCKLLTNVGIERLSCNKDLNVLDLRDCRSLGDEAVRALSCLPKLQTLTLDATDISDQSLKYLGLGTCPLTSLSLRGCRKLTNDCITLLFAGHVKQSLQMLDLSRIPSITDDGIMLLARSRTPLIELRMRENPKIGDASVMALASMQIDGGTYGSTLQLLDLFDCGGITPLAARWFKKPYFPRLRWLGITGSLNRVMVDALSRSRPFLHMACRGEELGTMLWDTSSDWYRHNDDDLDELEQWLLEGEPVSDDDTIMEE

SEQ ID NO: 62944 - protein, 321 aa, Zea Mays
MTADRKAGEQFGSVFPHLITQDLPRLVAIKDADFSDVDAVFCCLPHGTTQEIIKSLPRHLKIVDLSALLKNYCLQDFRLRDINEYAEWYGHSHRAPELQGEAVYGLTELKRDDIRNARLVANPGCYPTSIQLPLVPLVKAKLIKLTNIIIDAKSGVSGAGRGAKEANLYTEIAEGIHAYGITSHRHVPEIEQGLTDAAESKVTISFTPHLMCMKRGMQSTVYVELASGVTPRDLYEHLKSTYENEEFVKLLHGSNVPCTSHVVGSNYCFMNVYEDRIPGRAIIISVIDNLVKGASGQALQNLNLMMGLPENMGLQYQPLFP

SEQ ID NO: 62945 - protein, 1184 aa, Zea Mays
MGSLTRVPAEDPAAAEEEWSDEAVIYVNGVRRVLPDGLAHLTLLQYLRDIGLRGTKLGCGEGGCGACTVMVSCYDRITKKSLHFAINACLAPLYSVEGMHIITVEGIGDRQRGLHPVQECLAKAHGSQCGFCTPGFVMSMYALLRSSKQPPTEDQIEDCLAGNLCRCTGYRPIIDAFRVFAKTDNLAYTNSCSEDAKDQAICPSTGKPCSCRNETDVNVNESSLSSSVERYSPYSYNEIDGSAYNERELIFPPELQLRKVMPLKLNGSNEIKWYRPLKLKQLLHLKSCYLDAKLIIGNSEVGVETKFKNAQYKVLIAVTHIPELNTLKAKEDGIHIGSAVRLAQLQNFLKKVVAEHDLPETSSCQAIVRQLKWFAGTQIRNVASIGGNICTASPISDLNPLWIAVGAKFHIIDVNGNVRTTLAKDFFLGYRKVDIKPEEILLSIILPWTRPFEYVKEFKQAHRREDDIALVNAGMRVYLQETERNWIISDVSIVFGGVAAVPLSASRTENFLTGKKWDSGLLDDTFNLLKEDISISENAPGGMIEFRRSLTLSFFFKFFLSVTHEMKIKGLLADGLHADHLSAVQPYSRPVTVGTQSYELVRQGASVGQPMVHMSAMLQAPQKHQKYVASVLGLPQSKVVCKTKRIGGGFGGKETRSAIFAAAASVPSFCLRRPVKLVLDRDVDMISTGQRHSFLGKYKVGFTNEGKILALDLEIYNNGGHSLDLSLAVLERAMFHSENVYDIENIRINGQVCFTNFPSNTAFRGFGGPQGLLIAENWIHHIATELQRSPEEIKELNFHNDGVVLHYGQLLQNCTISSVWDELKASCNFVEARKAINNFNSNNRWRKRGIAMIPTKFGISFTAKFMNQAGALVQVYTDGTVLVTHGGVEMGQGLHTKVAQVAASSFNIPLSSVFISETSTDKVPNASPTAASASSDLYGAAVLDACQQIKVRMEPIASKGTHNSFAELAQACYMERVDLSAHGFYATPNIGFDWTIGKGTPFNYFTYGAAFAEVEIDTLTGDFYTRTADIVMDLGFSINPAIDIGQIEGAFIQGLGWAAIEELKWGDDNHKWIRPGHLFTCGPGSYKIPSVNDIPLNFKVSLLKGVPNPKAIHSSKAVGEPPFFLGSAVLFAIKDAISAARAEEGHLDWFPLDNPATPERIRMACVDSITKKFAGIDYRSKLSV

SEQ ID NO: 62946 - protein, 314 aa, Zea Mays
MYSTRVVISNLTFINSPFWNIHPVYCSQVLVQHLTILAPISSPNTDGIDPDSSTNVCIEDCYVRNGDDIIVIKSGWDEYGISFAHPSSNISIRNITGQTRNSAGLAFGSEMSGGISDVRAEGVRIVNSVHGIRIKTAPGRGGYVKNVYVADVSFDNVSIAIRITGNYGEHPDDGYDRNALPTISNITIKDVVGVNIGVAGMLQGIPGDSFSGICLSNVSLSVRSTDPWNCSLVEGYSSSVSPEVCEQLRATPGPGSGQMCYGGNYPAAAAQPQPPQKSGASRLVLGWLVLVRYGCRHITWFLLANELPGLFNKG

SEQ ID NO: 62947 - protein, 256 aa, Zea Mays
MQSASMEEAKKNGIQQLAEETTLVQFIFGGYLRSKIKCTKCQVISKHSERILDLTVEIDGDISTLDGALRRFTSSEILDGDNRCNSYERAQKKLTILEAPNILTIALKRYQSGVLGKISKAVKFPEHLNLSQYMCRTDDSSPVYSLYAVVVHRNVRNATVSGHYVCYVKDSQGKWHEMDDNKVKPVSVQKVLSRCAYMLLYARCSPRAPTSARAKKPKQMARSGSFPSGGGRYRSRHQGGLYPIWEEQMESYEAMY

SEQ ID NO: 62948 - protein, 841 aa, Zea Mays
MAWWSGKVSLGGLQDIAGAVNKISESVKNIEKNFDSALGLEEKRDDEDASGSQTSNSDRIGFFNPVMAFMGHNGEEDGTEVSEKPQSLKNLSAEEGINSTPTKKHISEVDPSEVSGTTSPKLPSKSEEVHSISNGSPVSKADVSEQSITPQTPTHPSVAEEKLDSSTEAPASKVGDAEASETSQSAGHPSTVEENQHHQVSKHSDPSDEAEPNQLRESVRDLPDGSASSSPTKIHQSGDTETGESIHTGKEDTSDRNILQSQPAESALASSDDITEAEDNIAQEYDAPKELSGPQESSDMVDKGTHLEVKLHDSNINTEKSEEESNKMESGESSVVVQEDNAMEQPQDLTLKSLTAEHDSNSQNESVINSTDIPVGLGEGPPNDFTKEEKILESVRGTDSQTLDSVVSVDELEKLRRELKMMEAALQGAARQSQSKADEIARLINENEQLKSTIDDLKSKSSEAEMDSLKDEYHQRVATLERKVYALTKERDTLRREQNKKSDAAALLKEKDEIINQVMAEGEELSKKQAAQEATIRKLRAQIREFEEEKQRLNSKIQVEEAKVESIKRDKAATEKLLQETIERNQTELAAQKEFYTNALNAAKEAEALAEARVNSEAKIELENLLGEAGEKENMLIKTIEELRHFLTRQEQEAAFREKRLKGDYDDLQKRYQASELRYNELVTQVPESTRPLLRQIEAMQETTARREDAWAGVERTLNSRLQEAEAKAASSEEKERSVNERLSQSLSRITVLETQITILRTEQTQLSRSLEKERQRASESRQEYLAIKEEAAIQEGRAKQFEEEMKELRARHKEELQEAAEHRDLLEKDHIISIQGYSMM

SEQ ID NO: 62949 - protein, 378 aa, Zea Mays
MPSPMARIFHRHLLLAVVTLAVAASLLRPAAAVRPFVLVLSGEDFLKDPAAHPSLPSADSDDDDGWDDFADDSPAADPLLSPSSWAPLLDPTISLPSGDETDSPADALFVAGTRAMLSAASDGDDAAFTTAAAQIEASAEAGHPGAQSALAFLTGAGMTRPASRSLAFLLHKFAADAGDLQSKMALAYSYFRQEMYEEAVILYAELAEAALTSSLISKEPPVIEPIRLHSGTEENKEALRKSRGEDDEDFQITEYQAQRGNAANMYKLGLLYYYGLRGLRRDYGKAFHWFSKAVEKGETRALELLGEIYARGAGVERNYTEAYKWLALAAKQQHYSAYNGLGYLYVKGYGVEKKNLTKVSMLHKNFRYKCMCIADRNS

SEQ ID NO: 62950 - protein, 581 aa, Zea Mays
MAVAPPLSTHVSRTLTSNLHLWPRTHGGVAHARTRALIPTPAAACAFRFSFRVRATASGSKLPPYPLPDVFPYITAEWEAVAKGWACAAVAVYCLSRAVPAAGRLPRALAGGGGGGGAAVVVAARGGVALAAFASARAAATYAQQAFLWEAALQAAGRLRERAFERLLERDLEFFEGRGGVAAGDIAHRITDEADDVADALFSVLNVLPSMLTVKANNGELKEIMRFQKLARADLKNNLSKKKMKALIPQAVRATYIGGLLVLCAGSIVVSGSSFDAEEFLSFLTALALVVEPIQDAGKAYNEYKQGQPALERIFDLMRFNPKVTDKPRAIHLQSINGDIKFHDVTFRYVDDMPPVADGVNLHIRPGEIIALVGPSGGGKTTLAKLLLRLYHPQKGYILLDNHDIQDIQSQCLRTHIAFVSQDTMLFSGTIAENIAYRDPVGDIDMNRVEYAAKIANAEEFIKMLPEGYNSNVGQRGSSLSGGQKQRLSIARAIYQNSSILIMDEATSALDIRSELLLKEALSNLIAKHSVTVIIIAHRQEMVLMADRIISLERGELREMSKQAFLSQDGHFSLPRIRSPN

SEQ ID NO: 62951 - protein, 677 aa, Zea Mays
MAASALWQPQEQGLREICAHLEAHISPNSDQARIWQQLQQYSQFPDFNNYLLFILARGEGKSIEVRQAAGLLLKNNLRTTYISMQSSSQHYVKSELLPCIGATNRAIRSTVGTVISVLFQIVRVAGWIELFQALHKCLESNDLDHMEGAMDAIYKICEDVPEELDVDVPGLSERPINVFMPRILQFFQSPHASLRKLSLGIINQYIVVMPSALYMSMDQYIQGLFNLAKDSSADVRKLVCSAWVQLIEVRPSILEPHLKNVTELILQANKDSDDEVALEACEFWSAYCDVSMPPEGLQEFLPHLIPTLLSNMVYADGDESLDDAEEDESFPDRDQDLKPRFHDSRLHGSETGDDDDDADAVNVWNLRKCSAAGLDVLSNVFGDSILPTLMPLIEQNLARTDDDSWKERETAVLCLGAIAEGCISGLYPHLPQIVAFLIPLLDDKFPLIRSITCWTLSRYSKFIVQSLDHPNGRGQFDKILMGVLRRILDTNKRVQEAACSAFAILEEEASEELVPHLEVILQHLMCAYRKYQRRNLRILYDALGTLADAVGAELNQAKYLDIFMPPLITKWQQLSNYDKDLFPLLECFTSIAQALGPGFAQFAEPVFQRCINLIHSQQLSKIDPTAAGAVYDREFIVCSLDLLSGLAEGLGAGIESLKLSVLLHGAVPWVPSRLSSW

SEQ ID NO: 62952 - protein, 473 aa, Zea Mays
MDLSFHVPTSNTQFIGDEHRTSAQMLWQAISVEIDGGGSSEMAVVTFDGIAILTPRGRYSVELHQSFLRLQGQANDFKIQYSSILRLFVLPKSHNPHTFVVITLDPPIRKGQTLYPHIVIQFETEAVVERELTLSGEILAEKYKDRLESSYRGLIHEVFSKVLRGLSSAKVTRPSTFRSCLDGYAVKSSLKAEDGLLYPLEKGFFFLPKPPTLIPHEEIEYVEFERHGAGGASISSHYFDLLVKLTNDQELLFRNIQRNEYHNLFNFISGKHLKILNLGDGQGRTSGVTAVLQSTDDDSVDPHLERIKNQAGNEESDEEDEDFVADKDDSGSPTDDSDAEGSDASMSGGEKEKPSKKEASSSKPPVKKKQKSGPDEGSQKKKPKKKKDPNAPKRAIAPFMYFSKAERANIKSSNPELATTEIAKKLGERWQKMTAEERQPYVEQSQVDKQRYAEESAAYRGAAAQQGSGAGSE

SEQ ID NO: 62953 - protein, 451 aa, Zea Mays
MTQVKPAPGGRMLTVLRVHLPSEIPIVGCEITPYVLLRRPDGGVFTDDVSETAPVDGYFMRYKWYRIQSDRRAAICSVHPTEQATLQCIGCLKSKIPVAKSYHCSSKCFSDAWQHHKVLHDRAISALNENGTEDDELFGRFGSGSSSSGVISAALSGSTSNLSLSSGVNNGPTPVYPTGTEKSSGETWFEVGWSRTYTATTDDIGHVLRFECIVVDVETRGTVRAPTSVMTSRVIPAPTPTPRRLIPVNAADAMVHFDLDSRTSSFGTFTVLSYNILADTYATSDTYSYCPTWALTWAYRRQNLLREIIGYHADIICLQEVQSNHFEDFFSPELDKHGYQPLYKKRTTEVYSGSPQAIDGCATFFRRDRFSHVKKYEVEFNKAAQSLTDAIIPAAQKKLALNRLVKDNIALIAVLEAKFSNHGTENPSKRQLLCVDQSRVDEMVSSIESPM

SEQ ID NO: 62954 - protein, 73 aa, Zea Mays
MQEIFDEQVAEEATEAEGAGVIATITNQRRTAKKGAGATATPRKSTQEKSKVQGKGYRDKCYESIRVAVEARF

SEQ ID NO: 62955 - protein, 95 aa, Zea Mays
MMGIDFLFGLLVKQENALRFAEDASMFYSNKLLIQHPVFFAIGVIVCSPYNILLLQTSCAMAPAFSVFLTSYSYGDSMSMARAVEAIKVKLASYA

SEQ ID NO: 62956 - protein, 120 aa, Zea Mays
MTAAARRSARPWLLAPSVPPPAIFGSGLWPSPLPPVEWTCSLLIHLRVAVLRTAAPAQPRRAPFPFGSPRHRGCRTIGHWLLHQLNSTLPSPQPQQDKHHTRPAGRQQPIFSARQQIFSA

SEQ ID NO: 62957 - protein, 251 aa, Zea Mays
MAPPSRDYWLGFFRGAGDNIFDAIEAAITVAASDHPAALRERRDGIAERLFTALLVTSAAAAAAGAAAAAPGGGAAGGTPVAGAPTPAQLHPEGAASVPSLCSSDRAEAIADDAAPRCDDPVLAETERIKAVLLSDQEKPEAELLELLRRLQELDLAFDTLDATAIGKAVANFRKHSSKQIRNLVRSLIEDWKHTVDVWIAHRRDAVVDQTPQSMGPSSLEQEDRGAASTHMDEGDLFATPSTTIRLSEAS

SEQ ID NO: 62958 - protein, 178 aa, Zea Mays
MSDGLYTYKHHRERGADIHTIFVKKSKFRILLSFIGTTFLLVSVCCALLSKDGLCLCSLWSISFASVIAKCLRCDPVKKESLVIMPTFGIQLEQHFWSGRVHRKFVPIGKILRPVLNEHVTPVSCYWSLALLVREEYELMLVFKSLNPPVKMLVPIWKALCAFVDSNTLGNSALPQST

SEQ ID NO: 62959 - protein, 385 aa, Zea Mays
MLAKFLWCCQTCEGLRGSKPNSPREPYAAVAKQMPASPSLSLFHPLLTPPQRHCSFGLVEERYIHPGLDWLVLVLLLNGRICSMDFHSKATNYLVTASDDESIRLYDTQDAVCLNTINSKKYGVGLVCFTDNPSIVLYSSNNGWDESLRLLSMNDNRFIRYYKGHLDRVVCIALCSGKENFLSCSLDRTILLWDHRAEKPQGLLRAQRRPTVSYDAQGMVFAVAYGGRIKMFDIRKFGMGPFATFSVGTDDSEAHVVQFSGDGRRILLTTKAGRVHVLDSFEGNSIASFRAKPILTNSTLEASFCPEGNHIVSGSGDGSVYAWNVESGKVACWESTDVKPPRVRWSPGSLMFVTGTSELSCWVPDLSKLESFTISHTNTRSSSSL

SEQ ID NO: 62960 - protein, 350 aa, Zea Mays
MAVRRRTAAAAAGDPPPQAPPADEAAAVAPDEPVLRAPNLRVAAVAAALFLAPFSYLAFVHYSLTADLQRSILKCGAMSLVGFCVALKLIPIAARYHLRRRMFGYDINKKGLPTGQIKVPEALGLVVGIVYLVIAIIFQQFHYAPDSIWLVEYNAALTSICFMILLGFVDDVLDVPWRVKLALPTFAALPLLMAYAGGTSIIIPKPLTPYVGLTVLELGLFYKLFMLLLAVFCTNSINIHAGLNGLEVGQTVVISAAVLIHNVMRIASSTDIETQQAHEFSIYLVLPFLTISLALLAFNWYPSIVFVGDTYTYFAGMALAVIGILGHFSSFTLFLAQDIGCRGLILERVC

SEQ ID NO: 62961 - protein, 540 aa, Zea Mays
MGLFDRLPPMDHMRSEKMCFVQLIMPAESSRLAVTYLGELGLLQFKDLNEDKSPFQRIFVNQVKRCAEMSRKLKFFSDQINRAGLRSSVRPALEPDIDLEELEARLGEHEHELLEMNTNSDKLKQTYNELLEFKLVLSKAGHILASSHSHAASAEHELDENIYDNGIHEGNAYLLEQGVHQGAHGHSGVRFVSGIILKSKALAFERMLFRATRGNMLFNQASAGEPVTDPISGEEVEKAVFVVFFSGEQAKAKILKICDSFGASCYPVPEEMVKQRQIFNEVSARLSDLEVTLDAGIQHRNKALESIGSQLWRWTIMVKKEKAVYDTLNMLNFDVTKKCLVGEGWCPIFAKSQIKDCLQRSTIHSNSQVGTIFHEMDTIESPPTYFRTDKFTNAFQEIVDAYGVARYQEANPAVYSVVTFPFLFAVMFGDWGHGICLLLGALVLILREKRFSSQKLGSFMELAFGGRYVILLMAIFSIYCGLIYNEFFSVPFHIFGKSAYECRDKSCSDAHTFGLIKVREPYPFGVDPSWRGSRSELPFL

SEQ ID NO: 62962 - protein, 157 aa, Zea Mays
MANADAGDGDEVILDAPGFIRVYRSGRVERFLPVDFAPPSTDAATGVSSKDVAILPDACLLVRIYLPLPPSSGSYSGKLPVLVFFHGGGFCLGSAFDAAVHSHANRLAAAAGAIIVSDCRWNTASRQSIRSPLSTGTRGRRSSGWPRTPWAGGRNPG

SEQ ID NO: 62963 - protein, 72 aa, Zea Mays
MVLVRSGMVDLVVVGGAHMAVEEVEDSAAEVEVVHGVLALYLTSNPMTTVLSLLVDPAVANKRATVPPDDYV

SEQ ID NO: 62964 - protein, 1180 aa, Zea Mays
MGISFKLSKVGVRVHPAARSASAAVAEKPGAGGKEGSLSESTREDKRKDVNGIKILPACSKEILPDHEVSFTLSLYERGYLISKSAPMDPSQTSIQDGKTLHPYDRASEKLFSAIEAGRLPGDIFDEIPSKYYNGSVVCEIHDYRKHVSNQAPASSAELGSPIVNKVRLRMTFENVVKDITLLSDDSWSYRDFMEAEACILRALQPELCLDPTPKLDRLHQDPVPHKLSLGIGKKRRLRQNPEVVTSSHMSHGKKVCIDRLPESAKADEMGITSSNAAQQVGGNITIQNMSVSGGSQTLRPNNSSQDAARTLLPQSGLQQTLCYSAAGNDHMAGPPANFSGTSSCISSHQSLIGYSDSVAANSLLSVKREMQDASLQDPKRIKRTGGIDDVQQQQIRPQPLGGQEMQWKNHQLHPQLDVKGMQYASSLSGQRYPSSMMNNMQDPGSSLYFSHQQNLRYDAKQEQMDGSDKSKDTLQSMAPETSMLDQQQSQSQHLPQQSVARNNVPNMGQWQNTRFAAEKDFKKEDIIQRRKLAPSSRAPTGPVIQSPVSSKSGELSGSSMGGQFGSAVTSAVTGVQKDKFAANSGTAVGFPSVASSPSDSMHRIQQPAVASSKRKTNSVPKTQPPFLWKSVMGDFLRKFWVARYQLFNKKKFDKISQKKTIINRNQNVAGCLNSCFHSEDYIDTTRPLCNSMISGTINTCKGRVINFVSTKDMYQGHSRPFPVDFNELSDETVRMQYGDIKDFDDPNSYGCVFILPTKHYADLFAGQLISLMLQDGHSKADDEVVRSTPFANISTPFGPLPNNVVSDVKQEGGVSQQLNAAAHANVAPGTQMQQLPVNRMLPSANGNQILAMQQGYMQGAAMPPRSQHLDQNLVQQPQHQQPQQQPLQQNAQAQVQQPSSLPLNQMQRPQVLPTSPLSQMLGPGSNLPMGSSQIGKNKAPPTSLQLQMLQAQPQQPMSRKVMMGLGSAMNMGNMVNNVVGLGGLGNVMGMGNVRPISSPMASMSGLGNNSNPMNMGMASNLAAAGLRPGMNPAAIAKVRMGLAQQRAAGMYPGMVGMPGSSSSILPSSAGLSMMGQPLNRGNLGPLQRAMMSSMGPPKMPGGNFQLNAQQQIHLQHQLQQLQQNPQQQLQQLQQQQQIQQLQQQQQQQLQQQQLQQQQQMGSPLGPPPSPQLSSGQQHS

SEQ ID NO: 62965 - protein, 258 aa, Zea Mays
MGEVLKLSSKYAFQRHQQWLQHAKTRSARHKIMRFLREQAALSAAEITADAVNSFVADLEDESDSELSLPSTKKEDSKFNWEKILSSDKLFFVNKSSDGFLPVNNVYPKVNGKQNKTVKDLGIKINGHSTIRGDSFSELMHPSNSTCKEVFPGLDDWKSGKISGWHNTEGNSVQWLCIACVDRKGMMAEVTSALTACGITVCSCVAEVSKRRGMGAMLFHFEGSYENVVSACLSVDMIFGVLGWSVGCSWCPLGALEC

SEQ ID NO: 62966 - protein, 535 aa, Zea Mays
MAGGAADMSPQAQAQTPGAAGAAGVSAVLSLSSREAPPVTVAAVAACTDEGKYLGVSATPQGQMVMSSKYLKAAQELLDEVVSVSKGVEDAKTAAAAATKSLAAVKKKEDSEGASGGGTDDGAGAKSGGGAAPEMSTAERQEMQMKKSKLLNMLDEVEQRYRQYHGQMQAVSSSFEAAAGAGSARTYTALALRTVGSRLRYIDHQLRQQRALQQLGMMQGGAWRPQRGLPERSVSILRAWLFEHFLHPYPKDSDKIMLAKQTGLTRSQVSNWFINARVRLWKPMVEEMYLEETKDQDAGGGGNDEGKSGGGGSKSSDTVDGVMPRADVMSKSAVRVGGGGAGAESASTNKGIHGSSLLELGGGDHQQSHAGFYDDDEDDGDDVMGRRLKKARGNEPAPAFHHVHDIATLHAQAAAAARQQHEEVSHRELLMKFMESGGGGGVRDHHQDGGGYSLFAPGPYGQFTTEPFAFAGNGGVSLTLGLPHGAGGSAEQTASFLMGSTTAGDSGSHGAATSYDMNMQSTKSFAAQLMRDFVA

SEQ ID NO: 62967 - protein, 340 aa, Zea Mays
MAGGGLQGAKKRKREHAEGKAKPRKQVKGGGDGAKRKSHSAAGGYTAHGGAGEVVARKKTPVTPKEKRLAAKEMSEARKMKRRQHYSLEKELTKLWEKMRCHDVSKEERSKAVSQAIHKMDGKYLDIATSHVTARVLQTCVKWCSESERDAIFDVLQPHLLTLSCKKYAVFLVKKLIELASKKQFASFISSLHGRVANLLHHTIGAAVVDYAFQRGTQRQKRQLLVELYSPELQLFKDLTVQSSSCLIDTISKLGLQISSVLLHMTIVIDKILEKDGDEPTNAPELPKKAKAKKKRSKEPLIVRIMQTREGLKLGISCVKYGSAKTKWARECISGQEEDY

SEQ ID NO: 62968 - protein, 203 aa, Zea Mays
MGRRNSSPGNLTHLKVPFMRTLFWMSLLLMMCLYPSYCRPNIWPNDNLPELEIAFKDLGKLMMEVGLMLAHHCDRYVMRQGVGSYDGDSLEQTIARSRCHKGRLLYYFPRQFSKQTDFDSVSSWCGWHTDHGSLTGLTCGLFTKNSMEVPCPDSAAGLYIRTRDNQVVKVVFDEDQLAYQIGETTEILSRGYLCATPHCVQFF

SEQ ID NO: 62969 - protein, 893 aa, Zea Mays
MVRKKRTGPGGSGETSGESSGASGQGSSQQPERTQQPGGGRGWVPQQGGHGGGQHQGRDRHYQGRGGPGPHHLGSGAPEYHPREYQGRGGEYQGHGGEYQGRGGDYQGRGGGRSRGGMPQPYYGGHRGGNVGRNVPPGPSRTVPELHQAPYVQYPAPVVSPSPSGPGSSSQPMAEVSSGQVQQQFQQLADRGQSSTSQEIQVAPASSKSVRFPLRPGKGTYGDRCIVKANHFFAELPDKDLHQYDVSITPEVTSRGVNRAVMGELVTIYRQSHLGGRLPAYDGRKSLYTAGPLPFTSMAFEITLQDEEDSLGGRQGGHRRERVFRVVIKFAARADLHHLAMFLAGRQADAPQEALQVLDIVLRELPTARYSPVGRSFYSPNLGRRQKLGEGLESWRGFYQSIRPTQMGLSLNIDMSSTAFIEPLPVIDFVAQLLNRDISVRPLSDSDRVKIKKALRGVKVEVTHRGNMRRKYRISGLTSQATRELSYVSFIAGMRFPVDDRGTVKTVVQYFMETYGFSIQHTTLPCLQVGNQQRPNYLPMEVCKIVEGQRYSKRLNEKQITALLKVTCQRPQERELDILQTVHHNAYYEDPYALEFGIRIDERLAAVEARVLPPPRLKYHDSGREKDVLPRVGQWNMMNKKMVNGGRVSNWACINFSRNVQDSAARGFSHELAVMCQISGMDFALEPVLPPVTARPEHVERALKARYQDAMNILRPQGRELDLLIVILPDNNGSLYGDLKRICETELGLVSQCCLTKHVFKMSKQYLANVALKINVKVGGRNTVLLDALSRRIPLVSDRPTIIFGADVTHPHPGEDSSPSIAAVVASQDWPEVTKYAGLVSAQAHRQELIQDLFKVWQDPQRRTVTGGMIKELLISFKRATGQKPQRIIFYSF

SEQ ID NO: 62970 - protein, 443 aa, Zea Mays
MPWTVQIYINLSYLHTDGSREPCSYDVSVPKFGTLSDLVQALSIVCLLGDDEILLVTEVYNNCIIRYLEEPSDSVSLLRDGDKLAAYRLPKRHEKSPLVVFTHQHFVQHSSDGNLTPQMREFEAPLLAALPEEISGLSLQDIYLKLLSPFQLSNGASSLNDCMESNSDSVDTPSDSGSINFQNSQLEDGPESNHCSASECEVTKGPDDLYDGVSGSNKEAHMDFEFYLKSERGEGQQQKIEINELHLLLETAPSRLHVNVHWLQNASRKYATSMLNNLPEIHKLELIPKGTEDSVALHGCLEAFLKEEPLGPEDMWYCPRCKKHQQAMKKLDLWRLPEVLVIHLKRFSYTQFTRNKLETFVDFPTVDLDLSSYVADKSEQPSSHYRLYAVSNHYGNMGGGHYTASIYHEEGKGWYKFDDDCVTPMSEDSIKTPAAYVLFYRRE

SEQ ID NO: 62971 - protein, 75 aa, Zea Mays
MQFSTLYYIKASVSTIVMRHIFTNNLSHLFQINPLHAHRADNLHVPNHTFACRWPNGRPSTVLLDPTPTAPAQSR

SEQ ID NO: 62972 - protein, 1507 aa, Zea Mays
MNTKVHLAEKEKQKLQVWSRIMPYKESFAWAMIPLFESNRAGGLSDAASPSSPLAPSLSGSSSQDSIVDPISKLALDGKVNHYSSGSSVIVEISNLNKVKESYIEDSLQDPKRKVHKPVKGVLRLEVEKLHDDHNDVDNASEGGSMANDLNDAGDINNGRSNRSSFDGIHSSVNSIAIAKKDAHHNGHTSNAENVDNFQAFDFRVLTRSEPFSQLFHCLYVYPLTVSLSRKRNLFVRVELRKDDSDIRKPPLEAVHPRERNTMLQKWGHTQIAVGTRMASYHDEVKISLPALLTPQHHLVFTFFHVDLQMKLEAPKPVIIGYSVLPLSTHIQLLSDVSLPILRELVPHYLQESGKERMDYLEDGKTVFRLRLRLCSSLFPINERIRDFFVEYDRHTLHTSPPWGSELLEVAAFRAMVNILTRVQQESSDGAERNRFLINYVDFAFDDFGDRQAPVYPGLTTVWGSLARSKAKGEDVPPLQLKEGVFRCIMQLFDCLLTEVHERCKKGLSLAKRLNSTLAFFCYDLLSIIEPRQVFELVSLYMDKFAGVCQSVLHDCKLTFLQIICDHDLFVEMPGRDPSDRNYLSSVLIQEIFLTLDHDDLSQRAKAARILVVLICKHEFDARYQKSEDKLYIAQLYFPLIGQILDEMPVFYNLNAIEKREVLVVILQIVRNLDDATLIKAWQQSIARTRLFFKLLEECIIHFEHNKTGDNMLLGASSRSPDVEHPASPKYSERLSPSVNTYLSEASRHEIRPQGTPENGYMWNRVSPQLSSPNQPYSLREALAQAQSSRIGSTARALRESLHPVLRQKMELWEENLSTAVSLEVLGITEKFSVAAGARSITTDYAKLDCVTSILMGLLSRNQSLAFWKAFLPVVYNIFNVHGATLMARENDRFLKQIAFHLLRLAVFRNDSIRKRAVVGLQILVRNSFNYFKNTTRLRVMLTITLSELMSDVQVTQMKFDGSLEESGEARRLRKSLEEMADVRSKDLLKDCGLPVTALEAAPEGSSDNRWSWVEVKHLSKCLVQALDAGLEHALLGSVVTVDRYAAAEGFYKLAMAYAPVPDLHIMWLLHLCDAHQEMQSWAEAAQCAVAVAGVIMQALVGRNDAVWSKEHVASLRKICPIVNTDVSAEASAAEVEGYGASKLTVDSAVKYLQLANKLFTQAELYHFCASIQELIIPVYKSRRAYGQLAKCHTSLTNIYESILEQEASPIPFIDATYYRVGFYGERFGKLNKKEYVFREPRDVRLGDIMEKLSHIYEAKIDGSHTLHIIPDSRQVNADELQPGFCYLQITAVDPVMEDEDLGSRRERIFSLSTGTVRARVFDRFLFDTPFTKNGKTQGGLEDQWKRRTVLQTEGSFPALVNRLPVIKSESLEFSPVENAIGMIETRTAALRNELEEPRSSEGDQLPRLQSLQRILQGSVAVQVNSGVLSVCTAFLSGEPATRLRSQELQQLIAALLEFMAVCKRAIRVHFRLIGEEDQEFHTQLVNGFQSLTAELSHYIPAILSEL

SEQ ID NO: 62973 - protein, 743 aa, Zea Mays
MPLPPLLLCVCLYLTHLPRLASSEPDADKAALLAFLAGVGRGATARARINWPTTPLACASPGHGPGWTGVTCSPDGARVVALHLPGLGLSGAVQSGTPFLVASHHHRNGGSRRSTTVTRNRCRRRFQNSNKFLRRPAAFVSLLHLHSSDPSTRETEAGSHAAAAAAAAAPALRLRLRLPLPLPHPPPPPRLLRARRRQGGAAGVPRRRGPRRHRARAHQLAHHPARLRRPRTGLDGSHLQPRRRARRGVAPPGAGPLGRRATRHARPPHGAAAAQPALQQPVGPAPRRPPAPARARGAPPPPQRLLRRAPARARGARRAPGARPLLQRLRRRHPRRAHQPHPPCRARPLQQLALRPRPGPRPPRAPVPQPLQQPPRRARATVPPPLRRRRIRGQRPDAPARSSSSRRRRPRRADAAGQAQRGGHPRRRRRRLRPRVRRRRGAAPRILQQGGPRRRRRRHGRGRREGRGEEGEGVAGVQGRHRQGRGGQPDGLLRGPGAGVRPGGSAPRLRRGPRQGRVRDGVPGRAGGRHHGRRQAAQQGGERRAPRLRAADGAGWPDSPSQRRRAPRLLLLQGREAACVRLLRQRKCIQHASWEEGRGANAIGLGNQVEDRSGCSKRSGTRPRREQRQICPRQHQGLQRVRQQGRIRLHLGPRPGTAGEPDRGEVPLPRVLRAGGRRHEEGVAGFRRVQPRRPRAGAAHGEVARPGIRRARQRGRPPREVGAVGRPRGVDRRGVRRRAAAGP

SEQ ID NO: 62974 - protein, 102 aa, Zea Mays
MLQQQNYIVFFVYINFDQICWICVLPFDCWGRGTGRSEDDGEEVYLDRGRGRASRSLVFLPFSHVMNSENRLLQLRNGSKREKTLRFKEFVYAGLNFQRRVN

SEQ ID NO: 62975 - protein, 802 aa, Zea Mays
MCMLCAVQRWSRRVATMLPWLVVPLIAIWAATQLLLPAAYRLEVTSPRLACVSVLLLTLFWYEILLPRLSLWRARRSARLREERRAHALELHKLRKIATRRCRNCSNPYREQNPGGGKFMCSYCGHVSKRPVLDLNSTGKASSRWPCAQDCGDWLDLRCSASPSTSFWGFSWHLLLSFFTTTVRWLLRKTFRFTSSGDGEGLGPDGKRLAKAGDNGGKAEESRVEKARRKAEEKRLARLEREMLEEEERKQREEMTKLVEERRRLRDEKAAAEERSKSATPVGEKDARKEAERRRQERRKKEDKGPSKSNSDCEDIDRRLGREGDMKRAFDRKIESDRREGYKPHYFEANNRSNKTVESRAKYFGRMTGGFLSSSRGFGGGSFFGRSIQAPAPQVNKVSRPIVPATDQGNAAKRDVQHASTQAAAKSTSAGETRNSWTNFNRPVSPNVQPAPTSFKKSWHQLFSRSASVSPCPDATTSARDTNQKPEPNGAQLSNAYTFLFQYPPLDSKPSSSQSMQFPGFPPLNGAPPNKPLPHFPAGHMPFYDDAESVVFEDPEQFEDPCYDPDAIALLGPVSESLDNFPPDLDCGFISSDVVKESHGRPSPIESPLSRSRMVEENPIKPLHLLVAKRPGGPIQPEASSEQRTWQMWSTPLVHESLGLQGHQSQWLQQTNQLNYSANVFNGRTNAPLGTGLNDSDPWLQKAPFKQLPPDTPSLFLPHEIPGKLHNDLVFGSPNKSAREHPFGSPGPSWPKEELSLSGAQEGGGHFSLLSGAHVGGSGDLFCSTSPDVQSLVWSFNEKETA

SEQ ID NO: 62976 - protein, 190 aa, Zea Mays
MQVLDGGVNGIAAKHVDERRKPLNLLDGLVDARDRVAEPAMRDVRPSLSSILDCSRLSPPCSHRPTRRTTCQTLATGSAAAATTSGVCSLPSDSRQRQTLRLGDGHTGEEVIPTCHGRGGGEGVRLTGDWTRPPIPPAVADVSVQEAGTQAQTTVQIDEEPGSDEDDDLPPLEANTNMNRPYELISQRNN

SEQ ID NO: 62977 - protein, 101 aa, Zea Mays
MGPFGGIMIECGTNQPIEKVLAAEDAARGCCSIRTTPTSCSCAGSWRSSSRLPNFSTPLSSRAAASWVSSCSTSRLAQLRQQRRHRHCQHQLPMPSRPAIL

SEQ ID NO: 62978 - protein, 175 aa, Zea Mays
MGSLLTRTGVLPWLHAKIVDPMLQVIRRGAEPKQLAFSAALGITIGIFPVCGTTVILGAVAVAVLGSRCNAVTVMVLNLAATPIELSLIVPFLRLGETITGSGHFPLTANALKNVLTGHASKDVLLSIVNAMLGWLIAAPFVLAVLYAVSFPCFKVLVNRFGGIPSSPRTPLKAV

SEQ ID NO: 62979 - protein, 5104 aa, Zea Mays
MGSPFVLTATLRKSYEVALMAVGQKWPVLLYGPVGAGKSALINKLAHIVGNRVLFIHMDEQMDGRTLLGSYVCTEKPGEFKWAPGSLTQAIVKGFWIVFEDIDKAPSDVRSILVPLLEGSNTFSVGHAEAVEVAESFRFFATVTTSKNDVSHDLPGRLTFSALWRKVMVGEPNQSDMVNIIKGCYPSLEPISSKLIDTFEKVNSLGSYQFGSLNLAGGLSDGVLHRFSLRDLLKWCKRILGTDLNFEDLRFASSGCKLIYHEAVDIFTASLSSPEKRLYVAGEIARILCVPYRGETVQPTEKPVIQARHMELQVGRVTLPCCDKPTLIQKGPFADIRRALEILERVACSIKFNEPILLVGETGTGKTTTVQNLAAWLKQPLTVVNLSQQSDISDLLGGFKPTDARSICFPLYMEFKDLFSRSFSAKDNEAMIRYCDEFVMNKNWKKLLTTLERYVAKAQKLIEGSKSSSGSKRKRPLPAHVVSDWDTFSSRLNMACSQIGSATGMSFQFVEGAFISALRKGHWILLDEVNLAPPETLQRIGAVLDGERGTLCLAERGDVDYVERHPCFRIFACMNPATDAGKRELPYTFRNRFTEYFVDDLMDDDDLRLFVRKYLDGLNAANGVIDSIVRFYKVAKKECEERLQDGANQKPQFSLRSLSRALGYIKNAEKKFGFRKAIYDGFCMFFLTLLDPPSGKIMKNLIVSLLLDGRVPPNISFVDYFTDKPLQLGGCESDDFLQSYVLTQSVTEHIINLARAVYIRRYPVLLQGPTSSGKTSLVRYLAAKTGHEFVRINNHEHTDLQEYLGTYVTDSQGKLQFQEGALVKAVREGHWIVLDELNLAPSDVLEALNRLLDDNRELFIPELQETIPAHPNFMLFATQNPPMLYGGRKMLSRAFRNRFVEVHVDEIPEDELATILEQRCRIAPSYAKRMVEVMKELQTHRQNSRVFAGKHGFITPRDLFRWANRYRTFEGKSYEDLAKDGYLLLAERLRDVNEKVVVKEALERHLRVKLNIADLYNSEVTREDNLFIDVIKLRVQDCVGNITWTKSMWRLYFLIERCYRSREPVLLVGETGGGKTTVCQILSAVLGLKLHILNCHQYTETSDFIGGFCPIRDRSRIAIEFKDLVAKIKQMKMFFYVAGNVPLETDVSGADSVISHLDEILDRYRKKKYLFPEVSAQDLGAMEQIKLDLMHLHKRWQAIFLWQDGPLVQAMKNGDLFLIDEISLADDSVLERLNSVLEPERKLSLAEKGGSVLEKIVAHPNFFILATMNPGGDYGKKELSPALRNRFTEIWVPAVIDVDELRSITFGRFTKTDFSCLGDCIVNFWKWFNQLHIGRTLTIRDLLSWISFINVTEQNLGPEQALIHGLFLILLDGLSLGLNVSKTEATEMRNTCLSFLLEELQKVGGTAVDSYLNDLNNYGWGDNMKKKDIDHGCLEDHFGIAPFYIPKGHFPCKQQDFEIMAPTTSKNVLRVLRGMQLPKPLLLEGSPGVGKTSLIVALAGFSGHDVVRINLSEQTDMMDLLGSDLPAQGGNGMEFSWSDGILLQALKNGSWVLLDELNLAPQSVLEGLNAILDHRAEVFIPELGQTYKCSSSFRVFACQNPSSQGGGRKGLPKSFLNRFTKVYVDELSEEDYLFICKSRYGSLISESFIRNLIHFNSRLYMDTMVYRKYGQQGSPWEFNLRDIIRSCEMIAGSPNPMMDDSFLNTVYLQRMRTLVDRHEVVKLYEDVFKKKISIHQPKMLHVNPHCLVVGSASIRRNNIQSYKVQNNQLNIFPGVLNSLEAAMHCIQQGWLCILIGQNSAGKTSLIRLLAQLSGNTLNELNLSSATDVSELLGCFEQYNFFRHYKTVLSEVEHYVDVYFSLSIDTNQKNFVAERRGLFTKWFEFVAAKGHSSIKTSKLMSGNASLPSLSLLAEIVEQMKCDLEMFDFSIPLTKDDLSETLKSINNLQQNGAAHQPVRFKWVAGDLIRAIERGEWIVLDNANFCNPTVLDRINSLVEQERSIMVNECGLVDGNPVVIKAHPKFRMFLTVNSNYGEVSRAMRNRGVEIFLMDQSWNLKGFSNVPGDSERKDVIRFLISCGIPRMELVSSMCEAHMYAKGEGSRVGVNITLLEITRWVQLFQQLIVKGNQFLWSLHLSWEHTYLPCLGEINGSGIVEEGKNKFLTNFDRSEILARNFSFLTVFDGCSTSLHSGLSLSLPGGWPIEQKLRDLIWYSKETCVMRNCMFLQSLGAQYAAYQISSLNDNSLLLGQISLIHPSILPAASLRELQFPTVNGQPVKICVTGAFNSYLADQMLFFAANWVMEQCTKNDLELYGKWFNWYNSLVQPYCNFFESYWYILEQESEHPIWHNILEYYREIVAYHNIDIVTQHIPLLSKKLLDMAGCDSLKACQNRLHRSFKALGLLRLTLQQWQIETKCPDLSVLECTLLPALKSLRCLEGEVLKTIAKSWKRLKIYSLLLDYHRSIWKMMIASQLEGLPIVWNLLRKEILKLQQKFPVEVDVFLMECVNLNNINDTNFQYGKPTLWDYGGHPHLPSSSEIFDKMQELLSFTTDVWPRKNLLNIELDDRKQLTDAMLSANKDLRHLAMEGVSMACIATMKTEEDVLAVVPQLDEVHKRLVGKVNSVRDNLGLLSKTSVPEFKFCCSVSSEILCNIYGFNGWLASLPLLNLKSLNLDTLLLQQLCKCTQKDSSETHEILVNSEYLLKYAMDYSLGSSSRSPLDYIQHQIIWWICHDWAKVDNAHLKVASCILEMWYNYHSSLWTYCSGSPKCLFSVTHDDSCDLAHLTKMDAINTIIQQDLHVVDYLKSGVMLKVASRNLWEGVSCLGNFVSSLHSAADSLFKQIIFVHKKHFEEENYNQLESLLFQQSRRLIEKEDLDTVCALLSSSSCRVLASLSESDKLVESLLMDLYSSYSRDSLLHTGAAWVRIGELRFRLLLSSYSPDPTFKSRYKHSHILEKITLVKLEEKVRHDCEELAGSNSPEDSHDNELLQLLEIKEKDTRAKVVFRPRQSKHKSLIAACLEFEDRLSECKDLLASLTCEGLGQLEVDRVCNWQIISMNFIKRLTEDYREYVDLIQPIQVAVYEMKLGLAIALSGSLQREYLKKIKEDDINRVLGAIYAFMQFPSGSFTERVVTDVTDDLTNYTITGQLGTLNSCSGDVDMLKKLAAMSSQLNVCKVAGKVKSLSEMLASVHHIFLVRTADCVSCSLVMDKSSYASLKDTFDHFTSMWINMKYRLKAKESDDSQYFKFKSRMISIDDIFKDVPLLSDMESEDSILDNEEKLEHEFFKITESIDDDNGVVEDNWDLIPESALKCIVTIHDQLFGSPDLFEKRRKCQVSDAQKVQSFIESYELGTRILKDLPELTCSMFDEKLMPEHLFRVCLEYQRSCAKTHQDCSGYNAYKDPNPPVLFKMVESLTTLQERVNSYLDEWPDHPGLLKILDLIASLLAMPLSTPISKVLLGLQLLAGKAQTLQENDSKFFVKDHLASIFLLVYSWQRLELDCWPILLEEVQTKYELNAAKLWFPLRALLTQTSGIPVDDDLSIIRSVEEFVQTSSLGEYKRRLHILFAFHGEISAGASLGSYSSNAVKKIQNILYSVFGYYMQFLSLVHGKIEEGKKNIEKELKDHVKLYSWEQAPYSSASIENFKRTRQKIFKLLQRFNDILKSPVIFLLNEEATSRKIPCWLDPQRPESHLPVDSEKFNKRFLWYHKWASETSLSLQTLQQSNGSTVGVPTAKEYADMVYDVKHWQNEIELNDRLQFFWISLERICGAANFGSTVKHGKKNQKKTALSNLFKTLEECGLSKHRPMSHEWGDELAAPSPLFLEQSYDSAHLLQQINSQKMLEDVSINHSTLLNTDNWKHANQQYFKCLAMMQQLRQVSLKFNKDLGLEEVNKAMSFMSHLLTVLSEQRHLAYNLFDQRNQFKHAIFLLGSGGKSKSLSSSQNVLLSSMWQQKKLFDAVITLITDSNLLLRSFKDCHYNSCNNFIEVEGISSLLGKFILNFSESKELLDECLLGSTNIFAGAYKSMPHSATEMEQLFTDNCQHIDSLLDGYLPGSNNIFPDAYKSIPLATTEMEQLFADNCQLIDSLREDMKVLCHRDLSVGSVKKVLISRLEELLEKGKMAMENRRHVEENHKLCLKLEASYIEILKETFMLVVGAVRKLTDHEVCSNGTEKSPVGNVASWKDTLQTCIMNLKLDDICVAGEKIRILVRLLVDYKPDIRTSIELHLMHLHAWLSVILSSAEGILSELLEAHITTSEMTLALGDLFIHLFTDGFGSTEDTAEDADELQQDAVGSGTGMGEGDGQKSVSSDIDDESQLGDSKDLTCKADPAPKNDDKAVEMQDGFNAQLSDVSEDLEGKDSGGEDEDTLDNQMGDTGDASEVVGKKSWDKDEDDDPKTSIEKYESGSSAKGTQQDDREMRAKDDGSIEEEDPMEMDSEEGKNNNLEHDPSTHDETELNTDEVMDKADAYDDRTGPELPEPENDSIDVDMVEQEQTDEINADNEDIGTEEAEQADQRLDASDDMEEGDMAQHSDGVVDNEGEHVEDANTDAGEMDSHQLDKADSLMPLSQGLQPDNMQINSNGESEANLANSSDMHGAVAPSVNFSGNEVPNMEISMPNTGNDSILSSNSKPDMQNDAQQHIKQTNPFRSIGDALEDWKERARVSADTQDHQPETGKDSSENTTEFRYVPEGEESTSQALGAATADQINYDNQINQSFLEDESCIRNLEHSDERTPDNPEVPYLQTSQALPNKSENANELDGREIQTDASVQNLVERTDHTFQDLVSFKQPPADDKIALIDLTTDRELPSQMDLDITDAETKRSNAVWKNLELATMKLSQELAEQLRLVMEPTLASKLQGDYRTGKRINMKKVIPYIASHFRRDKIWLRRTKPNKRNYQVVIAVDDSRSMSEGKCGKFAIEALVTVCRAMSQLEVGQFAVASFGKKGNVSVLHDFDQIFNSEAGVNVISSLSFEQDNKIEDEPVSDLLTHLNVMLDTAVARARTPSGQNPLQQLILIISDGKFHEKENLRRHVRDVLNRKRMVAYVLLDSPEDSIINLKEACFRVGEKVELKKYMDSFPFPYYVMLQNIEALPRTLADLLRQWFELMQSANE

SEQ ID NO: 62980 - protein, 202 aa, Zea Mays
MSGSSGPLPYSMRDVGAGGAYNNAKFRHRSRLKLAEDLAKTCVEMYFVTSTGLAPEIAYFHIEGDTEGGPDGGNKSSKYINDIVIKPLDRHNLLRPETVESLFVLYRITEDSKYREWGWQIFQAFEKYTKVDSGGYTSLDDVTSLPPSTRDKMETFFLGETLKYLYLLFDENNTLPLDKYVFNTEAHPLPVMRSAEQASHSV

SEQ ID NO: 62981 - protein, 343 aa, Zea Mays
MMGRKAPLGCATTLLLLLAAAVAPAELSVLGLGGGAAAASGAVTRADFPAGFVFGVGSSAYQVEGAVAEDGRKPSIWDTFTHEGYSLDNATGDVTADQYHKYKDDVKLLHEMGVDAYRMSIAWPRLIPDGRGAVNPKGLEYYNNLIDELLSYGSSGRVQRADQSQIHRGLHGVRRRVLQQLRRQGQVLEHRQRAQRRDDRRVRPGNPAAAAVLLPLRLRLRGRQLHHGAIRSGAPPPACARVCGVPVQRQVPGCARRTDRTHLAWLVVRAWDADSRRCRGSRTDERLPHRMVHASYGVRGLPSGDEEERRVQAADLHGRGGGASEGVFRLRRIQPLHRRLRQG

SEQ ID NO: 62982 - protein, 326 aa, Zea Mays
MEATSQSQDIKPRVPEGVQGHSPKVVTKSPRQSPRGGDKSEARKISPSPYPKVPIARVSDLDIVDSSSSNGDTGASKKKTEKSSFRPIAKESLSLEDSKEKNKTQKASNQRSAKNDIDEESNESVKPQRVGSTPSYGFSFKCDERAEKRREFYSKLEEKIHAQELEKSNLQAKSKETEEAELKMLRKSLKFKATPMPSFYKEPPPPKVELKKIPTTRARSPKLGRSKNTPSGGTEGNSNPPARSARLSLDQRVPQNGAKKAPAANAAKKPQRKSLPKLPSEQTAKVVDIAASVPSGEELGKKPSLTGLVREPIRAQLTPDEPGLSV

SEQ ID NO: 62983 - protein, 70 aa, Zea Mays
MEELLEMITWCQLGIHDKPVGLLNVDGYYDPLLALFEKGAAEGFISTDCSQIFVSAPTASELLTKMEVAS

SEQ ID NO: 62984 - protein, 408 aa, Zea Mays
MGGTGASSRRRWARRSFRTAGGGGGRGTGGVVRRTVAASTTMAPRGTQGFAHVDKQQRHVHGVLSDFRCNSGSTDHLSLYVEEFKHKSSHRSSVRCLPSAQGNVTEISRMQPVARKVQVDMTFNDKGLCRASRTVSGMRIQPKYYISSPNNNLKNSPTVKSYSGMSDFNYQLVRSAKRSALPKMGLTSTNCSLSEKMSFLRRPRHGDNHQNQSRISALNRRNKIVNPRGAAHLLSKDKVHEHLNSSLERHSQALLSNALIREKQLCCSDILNQKEPEQLWSSAYSESEKMLCFSSSDSIDDLQVSSSSDTSDSFNLSSLGVIDGDEWNTTFKRVYYPHAACLDSISVIYAKEIGQVSPISVLQPLSEDCSDSENIRHEPADPYDLSLAHLHQGRLLQRQVIFAELVSV

SEQ ID NO: 62985 - protein, 164 aa, Zea Mays
MKTDDATDTAAAAAATAEPYPKANLSEKRKALFEPLEPINGKRGAAETLLPPPDFEPASYPKGWLVGKKRKLVNVDVVESMRRIAIQEMNRKDREINGLNEQLEEDSRVLELLQKQLADERRKRTEIEKENSMLHEQVTMLMNMLDENEGFDEDGEAPPPDSFD

SEQ ID NO: 62986 - protein, 429 aa, Zea Mays
MSIAEGGSGGTRHHGGAVCGRAGPARVAEPGHRSAGHAVGRRGEGKARRYPLPALRRRRSLPGILNENTQCVIGNGAVVHLPGFFKEIDGLESNGISCEGRLLVSDRAHLLFDLHQVVDGLREAELGNSFIGTTKRGIGPCYSNKVTRNGLRVGDLRHMDIFGAKLNTLLRDAALRFKDFEYDNKILKEEVEKYKKFAERLEPFITDTVHFVNQSILQKKKILVEGGQATMLDIDFGTYPFVTSSSPSAGGICTGLGIAPRSLGDIIGVVKAYTTRVGSGPFPTELLGNTGDLLRASGMEFGTTTGRPRRCGWLDIVALKYCCQINGFSSLNLTKLDVLTGLKEIKLGTSYYTDDGNSVQSFPADLSLLEQVKVKYEALPGWEEDISSIRDYSDLPETARRYVERIEELVGIPVHYIGVGPGRDALIYK

SEQ ID NO: 62987 - protein, 106 aa, Zea Mays
MVIISVALTSWHARFFFVKDDTGGRALPKFGEWDVNNPASADGFTVIFSKARDEKKAPPTQGHIRNNRSVSADSKDSRAEKMTSYNARTNASKKWFCCVSPSPTQS

SEQ ID NO: 62988 - protein, 316 aa, Zea Mays
MASGIGSGQQQPPGSAVRLDALAAPAADADPGAVGDKLVFEAPPQPVREDYVQNAVKFLSHPKVRGSPVVYRRSFLEKKGLSTEEIDEAFRRVPDPQPSTTATTSPQQQVNSQNQSVGVQAYAPAQPVHPANAGPVVLPTQPRFSWYQAFLAAGLLLGFGASAAVFIKKLFLPRLKSWIRNVVAEGNGTEGNQLKPRIDDETADAVKASASAVSAIAKTNQQLLASKDEAEKKILVTLTQALDSQAKELKSLTDSIGHTREPINITRDDRFSQYRPLEDHAPTVIRNGAINSSWRASQVCAYNIHPYSCSTSMHVL

SEQ ID NO: 62989 - protein, 81 aa, Zea Mays
MVLSGGLVVPWLAAVAALAITAAPLGADAYKNYTVGDDKGWYDGLSLPGVDYQAWADGKNFSLGDFLITAAGRQAGSSAAR

SEQ ID NO: 62990 - protein, 258 aa, Zea Mays
MPCLSVRVPGSAVGFRLDSLLKLSDTRARNNKMTLMHYLSKVLSEKLPELLDFPKDLSSLELAAKIQLKSLAEEMQAVNKGLEKVEQELTTSENDGPVSEIFRKTLKDFLIGAEAEVRSLTSLYSNVGRNADALALYFGEDPARCPFEQVVTTLQNFVRLFTRSHEENCKQLDLEKKKALKEAEDNSKQLDLEKKKTQKEAETEKIKKKSDSEKACKKELENDKSSKKDSANEKGKLNNPIKELDISLQSPAQTASAK

SEQ ID NO: 62991 - protein, 74 aa, Zea Mays
MLKVLIKIISRNQNKLCYTYIGYVPLPCAPVVGDRDPVWPQPPQRSTMKNESSSSSSTRPLARSIRSFTPLAAQ

SEQ ID NO: 62992 - protein, 1178 aa, Zea Mays
MPSHETKICHQEYNQPTCIFLGVQAGLSLLTSELTMIFGIALGFNLLFEYDDLITGICFATVMEGTINACIAGFALLSYVLGLLVSQPQIPLTMNVIFPKISGESAYSLMALLGANIMAHNFYIHSSVVQGQKKSSAVGLGALFHDHLFSILFIFTGIFMVNYVLMNSAAAESTNTLLITFQDVVELMNQIFVNPLAPTIFLVVLLFSSHIISLTSAIGSQVISHHLFGINLPLSGHRLLLKVFAIVPTLYWAKVAGAEGIYQLLIICQIIQAMLLPSSVVPLFRVASSRSIMGAHRVSLHLEILVFLAFLLMLFSNIIFVAEMLFGDSGWMNNLKGYTGSPVVLPYTVLVLVALISVAFSLYLAVTPLRSGSHEAESHEWSVHSQRELLNTSQEREDVKVDNVTYEEDQRSDVVPSPRDVPDSHPELALDYIDTSDTAVESDHDSQQSTAYASTAPETCSSPSFTREESKSVVAVNWPEPLEKVPTSTVMEESTVENVVSRITTERDVLVETDVVSGKDKEDIRTLESEKSIVDSTPYVSDDGPPSLTFSRGKGSDAGNGSGSLSRLSGLGRAARRQLAATLDEFWGHLFDYHGKLTQEASTKKFGILLGIDLRTPSTSVRTDKQAAEILKSPLVRDSMRGAAFLSSSVDMMSPKNETSNLELAYGLQRGPGMGLSSWSQGMQLPNTQLQSSSNSLLEQSARLNSNFSSSYSDNNQFYQPATIHGYQLTSYLKQMNASPSLYSSMPLDPQRLPKSSVSAVPNYADSMMHARNHNLLASLGGTTTQLPATSRVGSMMPERSYYDPSSVDGNENAGSPAYSKKYHSSPDMSGIIAASRAALLNEAKLGAAIGPQSYLSRLAAERSQYASSTARPAAPLAFDELSPPKLQSDIFSAQSSMRPSARSLWAKQPFEQLFGMSSAELSKGDFNLPGRSGGVAKDDFSYKESETKLLQSLRLCIMKLLKLEGSGWLFKQNGGCDEDLIDRVAAAEKLLMQGTAENQLLLHGGDLQQHSSDQAGIQYMRTLPNCGEDCVWRASLVVSFGVWCVRRVLDMSLVESRPELWGKYTYVLNRLQGILDPAFSKPRGALTICTCLQKDTRVRNSPPHSGLTAMGPVPTPIRGAFTTAGVVLEMIKDVEAAVSGRKGRSGTAAGDVAFPKGKENLASVLKRYKRRLASKGQ

SEQ ID NO: 62993 - protein, 67 aa, Zea Mays
MVFKEAIVWLARLLQKIVDFYYVSVFTFFYNKPAAMFRHNLYSALTSVILVAILICRQCRSICSGNQ

SEQ ID NO: 62994 - protein, 653 aa, Zea Mays
MTEPRRVSFRDGCLASRKAEEAAWRRHQAAAWLQAMVGSLGLPPYPSEQEFVASLRNGIVLCKAINKLQPGAVTKIITNAPSNSQPLTAFQYFENIRNFLVAVNKLKLTSFEASDLDKDNLDAGTVGKIVDCVISLKSYHEWKQAGGANGPNKYMKSPLAVRSSQIQSENVASGPSPSLKRLDLTEVDADTQTFQNLDPNMKDCAFADAVEKLQKVIVDSMLSSKENIDQDILKKVPSKLIGAVLASQLGKEQFKHLQLLSPEKLIAENEPTHCIEHPNSPIESKQLLLQAHETELLDLKKMFQDVKVNFRSLQTQFRDDMAKLGENIQDLSKAALGYNQAVKENRNLYNMLQELRGNIRVFCRIRPLLHSESISSIEHVGTDGSVMVCDPVKPQSAHKIFQFNKVFGPTTTQDEVYKETQPLVRSVMDGYNVCIFAYGQTGSGKTHTMCGPSGGLSKDYGINYMALNDLFNISTSREDVKYDIRVQMVEIYNEQVRDLLNEDRSSTKLDIRASLNNGLSNLPDAKICPVQSPSDVINLMQLGEKHRASGSTAMNHRSSRSHSILTVHVNGKDIAGNVSRSSLHLVDLAGSERVDRSEATGDRLKEAQHINKSLSCLGDVINALAQKNSHIPYRNSKLTQLLQSSLGISGCTL

SEQ ID NO: 62995 - protein, 290 aa, Zea Mays
MAAASSPAASAASPGRGAGDPPAAAAAATARTAGCPCPICLEAFKDEAYLDTCFHSFCYRCICQWVRIVASKHAEPLSSVRCPLCKTENLSVIHAFDGESFERWYINQEPRKRRLSDAHELVSQFYNMKETTSNISGVQQYWEQQRYLRKKIWLQTWLRREIQALTRDENVEVIVHHIHGVMGSFMKRLEKEHTSSRWTTSPEKRREEFRRLVSDAARPFLLGRTERFVAEVELFLASDLNMEAYNKLRVQRFRESSSHLTREQDALPRDRSLEEHYMYFLCNDTDCDEM

SEQ ID NO: 62996 - protein, 519 aa, Zea Mays
MVQYRMHPCLSEFPSNCFYEGTLQNGVTVNERQSSGIDFPWPVPNRPMFFYVQMGQEEISASGTSYLNRTEAANVEKIVTTFLRSGVVPSQIGVITPYEGQRAYIVNYMARNGSLRQQLYKEIEVASVDSFQGREKDYIILSCVRSNEHQGIGFLNDPRRLNVALTRARYGIVILGNPKVLSKQPLWNSLLTHYKEHECLVEGPLNNLKQSMVQFQKPKKIYNDRRLFLGGGQGVMHGTNFGAGASSQAADKRSGRGKEGQSFAPYGPPNGVHKPGVHPVGYAVPRMPFPPFPGAPHSQPYAIPTRGLHGPLGAVPPVHQPGSRNFGSARSNTGGPIGGHLAHQQNSQQAMGSIGSNFNYTGMENPSSQPSGGAQMSQTGLMTQVPVQGLSQTFRDGFSIGGMSQDFFVDDFKSQGSHVPYNIAEFSTQASQGGYGVEFTQAPQSGYSGNYMNQNSHPGYSHIGTTNDIVSQDHMAHGSHGMFTQAGYNDPSQDESSQIHYGMAAAGPLQSQSLQPPPQ

SEQ ID NO: 62997 - protein, 195 aa, Zea Mays
MACSSVRSLPLDRSSWDGELDLELGLGCASSDPSTVAVEAFSPATSSSSRKQRTMTLTLGLPEEEEETGAGYPHSSSSRRPPAPAAGMFGRPADDHVHVAPPSHRQWQQQGRHAAPDAAPERRAAEPADRQRWGRGARWPIASGSGINWDWAPPYATARAGTDDDDASSAAAAASSGFPLWQLGAASSRSSWPSR

SEQ ID NO: 62998 - protein, 481 aa, Zea Mays
MLVDEYGSNAGFQLPNLICTKVLEEEEENSSEGRSLSFEAVTPEQDAPYNDDNEESQMPVEKHHHILEEVDGELEMEDVAPPSDIGATTKCQPEQSDTNRAPSDQRPSDAGPPLPVDRPPSPPPLPSSPPPVPVPQSAQMQPKLQMASDPMAPHPQRATYSVQSQQQHSIAEHPVQDMEGNKIRYHLPHQWHHSILLVPMAVSLLPQHLTMGTTIIGLQPHPCLTRDIISNHHPLHRLQINSLLCHQNTNIGHITGVITVHRIPRDIGTMDMIEVITDMIEGIMDMTDNTIMMIEDTTTMIEDITMMIEAITLMIEDIILTIEDITLMRELLGGQCTMMPLTREDILFLQVLLGFLTILKLHQPQCTMGDHQILRQGLVQAGLGRLGYLITILPRDILWSLQFHIQLEVMVDGDLDNLFRYRSGALMLSLVCGGLTCGRVCLVSLLQVEGTHGGGALQESGSWYLPPCTDVSHGFYGGRAA

SEQ ID NO: 62999 - protein, 129 aa, Zea Mays
MAAAAPAACKGKRKRHLSEDDVWLLLHRYHPGTILTALQEVAQHADGRRIDWRAVVAKSATGITSAREYQMLWRHFAYHHDVDESVDADDQPLDDDSDLELELEPDPNLTKEALCEASALAKEREAPAC

SEQ ID NO: 63000 - protein, 700 aa, Zea Mays
MSALLLTLLPGKGNILEGINGWELKPALRGPRLPRWMESGVSSFNEFIHELSVDSDADSIADSVAGDDDHEEFVCPPSPLSQSSRLSHASSFGRHDRRLRRHIRYAVSWILWPLRFFVSLIFILFNAIKFRMVRSTAKGAETPHLSRTGLAKKSFHIRDQFLQRTTDRRRGVFEDLHLAIEIFIESVFDIVHKAAHYILSPSEVWQNLFCWIQGSGHDTSSVVDVLTANVGSDNPVPTERKTVYRHSLNTDSRTCEDVITELGYPFEAIKVVTSDGYVVLLERIPRRDSQKVVLLQHGILDSSMGWVSNGVVGSPAFAAYDQGYDVFLGNLRGLVSREHIDKSISSYKYWKYSVNEHGTKDMPAIIEEIHKIKISELGKSQPQSAEGTGDQNDKLKSLEVQASQEDSIEDQPYKLCAVCHSLGGAVMLMYVVTSRITQKPHRLSRLVLLSPAGFHEDSNVVFSMVEKLILFVGPVLAPLIPGLYIPTRFFRMLLNKLARDFHNYPALGGLVQTLMGYVVGGDSSNWVGVLGLPHYNMDDMPGVSFHVALHLAQIKRAKKFQMYDYGSSAANIEAYGTPEPLDLGAHYGLIDIPVDLVAGQRDRVISPSMVKKHYKLMRKSGVEVSYNEFEYAHLDFTFSHREELLSYVMSRLLLVTDPGKGRIKQTTVRLRRQKKVQSEIEESIECRAKEESDELAGHLE

SEQ ID NO: 63001 - protein, 619 aa, Zea Mays
MTSRRSSTRSCRPTWAAAAAARGSTRSPSQIPTFQCNRDPWTRPRIWPPTATAAWLGRKGWRAGSRSRSACSMSGARVAVIGMATMQICHSRQPLSRKVPISSSRINPYRMIIVIRLVVLGFFFHYRVMHPAKDAFALWLISVICEIWFAMSWILDQFPKWLPIERETYLDRLSLRFDKEGQPSQLAPIDFFVSTVDPTKEPPLVTANTVLSILSVDYPVEKVSCYVSDDGAAMLTFEALSETSEFAKKWVPFSKKFNIEPRAPEWYFQQKIDYLKDKVAASFVRERRAMKREYEEFKVRINALVAKAQKVPEEGWTMQDGSLWPGNNVRDHPGMIQVFLGQSGGRDVEGNELPRLVYVSREKRPGYNHHKKAGAMNALVRVSAVLSNAPYLLNLDCDHYINNSKAIKEAMCFMMDPLVGKKVCYVQFPQRFDGIDRHDRYANRNVVFFDINMKGLDGIQGPIYVGTGCVFRRQALYGYDAPKTKKPPSRTCNCWPKWCLSCCCSRNKNKKKTTKPKTEKKKRLFFKKAENPSPAYALGEIEEGAPGADIEKAGIVNQQKLEKKFGQSSVFVASTLLENGGTLKSASPASLLKEAIHVISCGYEDKTDWGKEVYIPYIT

SEQ ID NO: 63002 - protein, 999 aa, Zea Mays
MRRGKGARNGLLPSSLRIISSCLKTVTSNAGSVASSVRSAGASVAASISSQAEDEKDQVLWAGFDKLELHPSSFKHVLLVGYSNGFQVLDVEDAANVCELVSKHDGPVTFLQMQPTPVGSEGIEGFRASHPMLLVVAGDETNGLGAIQGGRLSALIRDTNSEHQAVNCISTPTVVRFYSLKSHTYVHVLRFRSAVYLVRCSPRIVAVALAAQIYCFDAVTLENKLSVLSYPLQGAPGVNIGYGPMAVGPRWLAYATNTPLLSNTGRLSPQNLTPSPGVSPSTSPSSGSLVARYAMESSKQLASGIIDMGYTFSKYCQELLPDGSNSPLSSSPGRRSGKILSSVHPLEADNAGMVVIKDFTSKIVVSQFKAHTSPISALCFDPSGTLLVTTSVHGHNINVFRIMPTCIANGSGATRYDWTASHVHLYKLYRGMTSAVIQDISFSHFSQWISIVSSRGTCHIFTLSPFGGDASLQPQNSHSDGPPLAPCQSRPWWSKPSFLMDQQLHQVPSTVTHSVVSRIKNNTSGWLNNVSNVAASASGKLSVPSGAVTAVFHNSIYQGSLPVPSKANALEHLLVYSPSGHVIQHELLPSSGSESSGSSPRVGSGPNLQLQDDEMHVTAEPIQWWDVCRRTNWPERDENIANIVLYNQRSSMMAMGASDCEDSEHSDSTASNDGISGKEIMRIRERSSWYLSNAEVQINSWRIPIWQKSKICFYVMGYPAAELVESVSSGGGEIEIEKLPLHEVEIRRRELLPVFKQFQYSDRHSSDRNIANGGFQNALSHISNAQNSSVKDNGEYETKPVALSGFYADTRKTANTNGLARQTFSAVNLQQVGKCNSIESLNTAIVSGKTENGNNGYISTPPETKASIRSLSSYSLLDGHVDGMLSPNSASHKPETTNNSVLSNAASTDVQNGCLTTVDSGQQEASHSHSSVEFTQYFQEGYCKISELDDCRELTEAVTDADSSSSHCEREKPEEDGDNDDLLGGVFAFSEEGSSHLFI

SEQ ID NO: 63003 - protein, 70 aa, Zea Mays
MLIMVSKFCTLLLCFNKWIDRYVGFDDSRIFSVTPLLLRELKIWHVIICTYINLLDTLRMHSLGSKIIYV

SEQ ID NO: 63004 - protein, 194 aa, Zea Mays
MLGTVVTIAGATVITLYKGTPLLTETAHAEGTTHTLEGTHTLGGWVAGCLIMFANCICLSAWMVLQVPVLKKYPAKLSSFTITLALGFVQLAVVAPFFESDVERWKISSGGELFTILYAGVVVLGIAWYLMIWCINKGGPHFVSVFQPLQTVMVAIMAAIFLGDTLYIGGRGSVLCTVGEEQGDQKQRRSPSPS

SEQ ID NO: 63005 - protein, 104 aa, Zea Mays
MRPPHGPLNRPAPLPRSAIVGGLWLGAPGKGLPDLDLMRHERAGKRTRFAGGEDCARREQGSGRGSRMKRIAPGGSGRDSRMERAGNGRRSGRSFSWLGLRRLR

SEQ ID NO: 63006 - protein, 263 aa, Zea Mays
MGFGFVRLAARAAVSRRGMTPATSARRALAPPAVPAEPRCGPHWLVAARGHVGHSHHRGGEDEGETSERIFRLGLAADVVLTAGKAVTGYLSGSTAIAADAAHSLSDIVLSGVALLSYRAAKAPRDKEHPYGHGKFESLGALGISSMLLVTSGGIAWHAFEVLQGVMSSAPDIIGNTLHAHHDHGSSGHHHGIDLEHPVLALSMTTLAISIKEGLYWITKRAGEKEGSGLMKANAWHHRADAISSVVALVGVVPFLGCLFLIH

SEQ ID NO: 63007 - protein, 166 aa, Zea Mays
MAVVSALAKYKLVFLGNQAVGKTAIITRFMYDKFDDTYQATIGIDFLSKTMYLEDRTVRLQLWDTAGQERFRSLIPSYIRDSSVAVIVYDVTDRQSFLNTSKWIEEVNTQRGGDVLIFLVGNKTDLVDKRKVSTDEGEAKAQEHGAMFMETSAKAGFNVKHRHSIS

SEQ ID NO: 63008 - protein, 259 aa, Zea Mays
MDKIHRFGAVKSVNVVEYPAAGVSAAEENIVELKIECTEFSDTENIAKAVSEYSVPIIPSIDVLNHSVASDTKDVDLIPESQDQKDKHLPSNAALCESEAPVADEDAELDETQSRAALPTPQHAEADHTEAAVDENKHTGAGKVTATATDDDAVEKSHGDPRTSETCNPAGPTDKAEKPGRYSEQGAGDVTEDRPEKEAQAVGTSDTGFVFEPGSVLVEFLREEAACMAAHSLHGRRFGNRTVHAGYAPYDLYLQKYPR

SEQ ID NO: 63009 - protein, 83 aa, Zea Mays
MPCFTIFGSQGRCRVCICSANIAPVSECIKFPQFMAGLVCFMFVKTWAGRIEICKHICTTMSMCLCGIAVTLDDGCYNIVQLK

SEQ ID NO: 63010 - protein, 609 aa, Zea Mays
MHSAASTNTTAFAAAALSTLLSRCRSLASVKQLHAHILARSNSPFPYNHFLSKLLSLSCSASASAANYALLLLSSHPAPTAFTYNVTIRLFASSRPDTSLRLFLSMLRAEVRVRPDAYTLPFLLLAAARCPAPALARSAHALLEKIGLGDHDHTVHSLITMYSCLDDHLAARRVFDGISHRDVVSWNSMVKAYERAGMVAEVEGMLRSMVTEGAVAPNGVTLAVVLTACRDAGNLVLGRWVEEWVRSAGMEVDSLIGSALVGMYEKCGEMAEARRVFDGIRHKDVVAWNAMITGYAQNGMSNEAIALFHSMREAGLCPDKITLVGVLSSCAAVGALKLGVELDTYAMRRGLYNNVYVGTALVDMYAKCGDLEKATHVFGKMPFKNEASWNALICGLAFNGRGYDAIQQFELMRDEKGLQPDDITFIGVLSACVHAGLLEYGRQLFNSLTPVFKIIPRIEHYSCIVDLLARAGHLEEAWDFIEEMPGKVDAVMLGALLAACRKCKNTEVGERVINRIMKLEPSNSWNYVVSSKIYATSDKMDESARMIGLMRERGVNKTPGCSWVEVNGKVLEFYASTEPQHGAEDMYQLMGVLVNEMRLKGYVPNLDLV

SEQ ID NO: 63011 - protein, 259 aa, Zea Mays
MYEIHRFGAVKSVNVVEYPAAGVSAAEENIVELKIECTEFSDTENIAKAVSEYSVPIIPSIDVLNHSVASDTKDVDLIPESQDQKDKHLPSNAALCESEAPVADEDAELDETQSRAALPTPQHAEADHTEAAVDENKHTGAGKVTATATDDDAVEKSHGDPRTSETCNPAGPTDKAEKPGRYSEQGAGDVTEDRPEKEAQAVGTSDTGFVFEPGSVLVEFLREEAACMAAHSLHGRRFGNRTVHAGYAPYDLYLQKYPR

SEQ ID NO: 63012 - protein, 1034 aa, Zea Mays
MKGLSSRTSALNTASECLHILRFWSRDYGRGISLAESSHSLTVLVSIVSFLQAELNISDKPANATGISSRNSGSANSKNSNIWDMKISAFSMLEDILSKVASNMTENLWQSVIEVLRKVMDFVTARNLVIESSIMSRFYTSFLRCLHLVLVDPKGPLSGHVAGFVANLQIFFVYGLRSSSPPTLAPKETRTDSKPRASRGRYRPPHLRNKERRENDSLEGQNSDSEYSWYDMSSSDSDLSDSDGYAKSGDRFRSSKARLAAILCIQDICHADPKLLTSQWPVLLPENDVLQQRKYQATLMTCLLFDPITKVRVEAASTIATMLERQALVLTQVAEYKESSKRGSFTTLSSSLGQILMQLHTGALYLIQRETQATLLAALFRVLILLISATPYARMPKELLPTVIKVLCSRLLNKHSNKTEHYAVLVTVLSCLETAFSKVPPTLDVFAVLTEDCCAGPSHEQEESNVIAFLLHCIEEEMHYSVRHGAFQVLRSAVHNYPSCANMIWEKLRDNVLNLLQIQSFEDQKYDANFGPPGAKEESSIKGRCLVAGIKVMDECLRVSSGFTGADDIKECRLLDIQQISDCTINKTIKSAPHFEMEAAGSSQNCTLDITLGINRWIEVIETHLPQGLSHGSAMVRTASLTCFAGMTSDVFFSLPENKRDYVTSSSVHAALNDMVPSVRSAACRAIGIVACFPQILSSSSLPGKFIDAIEFNTHNSSTPVRVTAAWALANLCSCIRFRALEVHTDPYAGVGVLSKSSISLLVEVALRLAKDSEKVKSNAVRALGYLSRFIRFNYHAGTINDPSDSVFYGDPVWLERMVQALMSCVTTGNVKVQWNVCHALSNLFMNDTLRLQDMPWASSVYSILLLLIRDSNNYKIKMHAAVALSVPVSRLDYGSSFPDVVRGLVHALESLNSNNSSLPSNFKQRDNLEKQLTFTALHLLSFVSPNDDPSLKDFLTKKSSFLEDWLRSLCASFNSSERQPLPTEATNDEDGFSPNVTQKGMLSSALQSLLGVYAGRTQQVITQRFEQLARSVA

SEQ ID NO: 63013 - protein, 121 aa, Zea Mays
MQSFKSKEYVRETFSWQYYYWYLTNDGIEHLRNYLNLPSEIVPATLKKSAKPPGRPFGSGPPGDRPRGPGRFDGDRPRFGDRDGYRGGPRGAPGDFGGDKSGAPAEFQPSFRRPQMWTGKA

SEQ ID NO: 63014 - protein, 849 aa, Zea Mays
MESQRYNYGSGAGTGGKIRRYPPSRAVAASPYARPATAPTHAPGTATAAVSHEGGWLSRIIAAGTSRFLPSLFSFSTSQPQQAAPAPSPTRDQLPVVEPPSPLPPPLVDDRPECEENGGVAANNLCTENPQSCTKEEEENMLRNSDDHGGTALEELLKQRTFTRSEFEYLANLLWSKTIGANSLKLEDGNVRKMIVYDKENASEYSNLPLNFSTTTFSADDQVATPAEIAKAYMGLKSSKGSPLRLRLHDPSSMPITSMEVSMSQKAKPPTIPLAQGSRLHTSKTSDCLESNYTTPNGVICKMSSSPYFKSGVSSKELFGSVSSHYQTSNSVHTFGRQVLKRKSTVSNEFVSAGPIRRIHQRYNRTSPLLETQLGYRRYPVGYGSKLEGSEQLARTQKRRCLDKVGDASLGSVEDKTNVNYPGQVPEKSAEMATKILKQLDTLVPSQKENTSETKQKHESAIYFEEDVSRQKKVQAERDLLEPSPSEVPDGIASNKSISQITLNKEKPPAFSSRGNAPNLVLSDEIGRSKMSTPGNGFTFPAPTVNNAYSQGPPTPTLTSPILTVEKQPSVFCSASVTSAQSDPRISKSVLGGPVTQKLESKLNGDNQRVPSKNSGQVASFTSNPVFKSCSTGGSFTFSNTRFGSLSATSNMFAAKSLALSCTASPGASLGFPPVHTASSPAAHRKSEAANSSISFSSMQQFGIAGSSTVQDKSKAVDSSTPFGFPQKFDTVSSASEDMSKADSPEPTFFSGNHNVQSENCSSLFTQSPGNNLSSKSSENLNSGSSHSFADSPVGSATMCSSPSNSNSLFSWAAGSAQCQALYFHSRQLLLQYQIHHPQHQYLVTLLYR

SEQ ID NO: 63015 - protein, 809 aa, Zea Mays
MEETPPGQRPQPPPAHASPPFASAPFTPPPRVFSPGLAAARGTPSPGSGPGHALPHLSTPPGPPVFSSPLRPAAVPFRATPASPHPVSFAASGGYSSSSSATAATTASLPTSSAPHFLNGAATLHGDHAPAPSSIQGDGLDSPYVQFSANKVLKQKKLLNAPSLGFGALVSPGKEVSPGPEVVERDPRRCLNCGAYVNLYCDVQIGSGQWQCVICKKLNGSEGEFVVSSKQDLLQWPELASTTVDYVQVGNRRPGFVPVSDTRVSGPIFILIDECLDEAHLQHLQGSLHAFVDSLPPTAKIGIITYGRTVSVYDFSEGAAVSADVLPGNKSPTHESLKALIYGTGVYLSPIHASLPVAHTIFSSLRPYQLSVPEVLRDRCVGAAVEVALGIIQGPSVELSRGIIKRSGGNCRILVCAGGPSTFGPGSVPHSAKHPNYAYLEKTAMKWMESLGHEAQRHSTVVDIFCAGQCPVRVPVLQPLAKCSGGVLLAHDDFGEAFGVNLQRASTRAAGSHGLFEIRCSDNMYVTQVIGPGEEASPDSHETFKHGSSFCIQMHSVEETQSFSVSMETKADIKSDFVFFQFAVHYSNIYQTEITRVITMRLQTDDGLSAYLASVQEDVAAVIIGKRTVLRARTASDAIDMRLSIDERVKDIALKFGSQAPKSKLYRFPKELASLPECLFHLKRGPLLGSIIGHEDERSVLRNLFLNASFDLSLRMLAPRCIMHREGGTFEELPAYDLVMQSNAAVVLDHGTDIFIWLGAELAAQEGQSAAALAACRTLAEELSEKRFPAPRILSFKVSLLVLILYCYF

SEQ ID NO: 63016 - protein, 312 aa, Zea Mays
MFLSTVKARKVHDCRNSWHSEWWPAKLALWLGLTAVTFLAPSPLVQLYGKVAHFGAGAFLVIQLISVTRFIMWLNDWCRAEMTQKRYHLQIQAVSIVTYVGSLLGIVLMYVWYAPSPACRLNILFITVTLALVQLMTFVSMSSKVKAGYVAPGLMGIYVVFLCWSAIRSEPHTEVCNRKAEVATSADWVNIASFVIAVVVIVAATFSTGIDSKCLQFKQAEGESEEEEEDDIPYGLGFFHLVFSMGAMYFAMIFVGWNANASHTMERWTIDVGWASTWVRVGNEWLAAIVYIWMMIAPVIWKTRQVGSAAET

SEQ ID NO: 63017 - protein, 54 aa, Zea Mays
MVLTRWTYCTGFTLACLQVVIHFWDIVVKIGMRTTCMNFGIVNFGVPSALWQFM

SEQ ID NO: 63018 - protein, 815 aa, Zea Mays
MTTEILRNMLYQSVGMTASEGRLFQVDVIVLDEVHYLSDISRGTVWEETVIYCPKEVQLICLSATVANPDELAGWISQIHGKTELVTSNKRPVPLTWHFSKKYSLQPLLDGKGKKMNRKLRMSNSQNLASPKSEFYYVKGKRRFRTNKIEQGNSRPLDISKQVQLSKHELSNMRRSQVPLIRDTLSQLWENGMLPAIWFIFSRRGCDAAVEYLEDCRLLHDCEASEVELELRRFKMQYPDAIRESAVKGLMRGVAAHHAGCLPLWKSFIEELFQRGLVKVVFATETLAAGINMPARTAVISSLSKRIDAGRQLLTPNELFQMAGRAGRRGIDTVGHAVLVQTPYEGPEECCDIIFAGLEPLVSQFTASYGMVLNLLAGSKVTHKQKESDDVKDKHSGRTLEEARKLVEQSFGNYVGSNVMVAAKEETERIRQEIQYLSSEITDESIDRKCREELSEEDYAEISLLQKRLKEEKQIRNELKKKMELERMAAWKNRLEEFESGHLPFMCLQYKDKDSIQHTIPAVFIGNLNSFADQKIMNMVEDDSLVSGKPKRDSGEQLYRPSYYVALSSDNSWYLFTEKWIKTVYKTGLPAVPSVEGGTLPRETLKQLLLREELVWDKVEKSEYGSLLSMEGSLDTWSWSLNVPVLNSLSEDNEVERFSQEHQDAVECYKQQRRKVSHLKKTIKATRGFKEFQKIIDMRNFTKEKIERLEARSRRLTRRIRQIEPTGWKEFLQISKVIQEARALDINTQVIYPLGETAAAIRGENELWLAMVLRNKVLLDLKPSQLAAVCGSLVSEGIKLRPWKNSRTMTKDGLT

SEQ ID NO: 63019 - protein, 653 aa, Zea Mays
MPAHPTPPAARLSGVTSRRHAELLLHSGVDGVSVKDLRLRRIVPPAAGSLDTSPKCVSPVKPGSVDSTPPEAVSSAAAAAAGDLDRKLAPPRSKLVRDPRSFGYRRLLPFLNEMTKNNSSIGKEVFLQDTAAHPTDELSRSDSRLADESIGVSHSEPDAMDPVEPAVVSTGGDTDGKATCGNVMEETKTAPHDLTNKPLLARCTRSRFVHHPSSFSYKRMLPFLMEDEIYAQESGRVKIRKVAEERQFAANKHDASANGQQCLAVSDDSSQEGNRAQFKIVEEEKPLKADVNHILDDRQLKPPVIEASPDCSATEVQNVMQQEALASSQVPLTSFDGELTSDGDNVQSIGQHQLVVSEESQEECKRDEVNRSIHDEAVQSDGGYALDSREFQPAASEVSCSENSMAGVQGAAQEEPLPLDGVQENSDMGDDVSTEQAQLCVTSESLSAQLQNNAEFAEVLPCQDLDSGCHDIGFGSPTKRVVPSLHRHCAQQPQDSVVSHDDQLLDDDIQMVGRLSDPCAADRSSSMEEMSGRILFTQSASSKAAISWPSGAHSMEKRARSPKELSPKKGILKRSTRGCKGICMCLDCCTFRLHADRAFEFSRKQMREADDIISNLLKEVDSLRSLLEKHAGQVSINPCISVFVSFFFFSSSS

SEQ ID NO: 63020 - protein, 117 aa, Zea Mays
MRPRAILDIIKSGENFRISTTTRMPEQGTCERCGYISSQKLCKACVLLDGLNRGLPKLGIGSTKAGARADSDVVNQKKLCGHNFDAIFSLLKSQKLPCFWRYIRTSSTDPNNPNSES

SEQ ID NO: 63021 - protein, 180 aa, Zea Mays
MTLTHPRRLQRRQNKINLQLPPHPVEQLQCTLNGPAFRPTQQFHRMRSSPLPLLQIHRPIHTCGGLRCFLYLKLCPQGPPLFSATTVNVDLYYVLYIARTCDFSYVIESNVLRLQPIVPPYGTPPPPPYVMYPPGTVYAHPSTPPAMHPFGHYPMPTNGHAETHGAAPSAPEMNGASFPR

SEQ ID NO: 63022 - protein, 980 aa, Zea Mays
MITATGMERNGESHLKDPLLPTTSGASPAGASPRKERKTRKVLFSVRGISCASCAVSIETVVAGLNGVESIQVSSLQGQAVVQYRPEETDARTIKEAIEDLNFEVDELQEQEIAVCRLRIKGMACTSCSESVERALQMVPGVKKAAVGLALEEAKVHYDPNVTSRDRIIEAVEDAGFGADLISSGDDVNKVHLKLEGVNSPEDTILIQSVLEAVEGVNNVEWDTVEQTIEVAYDPDFTGPRLLIQCIQDTAQPPKCFNVTLHSPPKQREAERNHEIRNYRNQFLWSCLFSVPVFLFSMVLPMLSPFGDWLEYRICNNMTIGMLLRWLLCSPVQFIVGWRFYVGAYHALKRGYSNMDVLVALGTNAAYFYSVYIVLKALTSDSFEGQDFFETSAMLISFILLGKYLEIVAKGKTSDALSKLTELAPETACLLTLDKDGNAISETEISTQLLQRNDVIKIVPGTKVPVDGVVIKGQSHVNESMITGEARPIAKKPGDRVIGGTVNDNGCIIVKATHVGSETALSQIVQLVEAAQLARAPVQKLADKISRFFVPTVVVAAFLTWLGWFIPGQLHLYPQQWIPKAMDSFELALQFGISVLVVACPCALGLATPTAVMVATGKGASQGVLIKGGNALEKAHKIKAIIFDKTGTLTVGKPSVVQTKVFSKIPLLELCDLAAGAEANSEHPLSKAIVEHTKKLKEQYGSHSDHMMESRDFEVHPGAGVSAHIEGRLVLVGNKRLMQEFEVPLSPEVEAYMSETEELARTCVLVAIDKIICGALAVSDPLKPKAGQVISYLKSMGISSIMVTGDNWATAKSIAKEVGISQVFAEIDPVGKAEKIKDLQMQGLTVAMVGDGVNDSPALAAADVGMAIGAGTDVAIEAADIVLMKSNLEDVITAIDLSRKTLSRIRLNYVWALGYNVLGMPIAAGVLFPFTGIRLPPWLAGACMAASSVSVVCSSLLLQLYKKPLHVEDAPRPREDSDLV

SEQ ID NO: 63023 - protein, 146 aa, Zea Mays
MTTPQTSLPQLVGYRAPEVLETKKTIQKSDVYSFGVLLLEMLTGKAPLRSPGRKDSVEHLPKWVRSVVREEWTAEIFDVDLLRHPNVEDEMVQMLQIAMACVAADPEQRPRMDEVIRRITEIRNSYSSSSGTRTPLEDRPETAQAP

SEQ ID NO: 63024 - protein, 85 aa, Zea Mays
MWCHTTGCQRPGRKVVWMPCSCLPLQGCSDSPSSLGSLDSPTRRYQMQSLHFHRGHLFLPRGSNFTAKSTSSWWCWYGIRSNGGT

SEQ ID NO: 63025 - protein, 179 aa, Zea Mays
MAAFRTAARLFPGCHLPTLYMGMQYVRMHNFKLAEQFFTQAKSICPSDPLIYNELGVVAYNMKEYRKAVQLFELTLDHTSSSLNEMWEPTLVNLGHALRKLKEYQKAVSCYEKALTFPTKSLSAFAGLAYSYHLMDNFEAAINYYHKALWLKPDDQFCTEMLTYALESICQSTARRRPS

SEQ ID NO: 63026 - protein, 138 aa, Zea Mays
MTSFCARSVTRRMTSFTAPEGVGGLAGRRTIPAVPVPLPPPRPAGQRARKKMRLPEIQQMVRSLSVENDALRKEMRALQRDCTALSQENGKLETRLHQSITLSEAISVENKGKPRPLQPEQEAPSGFVLPDLNLPADV

SEQ ID NO: 63027 - protein, 170 aa, Zea Mays
MSATYNSRSQDIESSVVAHGDLWRLEASRGGSTSGNGTSPLYLVQLGPLLFVRDSTLLLPVHLSKQHLLWYGYDRKNGVHSLCPAIWSKHRRWLMMSMMCLNPIACSFMDLQFPNGQLTYVAGEGISASGFLPLFGGLLQAQGKYPGETRVSFSCKELLKPWHGKDLVLW

SEQ ID NO: 63028 - protein, 379 aa, Zea Mays
MKLIKHPNVVQLHEVMASKTKIYMVLEFVDGGELFDKIVNSGRLGEDEARIYFHQLINAVDYCHSRGVYHRDLKPENLLLDSNGALKVSDFGLSAFAPQTNEDGLLHTTCGTPNYVAPEVLADKGYDGMAADVWSCGIILFVLMAGYLPFDDANLMRLYKLICQAYFSCPPWFSSGAKKFIKRILDPNPDTRITIAEILEDEWFKKDYKPPRFEQGEDVSLDDIDAAFNDSEDRLVAEKREKPESMNAFALISRSQGFNLGNLFEKEMMGMVKRETSFTSQCTAQEIMTKIEDACGPLGFNVRKQNYKMKLKGDKSGRKGHLSVATEVFEVAPSLHMVELRKTGGDTLEFHSFYKNFSSELKDIVWKAESDANNKQTNK

SEQ ID NO: 63029 - protein, 53 aa, Zea Mays
MKCGHLAFAFFLWKPVPSHNAGLSVRSISGMLRVVSFDSSFLRVTCEMPDELK

SEQ ID NO: 63030 - protein, 96 aa, Zea Mays
MQALRTAPPDMQLKDKFLVQTTVVPYGTSDEELVPAVFSKETGRYIEESKLRVVLVSSYQSLEEQPTNGIHDTEPGAKYQMLQKKFLPLWYKVQQL

SEQ ID NO: 63031 - protein, 667 aa, Zea Mays
MLMKGPSSDVLRASISSAPSTSSHGSAQDECDSLGDVSTGRIDILLPKPLESNLVLDVYHVDCGVKHAALVMKNGEVFTWGEDSGGRLGHGTREDCVRPRLVESLTVSNVDFVACGEFHTCAVTTTGELYTWGDGTYNVGLLGHGNDVGHWIPKRISGALEGLQVAYVSCGTWHTALITSMGQLFTFGDGSFGVLGHGDLKSVSYPREVESLSGLKTIAVACGVWHTAAIVEVIVTRSSSSVKLSAGKLFTWGDGDKHRLGHGDKETRLKPTCVATLIDHDFYRVACGHSLTVALTTSGQVLSMGNAVYGQLGNPHSDGRIPCLVEDKIVGEQVLQIACGSYHVAVLTNRSEVFTWGKGANGRLGHGDTEDRKVPTLVEALKDRAVRYIACGANFTAAICQYKWVSGADQSQCSSCRQPFGFTRKRRNCYNCGLVHCNSCTSRKALRASLAPSPGKPYRVCDSCFLKLNNASDPNAANRRKDPVPYQPVESNGDAKVGKASLPSNMEMIRNLDIKAAWQGKKTDGLSFLRNPQVSSLLQLSDIALSGGLGMNRSAPRAVHISAARSVTTSRAVSPFSRKPSPPRSTTPVPTAHGLSFSKSATDNIVKANELLNQEVERLRAQVDNLRNRCELQELELQKSAKKVLEAMTLVAEESAKSKAAKEVNQA

SEQ ID NO: 63032 - protein, 86 aa, Zea Mays
MATVALWAMGAARAVAQAPRSTMVMTQAPRATMVTTQAPRATMVMTSTAVHQEEVSPPELKNSPCNLGSSVPDLRKQTVFCHFSDL

SEQ ID NO: 63033 - protein, 74 aa, Zea Mays
MLSLNKMHFLKLYSSTSSNSNSFRNGSSEHPARTSSQGSNKAGRTARMAESPTGLSPKVDRRTAVSAEREQTVS

SEQ ID NO: 63034 - protein, 355 aa, Zea Mays
MSNMLCFHIRSPGNITDISVPAFEVLSQYGTAKVTTKNIGTLEASYTLTFHCSSGISFMEEQYYILKPNEESTRLFYLHASTDQAAKYQCTAILKASDSSELDRQECVFSTTATVLDNGTQIIGSNGYKLGFFDTIKGYLVSFWDFLIDLISGKSCRLNKCRSFFDFSCHAQYRCITWLVMLVLLLFMLPAGAIVLYLLHQKGFFDPVYDWWDDLLGADYRAHRRHKKGRRHHHHHHDHHHHRHHHHHGHSHGHDHHPHSHHHAHQRRKIEPSHHHVLHRQQPGTAAEGHRHKHDPALGVQHREAGHLGHKRRHGKAVVAEDALDLEFRERRPYEVRHAGHLHRDHHHHHHSWEV

SEQ ID NO: 63035 - protein, 267 aa, Zea Mays
MAAASPPQDQQQPAAEGAVAREDPAALTPRRARFPRACHYRPNAPPLTPTPAPSPPPPRPRRNGNAGYETPEYRVVTPLVEEPASPAELPRWRLRGMWELASVLNFLHVFRPLLNIPVEFTAEELEDAIITPNGTLDDVHMPLLKSIPPVTRMAMGRGTWIAVLCKKLKHWWHWVAEGDIPIVASHGAETELYKALEPGIRLVILKAICDIRSEQEDVRNFIDSSLKHGYHLSIFRKERIGGDSHGISYWRNSFQAGTGQKSLLARS

SEQ ID NO: 63036 - protein, 168 aa, Zea Mays
MAAASSPAASAASPGRGAGDPPAAAAAATARTAGCPCPICLEAFKDEAYLDTCFRSFLKLLAASADSFCYRCICQWVRIVASKHAEPLSSVRCPLCKTENLSVIHAFDGESFERWYINQEPRKRRLSDAHELVSQFYNMKGLMLAELSRDHKQHFWGAAILGATKISP

SEQ ID NO: 63037 - protein, 327 aa, Zea Mays
MSALRSSNRMTMTRMPVNAGGSANVRFPESEKKGWCFEWPPVQRPHRVQSLILRCLQMYMDQKEVVDALSHHSKIEPCITELVWRQLEHQNPLFFKAYYMRLMLKNQIMVFNKLLQDQFEVINKEFSSGIPSMSLPNGSNSNLLKQNPCFLPETAPGSAMPDGIMHNGSSRGIINGTPSGDQLLNASKDLHGLHNGIDASTSLQSDQNAAAVLYGVDNETSATIKTESCYSSNADFAFCGNTFLESCQSIGDASGGGSFSSSELNGQPLNDSILDMESSSFSFLNQMPQSFIFPDLGDDFNQSAEITQFLTPETNFSDSTGGDHTAG

SEQ ID NO: 63038 - protein, 350 aa, Zea Mays
MVVTIFDELVKLGIVDGVMEADLEHSTIWTAGLYLILLLQFLENKVAVELTRSEFVEAQEALAQMKNWFTRFPTILQGCESIIENLRGQYAHSVGCFDEAAFHFLEAKKLTESKSMQSMCETYAAVSYICKGDAESSSQALELVGPAYRTMDSFVGVREKTCIIFVYGLLLMRQHNPQEARNRLASGLKIAHQQLGNIQLVSQYLTILGTLALQLHDAAQAKEILKSSLTLAKTLFDIPTQIWILSVFTELYRELEEKENEMENSEYEGKKEDDLQRRLSEAYSHSFHHELVEKSRIQPLHMSSKQPEMAVPSANGDLDIPESVGLSAPQPFLKRLVEAEPMRRSTRRRR

SEQ ID NO: 63039 - protein, 422 aa, Zea Mays
MASEIEVLEDTTTSSTSLVAAASTVPSLAEGAEAPAEDDSLKNDVYTAAAYGDLEKLQRLVEGEGRPVTEPDGGGYHALQWAALNNRVAAAQYILEHGADINAVDHTGQTALHWSAVRGHIQVAELLLKEGAKVDATDLYGYQATHVAAQYGQTAFIYHIVAKWNADPDIPDNDGRSPLHWAAYKGFADSIRLLLFLDAYRGRQDKEGCTPLHWAAIRGNLEACTVLVQVGKKDDLMVKDKTGLTPAQLAADKNHRQVAFFLDNARRVHGKGCGANTRFGKLSKLGLAPLLWCTIIGMLITYTHSVISGQYAMTTTAPFGIFAWSGVFLATAGLVMFYKCSRKDPGYININARGSQNQRDDEPLLKMELENPALLSGNWSQLCITCKIVRPVRSKHCSTCDRCVEQFDHHCPWVSNCIGKEL

SEQ ID NO: 63040 - protein, 999 aa, Zea Mays
MSICGYHSPRFSEDITWLPQWLQPYSTPVVGEHRNNSTAVSSLSCQNCAFVGHPSQEHQDCQNATDGYSGFILHLSGDEDTVVSSPVSSNVLPFSLRVSSESAAQPSLAEGSGNPQIPNSGTCNGLSESLCADGEEQEVNAVSQNQFEANDPQVDMPTKVARKEISIQPDTIRHRRHGFNGGKVDVRKLRNVDVNDAIELSIAASEAMVIAEMILDDSQPDKSAAAAIEAALHVKEARKQFYFEEPQHACGSSEGGLDEIDWLAELDESEMVDAYQDVALSLIHIACSSQDHNTGDLKQQNSHPTCPPCDADTHILWDSSSERQNKKWNSQNADSDDHVSDSFPNNQSAGVPPNEPTPCSASVKQAALCKTISCSRNKKTVLQASTQNNAAFHGTLGALATYQNVHKKVAGVAAQTNVGMKKRVKGLFEEENSYISDSISTDRRCPTSRASSMEIVASSRASLYCKAEGLLEENHHPGTEELCCQVVCSSLSQVDPLCSIVPCSISCDEGPSSQAPVCKQSEGHEGPSNQAPSCKKNEGNEGPTCLTPEREHSKKKEEEFMHTKEFPMMQYLDEEAGPSCVPLVKPADSNVPFRRRKYSSLRPFSTIATKSNIFGSTSNSNADVPVCQLERFTPIVLNKNVQRVQAAKEFIENSAGAENLEDFSAVRKQTYYPQDGSEDQIRELQVPREVFPPTENLVVKQHLKRKRVQFSEAKRSSRRTKNNRRILTKSRFSRSDSRTGEMLETREYTDNKEDTFQGVEFLLTGFPKQKEKEIESLIRKSGGYVLSKVSPFPLDKRKNMAEFPSWNPPIVLSPKKVSTAKFLYGCAIDAWILNPIWLFDSLQAGIMLPPGKYLIRQRNAQKHNSSFDRPLHPKCNTLIFDGVGFLIHGKISFCSKFSNIVKHGGGQVFISLQGLVQSLKDGSTSRGIILIANAASASRHLTHCGLEHDINTATASWIIASLFSGKLIPLKKDRCASFRRIKMPLFQQKQHVFYMSQEI

SEQ ID NO: 63041 - protein, 508 aa, Zea Mays
MKSSLRSRQESRRVSNGVIIGAMLLSLCVLSFVKARYCATPLGKAEDQLEEQMNASIRMEPEESSPARTPGASRRSALTNYFSSGGLSEEEDEQEAEEENVVTKPPPPPPAVTANRGSKKKKGKGKPTCYMTSKRSERCDASGDIRVDGNRSTIYVGGIEREWRTKPYARYHDPVAMAHVREYTLKALPEPGAAAAPACTRNHSVPGFLFSNGGFSGNLYHDYTDVLVPLFISTHQFRGRVQFLVSGMKPWWVGKFTPFFRQLTRHDVIDVDKDGEVHCFPRIVVGATFHRDMGVDPRRAPGHVSAVDFKRALRAAFGLKREAASRGGGGGATGDGKPRLLIISRRGSRRFLNSREMAVAAGDAGFEVRVAEPDQRTDMAAFAALVNSADAMVGVHGAGLTNMVFLPRGAVLVQVVPFGGLEWLTGVTFKEPAADMEVSYMDYHVRLEESSLVDQYPRGHQVLTDPYAVHRQGWDALKTAYLDKQNIRMDLDRFRATLREVMARLPSP

SEQ ID NO: 63042 - protein, 62 aa, Zea Mays
MTPAPLVVRETTNLEDAARLLLVTKYRRLPVVDSSGKLVGIITRGNVVQAALEIKKKVEGTL

SEQ ID NO: 63043 - protein, 151 aa, Zea Mays
MWFLRDLTGMLGGILFTFYQGSNLDSNAKMWRLVADFMNDLGMLMDLLSPLFPSSLIVIMCLGSLSRSFTGVASGATRAALTQHFALANNAADISAKEGSQETLATMLGMGLGMLLAQITRGHALSVWASFLSLTMFHMYVLKRSLFANTL

SEQ ID NO: 63044 - protein, 289 aa, Zea Mays
MKYVLVTGGVVSGLGKGVTASSIGVVLKACGLRVTTIKIDPYLNTDAGTMSPFEHGEVFVLDDGGEVDLDLGNYERFLDIKLTRDNNITTGKIFQAVINKERRGDYLGKTVQVVPHITDEIQDWIERVAVVPVDGKEGPPDVCVIELGGTIGDKIFSPHNDSGILDAGDIESMPFIEALGQFSYRVGPGNFCLVHVSLVPVLNVVGEQKTKPTQHSVRGLRGLGLAPDVLACRSTEPLEEHVKAKLSQFCHVPVSNIVNLHDVTNIWHIPLLLRDQKAHEAILKVLDLQ

SEQ ID NO: 63045 - protein, 155 aa, Zea Mays
MVLFSFYWVIFCLFRSRRSWKPNVQEKRLFSYVHDQHIRVKVTTHALRCIDKAGGIDEYLLKTPYNKMDTEMGIVWKANIEKMYSDLAEIEVGFFPPEVEAKIKKGLDEVRAAKRDFRREGRRALAKQSQLEASSVGDDQTSEVIDTKQVFAAKV

SEQ ID NO: 63046 - protein, 353 aa, Zea Mays
MAYTTSPSTSTSTAAAVAWAFAAATCVKLLLVPTYRSTDFDVHRYWLALTHALPVRQWYTDTSSQWTLDYPPFFAYFSRLLSLPAPLVDATLVSIPVRDATPFAHLIYLRLTVAFSDLLLLGSVLLLARDAQRKQRPFLALALVVWSPALLAVDHVHFQYNGFLIGLLLLSLHFLEQGWDLIGGVVFACLLCSKHLFLVAAPVYFMYLFRHYCCGRGVVKGLGRLVLMGSGVAAVFAAAFVPFVYYGQMQQLISRLFPFGRGLCHAYWAPNFWLRLLGDLLVIRLLLLFFQRSPQLLHSYWSFLPWLLALSKHSLILNQSILLDGSRMHAHVGLCLDGMYMRRHHFISLSHLP

SEQ ID NO: 63047 - protein, 68 aa, Zea Mays
MRMAMKRHRKYWQILSGLKHSRLILSTVLYHLGLQLIHSSLQALLLLLVNVLIKISTLKNLIQSGVGG

SEQ ID NO: 63048 - protein, 307 aa, Zea Mays
MFTDVVGSPYYVAPEVLLKYYGREVDVWSAGVIIYILLSGVPPFWDESEQGIFEQVLKGDLDFSSEPWPSISESAKDLVRKMLIRDPKKRLTAHEALCHPWVCVDGVAPDKPLDSAVLSRLKQFSAMNKLKKMALRVIAESLSEEEIAGLKEMFKMIDSDNSGHITLEELKTGLQRVGANLMDSEINALMEAADIDNSGTIDYGEFIAATLHINKVEKEDKLFAAFSYFDKDGSGYITQDELQKACEEFGLGDTRLEDIIGDIDQDNDGRIDYNEFVAMMQKGDNPLGRKGHQSNTSFGLGDALKLR

SEQ ID NO: 63049 - protein, 900 aa, Zea Mays
MATAVASQPCHLPLSAGGDPRCAASTSNVHTLEKVYGFRFICRSIVDVKTHKFHSRISKRKCYLRNSLSECDRTIHSGRWLEFRRHKGVFQRTRRMVHIIPLASDGDGNHISVNGALQVGSTSNIDEIKLKLNKALQSEDISNGLVQSIHDAARSIELALIEHSKLPKSSWFPKTWLGVENNAWIKSLSYQAAVDSLLKAVIDVSSRGNDRDRDINVFVQRSLSRLLTPLESVIKNELSKREPALYEWYSSDQNPLVVRQFVNIFENDPMFYSATAICLEGEPMNTSESDLSLLMLGLICLAAITKFGSAKVSCQQFSSMVPDIIGRFMDMLLEFAPLSKAYNLAKDIGLRREFLYNFGPRAAVPKLGNDHGLEISFWIELVQKQLLWALDREKIWSRLTTSESIEVLEKDLAIFGFFVALGRSTQGYLSFKGLTDLDDSLNGIVRYLIGGSVLYYPQLSSISSYQLYVEVVCEELEWLPFYNDDVLSAKTDTEGREEVPKGEVISRVLNVCSYWMTSFTKYSSWLENPSNVKAAKFLSKGHVMLSDCMKELDISSGFLEPEEELDTGTELASFDKSLENVEEALVKLENLLQELHVSSSHSGKEDLKAACSDLEMIRRLKKEAELLEASFLAKAEYLEADASSGSLSPAEEGPVKTSSRTNDTSAPQKTGSRVDNKRRPFWDFFGRSLKVDPALADQDLITVANVEKEGMESNDILRFEQLRRELIELEKRVQKSADEAQKEEEMVVAEKTTAPSPGSSVSSRQTTKKENVITKSVEKVKETTTTVLQGTQLLAIDTGAAMGLLKRALIGDELTQKEKQALQRTLTDLASVVPIGILMLLPLTAVGHAAILAFIQRYVPSMIPSTYAPGRLDLLRQIEKVKEMEVAEGSSEDILEELNK

SEQ ID NO: 63050 - protein, 296 aa, Zea Mays
MGPPPKPWERSGTEGTSGPAPFKPPSGGSTSDVVEASGTAKPSENVTAMEGNAAPNVNSTVSRPMPQRPWQQTGYGNTYGGYGGSNMYSSYGGFGNTYGTGGLGNSMYSSYGGGYGGGMYGGGMYGGGMYGGMGGYGGYGMGGMGGMGMGPYGNQDPNSMGPPASPPGFWVSFLRVVLVTTTCSAITFTKCRITSLFISRRTQMHGVVNFFGRISFLVEQNTQASYFFMTAMLQLFDRSGMLYGELARFVLRLLGVRRKPKKGGSIQGPEALAFEGPSRQSTEAPKTNNWDNVWGN

SEQ ID NO: 63051 - protein, 565 aa, Zea Mays
MGRRNDDIDWKSVFLSYFSHGASSDPAATRASGVAMAASSDDDERRRGSPGLHQRSEEPRSELERRFGKCCRPGAQVDGGAQAQHCRVTRAAAKAAVGLGPDVSSASNVVYDLSPINDDKEGEHVHDKNYSKLSPKFSEKKNYGQVPLSKQKSQGHGGKRKSIPVAKIYSSQPNSTTHAIDLKEPDHQSSLPSKFSKRRKQQLQKSSSIYSRKVQDVVLLDDEDIEPKEEVKLEMSDRLNEPKIYYPSRDDQEVVELTRSDIRCLDPEVFLSSQVINFYIKYIKMTRLCDENFRDKFYIFNTYFYGKLEEALRRPRDFPKLRRWSKGVNIFNNAYIILPIHGKEHWSLVIICLPPKERTSSEPIIILHLDSLGMHPSTKILNTVGRYLEKEWRFLSVAWPCLLNDIRKEAVQVPQQNNAYDCGIFMLYYIEQFIKKAPARFTTDKLGMFNRSWFKPEEASGLRQRIRELLLQEFGSARPDEAASEADVAAKRKEGISAAEWNEEEEEVRGSSMPVPDAVCEITGTKVWIKRVYRRTGWPPGNWCWSSGGSSRDARRAFIEQFSRK

SEQ ID NO: 63052 - protein, 109 aa, Zea Mays
MLRGEFSLCRLYTKSGSLRQFDRRPLAATGGVVVPGEDPAGPFTAVAASPPDDDDGSGSSMQQQQQQLTGGGANNDPYGDGVVTEREDAHDPFGDDVAMLDALLYWPGD

SEQ ID NO: 63053 - protein, 80 aa, Zea Mays
MSVRKSPLEYRAENPVAIERPKEQGRRRAENSSSPPILAPIANGAWGSTQGASSHRRGCARGQVGGETTIMASPIAHRRL

SEQ ID NO: 63054 - protein, 64 aa, Zea Mays
MFWRKEDPKDLEQQNLRFQHCRHTRVQHAPTLLQLMLLPVVCDRLLKEKQDSSPILEVEKNNIE

SEQ ID NO: 63055 - protein, 50 aa, Zea Mays
MSLTFTVDHKANCRGLRSLFSFRSVSSLIIILVLSRSSFSHNFGAGLSFL

SEQ ID NO: 63056 - protein, 2415 aa, Zea Mays
MGERDALPPLPLALGPPHLIPPAPTRDPRAIAFLPDLVGFHWVAYAAGSFLVVSHLPSPCRDDNNNDSCSPFFRQVIDLRAPVSAVAWCRRGSGEVAAATDNSIHIFQPAPASSPGSFGWLLRWSITETFAIVAVSWTGCGNGIVAVGAGVSMWARLESSWQLAWRSTPQVPQALVSTTCSMQGPVATVAALAPAEGSVPVLVFLNDARRGLEQAELVHPQPVCMIQWRSCSLYPHDLSEIRREILMTCCFDGTVRLWSKDEVSRSKKQRGLLISFSVIAVIEVNNTLNGVLGVDIIVRWSMESGSVVSRDEQGRFKLFSGDLRESQVGKCEWLVSLGPGPCISFWAIHCLDDVFPPRYPRITLWKQSKLQGWGDSYVKSGPLKSMEQSIFVEAVISRRLCSGPPATCFLLHLLVDDSFAWSTVSTKLLADSGNHALSDSAKNILCCLTKPVKQDGHKGSIRQVSVHPYSCEIELAVSMDSNRMIFFWSLSTFSTLIPTMHAPMYPLWKLLCKFDLRNISEDFEYSCLCWAPSVTRDNRFLVLGWESGVDCFVVRIQKEEVLSCQKIFTIPFLAESNTEGPPDSIHTIPLASKCSSSLSTTNQGAHACFSNEMFSAVVYEGSSVFPSGLEGEYTTCISVMPLNNTVLPIQQHDPYRTVPGYHIATGCSDGTVKLWKMTCAEDSLQTKKERHIWELVGMFGAHQGPIDIVSLSGCGRVITVGRNLKKNSTSIHIWEATKIRGDGNFLLGDTLMLQDHIVGLDGLSLGDGRFLLAVYLANELRIYSHKHPSFQNVLHTKNSKEEHLWSCIVLSHSHHDIVGFLWGPKATVVLVHENHLSLFSSWLVTGDNEYMTQIHSCPVVHEMLPCTNNFNEATFGKLKLPENFNSGNIDSNNVLLTDQHSHYSHGLWSLLHIAHRLSGPLASYHPRALIQYLYSGEWKRADAALHHLVRSMKVSETSKGVSNYSTCHSIPELPLSEYFAATVSNNISTKGFMWGENRSNTTFNLLSPSTSFLYEDGNLGINTTTSASEKPDIVELLDKSFSKYGISDSEKNQILAISDLMAGITDQSHSSPYKNLDEAGRRFWVAVQFEQFHALRRSADSSSNEGCRVDSASIAWAFQSDCQDDLLNSVLPAEPTWPEMRKLGIGLWYTNVSQLRTRMEKLARLQYLKSKDPKDCALLYIALNRIKVLVGLFKISRDEKDKRLYEFLSRNFQEERHKAAALKNAYVLMGRHQWELAIAFFLLGDDTSSAVNVCAKNLQDEQLAIVICRLIEGSGGPLERNLISNVLLPDAVERGDNWLSSLLEWMLGNYCQSVNRIFGCHPKLLIDQNVLADPELGHYCAILSAKSSFRNSVGEAVSAKLSKLSFAVAACALNKCGLPLEALECLSTNSSIDGKDSIIAHGDGDHKIFYGILSPVSASKNWLSSSVISGIESNLKLTMASKYLSSLLRKHSLCSQLNAPLSEEKVLNEYNNHQIEKLTCDITTVISIFDKRFSLKFADIAEKILIFCSHDGLLFLAYVLLWGTRSPDVATDNYILECHPLCPIDYLLLFSFKESCKFFSRYVVLSSMCSVLNMEDTNSTAWALKERHKYIVISLSNYLNVSRLLLKHDKSGNYILDDRSAMLAVMDLFEYIIEFSFSWLYYDIKSLLIMINPVLATSVNGDSFQVLLDQLMHAICHKNHDISSSTGGMPHAALSKTQLKKSVNSNLLADEKWHLIGASVWVRLISVLEHRLREFFEKEGLEHEAGVSGSEFRGLITSVAAKFVMDSIHFVSSSLVPLHASFLRKNLPMNSSSSLLFWLESKLPQQLPVSDSYDHLSRISQLSNSENMEALFNILWEISVNPVDVCNAFVSEGVNCFSLSNTNVTRSWKDIRCPVVECDKIITERSGEEHEHRLGSKRLGQGFAEKASYNGEVLYETKRRELIIQKEFQSPREILRRSGELLEYCILTFSVAQAVCLNSVNEKQAAIATNRKGLVFFNWSDKQHNKSFSEYVWSGSDWPLDGWAGCQSTPTPTSISPGVDLGRKKGSQLGSVGATTGLSSLAKPGRDLTGGGAFGIPGYAGIGASGFGWGEPEEFEDFIDPPATLENIHSRALSRHPSLPLFLVGSSNTHVYLWEFGKASAMATYGVLPAANIPPPYALASISSVQFDCYGQRFATAALDGTICTWQVEVGGRSNVYPTESSICFDSHASDVAYVSASRSVIASAGYSSNGSNVVIWDTLSPPATSQTSIMCHEGGARSISVFDSDRGYGSISPLVVTGGKNGDIALHDCRFLSTGKSKHHRVTTEHGVEASSMHDIKSSTFGGTDSGMVWHIPKAHLGSVTKVTTIPNTSLFLTGSKDGDVKLWDAKNSQLVFHWTKMHERHTFFQPTSRGFGGVVRAAVTDLQVLPNGFVSCGGDGSVKLVQIKDDLAAAYQR

SEQ ID NO: 63057 - protein, 226 aa, Zea Mays
MDYPGFGMSYGLHGYIASFDGMVDHVIEQYARIRGMKEVCELPHFLLGQSMGGAVALKVHLKQQQEWDGVLLVAPMCKISEDVTPPAPVLKALSILSCLLPEAKLFPQKDIGDLAFRDPRKRKVAEYNAISYSDQMRLRTAVELLKATKDIESQLEKISSPLLILHGAADMVTDPQVSKFLYEKASTKDKTLKLYEGSYHSILEGEPDDRISTAINDIISWLDSHC

SEQ ID NO: 63058 - protein, 494 aa, Zea Mays
MVGIATFDSAIHFYSLKRAQQQPLMLIVPDVQDVYTPLQTDLILPVSECRDNLEQLLESIPSMFENNRVADSAFGAAMKAGFLAMKSTGGKLLVFQSVLPSLGIGSLSAREAEGRANITTGDKEAHKLLQPVDNTLKTMALEFAEYQVCVDVFLTTQSYVDIASISVVPQTTGGRVYYYYPFSALSDPAKLFNDLRWNISRPQGFEAVMRVRCSQGLQVQDYYGNFCKRVPTDIDLPAIDSDKTVMVTFKHDDKLPENVECGFQCALLYTTVYGQRRIRVINLSLSCTNLLANLFRYADLETQFSCFLKQALVKSLGLRTDGRLDDRSYWISVASSVSVVLAVPLVFPRLIPIHDLTSRDDDDSLIPSPLMLNSENVQEDGVYLLENGEDGLIYVGNMVNPATLEQIFGVSSLAALPAQLALEQFDNELSRKVNEVVNEIRRQRCSYLRLRQCRRGEPSGDFFRSFLVEDKAPGVFSYVEFLVHVHRQIQSKMT

SEQ ID NO: 63059 - protein, 93 aa, Zea Mays
MRHRRPLPFAVERPMPKQAAAPDVRTPTRQATRERRSPRRAGGDHTPHVRTARSLQRACRRPHGTVVRATNARRRRSVWAARSVFVSFSLAHR

SEQ ID NO: 63060 - protein, 73 aa, Zea Mays
MPKPRPTASSWCCRCSTKRPAGPSSRRPCSSILWRGPADSTTHSASPRRCGPPAWPATPTSAYVTTGRATYSS

SEQ ID NO: 63061 - protein, 153 aa, Zea Mays
MGIKGLTKLLAQHAPTAAVQRRVEDYRGRVIAVDASVSIYQFLAVVGRKGSELLTNEAGEITSHLQGMLNRTIRMLEAGIKPVFVFDGEPPEMKKKELAKRSLKRDDAIKDLNRAMEIGDENAIEKFSKRTVKVTGRHNDDCKRLLRSDSAFY

SEQ ID NO: 63062 - protein, 188 aa, Zea Mays
MQELFINSSADGSLAMEATTCMNETHPGDDSDFNDDVCSDFSNYPQPVHDLGDDSDTLQSPNHHPSQSVDHSSSSSGLKRPQGEGVPAKRNVEPKSRTTKVVDELSATLVELQNDLKKPPPPVPMPFVNPDAILWQRLENMTITTDQKLMVGMYLAHKDQKGMRGFLSAASDITFESWVLKHLSDLDL

SEQ ID NO: 63063 - protein, 497 aa, Zea Mays
MINSSVDKLTRSTNFLRFLGQHALIVDEESPSTAGEEEIEDQKYHFMSLMLNLVNTFLYMVNTYIIVPTADDYSVSLGAASTVCGVVIGSMAVAQIFSSVYFSAWSNKSYFKPLVFSSIVLFLGNVCYAMAYDMKSLTVLIIGRLLCGMGSARAVNRRYISDCVPARIRMQASAGFVSASALGMACGPALAGLLQWKFKIYMVTFNQSTLPGWVMAVAWLLYLIWLWVSFKEPNRATEVNEAPQNPASGQTVDIGQVENGLAQPLLMDSVDKQNEDEDEEVDESEEAADDSRKPATSIGSAYRLLTPSVKVQLLIYFMLKYAMEILLSESSVITNHYFSWNTSAVAIFLAILGLTVLPVNAVVGTYISNMFEDRQLLMVSQITLLVGIIFSFKVTSTYSVVQYVVSALVTFVSAEVLEGVNLSLLSSVMSSRLSRGTYNGGLLSTEAGTLARVVADCTITAAGYLGVGKLLNVTLLPSLVICVASIACTFLTYNSLF

SEQ ID NO: 63064 - protein, 905 aa, Zea Mays
MPLPKIHYNMTGGLIFLLLFYFAYISFLQVLLSQSHRFRALVLLGRFLDMGPWAVDLALSVGIFPYVLKLLPTNTIELRQILVFIWTKILSLDKSCQVDLVKDGGHTYFIRFLDSLDAFPEQRAMAAFVIAVIVDGHRMGQEACMNAGLIDVCLRHLQPENLHAQTEPLLLQWLCLCLGKLWEDFPEAQLLGLQTNAPETVICLLSEPRPEVRAAAVFALGNLTTLSNCPDDDSDDDEKVKAEINVVRSLLQISSDGSPLVRSEVAIALTHFALGHNKNLKSVAAEYWKPQSKSLLKSLPSLANINNPSNVYSPNNILQGSIGPVLRVGSDSGAAGRDGHISTSSPIAASSIMHGSPQSDDSSQHSDSGILLRENASNGGLSYTRSRPVDNVIYSQFISTMCSVSKDPDPRIATIGWRALTLIGVEQVAMKSTRFNSGGLHRGETSASTFGMAHSSSWRDMNSGSNSMKFMTPPVSPPQHDYLLLGLRRVCSMEFGQHPINSPDGFANLLLSSATGPSNAELKKLPESTIYNWSCGHFSRPLLTASDDNEETNARREERERIALDFITKCQRSSACKITSQIASWDTRFELGTKAALLLPFSPIVVAADENEKISVWNYDDAQPVNSFHNHKLSDRGLSKLLLINELDECLLLAASSDGNVRIWKNFACKGGQKLVTAFSSVQGHRAAGRSIVIDWQQQSCYLYASGDMSSILVWDLDKEQLLNTIPSSADSAISALSASQVRSGYFAAGFADGSVRIYDVCSPDSRPVYVARPHAPRTEKVVGIGFQPGFDPYEIVSASQAGDIQFLDVRMAAEPYLTIEAHRGSLTALAVHRHAPVVASSAKQMIKVFSLEGEQLRIIRYLPSFMGQRTGSVNCLSFHPYKSLLAAGAGHNALVSIYAEENYK

SEQ ID NO: 63065 - protein, 57 aa, Zea Mays
MVPSSRPPPQLLTPCARLLWLRSALAHVTIVVSSLVIASHAVEPIVFLVQCLRGLTR

SEQ ID NO: 63066 - protein, 1446 aa, Zea Mays
MAWGEDEAIGPDVASAGLHVSERIGRDAAAQPDLEEALEASRYASHPYSSHPKEWPPLVEVAEIRQLPPMLIERYNTAAGEGTALCGIFSDIHRAWATVDNSFFVWHFDKWDGQCQEHNVDEQAICAVGLARAKSGIFIEAIQYLLVLATPVELILVGACCSASADGTDPYAELSLQPLPEYMIATDGVTMTCITCTEKGQIFLAGRDGHIYELQYTTGSGWRKRCRKVCLTTGIGSLLSRWVVPNTFKFSTVDPIVDMVMDEERNTIYTRTEGMKMQLFDLGANGDGPLTKITEEKNIVDPLDAPYGGRRTNAPPPRTARSPKPSIVCISPLSAMESKWLHAVVVLSDGKRLFLTTSGGIGSSVGLNSGLRRPTCLKIVATRPSPPLGVGGGLTFGAVSAAGRVHPEDLALKVESAFYSAGALIMSDSSATAMSSLLAVQKGSAAQLSLPSTFGTASRASRALRETVSALPVEGRMLCASDVLPLPDAAYMLQSLYADVECFTGFRKPFEKACIKLWAKGDLPTQHILPRRRVVVFNTMGLMEVIFNRPVDILRKLFDGNTLRSQIEEFFNRFGAGEAAAMCLMIAAKLLYAEDSLISNSVSEKAAEAFEDPGLVGMPQIAGTTALSNTRTQAGGFSMGQVVQEAEPLFSGAYEGLCLCSSRLLYPIWEFPIMVIRRPAGTNKCEDGVIVCRLSAGAMEILESKIHSLETFLRSRRNKRRGLYGYVAGLGDSGSILYKTGPIIGPGGHSNGRSPYNSQIQDMDPADKSASNKKPRLLYTSAELAAMEVRAMECLRRLLRRSGEALFLLQLICQHNVARLAQTLGNDLHKKLVQLTFHQLVCSEDGDQLAMCLISALMEYYIGPEGRGTVEEISTKLKEGCPSYFNESDYKYYLAVECLERAASMANNPDERDILARDAFNLLTKIPESADLSAICKRFENLRFYEAVVRLPLQKAQALDSNADITNGQIDPRHHDTIMLQREQCYEIVMNALRTLKGVGHSRMQSADKSSGVATAVDPASRTKYIKQILQLSVQWPDTVFHEHLYKTLIELGLENELLEYGGSDLASFLQSAGRKHQEEVRAVSSVTSGAAKLHDLSAPILTSQTKYLELLARYYVRKGERIAAARMFLILAERQCSNSEEVPTLDKRYEYLRDAVLQAKSAGIEADSSRKPIDSSTVDLLEGKLTVLRFQMQIKQELELMTARVENISSSSESPSGLFPRDNILADAEAAKAAKDKAKELSLNLKSITQLYNDYAVPFELWEVCLEMLSFANYSGDADSKILREIWARLLDEALTKGGVAEACSVVKRVGSKLDPADGACLPLDIICLHLEKAALDRLSSGEELVGDDDVARALLGAFLAILREWGISVIAHRLGTTSTGASIFLDGTFSLNQTGTANQGARDKIISLANRYMTEVRRLNLPQNQTENVYRGFRELEEKLLSPY

SEQ ID NO: 63067 - protein, 1814 aa, Zea Mays
MQEELGQRMHVPHGINLCFSTSSELFQVESSIELGTAEVNPVPSEKLSANSQAVRDDAGAVEGIDMNGKPVQKPKRKKHRPKVIKEGQSAKLQKPKTPKPPKENGNQPTGKRKYVRKKGLSTPAKQIPSEGADTHTRAKPGIAQRCLDFDVEDQHGHLDLVSQTQETEIQTGPGDTQPSISGVERSNAQVSCHWGWGGTSSSIISADPIVDIQGLQADCIPKRVNFDLNNSMASQMPTNYSSRMDSSGQFFQFGLGEKVQTNQLLDYNCNLPARRVSHLSSSVDHMRHPLANFDQYISTSQVCTENSRRHYQMPSSSRISENRTAASQYTERVSMGGNFNPGACIGEGTVIKQMAQCYRLPESPLVPPKHNERDVMNGNLNEFSVYNDYLNFSSNSNYQTGAAFGFHDSPVYSDVLAMGKKREHNAISGHQISFDIDFVNSNSTRKFCIDDLLSTSSQTSYYPEACKRMRPENHSNQLNVTTGKLSSSSAFSGSLNTNNVSTINPGIGTLADIQRLMALEKSQASQQMIDFITSQNNMAGESTELAQQNNSDKGFVALHNKKFQSLTAQNIPLPDSTVNQSGESNILRNGIHQTQPWEITSRSHHSSDNFALPNKWSGYLTAGNTQLSSITVNPSTENYIQSNAIYQYQCLENVVAKVPVLSGTHNTSSQEGHNHSTAATNEHIRTTSEEVVRSFTQRASEPTTHGNYNLNSSRVTAEANSTEKPRKRGRPRKVVKPNGEPKERGTKGKQNVSHEKPTSQKGSHTDILKTNGISYASEPSTGITPRMAIVESKSSDQDKEIHGGVIPQATAISVDLLDGIIQKIKLLSISRPDNVVAEIPKDALVPYEGEFGALVAFEGKTKKNRSRAKVNIDPVTTMMWNLLMGPDMGDGAEGLDKDKEKWLDEERKVFRGRVDSFIARMHLVQGDRRFSRWKGSVVDSVVGVFLTQNVSDHLSSSAFMAVAAKFPAKPEVPEKPVAEMSHTPEQKDSCSCSGLFGDSIKLQGKMFIEEISDVRSLITTEDNEESNSNELIGSSAGYGVNHATGGCHVSYRKSLTESHENGLSGSVFPTTGFSSVVETEDGSLEDVISSQNSAVSSQNSPDYLFHRTDPIGSSSLQNFTEEGYIMRNISNGTGSSTDCSGFLPIQDPKGTLGLSEYYGHNPLLVSGVNKGVLLDLNRSYQPLHTSMPYVQNSESDFTGVSCFSHMDKSFHTGPNRVNLSSVTQSEASLYPTDPLQQDEFSPVIKQNFQPLYSSDKVSLFKEHCSYGNDFSRNKTEAAIMEPLVYSNPQELYTTSTEQMGVEQFQSGCGQQDNDVRVQTTSYERHQSSTLCGNQNSQLEILQGVASGSTQKFIDTQKSPSEVQQNGSKAKKVRGRPKTKTYDWDSLRKEVFSNGGDKQRNNDARDTVDWEAVRQAEVREISETIRERGMNNMLAERIKEFLNRLVTDHGGIDLEWLRDVPPDKAKDFLLSIRGLGLKSVECVRLLTLHHMAFPVDTNVGRICVRLGWVPLQPLPESLQLHLLEMYELHYQMITFGKVFCTKSKPNCNSCPLRAECKHFASAFASARLALPAPEEKRLATSEDPNVVEFCHQTYINSGAVGELEWSANYPKHAVCGNLQPFIEEPLSPEPEPENVEAKDGAIEDFFNEDPDEIPTINLNIEEFTQNLKNYMQANHVEIEYADMSKALVAITPEAASIPTPKLKNVSRLRTEHQVYELPDSHPLLEGFEQREPDDPCPYLLSIWTPGETAQSTNAPKTFCDSGETGQLCGSLTCFSCNSLREMQAQKVRGTLLIPCRTAMRGSFPLNGTYFQVNEV

SEQ ID NO: 63068 - protein, 76 aa, Zea Mays
MQPQKQKLSAIRTLVAISSRKFVIPDVPADIVNSLEPEVLVSYHSKQTAAVSIRSTGRSTSRSTTCIPPLSKASIC

SEQ ID NO: 63069 - protein, 260 aa, Zea Mays
MLLLQRYEFKANHEEWVNTVKPKLGLDISTRVLQAVNFARENIKSLYAIRNELRVALKNLLKDTGILVLPTTAGYPLKRNSKERLSSGFEDRMYKFVGVAALSGCCEVTIPMENLDHHVSLSFVAAHGSDKFLLRNILDTYSLIQDQVVLASKLETAPVTNVDVDVNASELLKEKGNSAFKRRQWIKAIEFYSEAISLSDTNATYYCNRAAAYLELGRFKQAEADCDRALLLDRKISGMLWHWSHRIKQLLQRKGGCRNS

SEQ ID NO: 63070 - protein, 51 aa, Zea Mays
MAKEKKVIDPALAGFYEAMENTNTEKITNEMLAGLSEDSGDSESFDLESGN

SEQ ID NO: 63071 - protein, 381 aa, Zea Mays
MQVWDYTGLGYTRYNARDVGKEHLGCVVENKVLCNSLLLRLQEELDDIENVIYPTRLVSLTFPLKTRQAGMKPTSREPLSVGHTTEEFHRSHLVKLDLSDGRSLYSKLVIGADGSKSNVRQIAGIKTTSWNYPQSAIICTVEHVVENDCAWQRFLPSGPIALLPIGNNFSNIVWTMSPEESLRHKSMSPEEFVNSVNHALDFGYGPHPHSTALDHYMEQFFSGIGSSAASTKECFEVPPKATRVVSERMAFPLSLMHSHDYVSKRLALVGDAAHTVHPLAGQGVNLGFGDAAALAKVIAEGVSVGSDVGDLTLLQRYEKERKAANVAMAAVLDGFQKMYSVDLGPLNVVRAAAFHGAQYISPLKKNIISYATGDTKWSLFQ

SEQ ID NO: 63072 - protein, 1199 aa, Zea Mays
MDRATPRVCGRRGVSQAAVEAAPSSSRARRRDKAPAVVMDLGDDDCGGGGARKTVGGAAGRCEGSTKAPLPLLPPMMVPAGAVALRTRSRRRAMLAAAVVEEAPTKKKKKEGAIPDAAEAPRGHGSKAAATSMATSSHKRRAGTSRSTSRDKRRARSGRASEPARVGRARKRKRNELEAPARRERVKAPCVSESDDNSGRGDDASHDGDAEPRVGVAIGTDLVNGDHPAAKEVVEGAGDEDTGDGGNSGLASTADVFAEEMAPFEDDYDDEMLEEQLVGDVIRAYSNGRNFDSDGVDWEAEDEMEFNDDADNSDFMDDADDSDFMDDAYEGGNSKPIQNHAKLEIQDWVNQKVVLSGGRCEARGEGDLEEELDVGKEADEEDVEPKSEAAPGSDKRVLQLEILGSDEEIKVLENMSSAPSRKASVQSKLPTIPSCVAWRTRSSWGVNQDRLSYDTYFEELSDEPKEDDDDTEVELDEVEDDNNDDDSSDAYDKDDEEKEEEEEEAERRKLNNRICTSDEDMINITVPTSRYDMFKKKNSSRYDIEWVEDEDASVDMLQPVSFKKDSSWKPVAVGNDTFTEQQKRSRFTWELERRKKLKLEMKTNPLHERDLDSDPNSSGSDQIRKYGFKSDGSHKVDRKKKHTSPKSGKKPSSAIILKRQSLLKLLVDKMSGDKSLASFPFDQNPQLQFIFKEMHPLVFSFGDEDLVAADRPEQDVGLDMLWADFDFALESENIGTYYDDECQEGNQLDFSLAPVTPCSRGKHEFVIDDQIGIRCKYCSLVNLEIKFMFPSLVSVFAEKSAWPNDKGVKNTLMFHDLYEQGVNDTEQSQDIHQYGTVWNLIPGVISTMYEHQREAFEFMWTNLVGDIRLDEIKHGAKPDVVGGCVICHAPGTGKTRLAIVFIQTYMKVFPDCRPVIIAPRGMLFAWDEEFKKWNVDVPFHILNTTDYTGKEDREICKLIKKEHRTEKLTRLVKLLSWNKGHGILGISYGLYTKLTSEKPGCTEENKPLELIKEHLRKFFKWREGKEILQMDGKILPRYRQASIEAFNNPNNDSRVLLASTRACCEGISLTGASRIVLLDVVWNPAVGRQAISRAFRIGQKKFVYTYNLITYGTGEGDKYDRQAEKDHLSKLVFSTEDEFNNVRNMLSKAEMEHCSKFISEDKVLEEMTSHDQLKGMFLKIHYPPTESNIVYSYNQIATE

SEQ ID NO: 63073 - protein, 56 aa, Zea Mays
MSRSTPRTRRTPPTRPRRVAAATEVTVTAAATAARAVTAAARVAAATVATAARAAT

SEQ ID NO: 63074 - protein, 153 aa, Zea Mays
MSSHLAAAASALPLPLPPPAVAAPSRALRALILSRGGAAAVCSSLRRGGTPACLVRRLCSHHSAAAAATALEEARRGRKQLGMTPALYDYLLANVREHPILRELREETAAMRGSQMQVSPAQAQLLSMLVQILGARRCIEVGVFIISCCTGPS

SEQ ID NO: 63075 - protein, 55 aa, Zea Mays
MRHGVPTHKQQNRRSLLHLRRTSPCLSGSAYVSCGWPCSRSATLPVLMGVAVNAS

SEQ ID NO: 63076 - protein, 467 aa, Zea Mays
MASESRRVRNARGPFWFPCHYRALTVHQPVQSSKVLRPAIQSAASPLLLLSPLLLLRSSSFASSPRRQHPPPSRPLRVNASTLQSHLFAAAYASSASSAMMKDKMKGFMKKITSSGSGTPSSFKGTSHVLGSGPSPSSSSSHPASRPSDPSANPKPAPKRPSPPPPPTSTTDFTPYTPLVSSSSSSSRRSVANGTAAAATIACPSCEDAFPSELAVTEHLDGCLASAGGARARAAAYLAADPPPPPAAVEVVKRLLGNLLREPSNDKFRRVRLGNPRIKEAVADREGGAELLEAVGFRVGDEGGEPFAVMDEVPSDARLNGIRRALLLLEGAHSSAAPGKVEAEAKESCSNVPDVLQDGAMTIDRQIRVFVSVPGSSVPQNDVPDSFYKLSGEEIRNEAKMRRERLEQSRLLIPKSYKEKHALAARQKYKQAVIRVQFPDRMILQGIFLPGEATGSLYEGCQFPTKN

SEQ ID NO: 63077 - protein, 121 aa, Zea Mays
MTKWARVFVLPSEGIIADSSLSNHHEDSLGSGLPSISTGKPFDSDEVPPGVTLTAQFLYHLANKMDLKLDIFSLGDTSKPANGEAASPKKQSPSGSRSPDLLMANTAELTTIGQNLQAKPE

SEQ ID NO: 63078 - protein, 588 aa, Zea Mays
MRPLPKKPNAALPVPKQLKVHHPENESLSRFFLEKWRAMMQEPDGLSQNNYLAFANANRSLCSSKEPIRTLKDFSNVKGVGTWLINHMKSFFEKSSQDLSPAKGKKAKGTKSYLPRKNTAAYAILITLHRAKTSGKDFMMKQELIDAAEASGLSRDAIGPNKSKAKQSYGKDWYTGWSCMKTLLSNRLVTKWSNPAKYMLTQEGEGTARDCLSRSGLDDSARPLTIIGAHNTSAMDPSVARHSPELVSDSSLTKKKSNCYRQVQATNYEGIICCDSDSEEPCGKDIPLKGMEPITSCGPPDISRPFQGTPKLQSSTMGSAKLAMPPRRANENFLEAYEVILILDDREKFGSRSRKVADNICSLSHFAVDVRQLPVGDGIWIARHKEDHTEYVLDFIVERKEVMDLDGSIEDNRYRDQKLRMKKCGLRKLIYLVEGDLNRAPKRVKTACFTTEILDGFDVQRTTGFADTQKRYVDLTRSVIAYYDASFSIVGKASPVCPTYDDFKRKCYDLKKKTVSDIFGCQLMQVPQVTEEAAQAVVELYPTPLLLAKAYSILGGDTSAQEKMLKKKNEMVNAGASRNIFHLIWGDG

SEQ ID NO: 63079 - protein, 724 aa, Zea Mays
MDRQTASHNSSESLCSSGIQYGLNRGPGTIGGLHSSNSLRSLDEIPNNDLPSNTFASLLGSSLSRSASPDPELVRRAPSPSLPPIGVKVGNTDKMNGGSSSFRRSSSAIGGSDDLVAALSGMNLSSRAMSGQTMDQSQLYQDVDNVQKFLFDRQGDQPNGNQQHYMRRPEHGQSKLSDGYSANLANSSTMRNQINSGSFTSFDSLSLGSGFPSPRIGSRSPGGTVSSRQNLAGMSNMLNYNGIGSPTASPSLQTSIDPAYIQYLAQIAATWDDPLMDRSHLGSSYMDLLGTQKANLGPLLQSQKQYGYCGNLGFNLGGYAGSPLTSPVLPSSPIAPGSPLRHGDRNMRFPPGMRNFGNSFGSWNSGMSGKMDANLMPSLLEEFKSNKSKSYELSEIAGHVVEFSADQYGSRFIQQKLETASTEEKDMVFSEIMPQALTLMTDVFGNYVVQKFFEHGSTAQIKELAGQLIGRVLALSLQMYGCRVIQKAIEVVDLDLQTKMVAELEGHVMRCVRDQNGNHVIQKCIECIPQHAIEFIVSTFYGQVVMLSTHPYGCRVIQRVLEHCDDPKTQQIMMDEILQSVCLLAQDQYGNYVVQPHERSAIIEKLIGQVVQMSQQKFASNVIEKCLAFGNPVERQVLIGEMLGSTSESEPLEVMMKDQFANYVVQKVLETCDDQQREMILTRIKTHLNTLKKYTYGKHIVARVEKLVAAGEKRLGLQPACTAA

SEQ ID NO: 63080 - protein, 125 aa, Zea Mays
MGSLMSCLSDPIPSGNRSPPPQPKRRSSTSSRGRGGGGRDSAKASVSIDEEALTAAAALVLGQRGASGGLGAFERSASVRYAAKRQSQGPPLPRSCSTRPRSLADPELQPQQLLAKLMNTLERSE

SEQ ID NO: 63081 - protein, 860 aa, Zea Mays
MPGWKDVVVFLQGKALCEGWEKKMKRRRSVGTMLSRGSDADRDVKSMGQHRPANEARPRSSDGLGYRHGVSAGALAGNKLDGTSQQNNIVSCILPKSDVDYVAQPNERRERHAGVEKERTTVKGNKVNTSDDMQNGSLSPLPKAKACRAPRTSSLAINSCSNFQRSTGGNDEWEEAPYPNKVSPLAGMTNRKRSTHSNASSPPIAWVGQRPQKMSRTRRANVVSPVSNFDEVLSEGSPLDTATRSAPIESGSVLLTKNTSTTKMDSIPSPAGLSESEGSAVAESKSKEKTMHSGEVGNEGANTAHNAMGLIFLSNKNRIPLKEELEDGGVRRQGRSGRGAMHVKGCSLMPKEKLVTAETRKPIKGGRPGSEKNESKLGRPPMKKGSDRKASSWHSQALNSDLTDITGEPEDDQEELLAAVNAARSAIVSAYSGPFWKKVEPMLTFMSSENFSFLKNQINLVEELEMSMSCMYDSEHDIIASVDHRIMSKMEEHSSQGLALSNFPPSSQQSKTNGVGAKGLIGCFSHGDKIHTGPQKLEADKWFNEMAPMAHRLLSALIMEDDLPDTNGVQSDILVEFPNSHNPYTVNGYMENELQASTITSNFGLSVDFVHSNSTSVVHQSMCNGFTSNFNNSNSENSVHSEDLSDGLNFTVYTESGPLHDLIPPIPQQCQNPGKNFPLSPYEYQYGQMSVEDKILIELQSIGICPETVPKLDDGEDDNINKMISELRKRLHDQVNQKKCRLHKLDKSIQDTKNIEERSLEQHAMNKLVERAYRKLKGGRIGSSHKAGVSKSANKAAKQLALAFAKRTLVRCHKFDETGKSCFSEPSLWSVLSAPLPSSDARFTEGVERLKHQKLDRTPF

SEQ ID NO: 63082 - protein, 93 aa, Zea Mays
MSPSSPPTGAPPTNSAGTAAAAAADAVACAPTAASSCRITWHMQHPRQAKITTGLSRTNRPTRSAGASPSPAGSMVRLLGWDLGDWDFRGGAM

SEQ ID NO: 63083 - protein, 166 aa, Zea Mays
MPIARYLDLADWPLLSAINFASQLTCCCGAAIPRHSCRCIVAWPGVVATSLLSSKSPPRMLGSLIARLSIPRSSRLMPQQHRGHPSSQCCYLPCYCNHASCAARLKYSSQVSILCDSSLVRQDFLVKERFQEYVEKQAPGRCPKCSAKGLNKDHRRLFELLVDMVR

SEQ ID NO: 63084 - protein, 115 aa, Zea Mays
MPPPAAHATPPAGQLASRPATAPLCSSRCSIVCRRWCRPTSPSTRLMPCLRHSTIREGSCSMITTLARGTTCSLCGQSRTTNIYHFNFHSHGGCLRSLESKWETSYAECFVICFS

SEQ ID NO: 63085 - protein, 156 aa, Zea Mays
MYALIQEINILHNSNVPVAEMSSQLSPWAAALFQFLPPFIRRELLLHQESDNSAQLSQIDTEQLLAHLVETEMIKRTKEGRYKGRKFSSVCHFFGYQARGSTPSNFDCDYAYALGRISLHMIAVGLTGYMATVANLKDPVDKWRCAAAPLTVIRCH

SEQ ID NO: 63086 - protein, 1491 aa, Zea Mays
MGVHGLWELLAPVGRRVSVETLAGKRVAVDASIWMVQFMRAMRDDSGEMVRDAHLLGFLRRICKLLFLRVRPVFVFDGATPALKRRTLAARRRHRDAAQAKVRKTAEKLLLSHLKARKLEELAEQIRSDRAKHDAKGKQVESSNGGETEKTSQNQIGDTNNSEGNVASINQEKVDGMLAASLAAEEDTDFTDEGTHHLTSAPLPEGDEIDEDEDDDEGMIFPMTTGDIDPAVLASLPPSMQLDLLVQMRERVMAENRQKYQKIKKEPAKFSELQIQSYLKTVAFRREIDQVQKSSSGKGSGGVQTSKIASEANREFIFSSSFTGDKQMLAQRGEKEHNVENTRSKKEIHSSVFASNPTSSLGTMKPPNSKTLSDFGPDVETYRDERGRIRVSRVRAMGIRMTRDIQRNLDFIKENEQVKSKGQTQTNFHNGSTGNEEPPDFPEHLFESNKLQSSCSPDVDLSETDRDNHQTSSQIGTDIISESSCYGNKEAIEISFSVDQTEVKDGDEDIFLQLVSGMAPNNIFSGNNCLVKKMEESVDSECIWEDGVIEAGTSPVKIDMKDHKSSLPENCSDDEMEWEEGDSFVPGVASSSEHNPCNAPKGDLEEAALVQEAIRRSLEDFEKKASENVSTGDIQASVEDRSLQFSNNVPKISESLGENDSHSGVPVVDEINNETRTEINYDKDDMVQGTGLLGTERQESESQPPLVNNDWHADMHRAHPLGSVPPCTTFTSDLAEKPSVSAETNGEDVMIFTTKIPGTALGDCDKTSNLNIMNSDQSKCSKDIASTGESLSHQKNLLIDELLAVTAEQKENATQVDLKFATSEVDYTQICGNDDNHTISASYVDAELSRLRQEQIYLGHERRKLESHAESVSSEMFAECQELLQMFGLPYIIAPMEAEAQCAYMEINNLVDGVVTDDSDVFLFGARNVYKNIFDDRKYVETYFMKDIESELGLSREQLIRMALLLGSDYTEGVSGIGIVNAIEVVHAFPEEDGLQKFKEWIESPDPSIFGKLHMEISGRSKKRKLDENDSDGKGKGLEPECIQGSDDKQSSNEDEHVKEIFMSKHRNVSKNWHVPATFPSEKVVNAYISPQVDSSTEPFSWGRPDLGLLRRLCWERFGWGKEKADELLLPVLREYNKHETQLRMEAFYSFNERFAKIRSKRIKKAIKGITGKSFLDADESEQDNPSTSKTIKKKEASSSSHARGREKRKNDYGVMGSQEDNIIDNTNSLAETVENTRENNNTTKIKRGSSCGRPKGRGRSRTTAGSDATINQEDYEIEYSTSASDEDSCKRHSNSYGSEGRALRRSSRKRKQVTYMEDGHEAYGNDVPMHQNDENNPGQPAAAADVAGEDTGFNIYHQDTSELNSSQMHTGAGITEDINEDSQRFELREDNQVDSTPKDYLFNGGGFCMEGEGDEQEPACDQSGAEVEPGPSGPCGAMDEVSESASISTAMECTENARMEARGASSSQQRRKASRGLSAMPTLIKRRRKS

SEQ ID NO: 63087 - protein, 1131 aa, Zea Mays
MAVAGLAPSPAPALLRRFPCSAPPWAPSPFRPRRPRRGRSMMSPFTGARRQEYSHSSVLGIQDNRALKLPVCVNFNLQNGGAQEWADESRRLSLSKAGNSNGSTHLGSGIFHHEPLEDFKSSNQSLLHSVRQRMAPNSLANRHVNTELAKHHAIKHAAVAVSALTSVVNDDLKSVKRPKESEVEVHWSNGPKFHSHIPKISEVETSLRFDENATDGYAKDVNECSPEETVQPSRTRAPSSQESLDARKALSTIYDKVLVVDNVMSARSVVQLLTTKYRNYIHACDTEVANINVKQETPVGHGKVTCFSIYSGTKGAEADFGNGKTCIWVDVLDGGPDVLMEFVPFFEDSSIRKVWHNYSFDSHVIENYGIKVAGFHADTMHLARLWDSSRRTDGGYSLEGLTNDHRVMGVVPKELQKIGKRSMKTIFGRKKIKKDGSEGKITAIEPVEILQREDRELWICYSSLDSMSTLRLYESLKSKLERKPWTFDGYPRPGGSLYDFYEEYWCPFGAILVKMETAGMLVDRAYLSEIEKVAVAQRESAADKFRKWASKYCPDAKYMNVNSDTQIRQLFFGGIENIYKSGDFLPKSKAIKVPNNETAVSEGKKVPKYRTIDLFSIVEDLKTDIFTASGWPSVSGAALRNLAGKVPSDLVYSTDDVNDDECGIHSEISHCDLEDTSSYGTAYDAFGGGKEGKEACHAIAALCEICSINSLISNFILPLQGNHISCKEGRIHCSLNINTETGRLSARAPNLQASSIVGGKGASIARSWAQMHSWKIGVRRYFFEGKGCRENPYSTILLNNEKKGTRNGPRKEKNKKTKNKKIGYREFSQRHPKPPNAIKPKHLQLEHVIEAALPRKERRGHVLEDEVIHLLPNAPYYHCQNIHEEVVPKGTPCSFDKKGVPSANQPALEKDRYKIRQAFVAAPGNTLIVADYGQLELRILAHLADCKSMLDAFKAGGDFHSRTAMNMYQHIREAVEEEKVILEWHPQPGQEKPPVPLLKDAFGAERRKAKMLNFSIAYGKTAHGLARDWKVSVKEAKDTLKLWYSDRKEVLAWQMKQKQLAHEKREVYTLLGRSRRFPNMAHATSGQRGHIERAAINAPVQGSAADVAMCAMLEIDRNTRLKELGWTLLLQ

SEQ ID NO: 63088 - protein, 82 aa, Zea Mays
MAQAKQASEEAERLATARAKVGMQMAEKQGRIATLDIECATLKQEWFSMKNKITRQEPHVAKSQSKQNFIEGTGFSENRKNT

SEQ ID NO: 63089 - protein, 427 aa, Zea Mays
MIYQSRLAPKFDVNRGKNMNFVLSLLDSENENVTELAAAIISHSCKSSAEQLALCSAGVPQKLVSLFGGSVNLRDACLGSVTVVVQNNQDVASRFVTTVHGKCFRSVVGLIHDRNPSTRLLACRCLIALGHASPGHFQDKQIKTKLIMVLLELIEEPGHIGDEAPLALTTMIKDSFELQKQALATNAVEKLSNHLLAKPLETRQAVAILLALSELCSKLEESRSQMMSDEVSTLLLDALKHDWADIRVAACSCLKNISRSPKVLSGGRLSCDTVIGPLVQLLNDSCTSVQVAALGAICNIAINLTPRKSVLLNSGVVSHLVHLSKSMDPILRLKSVWALRNIMFLLSPKDKDFIVKELTLSTLSSLICDSEHFVQEQTLALVRNLVDGYVDSANFVIGEDGIIMNAIARQLNNASAPGVFVQQDMRG

SEQ ID NO: 63090 - protein, 353 aa, Zea Mays
MGQSYVTAGKHEETPEAFPLPRGVAIVRADAGWAHCVAITDEGDVYTWGWKECVPTGRVIGDQSSVGTKEKDERQMAMATDQGVSPRSQVSRTSSGAASGPSESRGTDDSTKRRRLSSAKHGPESSTSSDESLSAPPCVVTFNTGVKIVSVAAGGRHTLALSDLGQVWGWGYGGEGQLGLGSRIRTVSSPHPVPCIESALYSKDRPSAMKGNKAAEGHVSKVLGNCVRAIACGGRHSAAVTDSGALLTFGWGLYGQCGQGNTDDVLSPTCVSSILGSKMQDVAAGLWHTVCTSVDGDVYSFGGNQFGQLGTGSDQAETVPKLVDATSLENKNARSVSCGARHSAIITGNFKLF

SEQ ID NO: 63091 - protein, 77 aa, Zea Mays
MSKTNRPPISMRRLVKFMEGKEKNIAVIVGTVTDDKRIQEVPAMKVTALRFTKPYVRSKGRKFEKARGRRNSRGFKV

SEQ ID NO: 63092 - protein, 348 aa, Zea Mays
MEDLGLWKQAWMWVLSQKHILAWAHTAACGSRERLAFLVDRHWPAVSRACATSSRLALAALRQWRGCTARGVLAVASLGPAAVFVILWSFFVCMTSPACALYALLSLGAAAAVVHYMGYTPGLFIVGLFGILIMWMYGYFWITGMLLVAGGCMCSLKHARYVIPVLTSYGVYSVAVRVGWLGVFLTLNLSFLTNDLLNKLVQGYEGSTEESQFEDMKDSDPVMDEFYRSCEFPSVPDSEPETVSCAKPYCSAPIQDVLHVQKEEPPSKVVKSDSTSLDEIKRIMDGSNHYEVLGVPRNRSIDQKTLKKEYHRMVLLVHPDKNMGNQLACESFKKLQTAYEASVWMFML

SEQ ID NO: 63093 - protein, 82 aa, Zea Mays
MAHGAEVGCSLFASSKGSRIEGSRARSPRRLMAIRDPTLGPERQELPPATAAARAPPSLPHGTHERPLGQGQPRLTDSIPSL

SEQ ID NO: 63094 - protein, 738 aa, Zea Mays
MGRNGSVRRSAFSGAAGAAAGPPSFSVNPADYRLMEEVGYGAHAVVYRAIFLPTKGVVAVKCLDLDQLNNNIDEIQREAQIMSLIDHPNVIRAYCSFVVEHSLWVIMPFMTEGSCLHLMKISYQEGFDEPIIGSILKETLKALDYLHRQGQIHRDVKAGNILIDGAGVVKLGDFGVSACMFDRGDRQRSRNTFVGTPCWMAPEVLQPGTGYNFKADIWSFGITALELAHGHAPFSKYPPMKVLLMTLQNAPPGLDYERDKRFSKSFKEMVAMCLVKDQTKRPTAEKLLKHSFFKNAKPPELTIKSILSGLPPLWDRVKALQLKDEAQLALKKMPSSEQEALSLSEYQRGVSAWNFDIEDLKAQASLIHDDEPPEIKEDEDIARNIEDLSSRNHLGKSFANECNSRQRAFVTTLKSDGNRPTTNEAFDFDFDFSEAATTRRADGHERNIRENDSLPSTAKRDPESNHWTSDVGQRQLSSGGSNSSTAERGYGFERDAVVQTIPEKQRSEARKTASLSGPLSLPTRASANSLSAPIRSSGGFVDSSGDKSKRSVVEIKGRFSVTSENVDLAKVQEGPLSSLSRKSPEGSLLKKSASTGDCLINTKLMRNANQLKEFCNSSVSSSVLIPHLNNLVQQTMFQQDVIMNLLSNLQQDEKVDRTQPGISSQVRTMENGKVADTANSEKERSLLVKISELQSRMITLTDELIAAKTKHVQLQQELNALYYREEIEDVRDEDIEET

SEQ ID NO: 63095 - protein, 492 aa, Zea Mays
MDGFTLPPFESTCIFRDNDIIRGQRLKVTNSGKHIDYSKKEQNGSKKLKLSVIDIEAKKATPQHETTTTLVEQQKSEGNYQTELKCEAKVTNYDAQSDTKKNVHGDSPIAADCPSSSNQDGLPVPSSNQNGSHVHFSSLKADEDESETSDEIVPVVVRPGHIRFEPAGREPDKSPAKELQGTFQWSGTLSKKKGQKWGINSSNKKNADVGYHAGIAGSNTEVNNLVMDIKVTENGFCAVSNRRIDEGSNVEMSSVKAVANEEKSRGVPFDFESLYPLTQLPKEGDLIAYRLVELSSMLCPELSSFRVGKVVLYDPISLRIILLPVQEYPITTEENEDKDEPDMLVDLSPYKEDGSLEIEYSSLLDVRLLKGIEPVPGAFSTPLAETCNEVGSALAKGRPVTLHKNEGNIESQKSPLVANNTNGKSEKTVWEKNDEPGDEVDVQQNGWGTWKQNSTSAWSYRALRSSALGPTMALLRGKNNQRGKPPYRKKGK

SEQ ID NO: 63096 - protein, 526 aa, Zea Mays
MNPSPNPPPAGVDLVAATQMQLLQQMANTMIEMAQMRQECQEMRQELQEMRQELRQERLERQQQQPLPPPPPAPPRDKHREFMSHKPPTFSNSPDPLQADDWLKTVDKMLNIAQCTDQEKVLYASGRLTGPAADWWDSYCAAHAAANTITWAEFSTQFRNYHIPASLMKIKKKEFLSLKQGNMTVSEYHDKFIQLSRYAPDEVADDERKQEQFMEGLIGPLQYQLVSHTFSSFQRLLDKAIAVEHKRVQLGEMKRKTITQGQGSSSVRRRYVPPQGTPARPGGGQQSYQRPAQQTPQATPQTPHTRQDAPTVTPARPTGQGTATDTICFKCGEIGHYANVCPKRNPNTPARGNSQVKQTQTLGSNRGYSIAKVNQINVEATEDGPNIVIGTFFINSMLATILFYSGASHSFISARYVLANSLPYLALHRPMIVITPKGAYEATYMSHRIELTILGRKFWAMPVVLEESIIDLILGMNWLKQWNAVIHCARGTVELSSPDGDRFEVTVAPPTSNHGLWVKMCNLCRV

SEQ ID NO: 63097 - protein, 1016 aa, Zea Mays
MEKRLAYAALLPLLLLTLRILPLPSGSPNCSGGEGETPPASRHVVRFLEYRRAEEHREYLDAGLRDGAPAAAWRWVERRNPAAAFPTDFAVLEIRDAHREAVVAAVRALGRVRDVHADATYSRSALSAAPDRSRPPRRGKLFTAMSFEGEEEGGGETGNSSSAAWGRKLLLQRSQVTSLFGAERLWGRGFTGKKVKMAIFDTGIRADHPHFRNIKERTNWTNEDTLNDNLGHGTFVAGVIAGQDAECPGFAPDTEIYAFRVFTDAQISYTSWFLDAFNYAIATGMDVLNLSIGGPDYLDLPFVEKVWELTANNIIMVSAIGNDGPLYGTLNNPADQSDVIGVGGIDYNNHIASFSSRGMTTWELPHGYGRVKPDVVAYSRDIIGSKISTGCKTLSGTSVASPVVAGVALVEGASKLSGPNMYEQGAGRLDLWQSYEILKNYQPRASIFPTMLDFTDCPYFWPFCRQPMYAGAMPVIFNATILNGMGVIGYVKDQPLWQPSEDIGNLLSVHFTYSDVIWPWTGYLALHLQVKDEGSQFSGIISGNVTLTIYTPAAHGESSPRSSTCILHMKVKVVPTPVRSKRILWDQYHNIKYPSGYVPRDSLNVHNDILDWHGDHLHTNFHILFNMLRDAEYYIETLGSPLTCFDASNYGTLLMVDLEDEYFDEEIQKLRDDVIHKGLGIAVFAEWYHVDTMVKMTFFDENTRSWWTPITGGANIPAINELLAPFGIALGDKILTGDFSINGEQTHYASGTDIVQFPAGGFLHSFQLQENSKTVQDHIGTLDTESTQGKGKLSSILGVIEAGEGRIAVYGDSNCLDSSHMVTNCYWLLRKILEFTGNRVKDNVLFSEAAQLKFPVFENIHHPSRRTDVNFSTYSTVVGKELICHQDSRFEVWGTKGYGVQPIGTSRKLPEYQMHESSSSPNVTIQIAGSRQDKVERLQRNLSIPNAAKFDDKRDYFGFIGHEEVDIGMLMASQWMIPCFAATACLMLYLSCRVQQKRRRRRKGSVASANRLTSMV

SEQ ID NO: 63098 - protein, 1668 aa, Zea Mays
MKTVTTNAATVSEYVSYLTKGQIPPKHISLVNSTVNLNIEGSKYTIETVRTGHGRYKLRMNDSTVEANVQSLCDGGLLMQLDGNSHVIYAEEEAGGTRLQINGKTCLLQNDHDPSKLLAETPCKLLRFLVADGAHVGADVPYAEVEVMKMCMPLLSPASGVIHCMMSEGQALQAGDLIARLDLDDPSAVKRAEPFDGMFPLMDLPVAASSQVHKRYAASLNAARMVLAGYEHNINEVVQDLVCCLDNPELPFLQWDELMSVLATRLPRNLKSELEDKYKEYKLNFYHGKNKDFPSKLLRDIVEENLAYGSEKEKATNERLVEPLMNLLKSYEGGRESHAHFVVKSLFEEYLTVEELFSDGIQSDVIETLRHQHSKDLQKVVDIVLSHQGVRNKAKLVTALMEKLVYPNPGAYRDLLVRFSSLNHKRYYKLALKASELLEQTKLSELCSSIARSLSDLGMHKGEMTIKDSMEDLVSAPLPVEDALISLFDYSDPTVQQKVIVTYISRLYQPHLVKDSIQMKFKESGAIVFWEFSEGHVDTRNGQGAILGGKRWGAMVVLRSLESASTAIMAALKDSVQYNNSEVNTMHIVLLNAETESNISGTSDDQAQHRMEKLTKILKDSSVASDLQAAGLKVISCIVQRDAGRMPMRHTFLWFDEKNCYEEEHILRHVEPPLSALLELGKLKVKGYNEMKYTPSRDRQWHIYTLRNTENPKMLHRVFFRTIVRQPNAGNKFTSAQVSDTGLGCPEESLSFTSNSILRSLMTAIEELELHAIRTGHSHMFLCILKEQKLLDLVPFSGSTIVDVGQDEATACSLLRSMALKIHELVGARMHHLSVCQWEVKLKLDCDGPASGTWRVVTTNVTSHTCTIDIYREVEDTESQKLLYHSATSSAGPMHGVALNNPYQPLSVIDLKRCSARNNRTTYCYDFPLAFETALQKSWQSNCSSVPEGSENSKSYVKSTELVFAEKHGSWGTPIIPMERPAGLNDIGMVAWILEMSTPEFPNGRQIIVVANDITFRAGSFGPREDAFFEAVTNLACERKLPLIYLAANSGARIGIADEVKSCFRVGWSDERSPERGFQYIYLTEEDYARISSSVIAHKLQLDNGEIRWIIDSVVGKEDGLGVENIHGSAAIASAYSRAYEETFTLTFVTGRTVGIGAYLARLGIRCIQRLDQPIILTGFSALNKLLGREVYSSHMQLGGPKIMATNGVVHLTVSDDLEGVSNILRWLSYVPANIGGPLPITKPLDPPDRPVAYIPENTCDPRAAIRGVDDSQGKWLGGMFDKDSFVETFEGWAKTVVTGRAKLGGIPVGVIAVETQTMMQLIPADPGQLDSHERSVPRAGQVWFPDSATKTAQALLDFNREGLPLFILANWRGFSGGQRDLFEGILQAGSAIVENLRTYNQPAFVYIPMAGELRGGAWVVIDSKINPDRIECYAERTAKGNVLEPQGLIEIKFRSEELQDCMGRLDPELINLKAKLQDAKHGNGSLPDIESLQKSIEARTKQLLPLYTQIAVRFAELHDTSLRMAAKGVIKKVVDWEESRSFFYKRLRRRISEDLLAKEIRRIIGDNFTHQSAMELINEWYLASQATTGSTAGWDDDDAFVAWKDSPENYKGYIQELRAQKVSQSLSDLADSSSDLQAFSQGLSTLLDKMDPSQRVKFVQEVKKVLG

SEQ ID NO: 63099 - protein, 422 aa, Zea Mays
MGEYCPSPQGDSALAAPPLTLPSSSPATAVRPSYGSCDRSYVKQVFDNLHGSISVDPLALQFVDTEEFQRLRDLKQLGLTYLVYPGAVHTRFEHSLGVYSLAGKAINNLKTYQGVELGIDPVDMQTVKLAGLLHDIGHGPFSHLFEHEFLPRVDPGSSWSHEKMSVLLLDSIVDKHAIDIENDYLKMVKDMITASSDPASTTSAKEKHFLYDIVANGRNGIDVDKFDYIGRDCRACGLGCNFQYWRLMEGMRVMGDEICYPAKDYLSIHKLFSTRADLHRTVYTHAKVKAVELMLVDALVEANDYLGISLHAHDPEDFWKLDDTIIKTIETAPNNELKKAKEIIQRIRRRELYKFCNQYSVPKDKLEHFKNITAQDIVCSQKSSEVLLKEEDVAVCNVKIDLTRGKYNPLERILVAMRSSRS

SEQ ID NO: 63100 - protein, 286 aa, Zea Mays
MSAAAADWLPSASVTASGRPVLSAGEVERNLLPLVDLEPEENPRLAPLRACLLALTSHRLIFLHEPSRSARGLPLATVVHAYPPHRRHSHNPLRSLFSAPSSSSSSQHHRIRLQISMPPVRSEVIAIVVTCKADVDVFFGRLLEAIRARAWEVTPAAAPSSGTSVAEGAAPTEDIAIRMPVVGVSGILRMEQESWENAGQNLQDAFQDLNALMSKAKEMMQLAEKMRLKLLMNSSTESNSNDEEMGSKQDMQDLLLSVGIVSPVTKETAGALYHQQLSLQGLIVCV

SEQ ID NO: 63101 - protein, 468 aa, Zea Mays
MSNYYDDYDDIDGMEDDYDMDDPIDDMVDEQQGIRDSDVEDNDYGQPSDVLTQLQNVLLKIATTQIMDLNDKIPDTSSADARKGRDIQGIPWEQINITRKKYRQSRLEQYKNYENVPNSGEEAMKDCKPTEKGGIYYEFRRNTRSVKSTILHFQLRNLVWATSKHDIYLVSHYSIRHWSALSGVDTELINVQGHVAPREKHAGSLLEGFYQTQVSTLTVKDNLLVAGGFQGELICKHLDQEGISFCCRTTYDDNAITNAVEIFNTSSGAVHFMASNNDSGVRYYDMERFQLFKHFQFEWPVNHASLSPDRKVVVIVGDDPDGLLIDANSGKTVHSIKGHRDYSFASAWSPDGRTFATGNQDKTCRIWDVRNLSKSVHVLRGNLGAIRSIRFTSDGQFMSMAEPADFVHIYDVKSDYNKRQELDFFGEISGTSFSPDTDTLFVGVWDRMYGSLLQFGRLYNYSYLDSLF

SEQ ID NO: 63102 - protein, 108 aa, Zea Mays
MWRRLQTLAPSLRRAAASSSPASARAVPLSTVPVAAFRRTSTLLSSPGDKPAPSKVEDVMPIATGLEREELEAELQGKKRFDMDPAVGPFGTKVRCPCFCDLAQSLGL

SEQ ID NO: 63103 - protein, 1153 aa, Zea Mays
MDNRVVPTTFYIHNFVHEFARHVACDDIIIFDGTKMQKGCAKRQTFQYALLTCYRVQSTFSHSTLTRTRALHIMNSEAITFPREAFELLKHLRVLNLSGCCIEELPASIGCLKRLKYLDVSGVQIQTLPFPVSRLTNLEVLDLSKTCMKELPSFIGNLQNLKYLNMQGCDKLQNLPLSLGHLQRLEQLRLSCCRCIAMLPDSLCNLINLRILDLSRCTMLRHLPALFGNLVNLEDLSLSSCFNLKQLPESFGNLYFLRFLNLSSCYELQQFPESVTNLEKLEVLILRRCCRLRILPPSFAMIKYLRILDLAGCEALHVSTEMLTTNLEYLNLQRCLNLQTQPYYFENFNKLKFLNLSHCLPTVDCLESISYLFNLEYLDLSETSLDIPMSFARLQKLHTLNLTGCAPMHPSSNVHQTWPGILAKITSLKSVLTMDPVLAASLQGHTECSADYDYHSLTTTDELVIKEITGGSRGLRIAEQLNLQNRLEVCFLKLEWVPRSQSAQDQLLEYTDEEVLEKFQPNETLEHFMLVKYTGNVFPTWMMNKLTSLPYLVNLCLFHLHNCSALPPIGHLQNLRYLHIKDMPNLTNLEMGLSGGPVSLGKLTHLKLEALNLEELSILLSANNESPCFMFPNLEELSVLSCSKLVFKPSVPKCAKYVIKESNMVLSCWQPLGPFSSPPIEKVEISGCVMPSGWLQWLRSIQTLEKVVIDGEALSSFELQKIYAFQEASGSKISKETVSSSRTNMSRELTTEDGALKAIGIDNSTIKHIPRFNTTSELSVDTISSSKVSTPSKEIPSTLRRPDKSKMPALIPGDGSLNLSLKQVQKVTHNFSPLFELGEGGTWAVYRAVLSDNQVVIIRRAKKGHVQEAKHLMEVKLLTKINHWSLVRFLGFIDEKDECIRITEYVPNGTLREHLHGDALICYNLRTSNILLTESYRAKVCCSELSKSGNIVLLKGTGGYIDPEYLETSELTAKSDVYSFGIILLEIISSHGPQDWDVLMNHRQSSVVQWALEKFYDDLMNEILDYRMEDRVDGDVVRDLLSLALSCVVSRGADRPSIVVVGERLWKIWQDHRRNVGEQHEYQGSWAEFIEQEGILRHHKCVLKRSWEPSTTQQDWSVYVRQIELVQEAYDTPWGEEIFSGSVSLDDITVYSR

SEQ ID NO: 63104 - protein, 334 aa, Zea Mays
MLTHSLEPFPAEISQSESQLVYYRDSAVLLSPYHVLEQVTYIKMPSNRIESFTRVDPTTRAGSEVKYGTYSNQMPNSYLPVLVHYENNRPFAVVEELVRKVEISHWGNIQITEQYKLKHGGARHKGVFSRLEYQSRPSISGASSFKNLLARLPPRVHSVYYRDEIGNISSSHLRTDSHKSDLEIEPRYPLFGGWHCTFTIGYGLPLQDFVFESVDGRRYINLTFGCPLLDTVVDDLTVKVVLPEGSKNPEHVVPFVTEKHLETSYSYLDVVGRTTVVLKKKNVVGEHNVPFQVYYEFNPIFMLAEPLMLISAVLLFFVAFIAYLHMDLSIRKSS

SEQ ID NO: 63105 - protein, 56 aa, Zea Mays
MGIEMLSLGSFKTRVILSSCLQAFQIEPITSTVSYMIGRDVMEGRGQCRCRCCTVS

SEQ ID NO: 63106 - protein, 51 aa, Zea Mays
MKIGMECWQGYSDLFITEISPVQISRTVPSYLHLPPLPWIIFTLQHRRGLP

SEQ ID NO: 63107 - protein, 592 aa, Zea Mays
MRHLALLALLLAPVLGSTGTTLSPSPAATDSPANQGQASSPPQSAFALGPVAVPTAPTTPSASPSPEKAAAVSPAAPTEPRIAPAPVAPPKEYSAPPPVEVAPTDPTDEVPPPVAPPQAAVGNPTPILPGTPALLPYVQAPAPSVVLKPNPPVVVSPPPANNQPSRPVGSVPPYPPPASPPPANGIPPYPPSGRFPAIPPATSAVPPPATSPVIAQAPQRRADPPSRDYKNGNAVPPANTYPPTNLKKHHVPHASPPKGSTGQTVPGHKSPVTGSAPATSPLPQNTNMPSIPKNASSVPHAHPSPPSIAPELAPTGRSHAQGWKSSNPNNKTNRLHAPSYPPPRAQGPEVSRTPRQTGTKNYTHHAPPPFPQGHPSFPVHSPSPSPASSRGPANAKKRNHISPTLPSIPPLPEPKAPSAHPIWTLPPPPPNSDCNSLSCPEPLTDPPAGAPCACVLPIRVGIRLSVDLYSFFPLVSDFAEEVASGVNMAQRQVRVMGANVAGDQPDKTMVLVDLVPVQVKFDNATAFSAFESLWSKKVSLKPSVFGNYEILYVVYPGLPPSPPSGQGVGDGAFGNNRNARAVKPLGVDLFDS

SEQ ID NO: 63108 - protein, 190 aa, Zea Mays
MTDIHKKELADVWSCGVTLYVMLVGAYPFEDPDDPKNIRNTIQQIMQVQYKIPDHVHISTECQQLIARIFVANPMRRITMKEIKSHPWFLKNLPRELTETAQGMYYRRDNRVPSYSDQTSEEIMKIVQDARTMPKSSRSGYGWSSEYSDEEEEKEEEHRPEEHEEEEDEYDRRVKEVHASGELRMDALHI

SEQ ID NO: 63109 - protein, 104 aa, Zea Mays
MKSRRWATEEEIFNPQLGRTQDLHWMRDFGGGCNWRSASLRCCESQAATAAGGRGRGRRVAAPGGWSEFGALNSRGVSNPPMPSMTMLGARCVRSTTVISAYRA

SEQ ID NO: 63110 - protein, 753 aa, Zea Mays
MASAQAPSSAAAPSRKDHLEAGKKRLEQFRKKKAAKKATAASAEQAKAPAPDVVENPPPIVNAGSLGDGLVSDVDPNQASTSSVPLSVYENGPASASRGAEFMSNGHQQDAVSDGGRKFYGNLSFSDLVNGHHENWRGDGARKKDEHSPYKDVESKSKLSAFGNGSSLNLPSTENMPSWGRNSLSSQVHDTEQSSSYSSSTLFGKSKNAYAQDYSTNSDIFGRLRATSEDSSKVEQSMYASTRDYGNAFNSSMIAGTVDHDTNVGITRTSADSTPVNSERQDPFLSSGYPTTYTRSRPSFLDMIGVQRAPLTTEASYREPAKANQLSSYSNYQSSFLQQSNQQSTGSNAADIPFASESQEYSHEKGSYGSSTPPDFLLPKEERSKHHGNQTFQNFTTHGKDDDFAALEQLIEDLTKEKFSLQQSLQKSQELAETLATDNSALTDKFNQQAHVISQLTSDMERLQEEIQAQLLALESIRTEYANAQLECSAADERAKVLAAEVILLEDKGLRLRSSELKLEKEVEGLHSEISSYRRKVSSLEKERQHLQSTVKALQEEKKLLRNIPVNEKATTTVEKPWVDKRDASTATEDLDIGENSSSETLTSTVDTLEDAGISVLRSNIMSDFSSLEEVSSSIPDDQLRMIDNINSLMSELVVEREALLRALRIESSNCSKLKELNKDLTQKLEIQTQRLELLTSQRMANENALAKPIDTRSINDATMYADEGDEVVERVLGWIMKLFPGGPKRRTSKLLR

SEQ ID NO: 63111 - protein, 77 aa, Zea Mays
MKCNTLSDPNYIPNIASQMSHPTMNTVIGQETENVMKPCCSSSQLPKSFGSCDLRIKQTYISSRQHNSSVHLNNMAM

SEQ ID NO: 63112 - protein, 273 aa, Zea Mays
MDRKDVGILAMDIYFPPSCVQQEALEAHDGASKGKYTIGLGQDCMAFCSEVEDVISMSLTVVNSLLKKYKIDPKLIGRLEVGSETVIDKSKSIKTWLMQIFEESGNSDIEGVDSSNACYGGTAALLNCVNWVESNSWDGRYGLVVCTDSAVYAEGPARPTGGAAAIAMLIGPNAPISFESKYRASHMAHVYDFYKPDLASEYPVVDGKLSQTCYLMALDSCYRQFCNKYEKIAGKQFSICDAEYFVFHSPYNKLVQKSFARLYYNDFLRNCSC

SEQ ID NO: 63113 - protein, 483 aa, Zea Mays
MGQAAYLSKHHDFYSSSQVGFYIAVPDKIRWPVLILAILASVVGSQAIISGTFSIINQSLSLSCFPRVKVVHTSEKIHGQIYIPEINWLLMILCIAVTVGFRDTKHMGNASGLAVITVMLVTTFLTSLVIVLCWHRPPLLALAFLLFFGSIEALYFSASLIKFLEGAWLPILLALILMAVMLIWHYTTIKKYEFDLHNKVTLEWLLALGDRLGMVRVPGIGLVYTDLTSGVPANFSRFVTNLPAFHQVLVFVCVKSVPVPYVFPAERYLIGRVGPPGHRSYRCIVRYGYRDVHQDVDSFETELVETLATFITLDASYRCSEASERELELDPGEQERRLTVIASNPLRRRASYDLQDSVQHSAASTVEVRATAADSLSPRDAEISSAAGPKQVRFFIDSHVVSPEAAENKQVADELEALAAAREAGTAFILGHSHVQCKPGSSVLKRLAVDVGYNFLRRNCRGPDVALRVPPASLLEVGMVYVL

SEQ ID NO: 63114 - protein, 726 aa, Zea Mays
MANLSEDNGEETPLQVRLNGVATFIGLVGLSVAGAVLVVLWIRYFTGHTENPDGTPQFVAGTTGVKQGFMGAIRILTIAVTIVVVAVPEGLPLAVTLTLAYSMKKMMRDKALVRRLSSCETMGSATTICSDKTGTLTLNKMTVVEAYFAGTKLDPCDDVSQMSDSAASLIIEGIAQNTTGTVFLPEDGGAAELTGSPTEKAILSWGLKIGMDFDDVRTKSSVIHVFPFNSEKKRGAVAVQLDDGVHIHWKGAAEIVLSSCKSWLSVDGSVQSMSAEKHDEFKRSIEDMGANSLRCVAFAYCSFDIEKIPMEDITSWELPEDDLTLLGIIGIKDPCRPGVRDAVRLCTTAGVKVRMVTGDNIETAKAIALECGILDANSVISEPVVIEGKVFREMSESARGEAADKIIVMGRSSPNDKLLLVQALKRKGHVVAVTGDGTNDAPALHEADIGLSMGISGTEVAKESSDIIILDDDFTSVVKVVRWGRSVYANIQKFIQFQLTVNVAALVINVVAAVSSGDVPLNAVELLWVNLIMDTLGALALATEPPTDNLMKRNPVGRREPLVTNIMWRNLFVQALYQVAILLIFDFDGVRILRLQNESRSDAEKITNTFIFNTFVFCQIFNEFNARKPEEKNVFKGVTKNHLFMGIIGITTVFQILIIQFLGKFFKIVRLGWRLWLVSVAIGLVSWPLAYVGKFIPVPVRPLPDYFKPRCCWKPPRRDEEEGGQS

SEQ ID NO: 63115 - protein, 50 aa, Zea Mays
MAAILHCFLPQDLPLRSKDREKEGHVELKRKRGSRRCSSPSPLEDLLGKP

SEQ ID NO: 63116 - protein, 109 aa, Zea Mays
MDPAADPLRSFAVLGLAATTAAANSGFADSNPIRPVTVRAASALFHRLRRARPHPRRASIRHPRYTWCRPGCCDLPLGGSRGFTSKVTLGCSPNFSSELQLRRVPHRAV

SEQ ID NO: 63117 - protein, 356 aa, Zea Mays
MRVLEEDLFPSTPGKVKIERAGAMNRQLHRCFASTSTMFLWALFLVAMTASYLSFQSFVGTHCSLALRKRGDGVVGVDNFNAYYDPSLKKARRALLASHGVFIVEGDINDGRLLAKLFDVVPFTHVLHLAAQAGVRYAMQNPASYVHSNIAGLVTLLEACKDADPQPAIVWASSSSVYGLNDKVPFSERDRTDQPASLYAATKKAGEEITHTGNPSRCTAARTASTWPATSPTSTTLSRAASAPWTRPARAPAPAARSAGRRPTGSSTSATPRPSRCLTWCPSWRSTSASRPRRTWSRCPAMATCPSPTPTSPSPGSSSGTSPPPTSMSASRSSSSGTSPTTATPGDPRTRDNDPC

SEQ ID NO: 63118 - protein, 225 aa, Zea Mays
MSKMGQPAKISRSQGENGPSQGERISTLDEGKRTYTLFQGHSGPVYSAAFSPFGDFLLSSSSDSTIRLWSTKLNANLVCYKGHNYPVWDVQFSPVGHYFASASHDRTARIWSMDKIQPLRIMAGHLSDVDCVQWHVNCNYIATGSSDKTVRLWDVQTGECIRMFIGHRSMVLSLAMSPDGRYMASGDEDGTIMIWDLSTGRCVSPLLGHSSCVWTLAFRFEDHVI

SEQ ID NO: 63119 - protein, 134 aa, Zea Mays
MVYRSPVGGSTCSVLSVVLYVSQSSYHSSINIKKRRKNHEVRRLNIYHSQSHTRKERRKTSWSTHYIPIIYHIRQLCMPEMQAPPVLRPSIYNRNHRKPCRFDIIWIVHENAAPLPHAHQIVKLVRSVGRERPD

SEQ ID NO: 63120 - protein, 280 aa, Zea Mays
MDGTLQPAVGSDGRKVEAQGNVLLASIENMQYAVSVDVLHTVFSSFGTVQKIAIFEKNGGTQALIQYPDVNTAAVAKEALEGHCIYDGGYCKLHLSYSRHTDLNVKAHGDKSRDYTIPAGVIQGAPQPPGIQATSPGWQGNLQAAGPYAPPGAPPQNHSANGQVPNWTPGNSGYSPAPGTYPGQMYSSPAQYVASGSFLNTSAATPPQYATSGGFPNTPSTAPSQYAASRGFPNTTPAAPPGAPSQTPHASQQMPHQHGNHSGGGTPGTSQPPLPASYYR

SEQ ID NO: 63121 - protein, 455 aa, Zea Mays
MSVTVALGLGTVNQSMKAGSSDTDGNGPASCWPLLAGSKLISRCCGGDCSAARIETTKAALPRTPFVSSSSLPSWLQHCRDHQEPATHLTDDLGKTWSSICSSSRPSQRTTTLHFSAPVSPASSISSYEHGGGQSQQPRHSWLLAGLDAAHHPWRPKREASIRSHDSGASNGSVEVECRARFKELNAENLKLLCGALEKEVPWQKEIVPEVASAVLQCRSGIAKRRDKSRSADAKEETWMLFLGGDADGKERVARELARLVFGLRSSFLSIRPGGVVSASSPPPASSGSSEGHRSSKRPRMPEEEPAAYYLERLHEAVSENPHRVIFMEDVERADRDCQLRIKEAIESGVVRNHAGQEVGVGDAIVILSCESFGDSRSSRACSPPSKKVKVEMEEAKEERAGDHEHNQDGVSKPSPSCIDLNVDMESDQADEPSLGDQCLLTAVDRALFFRRQDN

SEQ ID NO: 63122 - protein, 220 aa, Zea Mays
MGRGKVELKRIENKISRQVTFAKRRNGLLKKAYELSLLCDAEVALIIFSGRGRLFEFSSSSCMYKTLERYRSSNYSTQEVKAPLESEINYQDYLKLRTRVDFLQTTQRNILGEDLGPLSMKELEQLENQIEVSLKHIRSRKNQMLLDQLFDLKSKEQELQDLNKDLRKKLQETSPQNVIHDVSWEEGGHSGSSVLGPFQGLLQHHGNDPSLQTRRPTWTS

SEQ ID NO: 63123 - protein, 175 aa, Zea Mays
MPGFAQRLAGIPWRSIARQGLSRVFLVAKAYCVIHVVNDHLCSVTLVRGASMLPSLNLAGDAVAVDRVSVRLGRVAPGDIVLMISPEDPRKSVVKRVVGMQGDSVTYLVDPGKSDSSRTVVVPQDHVWVQGDNIFASNDSRQFGAVPYGLITGKIFCRVWPPESFGAIDDATKQS

SEQ ID NO: 63124 - protein, 121 aa, Zea Mays
MKRSVALKKGLPILGVFRSFAAVGVDPADMGVGPAVAIPAAVKFAGLEIGDIDLFELNEPFASQFVYCCNKLGLDRSKVNVNGGAIALGHPLDATGARCMATLLNEMKRQGIDCRFGVVTM

SEQ ID NO: 63125 - protein, 105 aa, Zea Mays
MHGSDTGAYDAEGRFVPAKFEEIFTKHAKVRPDALTFEEIEEMILANRDPLDPESWAAPEGEWGLTYKLASDKQGFLHKDSARGIYDGSVFYKLEEQRTSAASEM

SEQ ID NO: 63126 - protein, 565 aa, Zea Mays
MPKTPPVNASKNTEPQKQSAPNLTITNGHTSTKVVVKKEHPINDVKHISTWVCKNLACKAVRPAEDSFCKRCSCCICHKFDDNKDPSQWLVCSSDNDSKNCCGSSCHIECAFREKRAGCFDLEQIIHLDGSYSCASCGKISGILGYWKRQLVIGKDARRVDNLCQRIYLSYRLLEGTVHFKELHEIIEDAKAKLESEVGPLDGMSAKNAHGIVSRFSAGIAVQKLCSTAIQRADEWLSSPDLHLRGYKLWYWKSREQPSMEKPVIVSKDERKILLYDLTPCTEYSFRVISFTDDGVLGHSESRCRTESREIFVMRAPKNAVGGGATHAQKKDRNQSCKSTGFKIRDIWKNFQEALDAEGCFEGFSEDVHEGSCSRSVTETELSGACRKLHFNSSSVPDLNAEVPVPVDYTENHYYSKKGLVRSNDSGDSETCAVGQTAEPPAVESRQVSKVNSVPVNKCEQNGASAICHEKMLSGSTRQLDGDYEHCVKVVRQLECDGHIENGFRMKFLTWYSLRSTDQERKAVSTFVRTLSNEPSSLAEQLVDSFGEILNSKKAKTGFCSKLWH

SEQ ID NO: 63127 - protein, 910 aa, Zea Mays
MKYIAHYRILMINLSDLLNSLVKAQQDILGKRTCGMSEGLCSVDPMVFEVMCCPVVLGVHLGNQLKGQSQKTQQAILKKFRSGVYNVLVATSIGEEGLDIIEVDLVICFDANVSPLRMIQRMGRTGRKNEGRVVVLAYEGQELQGYRKKQGDCRTMRKLLHNSERFEYHASPRMVPHVYKPEVKYVKLTIDKYIPHAKKMRVAAKEASPIPWKMSEADGQMITRYFSVCKEEVWRPSLVAFPRFQLYPSVVHKVPHSFRTTDMLTDAMKQLQDPSLFRTKCEIPLQEPANVSAVEEGLEHEGLYAANGNEEMPQECDGLEASSSVVWNENVSVPGSPVKKYPVHTFFSGDYVTVDRRGSVLITYVPVLPQKIAFSKDIKSAVWNNKDQNKAKPYRSAAGVCRTTVEFVLGTNTDKHLFVDNLSTVAMHSPECSWHGDNVDDNHVLTTVPSKTLTSPREKMDTPCNVKLPESTYSYQEDMELNSRLTVYMEEGIVPESPVVEVSHLRLEMDEAADFGAVPKRGSPKSRDERAHANVAGSHKGPLNFEKNDQLLCGENEFDGSSRLYMLDQTRAKTEEPMHPSNVKMATTTRHTPGNMLCDSFSGDYQLRSGGDASGSVQQAPKYRRLCKYGDKIKRVSSISLDGCDDRFEECNIANKDRPNQIKHAMGTKRKTKRRLDAYIDEEVGVSEDAYVSEDEDDNQSEDKYEDSFIDDQATPTEFTQTEQGDRHNGDMMGFYRQSLFTQSPVVLPSRYLDVSYNSASRTGNSSYSSEARHNYTETPKEIQTQHHTINPSPSYSFVQDRCERGIANCESSTKLDCRKRRLSFQQPLAIPVINLEPEPAPEPSPHVASRVADHLYFDDGFFENLDLDAIEAQATEQWRQKTTQSTQKPVEIKNASDMSFAPPSFDLGL

SEQ ID NO: 63128 - protein, 301 aa, Zea Mays
MSIDPKLLLSNFPMISMILGLLIIGKTLLVTFVGRVFGVSTIAAIRVGLLLAPGGEFAFVAFGEAVNQGLLSPQLSSLLFLVVGISMALTPWLAAGGQFLASKFEQHDVRSLLPVESEIVAQLLSERLIPFVALDVRSDRVAVGRALDLPVYFGDAGSREVLHKVGAERACAAAITLDTPGANYRAVWALNKYFPNVKTFVRAHDVDHGVNLEKAGATAVVPETLEPSLQLAAAVLAQAKLPMSEIQESINEFRNRHLSELTELCATSGNSLGYGFSRVMSKSKSISSDDESETVDGALAI

SEQ ID NO: 63129 - protein, 271 aa, Zea Mays
MMLMTFPNATKYLKKVGGYRVGYDIKLSGTESPRSVTGLEGVRVRVLFAWVLITGVEATDGEVTVHIEPIRKSFPAIGFKSSPRCIIGLATGVETKDPSHYHGPQHQVYEAGQRGQQVQVFLIFIRSFLSDLGSPLSRTPGLVICVFSWHAAFSVLDNANGVTTPRTGRFKQVKDGLLSAVSEMQYCAREMRKIINSLWTMNLNEVSSRLQEMAVFLEENTMYIGELGGVTDADWALDNGGYLRWFNVIYGDNMNHVGGCRVLLSETSLCD

SEQ ID NO: 63130 - protein, 167 aa, Zea Mays
MEGDPACGLALADEEAECSSWDSDDEYQKFIQNMNPPRVTIDNTSCPSAIVIHYGILLEVVQVLTNLKLIVTKAYISSDGGWFMDVSTDEGEAKAQEHGAMFMETSAKAGFNVKPLFRKIAGSLLGLDALSSGKQEDMVDINLRPASGSSASGAAAQLEQKSGGCSC

SEQ ID NO: 63131 - protein, 95 aa, Zea Mays
MEELCSKIKVGDRCEVEPGAKRGTVKFVGRAEALGRGFWVGVQYDEPLGKHDGMVKGIRFFECPQGHGAIVRPEKVKVGDFPERDPFEDEDDDEI

SEQ ID NO: 63132 - protein, 286 aa, Zea Mays
MAIRYWPMAGAAVGFRLVLVLFGGDLHLASRPEVSTPLTSLRRLAEGYWLKQASVSPYSGSMYHGSPLLLSVLGPLTSSRPDGHHAHIYCSLIFVAVDFLAAMLIRATGHELEMARNRSLKSLDLTKAVKDTVNVSAGDVASLIYLWNPWAIVTCVGSCTSPIENLMVVIMIYGSCSRLAPLAAFGYVMATHLSLYPAILIVPVILLLGYGLDAPPPKVFVIKGSIARKSDVSDNDKTSRQRVVQQFSWKPVLHFIFWLFIWSCHVLLLSSVILKKVGGLHEMFEK

SEQ ID NO: 63133 - protein, 221 aa, Zea Mays
MADAYWRYAAAAPRQQQQQQQPPPSAGGGVAHPGMGGGAPQMAPAGGQQQPMKRPRPTEFSDVPGAPDTAGYYPRDEERAGYRAARDTESLNASYERFLRTGQIQSFGGGHAGEPIRPAVGGNAAYPVDDRSMMAARDIFRPFVGFREVRLVNKEPKHPGGDPIVLCFVDFAEPTQSAIALDALQGYKFDEHDRNSPNLRLQFARFAGPKGNSGPGGRGRR

SEQ ID NO: 63134 - protein, 599 aa, Zea Mays
MQVAEKDMLHEMVKIAKKKPDYHVKEKILILIDTWQEAFGGARARYPQYYAAYQEMLRAGAVFPQRPESTVPIYTPPQTQPLRNYPPPALRNTDYRHDVPESSSAPEVPALSLTEIQNARGVMDVLSEMLNAIDPGNREGLRQEVIVDLVDQCRSYKQRVVQLVNSTSDEDLLSQGLTLNDDLQRVLAKHDAIAAGIAIRLQKPKSAPARADSSPTKPEPTKETEQRSAKVASSVTPFEQLALPAPPSSSASKSHGESAVSPNIDLLSGDEFFKPEPVHSQALVPLVTQASASSSPSTLDLLDMFSDSNAINNTSQNPTILSISNSNPNTSVQAYPVPQQPVPPHHPSPYANGLNSDTMTPFDQGSKLTSASSWNEQIAHGMIPPQQFAHGQGEQSNDLPLPPWEALPAETEQLEADHPGGLSALPQFGVSQPQPVQITHSGQQVLPSQLMPTGQPGGQFQPRFGAQQPYATENTQYGGMYPPVQGNQPTGIYPQQMAGDVYQQQMFGGQMIGYGYGPQPGGYYVPNAAYAYAGANDLSQRMNGLSMQGNSLYGTPASSSLQQRNRPSRPEDSLFSDLVSIAKQSLVKLLPTRLVTCKP

SEQ ID NO: 63135 - protein, 213 aa, Zea Mays
MKAEALLMLRRYEEVIQLCQESVNLTERNSVLFKDNGEPKNSRVSERMQFSGRYWRPYLICKSYFLSGKLDEALELLKKHEQVTPVKESEVNTYEEKFSSLSATIRELLSLKAAGNESFQAGRYSDAVKQYSAALAWNSESRPFSAVCFCNRAAAYQALGQVTDAISDCSLAMVLDTNYPKAISRRATLYKMIRDYDQAANDGSGAILLFRRY

SEQ ID NO: 63136 - protein, 50 aa, Zea Mays
MYRNLQTQDEAIHNMKSRVGTKVEPAPKQSARELRLNSRKRNRLKEEKVI

SEQ ID NO: 63137 - protein, 92 aa, Zea Mays
MPLPLSILTMIDLAKRRGSEKEKSRKDKKKRLTKRSKLTPEPSASKKRNIISSSREEERSSPPKHSAETPSATSIGVTEILEVMTKPLLSLC

SEQ ID NO: 63138 - protein, 1201 aa, Zea Mays
MEAVKASEARRDPPLLRAVELSRVVAEEGAGAELAGILVSNLCFAHNSPSLWKLLGQAVASRLLCPLHVLALLTPRVLPQRRAQPEAYRLYLELLKCHATSSLLAMEAGPNRDNILEDCGFPSVMAEGQESVYAIEGPQPMDLDIKRGSTENQNEHREQLRRKNTFMALDVLHMMAADRKIQSFLSLIFLNMPEKFSSLRQRLSSIEAHKVTLETLLPSGHKINDLLINIWRVCKAGYQPNNKHILGVLGNMGSGGSLLGQLTGAGRPACWIIFDIYVENAIDGKHLSVTSAIGIIKEMTKTMQVLNEASWQETFKALWISTLRLVQRAREPLEGPIPHLDARLCMLLALIPLSIAAILQEESDMFGVEGNKILPQRQGLISSLQDLIQYSGLLVPPSSVVNAANAAASKAAIFKANYKAGAGNTSMMDQTDSSMKAAGNMLHLIIEACISRKLIDTSAYLWHGYVVPSRTLKDTALPQESPWLNFMKGSQLSEPLIDALVATPASSVAELDKLYSVATNGSEEEKTAAAKILCGASLVRGWNIQVPDVAVALMPLCEAFGSIAPPPNHKSTILGETSVYLVFSCAFLCLLRLWKFYRPPQEYCLTGRGGSVKLELTLDYLLLMHNNRIFSNSSAPNRDSYNSMGSVNEVSAQPIYIDSFPKLSAWYFQNQACIASTLSGLCNKNPVHQVANKILNMICRKMNKGGVSSSNLSSTSSSSVSGSSVSASDDSYQRPAVPAWEFLEAVPFVLEAVLTACAHGRLSSRDLTTSLRDLVDFLPASLAAIVSYFSAEITRGIWKPVPMNGTEWPSPGASLHSIEAEVKEILASAGVQINSCYPRGVPPMLPLPMAALVSLTITFKLDRSLEYIQGVIGHALENCAGGSSWPSMPIIGALWTQKVRRWHDFIVLSCMRSPFGRDKDAVAQLIRSCFSSFLQSSSSGSDIIANRGVGALLGDSITDQGLRLPMAPGFVYLRTCRTFHDTYFVSEVILKQVIEWAHKLANGWSFNGPPQLKSGRTPLSCAASMAHQVAMLGGGLLCIAGGPLVVQVLYEDTLPTLLLSAREQSLKDPGPVSSTLQGYAMANMLFYCGSLLWGADRSSPVMKLSFLSRRPRVVRNHMDFIAGVLDGHILLGCDPGTWKAYVSQFMFLVVKFVPSWLPDIKLDTLKKIAAGLRSWHEHDLALSLLERGGPQAISVVVETFL

SEQ ID NO: 63139 - protein, 67 aa, Zea Mays
MRPTTMLPCQRDLRELVMLPADKLREAPPQLVGYSRRSQPPLPLFAQLSHKMPPVANATHLLRIVCL

SEQ ID NO: 63140 - protein, 214 aa, Zea Mays
MRRGVLRVQDGRARPGDAGGDRLRLRQGGRLRLRLQGRALLRQRQQGGRLLLHLQQLLPEPQRHGRHLRLQRRRHAHRHRPQLRHLQVRLRPQQRRHRRWHGRWRGYRRWHGRRGRDPRERPEPTVRRHWRVRPVRGRQHGLQRRRRPARRRAARGGCPRSRRRRRRTSPPLGAVPWQLGAGGHDTRRRDPASAARQRGLWSMSGVSACAYLMK

SEQ ID NO: 63141 - protein, 503 aa, Zea Mays
MATARGMTPAAADAVEELTRLYRELPPRPAVEEVEAAAAVLASADAEEEARLAEIAREEEAARRKEAAHVVELERRFKLFDDLIQRASRVVSPGDGARGGGDAVVDLEVEANRNPALAAAVAAAATEIDRGSKGGLGLEPKSVSSLHRATSAGTDTEKLGLIQVASLIESSAKKGTTELNLRGKLVDQVEWLPVSLGKLQDVTELDLSENRIMALPSTIGSLRYLTKLDLHSNQLINLPDTFGELSSLIDLDLRANQLKSLPTSFGNLMSLANLDLSSNLLKVLPDCLGKLKNLRRLIAETNEVEELPYTIGSCTSLVELRLDFNQLKALPEAIGKLENLEILTLHYNRIKGLPTTIGHLTRLRELDVSFNEVETIPENICFAASLVKLNVSRNFADLRALPKSIGELEMLEELDISSNQIRVLPDSFGHLSKLRVFHADETPLEVPPKEVVKLGAQELVNYMKNMAAAREVSQKETDERSFWTWLRSLFGCEQNQGSGPVPV

SEQ ID NO: 63142 - protein, 150 aa, Zea Mays
MGCFHSTAKRQHPGYEDPVHLASQTAFSVSEVEALFELFKSISGSVIDDGLINKEEFQLALFKNQRKENLFANRIFDLFDVKKRGVIDFGDFVRALNVFHPNIPMEEKVDFSFKLYDMDGTGFIERKESLPPATVVLSPAAAPQNARSSP

SEQ ID NO: 63143 - protein, 84 aa, Zea Mays
MQGHYVLGHNFGPGSSHNLHDNLNQFDQASSAPTLQQQPFTGNGQLTQGYPGDMHALQFVEPTPQIDHQNGDEGQSSIPVWDFL

SEQ ID NO: 63144 - protein, 572 aa, Zea Mays
MGKEKLHKQPSGRLIESLKMERMRNILTHRYPYPHEHSRHFIIAVFACWLFFISSDNLQNLIMKLDKNFKWWSMYACLIGFFYFFSSPFIRKTIKPNYSNFNRWYIAWIFLAALYHLPSFQSMGLDLRMNLSLFLTIYISSLIFLMVFHIIFLGLWYLGFVSRMAEKKPEMLTIIQNCAVISIACCVFYSHCGNRTVSRDKSIDRRTASWIVFSLWTKHDDNTLISRLLRMHKFKEQICSSWFAPVGSASDYPLLSKWAIYGELSSNGSGSSNEISPVYSLWATFMGLYIANYVIERSTGWVLTHPLTISEYEKLKKQLKPDFEDMVPWYSGTSTDLFKTVFDLMISVTLFVGRFDMRMMQAAMNKTPDEANSHDLLYDHLDGKDELWFDFIADTGDGGNSTYAVARLLAQPLLVINSDDSRLTFPRGQLLLVGGDLAYPNPSSFSYERRFFCPFEYALQPPAWYKPEHIALEKPELPLGVSELRRYRGPQCFMIPGNHDWFDGLNTFIRYICHKSWVGGWFLPQKKSYFALKLPNGWWVFGLDQALHGDIDVYQFKFFAELCQQKYAGRRK

SEQ ID NO: 63145 - protein, 642 aa, Zea Mays
MTSNSSQNMSSCSTGGSDAAVGGGSWLGFSLSPHMAATMDGAADGVPVQHHHHEGLFYPPVVSSSPAPFCYALGGGQDGLATAAANGGGGFYPGLSSMPLKSDGSLCILEALHRSEQERHGVVVSSSSPKLEDFLGASASTAMALSLDSSSFYYGCGHGHGHDQGGYLQPMQCAVMPGSGGHDVYGGGHAQMVDEQSAAAMAASWFSARGNGGYDVDGAGAGAIVPLQGHPHPLALSMSSGTGSQSSSVTMQVGSAHADAVTEYIAMDGSKKRGAGNGASAGQKQPTIHRKTIDTFGQRTSQYRGVTRHRWTGRYEAHLWDNSCRKEGQTRKGRQVYLGGYDVEEKAARAYDLAALKYWGTSTHVNFPVEDYREELEEMKNMTRQEYVAHLRRKSSGFSRGASIYRGVTSISRRHHQHGRWQARIGRVSGNKDLYLGTFSTQEEAAEAYDVAAIKFRGLSAVTNFDITRYDVDKIMESSTLLPGEQVRRRKEGADAAVSEAAAALVQAGNCMTDTWKIQAALPAAARADERGAGQQQRQDLLSSEAFSLLHDIVSVDAAAGTGTGGMSNASSSLAPSVSNSREQSPDRGGASLAMLFAKPAAAPKLACPLPLGSWVSPSAVSARPPGVSIAHLPVFAAWTDA

SEQ ID NO: 63146 - protein, 285 aa, Zea Mays
MEVYVVNTENDKLPRVKYPKPLIFHDGRLAFLPTPAAMLAFFLFLPLGVILSVIRINIGIVLPYKVNFVAAAIFGVRFRASGLRAPPADGEQRRGVLYVCTHRTLVDPIMLTTALQKPVPALTYSLSRLSELIAPIKTVRLTRDRARDADTMSRLLKQGDLAVCPEGTTCREPYLLRFSPLFAELADDMEPVALDAQVTMLYGTTASGHKWLDPVAFFANPVPSYRVEFLGTVPREWTRAGGRTGVEVANWVQRRLGEALEFECTELTRRDKYMMLAGNDGVVAK

SEQ ID NO: 63147 - protein, 967 aa, Zea Mays
MASPRSAGGDEAIWMKLREAGFDEDAVRRRDKAALIGYISRLESEIYEYQHNLGLILLERKELTSKYEQLKASFEATEIILKRERASQQSALSETRKREENLKKNLAIQKECISNALHDMRGETAEIKVSYEAKLAESLQMMETAQKKFDEAEEKLLTAKSLEADCIRTRNTSLRRLQDIEDREDQLRRYQTSFELENASKEKEINLLRKSLDDTKKILHEKEQCLLKEQVLLNQRDDSILERLAYITSSEKRLEEEKLNLEDERKVLLEEKNKLDLNMQAIISREEAIIQKESILDKRESELLILQETIASKERAEIERLRQEEEIALVRRRQEFDTDMEIKLTSFEEEIDARKALLDQRETTINEKEDAVAQREQNLNLRFAELANKEESLVKKSDELREEEKRLSSERETLHIDLQKEKEEIHNMKLDLEKEKSFFEEEKREAIQAQENLAITQNEREDLQSLQVKLKDEIDSLRAQKVDLMADAERLLSEKERFEIEWELIDEKKEELQKEAARIAEERRVIDEHLKSEFDIIKQEKEDLRVQLKISTESLAHEHAEFMNKMQQEHASWLSRIQLEREDLKKDIDIQRTELLNSAKARQMEIDSYLREKEEEFEQKKSKELEYINSEKETISSKLEHVRLELQKLEEERKRSMLERERREEELSETKKTIDALNEQREKLQEQRKLLHSDRKSITQQMQLLNELEELKIESENRQLSLRQCGKSKHAGVENLEDNGVHLSPDEDQNASPKQTTVKKLEVSPSVSTPISWVKKCAQVIFKRSPEKSADPNNDIPPKLGNVNDCTSLATAYSDGLFACHLENGAEKVPQAIDGLKVGKKRLNNALSHGDSEISQPKRKQQKSATQILRVIGGEIDSNCSPSVLEEKCSKNEHDAVPVGLCGKGPQNPQAEHSEDISVSASEPSNGPGVVDSEDKDGADEESDDEGEDEEEEKTSSAKKLWRFLIT

SEQ ID NO: 63148 - protein, 608 aa, Zea Mays
MAVLNLLALIIATLLLLFRRTSGAGISPADTLNSGGNVTDGETLVSAGGTFTLGFFSPSTTVLTKRYLGIWFTASGTDAVLWVANRETPLNNTSGVLVMSSRVGLRLLDGSGRTAWSSNTTGASTSSVAQLLGSGNLVVREKSSNAVFQWQSFDHPQNTLLAGMRFGKNLKTGMEWSLTSWRAQDDPATGDYRRVMDTKGLPDIVTWHGNAKKYRAGPWNGRWFSGVPEMDSGYKLFSVQMVDGPDEVTYVLNTTAGIPFTRVVLDEVGKVRVLMWLPTSRVWKEYPWLPRDACDEYTSCGAFGLCNVDAAPTPSCSCAVGFSPVNASEWSRREASGGCQRDVPLECAAGNGTAVTDRFAPVHGVKLPDTDNATVDMGATLEQCKARCLANCSCVAYAPADIRGGGDGSGCVMWKDNIVDVRYIENGQDLFLRLAKSESATGERVRLAKILVPVMAFVLALTAAGMYLAWNCKLRAKRRNRDNLRKAILGYSTAPNELGDENVELPFVSLGEIAAATNNFSEDNMLGQGGFGKVYKGTLGQNVQVAIKRLGQCSGQGVEEFRNEAVLIAKLQHRNLVRLLGCCIDGDEKLLVYEYLPNRSLDSIIFET

SEQ ID NO: 63149 - protein, 94 aa, Zea Mays
MHWQYRTICRGPNSILKNLYDVVGSKADDYISFYGLRAHGRSDDGGPLVTNQIYVHSKLMIIDDRMALIGSANINDRSLLGSRDSESRPQRHLR

SEQ ID NO: 63150 - protein, 236 aa, Zea Mays
MDTEPLLPAHLLHSLPEHSEVFHFSPPPSPSCPSPASSYKDRIIFGAHPPPPQPPPPPPLPPSHSHRAHRRRSSVDGLYDFDLPSCSSSPPSPPSDPEDPSSAAAAGASSLFEFIANAASARTNLHRSRTAPAMAPLSAVTLAAAAAAGDQAPAPPERPSIVLHTFLFLLAYLALGVTFYAAAPANFSSSAGPTHPVADALYFCIVTLCTIGYGASPHHRAQEPNLCAQAPPQLHL

SEQ ID NO: 63151 - protein, 202 aa, Zea Mays
MAIIMSSWSENYGDPSESKDLMAQFKVAAKAIASDEKIALLGAIQSLFEGSMYTFVFLWTPALSPNEEDIPHGFIFATFMLSSMLGSSIASRLLARKLKVEGYMQIVFSISAVTLVLPVATNILVPTSSVKGGSVSIGGSLQLLGFCTFEVNAFPITVMFGMCSIFLFMAAILQRRLMVVSDQVHKSSTTQEMIGEDEPLNP

SEQ ID NO: 63152 - protein, 79 aa, Zea Mays
MINIIAPSWRVIPATNMIDKIRKDPQLKKKICFNPYMYRGNLALQIGCKLLSVSLDIKKSLHEVRSSPSVRPPHATLVA

SEQ ID NO: 63153 - protein, 837 aa, Zea Mays
MEDEADGGGESFVLRSGVRAGLKREFAFAIASQAVLSSSYAPLGRTRRSSRILNPSAASTPSVAGAAVSTSSSSTPDTKPKAKRPRPPDPPPPPPFPPPPDYAPAPGEDHDGAAVGPVLALMAAAGPSPPPTPLTPQPHADADADPAHLANIIIPPESSPRRITRSMLQPKSRLPTAARSPDNAAPLKPKLEPPEEEDGKPVPALRRFTRSLLVKDKDSNDDDLSGTTTASNASSPSPKTNTTSTSRSSNKGNKNTNKIPTNLRELLATGMLEGQPVKYIMRKGKRAVLRGVIKRIGILCSCSSCKGRKVVSPYYFEVHAGSTKKHPSDYIFLENGNNLHDVLRACTNATLDMLEPAIRKAIGPAPQERIFRCKSCKSSFSTLRSGKFALFCDSCLESKGAKNNISSSKVGRSQTSSAKVYKSASPGAKSSSVGRLTRKDKGMHKVVFMSGILPEGTDVGYYVGGKRLLDGYIKELGIYCHCCSTVVSPSQFEGHAGRAARRKPYHNIYMSNGVSLHELSISLLKGQKMSNRQSDDLCSICSDGGQLLLCDTCPRAFHRECVGLSSATKGTWCCRYCENRQQRESCLAYNNNAIAAGRVEGVDALEQIFTRSIRIATTLETGFGGCALCKLHDFSKKKFSTRTVLLCDQCGREYHVGCLKEHNMADLTALPEGAWYCSTDCVRINQTLQDLLNSGGEPVLAMDLDVIKKKREVKGFNDDDADLDVRWRVLKDKSSDDSKLVLSKAVAIFHETFDPIIQVSTGRDLIPAMVYGRSARDQDYTGMYCTVLTVNNIVVSAGLFRIMGSEIAELPLVATSRDRQGLRKRSLSGLSVLGSQR

SEQ ID NO: 63154 - protein, 284 aa, Zea Mays
MSKVTWCRSAGVKKKANMPQGKSKKNVVKEKAKKIKKNAESRAKVHENTDQIEINIREGVSIWITKAAVQKCFEFPPGTDKKLPIDPTTKTFDSLYRVLSVSEKKINVKKKKMKENMKEKQVEEEKIEMNMEEKKQNLVEDEGSQQEESEEEDGEDGEIGEEEGEDGAIGDAKVGGDGDKESAKRGGIKVAVRRNVLTPLNINLMLQNINNDEILKLLVKRNEDTDGTEPNLDIDLIVRCFFAVVLDRLLLPQATFYLSSATLKAVTDLDRLKTVDWSILFSKI

SEQ ID NO: 63155 - protein, 380 aa, Zea Mays
MLVRHVFPEFSSRVGHLRAKAAWVAGQYAHINFSDPNNFRQAMHCIVSGMHDPDLPVRVDSVFALRSFVEACKDLNEIRPILPQLLDEFFKLMNEVENEDLVFTLETIVDKFGEEMAPYALGLCQNLAAAFWRCMASSEADDEADDSGALAAVGCLRAISTILESISSLPHLFTQIEPTLLPIMRRMLTSDGQDVYEEVLEIVSYMSFYSPTISLDMWTLWPVMMEALNDWAIDFFENILVPLDNYISRGTDHFLACKDPDYQQSLWKALQSIMMDENMEDSDIEPAPKLIEVVFQNCKGNVDHWVEHYLRITIERLRRAHKPYLKCLLVQVCCCVLLSTKTMWSVFLSDELIVVFLDLVLGLSIYFYDNWKKIKTVEVR

SEQ ID NO: 63156 - protein, 289 aa, Zea Mays
MAAGLSGAAMTSFVAKNPLLAAAARRRALPPLAGRALPFSPLTTARAPRRRGLGTVTCFVPQDTEHPAAAAPAPVAPVPETALDEEARAAAARRVAERKARKRSERRTYLVAAVMSSLGVTSMAVAAVYYRFSWQMEVGMEFWARWAHRALWHASLWHMHESHHRPREGPFELNDVFAIVNAVPAISLLAYGFFHRGLVPGLCFGAGLGITLFGMAYMFVHDGLVHRRFPVGPIANVPYFRRVAAAHKIHHMDKFEGVPYGLFLGPKELEEVGGLDELEKELARIGRTI

SEQ ID NO: 63157 - protein, 799 aa, Zea Mays
MGCTASKVEQEDTVRRCKERRRHMKDAVAARQLLASAHADYLRSLRVTAAALSRFAQGHPSLAVSHHTAPVLLSAAAPPPAPIAVHAFPTPAPSTAASSSLPPPTPLVQRPHPPPQPPTAAAMAAPQPALARAPRPRRLRVPHILSDSSVTSPAQPSFRKQPPVGTPSSSSAWDWENFYPPSPPDSEFFDRRKAEVEQASRLRELEEEEKARAYLHHHTHYNLKEEDEAAEDDDGEVDHEPDGMHSGGWEDDEHYASTTTSETRSDEEGEMGDRSECGFAARSECGFVARSEYGGTAPSEYAAVPLPLRRDERSEAGDFSTVMAATEMRMVVRHRTLAEIVAAIEEYFVKAADSGNDVSELLEASRAQLDRNFRQLKKTGYHSNSVLSAFSSTWTSKPPLAVRYKLDTNALEMESTEGKSHGSTLERLLAWEKKLYEEVKARESVKIEHEKKLSTLQSLEYKGRDSAKLDKTKASINKLQSLIVVTSQAATTTSSAIVRVRDNELAPQLVQLCFALLGMWRSMNHFHEIQNEIVQQVRGLVDSSMAESTSDLHRLATRDLEAAVAAWHSNFDRLIKYQRDYIRSLYGWLKLTLCQVDSCVPQGAHASMISRELTSFCDEWKQALDRLPDAVASEAIKSFVNVVHVIYAKQAEEMKVKKRAEAYSKELEKKTNSLRSVEKKYYQSYSMVGLGLPGSGGHGGIDSHAYDARDPLAEKKTEIAQCRRKVEDEMARHAKAIEVTRSMTLNNIQTGLPGIFQAIAGFSGTVVEALDVVCRRAGSVRSPGCAVCSAACLPAWTLE

SEQ ID NO: 63158 - protein, 1217 aa, Zea Mays
MANLNITNILEKMTGKDKDYRYMATSDLLSELNKESFKADQDLEPKLTITVLQQLEDASGDVSGLAVKCLAPLVKKVGEDRVVEMTNKLCDKLINGKDQHRDTASIALKTIIAEVTTPSLAEKILLSLAPQLIKGVNTAKSAEIKCECLDILADVLHRFGNLITKDHEYMLNALLSQLGSNPASVRKKSISCIASLAPSLSDDLLAKATLQVVQLLKNRGAKSEITRTNIQMIGSLSRSVGYRFGPHLAETVPLLISYCTSASENDEELREYSLQALESFMLRCPRDISPYCEGILNLALEYVSYDPNFTDSMDEDTDEEAKEEDDDDESANEYTDDEDASWKVRRASAKCLSAIIVSRPEMLSKMFLEACPKLIERFREREENVKMDIFNTFIELLRQTGNVTKGQGDIDESSPRWLLKQEVPKVVKSINRQLREKSIKTKVGAFSVLKELVVVLPDCLADHFGSLVPGIEKALNDKSSTSNLKIEALVLTRLVMASHSPSVFHPYIKALSAPILSAIRDRYYKVTAEALRVCGELVRVLRPNLETTSVDFKPYIGPIYNAILGRLANQDQDQEVKECAISCMSLVVSTFGDGLERELPACLPILVDRMGNEITRLTAVKAFSVIANSPLRIDLSCVLDHVVSELTAFLRKANRALRQATLGTLNSLVVTYGGQIGSSSYETIIAELSTLISDMDLHMTALALELCCTIMVDRKSIQNVGLAVRDKVLPQALVLIRSALLQGQALQALQRFFASLVQSANTSFDALLESLISAAKPSHSGSLAKQALSSIAKCVAVLCLAAGDQKCASTIEMLKGILKDDSTTNSAKQHMALLCLGEIGRRKDLSNHVQIENIVIESFQSPFEEIKSAASYALGNIAVGNLSKYLPFILDQIDNQQKKQYLLLHSLKEVIVRQSVDHTGQSELQDSNIEKILALLFNHCESEEEGVRNVVAECLGKISLIEPKKLVPALEVRTSSPAANTRATVAIAIKYSIVERPEKIDEIMYSKISTFLMLIKDSDRHVRRAAVLALSTAAHNKPNLIKGLLPEILPLLYDQTVIKQELIRTVDLGPFKHVVDDGLELRKAAFECVDTLLDSCLDQVNPSSFIVPFLLSGLGDHYDVKMPCHLILSKLADKCPSAVLAVLDSIVEPIEKTISHKPKGDAVKQEVDRNEDMIRSALRAISSLSRISDYSIRFKNLMNKITATPALAEKYNSVRGE

SEQ ID NO: 63159 - protein, 897 aa, Zea Mays
MEDEADGGGESFVLRSGVRAGLKREFAFAIASQAVLSSSYAPLGRTRRSSRILNPSAASTPSVAGAAVSTSSSSTPDTKPKAKRPRPPDPPPPPPFPPPPDYAPAPGEDHDGAAVGPVLALMAAAGPSPPPTPLTPQPHADADADPAHLANIIIPPESSPRRITRSMLQPKSRLPTAARSPDNAAPLKPKLEPPEEEDGKPVPALRRFTRSLLVKDKDSNDDDLSGTTTASNASSPSPKTNTTSTSRSSNKGNKNTNKIPTNLRELLATGMLEGQPVKYIMRKGKRAVLRGVIKRIGILCSCSSCKGRKVVSPYYFEVHAGSTKKHPSDYIFLENGNNLHDVLRACTNATLDMLEPAIRKAIGPAPQERIFRCKSCKSSFSTLRSGKFALFCDSCLESKGAKNNISSSKVGRSQTSSAKVYKSASPGAKSSSVGRLTRKDKGMHKVVFMSGILPEGTDVGYYVGGKRLLDGYIKELGIYCHCCSTVVSPSQFEGHAGRAARRKPYHNIYMSNGVSLHELSISLLKGQKMSNRQSDDLCSICSDGGQLLLCDTCPRAFHRECVGLSSATKGTWCCRYCENRQQRESCLAYNNNAIAAGRVEGVDALEQIFTRSIRIATTLETGFGGCALCKLHDFSKKKFSTRTVLLCDQCGREYHVGCLKEHNMADLTALPEGAWYCSTDCVRINQTLQDLLNSGGEPVLAMDLDVIKKKREVKGFNDDDADLDVRWRVLKDKSSDDSKLVLSKAVAIFHETFDPIIQVSTGRDLIPAMVYGRSARDQDYTGMYCTVLTVNNIVVSAGLFRIMGSEIAELPLVATSRDRQGLGYFQALFSCIERLLSSLEVKHFVLPAAEEAESIWTERFGFAKISQDELREYLKGGRTTVFQGTSNLHKLVAKLEC

SEQ ID NO: 63160 - protein, 604 aa, Zea Mays
MAGAAASPVAAHVVERFRSRLREEAGSGEPGASAVVRLYAEALRELTFNCKPVITELTIVAGQHAALAAGGIAGAVCARVAESAAQDTRQMSDVQEDLINGLTSNSSQGRPSVFQHVDISTRRYPSNFGVQNGALLEYQNSEHTLNHGRIATMPAPPWQQPIGLPLRIQGPEHPSVLGRIPQPVDGEMPVKRLDISGTYNGLNVDKPLVKHRSSPAPAPTEWLPLHHAQSQTLPLIPPDTKHVRSASDSLEISSFVSHGGSSSVFVPRHQYDAVDRKTGTSNLAQPPSPYQNQDLLPSSQQNQGTILGNQAHPHRPLKLHPHAHPHHQETFRSFAPGMSVSPFQGQGGNATMTPVSVLPTSFSVPPAVPPYGVLSAPGFPMPPLPPGPPAPVSLQMGSSSSQVGGPQPFVSGLLSNLMRHGVISLEPPSQSQDSVGVDFNVDLKVRNESVTNALYQDLPRQCKTCGLRFKCQEEHRAHMDWHVTKNRNSKNRKKSSRKYFVTAVEWLRAAETVGNDGVPAFVLSDPVPDRQEEKEIAVPADEEQTSCALCQEPFEDFYSDETDEWMYRGAVYMNAPDGNIDGLEWSQLGPIVHAKCRSGPGNTS

SEQ ID NO: 63161 - protein, 364 aa, Zea Mays
MKAICVLEAIVRKQDTDPYSIIASYFTENTASVVKCSELPQVSLREKASKVLNMLIGEQPTGTAATKAAMPTPVQMPDLIDTGDQDDLATSSGHASIEQNSGNSAYVSSVDDLLGGEPISDTSVTADSNGSDPFADVSFHEAETKETNDLFSGLTVEEKSSTTMHDSSSDKNELPDIFGSSPDSFNQGSVTDQGTVNDLIAGLNLNGTGHAQSAVKAEPNSNSGSQFFDTKNESGHVPSAATLNDILGQNSLYQQQQTPLQYSFPQHMMLNQSFPGQQLNYGAMGILLAQQQQLLQSFGNFNAGLGNSSFNSMNGGNTSVLPDIFNSSNQPQNHVAVMSSSKKDDNKAFDFVSDHLAAARGSRK

SEQ ID NO: 63162 - protein, 278 aa, Zea Mays
MVPTTRNLLLHHDVDGKSSRGRPCYHPAGHQYYVGIAAQLEASAASAAWQQDHQSKPSRSPRLLGMADDDEQPDAAAGPSTSSASPGGAGAGNGRGGDWLQLGLAAAAASASSSGDNSTMDPDPPAPTELELSAYDKRNACRMRRPPLFPLPLRSYHPPYGYGRYRPAAAAASRSMPFMPPSRCSSSDAIIRVISPPRRRTEAPRLWLTLQAAPNQSREPVLPQIAKSYLRIKDSNMTVEVVMKYLAEKLGVARSRSRSRSHQVCINSCTITLLFGVL

SEQ ID NO: 63163 - protein, 162 aa, Zea Mays
MIQLRYGPFWTCTTLIFVAASIATFVTYLSHKWHKKEWNYDINLVTWSAGLFYGYVTFVPLLLYVILKYLSAPAGLVQLWCLYGYSLFIFIPASLLSIVPIEIFRWVIAGVAGFMSATFVAVNLRAHIVNSGERWFLIVAGIFLLQLGLAVLLKLYFFTITV

SEQ ID NO: 63164 - protein, 196 aa, Zea Mays
MVILALILKRARTKALVKDKRTTEEAFGTYVECMVGDIGDKSFTKRALRGVRAIICPADDGFFSEPIDLKGVQHIVLLSQLAVYRNSGGLQAIMNSKLKTLAEKDEEVVLASGIPCTIIRTGSLQSTPGRERGFDFTEGIASKGRISKEDAATICVEALNSIPLKTHIFEVANGKEKVIDWKAWFEEQTKREEEIQ

SEQ ID NO: 63165 - protein, 550 aa, Zea Mays
MEMCRGGRKGSRAAETLPMAAIAGLGHGDASAGAGADGDVQRWEEGIAGGRDLADVIFTNESNIVRWKNKRQQAVDSKVGRLDNFIECVKAPIQEVGVPKIPMIYGRVGVIALDNARQSAKIIDQSLTPGKIYDGDGFNYIKESFENGTLHLIGLLSDGGVQLSYKRTTRFTFICSIQLLLKGVSERGAKKIRVHNLTDGRDVLDGSRVGFVETLENDLLELRGKGIDAQIASGGGRMYVTMDRYENDWDVVKRDWDAQVLEEAPYKFKSALEAVKTLRAQPKANDQYLPPFVIVDDSGKAVGPVLDGDAVVTINFRADRMVMLAKALEYADFNNFDRVPVPEIRYAGMLQYDGELKLPNRYLVSTPEINRTSGEYLVKNGIRTFACRQPGKTTRSSSHALPPPYFSLLDTPPATDIPYRQVPFPRLALVACFRPAHLPPVLAMGAGANNHEESSPLIPAAVAAPAYEKPVSAHAFGGVPRESWNSGILSCLGRNDEFCSSDVEVCTCRAPCPRNRYSLFESCVILGVEICVVLRLGISRRNRWLYYHEF

SEQ ID NO: 63166 - protein, 417 aa, Zea Mays
MMHPLRRILALLLVGLLPAAAWSLAPPRFPRPQPRSRPGANGVGDYEYETRYFRQRLDHFSFPGVGDEDEDEAAAFFQQRYLVGRGGGWAGPGGPIFFYCGNEGDIAWFAANSGLVWEAAPRFAALVVFAEHRYYGESMPFGSKAKAYSDSKSLAYLTAEQALADFAVLLTDLKRNLSAEGSPVVLFGGSYGGTAWMRLKYPHIAIGALASSAPILQFEDIVPSTIFYDLVSDDFRRESLSCFLTIKDSWKELDDQANEQDGLLKLSKTFHLCQTLKTSGDLSDWLSSAYSYLAMVDYPLPSEFLMPLPANPIKEVCRNIDSQPKGTGTLERIYAGVNVYYNYTGTVDCFDLNDDPHGMGGWDWQACTEMVMPMSYSEQRSMYPPYKFDYASYAEDCIKSYGVRPRPKWITTEFEYH

SEQ ID NO: 63167 - protein, 85 aa, Zea Mays
MKPRTATLAAGLLQLVALAAVAEADTDAGDVAALGNLYSSWNSPARLAGWSASGGDPCGAAWTGVSCSGSAVTSIHGYLNSPVNW

SEQ ID NO: 63168 - protein, 92 aa, Zea Mays
MILGVLLTGRDPTDSFFSGESTGQGGLPRWLRHTQQSADPKETLDSSILGDEGEEEEMLMAIRVAIVCLSDSPTDRPSSDELVAMLTQLHSL

SEQ ID NO: 63169 - protein, 1082 aa, Zea Mays
MGAGSQDNLQRDSVCPLCFCKQQLNVLQSYCQSQIKENGKKTAASASKKSAKPTEVSAVEIVQQILLSYLQEAGSQDDGNLFTRWFYLCIWNKDDQHSQEKIIYYLARLKSKEILRDSGNGLAISRDSAKKICLALGQKNSFCRGFDKILALLLASLRENSPVIRAKALRAVSCIVEADPEVLGDKRVQYAVEGRFCDSAISVREAALELVGRHIASHPDVGLKYIEKVAERIKDTGVSVRKRAIKIIRDLCASNPNTDTTHAFVEIISRVNDEESSVQDLVCKTFYELWFEEPTGSHKHLVADGSSVPMEIAKKTEQIVDMLRKMPNHQPLITIIKRNLTLDFLPQSTKAAGINSSMVASIRKRCELICKRLLERILQVEEGAANEMEIHTLPYIVALQAFCIVDPTLCIPVTDPSKFVVTLQPYLNIQVDNKSSAQLLESIIFVIDAVLPLIRKPPQNVVEELEKDLKHMIVRHSYLTVVHACIKCLCALSKSAGRGPGLVENLVNIFYKHLCGANSDSQLLGRSLFCLGLLLRYGYQLMLTSENQLDFPKIINLLQRKYLLKDDFSLKVRALQTLGYILIAKPEFMLQKDMLNLIETALSSEVDYRFKIQGLQNLYEYLRDAESQLTAESTAKPPGQCEINGRSEVPVAAGAGDTNICGGIIQLYWSSILERCLDTNDQVRQSALKIVEVVLRQGLVHPITCVPHLIALEMDPLEGNSKLAHHLLMNMNEKYPSFFESRLGDGLQLSFKFFESIVSNHKMSANIKSNPIAFVKPGISRIYRLIRSNRNSRNKFVHSIVRKFESDSRSRSTVSFLVYCAEVLASLPFTCSDEPLYLIYDINRAIHLRAGGVEGNLKRWTSMSQSQEMAGMPTLPGESHVVMQEEPGGYYDNMGDATERVNDNPCSTSDVDIAKVQGDCHDAIALQLLLKLKRHLKVVYGLDDARCQAFSLKEPPKSGETFSRQNVSFNIGNTNLSLPSCLQDAASVYQDFKTVLREDSMDFAVFVPSVQTRKRPTPRNTTSPTPRSMTRVRRTAAPSVTKARGGARGDDSDDTDDDDWTGGPRVLDFSGGGRVTRQRVQV

SEQ ID NO: 63170 - protein, 604 aa, Zea Mays
MAAPPPYTPPAAVPQPLVLLHHPPALVLHVRLRPRSLRLARAPAATATAAAASVAPDDISQLNYRLRAIVRRREGAAAQGATSSSPVDPAQAEAYLRMIRDQQRLGLRQLRREEQEGEGDGDEEGPDGERARKGVAAGSSLGHRVDPRELEPGEYVVHKKVGVGKFACISAEDGADYVFIQYADGMAKLAVDQAARMLYRYNLPHEKRRPRNLSKLNDPSTWEKRRLKGKLAVQKMVVNLMELYLQRMRLGRSPYPKPASMDDFAAEFPYEPTPDQCQAFIDVEKDLTERETPMDRLICGDVGFGKTEVAMRAIFIVVSAGFQAMVLAPTIILAKQHYDVMTERFANYPEMKVAIFSGAQSKEEKDELITMIKNGDLHIIVGTHALLTERMVYSNLGLLVVDEEQKFGVQQKEKIASYKSSIDVLTLSATPIPRTLYLALTGFRDASLMSTPPPERVAVKTYVSAFSKERALSAIKFELQRGGQVFYVVPRIKAIDDVLQFLKDSLPDVPIAVAHGKKLSKNIQLAMEDFTSGKVKILVCTHIIESGIDIAHANTMIIQFAELYGLAQLYQLRGRVGRSGTEGFAYLFYTDKSLLSRVATTRSY

SEQ ID NO: 63171 - protein, 185 aa, Zea Mays
MELPREDFLPAVVAFNTDAAFSSKDSLDGGDFSAPLVLTLCFMSLENLSNDAGREWALVGEDGVDLALVDFAFELTTSFLSERRPLSACFERLEFDLRQGTGILGTTIGGGGLGGLAAAKKKSGGAGHHKILRAADAGMAARDRPDPPEDRHRGGCLETVDMDELPQLDDVAEDEVVLLVRQRHV

SEQ ID NO: 63172 - protein, 266 aa, Zea Mays
MVAATATATAMATAASPLLNGTRIPARLRHRGLSVRCAAVAGGAAEAPASTGARLSADCVVVGGGISGLCTAQALATRHGVGDVLVTEARARPGGNITTVERPEEGYLWEEGPNSFQPSDPVLTMAVDSGLKDDLVFGDPNAPRFVLWEGKLRPVPSKPADLPFFDLMSIPGKLRAGLGALGIRPPPPGREESVEEFVRRNLGAEVFERLIEPFCSGVYAGDPSKLSMKAAFGKVWRLEETGGSIIGGTIKTIQERSKNPKPPRDA

SEQ ID NO: 63173 - protein, 918 aa, Zea Mays
MASAMKLLGRSSLASPAAAAPGRERRGGPCFAAVGREGSAHRRRSSLRSTAPVGALAERVVVTPAPPERAGAGPPEPHPQSVAARAVVTVRRRRKEDAKRRVAEQLDAYADRVGRSVLLELISTETDPRKGGPKKSRRSALVGWFEKKDVKTERVVYTADFTVDGSFGEPGAVTVLNRHQREFFIESIVVEGFPSGPAHFTCNSWVQPTRVDRNPRVFFTNKPYLPAETPPGLQELRRQQLSDLRGEGADTGERRITDRVWEYDVYNDLGNPDKGAEFARPVLGGEQQLPYPRRMRTGRPKTITDDRAESRVEYPEPIYVSRDEEFEDGKNEMLSEGALKALLHNFMPLLVSSVSPDIRDFAGFHDVDNLFKEGLRLKQALQDQLFQKIPFVRKIQENSEGLLRYDTPDIIKKDKFAWLRDDEFARQALAGINPVNIERLQAFPPMSKLDPAVYGPPESAITEEHIIGQLDGMSVQQALQDDRLYMLDYHDIFMPFLDRINALDGRKAYGTRTLFFLTAAGTLKPIAIELCLPPMTDGCARAKRVFTPPADATSNWLWQLAKAHVCSNDAGVHQLINHWLRTHAAMEPFIIAAHRHLSTMHPIFKLLKPHMRYTLKINALARQILINGDGVIESGFTPGRYCMEMSSFAYRELWRLDQEGLPADLIRRGMAVEDPTQPHGLRLLIEDYPYATDGLLLWSAIRRWCDAYVAMYYPSDESVQGDTELQSWYREAVHTGHADKRDAPWWPRLSTPADLASLLTTLLWLTSAQHAALNFGQYPLGGYIPNRPPLMRRLVPAEGDPEYAHLVADPHRFFLSALPSLTQTTTFMTVIDTLSTHSADEQYLGERPDEAWTADPAALAAAREFADEVRRAEEEIERRNADTGRRNRCGAGVLPYELMAPTSGPGITCRGVPNSVTI

SEQ ID NO: 63174 - protein, 545 aa, Zea Mays
MGGAGGLMLLRARCRLQLCLGLSRGGGGGGGADEIDRPTPVTSGVAFSFRPGEKRRKPNLGSGVPAGMSATVAGHRSRFRNRTTVPREPRNSEDTWARASEAKPIRNIALRPAQSRPDLGRGHASDDKLPRGGEGRLGVGAELDELHLHLARDSHALACSCRAGAETMGSPHHGHGVDGGGRSDDEEGDAGSWRLRMDSGFSVPDRFHRQPPFYARIFGGSHGKQRKIAKYYKKQENLLKDFSEMETMNEMGGLDQNAPTEEEQKQLAKSERFAINLSNAVNLVLFVTKVVASVESASMAVIASTLDSLLDLLSGFILWFTAYKMKKPNKYNYPIGKRRMQPVGIIVFASVMGTLGFQVLIESGRQLITQHVLCCGREFFLMLYCRTFKNEIVRAYAQDHFFDVITNSVGLVSALLAVRFKWWMDPVGAILIALYTITTWARTVLENVGTLIGKSAPAEYLTKLTYLIWNHHEEIQHIDTVRAYTFGTHYFVEVDIVLSGDMPLSQAHDIGESLQEKLEQLTEVERAFVHVDFEFTHRPEHKAEV

SEQ ID NO: 63175 - protein, 197 aa, Zea Mays
MPLKNGKTASGPLIKPIHFKNSAAEKVMSNGKVNLTSKNNPEVNGTAKSSESNRCKTGQFVGPSKNNADNTISCGERGQQSERIHDANGNGQSIHHSQYFGEISNGNAMPTSAQQETSHGNATPARQETNNSNGTPAQQETSNGKASHAEHYSERSSHQEEHANFSGNKRRLEEDKFQEILWSGNKYAQELRHSNKV

SEQ ID NO: 63176 - protein, 161 aa, Zea Mays
MWDFSFHALYKVSLHSKSLSTTLAIINTDDKSFSFNSALHTYFSASITGVSVKGLKGCKTLNKDPDPKNPLEGKEEREEVTFPGFVDCVYLGAPSELILDNGLGDKIAIANSNWSDAVLWNPHLQMEACYKDFVCVENAKIEMVQLEPKQSWVAEQKIELV

SEQ ID NO: 63177 - protein, 616 aa, Zea Mays
MARTMLPSPSPHTAVKREIEDAEPTAHTPASLPRKKRRRGGRLPVTPTQLPLSPPLVTPQTIPSVASGDASFAGLTPTPVFSAVKDESGADTGVGSNGRASGKRNDSQDLRSVPRPAAAEPPTLWLNRRRLGLILHELAGAHRWRDAASVVSTLLSGNRKPDSYEETRRMFVVAMEIHKRLAEDSSVQYGGRSSYYLRTQKLFNVWMRKLIWFPSCPKKNLVTLELALFYLSQGNIDNAHIATRTLIANGKLQTEPILNLVHGLISFDKWYSGLPKDMQVEDFDVYDESCGIPMKSNGSAGTDLLVNSDEDSMNIDESSLATCSSESSINNENIDKKMNNKPGFLHPKEEMDPLESQGNENLRSIFLDTSDGPTCGLEQSLLPLKLKFATGASNDCFDKYMKYKSVPNTLYEDAEKCLRLALYSNPPVMAALLPLIQILLLGDKLKVALNELEKACLSLATALPFRLRGRLLEEYDQNQVSTIFSCYEEALRRDPTCSYSMERLIKMHKKGYYNTIQLLEAIALHLDSVNGKSCIWEELVSCFLRLFSDNTADYEDCISCTNTHGGESLEASSKFSSVFFEQFTRESWKARCRWWARHHFSQNAYTSEAQSGLLFS

SEQ ID NO: 63178 - protein, 139 aa, Zea Mays
MAFYYGVGGQSSAWAAPGGSRPWTKAEDKVFEGALVMFPEHLPNRWALVASRLYDRTPQEAWDHYQALVTDVDLIERGMVEAPDSWDDDAAAAGGGRSGRGRGGGSGSGEERRRGVPWTEDEHRYAPRAFEHSSVLSDV

SEQ ID NO: 63179 - protein, 168 aa, Zea Mays
MRHVSRSTASPWRTNVAEVEIKKAEPKKPGAGDSSSNGRHSRGGGHRDSYRGSGVSVNSGGGYGYGGGYRSAAAAYYGSTAYGAYGRGYGYGATSGYGSGYGSAYGGSMYGGPYGAYGSYGGAYGGGAYGAPGGYGGGGYGSYGGAGGMGGGGSAGGRGSSRYHPYGK

SEQ ID NO: 63180 - protein, 58 aa, Zea Mays
MCPVMICVVQNSGTSCIILTFNLPAVVLVEILECCVKVLFSIQFVHMHCCGDEFVVVN

SEQ ID NO: 63181 - protein, 77 aa, Zea Mays
MLPICHRVVRTPYTSTKEARQGSTTRPFQSSTSSRKPATDLGRRKHRNPSSKNLYRQFDPRTSLYSVATPPRLPLTR

SEQ ID NO: 63182 - protein, 211 aa, Zea Mays
MEQDKRTKVLCLHGFRTSGAFLKKQISKWHPSILQQFEMVFPDGVFPAGGKSEIEGIFPPPYFEWYQFNMGATLLALLVGYQAQGKVLSDHPPIKFVVSISGCKFKDPSICDVTYKDPIKVKSVHFIGEKDWLKVPSEELASAFDEPLIIRHPHGHTVPRLDDVSVKQLSEWSSCILEDLETAIVPEALDSGNPSDKEAISAEFAENLVTA

SEQ ID NO: 63183 - protein, 1038 aa, Zea Mays
MSSSAAETPREHVESIRRKRYYIGRGEQNPLAEDLHQATNYLSQELYSKDVHFLMELVQNAEDNEYPSEVAPSLEFLITSKDITGCGASSTLLIFNNERGFSATNIESICRVGKSTKKGNRHRGYIGEKGIGFKSVFLISSQPHIFSNGYQIKFNEKPCAECNIGYIVPEWVESTPSLSDIETLYGCSKVLPTTTIILPLKSEKIDAVKTQLSSMHPEMLLFLTKITKLSVRENSDLNHTTVSEISITSEKNYQARKNMHAESYTLHLSAEETGKEEAECGYYMWRQKFPVKPENRVDKRAEIDEWVITLAFPHGQRLTRGKQLLPSIYAFLPTEMVTSFPFIIQADFLLASSREAILFDSPWNKGILECVPKAFMDAFVTLVKSDAPSMSRPSMFNFLPVDSSQIPLLEPVRSGIKDKVLAEDIVPCESYASQKIFCKPSEVARLKPTFWTILAKAWGLGVDLKNLSTHGTYILSSHFDKSIYDSVLNFLDVKNVNHEWYAKCIEGSNLVKEVDEQLYLEILYFVAVNWQNFSGTNMMSIPLLKYVDRGGVLSFWSISRASQCNDRLCIASENKYISWLISWNREFLSSNRFFLPPSTQTALEGCSEKMKSWLQKHARVEVVSIYSYGSVVVNSLGSDQRAVIAFAHFLYHSFKKDHIGDYYLSELCSSMPVIDSYGYVVKERNSIIVPAKGSKWVGLMGTNPWRDHGYIELSAEYKSAGHFAGNYTSEDQLLEFLKTNLQASDVPFILPPDARFSTVSSSLTVDNVFLLLEWIKNLRSRGVRLPDLFLTCVKEGNWLKTSAGYKSPNISFLSSSNWGSLLQTAPSCVDIPMVDQEYYQNRLHMYKEELKAIGVRFEFQEASAYIGTRLMSIAAGNSLTRENVYTLLRLIRFLREKFLSPSDLIESVKEGRWMKSTLGYRRPADCIIYDSDWEVASCISNQPFLDVSFYGAAILEYKVELELLGVIVGFKDNYQLVIDNFKFSSCDITSQATVLILKCFQLSCSILCVLKSGCTLHWDSDLHQMQFYLMMHGYLCLQ

SEQ ID NO: 63184 - protein, 101 aa, Zea Mays
MPLRSCLMAAGFAASRPLMSWRWRTATRSTPCFTRPEAAFLAPPKSLVLLSVLRSTKQKGKSLFKELVMLWLLVPLLRDILSLCLVVWFGTLFCHHSFIYP

SEQ ID NO: 63185 - protein, 258 aa, Zea Mays
MYIYTSTSCVRTAEICLLSAASSRDAEHGLRDAWEQVKEMRAREEETRQRAAFLQHGFASAWKEGIHTDIVVKPGTGPAIPAHKAILAARSEVFRHMLSGDDRCKAPAGGSISLPELSHDDLSLLLAFLYTGALEAPGEGGGEASQDQERQLHALLVAADKYDVPFLRRVCEARLAAGVAPRNALRTLEVAELSSSAALMERAMGAVVEHAEEVVFSAEYERFAARNAGLCVEITRALLARMPTPARSDGPCLELGSS

SEQ ID NO: 63186 - protein, 66 aa, Zea Mays
MPLVLQVWLHVRKGVRAARAWWHHRRPPQQQAHQYPCRSRCSFEAIVGSRSAVRRIRSCGDHKRCG

SEQ ID NO: 63187 - protein, 85 aa, Zea Mays
MGIVFTRLFSSVFGNREARILVLGLDNAGKTTILYRLQMGEVVSTIPTIGFNVETVQYNNIKFQVWDLGGQTSIRYRLFIMIVNS

SEQ ID NO: 63188 - protein, 303 aa, Zea Mays
MASAEIPNSSPDATNPAAAAATATATATGPDISSSPPLPPRKRRLSPSSSPTRSASRSRSPRSRSPRGRRSRSRSRSRSRSRSRSPQYPPDGKRQRHNDLTVEACRDFLRDRCTRSDLECRYAHPHNSASVDRQLLRSIGMEDPNVKTQICRDFTRGKCSRSANECRFLHHSSVEDAAIVCQDFLRGQCNRIACRYSHVVAHPVPPMSHVPMPYPEMLYMPPPPPPPLGVPMMGPPPSPFADNKNRVEVCRDFLKNMCNRESCRFLHPGTHTAAASANVEVCRDFKRGECNRPACRFLHPYTS

SEQ ID NO: 63189 - protein, 1412 aa, Zea Mays
METAFCLASCRGHEGDITDLAVSSNNSVVASSSNDFIIRVWRMPDGMPVSVLKGHTGAVTAIAFSPRPGAAFQLLSSSDDGTCRIWDARYSQQPPRLYTPKPPDVAPGKSGDASSSAAQVQPTNHQILCCAFNANGTVFVTGSSDTYARVWNACKSSSDEHEQPIHEMDLLCGHENDVNYVQFSGCAVASRSFSSDSSHTSKEENSLKLRNSWFTHNIVTCSRDGSAIIWVPRSRRSHGKIGRWTRAYHLKVPPPPMAPQPPRGGPRQRYQPTPRGVNMIVWSLDNRFVLAAIMDCRICVWNASDGSLVHSLIGHKESTFVLDVHPFNPRIAMSAGYDGKTIIWDIWEGKPVQIYETGQFKLVDGKFSPDGTSLILSDEVGRVFIIGTGQGESQKDAKYDQFFLGDYRPLIRDTNGSVIDQETQLAPYRRNMQDLLCDAGMIPYPEPFQSMYQKRRLGTLGLEWRPPSVNFAVGPTYNATTGEYQTIPIIDPDRWEPLPEITDFIELEPENEVISDDTDSEYNGMDEYSSEGEQDIMSGDSSGTSYSSGEIDADNPDSAHLRRSRRKKKKSEADLVTSSGRRVIRKRFLDDPGVATVSRPHRGRKSRNGCSSKKKRSPKSRGLRPRRRAAETALITFPKKGVSTEEDEDDSESFSDSELNTDSTEAEQLEWSGQLRTRREINSPFDIDDVTDPSQFTDNKENSGTGKKLVLRIPRRDLRTQFPLGSGKAECSIQDKAVKSLSLANHEPVEHELTIEPGHSPASKAELTIDGDLHDSSAVCSNNSIRWGEVKMRSSKRCKYSEPAGGLWSSSNNVALQDIEGSSSQQIPHEYGDGIQPSVVQNVQEVQHGTILDNIPENNSTDEHTRENFGDLEKIANNINAHADGVNDTVQVPNTSQPQLKVKFKSRGSADAVGNIMNSKHVKDSVQCGDDSSINQPRNADFYIVPKSSQECLDKSTSLHDSKKPYLDASKKYTAVYKRSKRKNKKKMDSDECPNEDSTSISNDDGGYQPAEYSPVAAASSRLRRSARKSFAYNINGTTQDDISEVKVSYGSHEASTSGRRVVTDVREGMWRQNSRSVGLRSARNKRESNSFLDTHPLGRRHQVSFKYSWLMLLEHEDSYRYIPQLDDEVMYLGQGHEEYLKQVQSSEFCPWNRIKGLKAVELCKIQGLDYATYRGSGESCCKLTIEFVDCTSSGFGKTFMITLRELVNFPDFLVERTRYEAAMERNWTHRDKCKVWWRDEEGQVGGTWWEGRVMAVTPKSPDFPESPWEKYVIQYKEDGSDHAHSPWELHETGSLWDPWKHPHMDLTVRDKLLSEMENLQEMSHRDQDHYGVFKLDKVAEKSDFINRFPVQFSIEVIKARLANKYYRTLGAVRHDTTVMLSNAESYFSKSSEMTKKIRKLSELLDQIFSSL

SEQ ID NO: 63190 - protein, 80 aa, Zea Mays
MSYQAPPPGTAAYPPPGTAYPPPGQQAYPPPAYGAPPPMAAGGYPPPPPPQPQDSKRSNDGFLKGCLAALCCCCMLDMCF

SEQ ID NO: 63191 - protein, 352 aa, Zea Mays
MMRYPRPSSDGLPLPNGIGSGGGGASKKPATPPPRSSKDDVAPAVATDSSRLAAFLASTSLESKARARAPPAQPAPTSAATAAVAATKSPVRDHDHGHGHSHGASSDHSDPASPSSTGTGELLLQWGQNKRMRCRRDSASPSPQHRQAGGKIQRRSSSPAVDKLMPPPSAAPYTRGSNLRSVSSLPPRSGSGSGSGSSAGALPHPLRSAEDRAAGKFSAARAEKQRAVSPGSVMGMGVPVPDPRRQQQQQHAGAAAAATSKPASKVEMPRIYTTLSRKEKEEDFMAMKGTKLPQRPKRRPKIVEKTVSAICPGMWLTDVTRGRYEVREKKCPKKQQKNRGLKGMEGMDSDSD

SEQ ID NO: 63192 - protein, 362 aa, Zea Mays
MYLFLLFSWKQGVSSQQTTEGTGVFGRFRFLNQRVSSQSEDSLSCHRIDLRTSTIKIDADENDLRFCFRIISPVKAYTLQAESGADQKDWIQKITGVIASLLNSPFPQQLSYGNVAAESNRSTSSVDSLSIEDNKSSEGHDDIFNLLRNIPGNDSCAECRSPDPDWASLNLGILICIECSGAHRNLGVHISKVRSLRLDVKVWEPVIMDLFHALGNDYANSIWEALLPKEDQGMNDSNGAILFIEKPKPSDAFSIKERYIQTKYVDKLLFARDPDQNTINILEAIRKNDVRAAYRILAIAEVSANMTYDALSKDVHHVQPVTDKMLLDPISCEIIQDSGKPEGCLQGFPWPNTIASLCPKEK

SEQ ID NO: 63193 - protein, 442 aa, Zea Mays
MDFSAGSYFTSWPVNSASESYSLADGSVESYGGEGIMPPSSYFMTARSDHNLKFSVHEQDSTMLPNDQLTYAGARQTDLLPGETPSRDKLCENLLELQRLQNNSSLPSNLVPPGVLQHNSTPGAFHPQLNTPGLSELPHALSSSIDSNGSEVSAFLADLNAVSSASALCSTFQNASSFMEPVNLEAFSFQGAQSDSVLNKTTHPNGNISVFDSAALASLHDSKEFISGRLPSFASVQETNVAASGFKTQKQEQNAVCNVPIPTFTARNQIAVAAMPGSLIPQKIPSWINENKSEGPVSHPSDVQIQPNSVGNGVGVKPRVRARRGQATDPHSIAERLRREKISDRMKNLQDLVPNSNKADKASMLDEIIDHVKFLQLQVKVLSMSRLGAPGAVLPLLAESQTEVPNLLISLQKYRCFIIGDIDFPSFFHLYAQLQCLRQIPL

SEQ ID NO: 63194 - protein, 332 aa, Zea Mays
MNLPYPKEETLARHSILGPNGLNGRWNGPVTGIKVQYPSNFELTQNGITSLVPSILNQDDLHGSNTAPAPPPPSSSSNDNDNMKSVLSLDDGRWSVPAEEHTPLPSANLEEELFQLNIKQPSPPPVLAEVQRPISPSRVADPTPGLPTSGTARFQNLHVPIKLMECFLRVAESNTKRSLETCGVLAGTLKNRTFYVTTLIIPKQKSTSDTCEATNEEELFEVQDTYSLFTLGWIHTHPTQSCFLSSIDVHNHYSYQVMLPEAIAIVMAPTDTRKHGIFHLTDPGGMGVIHDCQERGFHPHKAPLDGSPIYEQCSHVYMDTDIKFDMIDLRQR

SEQ ID NO: 63195 - protein, 573 aa, Zea Mays
MLAAEGIVVQSFNSDLLYEPWEVVDDEGQPFTMFDPFWNRCLSMPYDPPAPLLPPKRINSGDLSMCPSEDLIFEDESERGSNALLARAWTPGWQNADKALTAFLNGPLADYSVNRKKADSASTSLLSPHLHFGELSVRKVFHLVRMKQLVWSNEGNHAAEESCTLFLRSIGLREYSRYLSFNHPSSHERPLLAHLRFFPWVVDESYFKIWRQGRTGYPLVDAGMRELWATGWLHDRIRVVVASFFVKVLQLPWRWGMKYFWDTLLDADLESDALGWQYITGSLPDGRELDRIDNPQFEGYKFDPHGEYVRRWIPELARLPTEWIHHPWDAPVSVLQAAGIELGSNYPLPIVELDAAKGRLQAALSEMWQLEAASRATMNNGTEEGLGDSSEVLFPQELQMEVDRQPAPAEAAANVHVHVPMPARRRGDQMVPTMTTSSLNRAGTEVSADLVVANSEEEDTRAQVPFHAHLHLHPRAEAPPAARRTNNGARQHDVFQQRRNHRRDALLAPSASEASSSWTGREGAVVPVWSPPAASGHSDAFAADEADVSSRSYLGRHPQSHRLMNWSQLSQSS

SEQ ID NO: 63196 - protein, 413 aa, Zea Mays
MQMAGSAGSTKLVKMASEGNKDVPHEALTVDHSSISGSKRKRGRPRKYEYPVNELPQKVQPIQSAPPLLHCTQDGSSLASHASGGGAHGNWSAQPRNSANASLQGNSGKDDFLGKHFVGKLTKKVPGFSLITVKVKDNQVLKGWVPDEINLRPITPKDDLAPELPMLRPSQVRKRASAIHMQPALPVPMHLENVTLAKPLQMRRPVEKTIAKHAVPLASRPYISSGVVAAIPISVAPINPEMRTSARQDAELVIPQSSVSAVPIKFVCPASVPCKQLANQNEFTGNKSVDEVQKDSESPNVTKESPVKAEKPNIALVDVVAKDSLGEGQQLNDQVTDVVRDFSGQTQNVDVTMSDEIKIASGARDKPNSANCEQQSSKEPSDITEQSEQLKTETDVQKGVDASDDIHPAHDEQ

SEQ ID NO: 63197 - protein, 163 aa, Zea Mays
MTQHVSMISITLSPRELDKHTPGYQAPVYVEQPRQQQVPPPHRQPRRPPAQFQQLEYEDSYARGRGRGVGVEGAGVEVATVAMVDMETTKVAIIRVVGIMTIKVEIMAMIIKTDIVAMIIKVGMVVDMAITKADMGTIKKMVDITETQEVVCEEEAIGVTEEG

SEQ ID NO: 63198 - protein, 600 aa, Zea Mays
MDTPDRPRAAAAAGFEDSPVFNFINNLSPIPPPKPLDSAHNVQLFKSSDLAPVSSIFASPHVNPVKETKVLIRDESVHLPQELHSPSSVRTRIDTSGSFRMIRCKDIVSDNCNITCQLNEASIDSSDHTSNSTGQLTQSIQDAAGSMESDKDQCDANKTDLTISQECTGLEGMNLDESGPDKMDSSHSGIVVHENQLSEQNNDEPAAYNEGYIITHQSTSDMLTLAIPSGTETQPVNDTQMADNPYSCESLLDDQSSGYCTQNSVHEPHLYWTGAVEGSAVSYTPQTLPGALQSQLMPCNKLSEPKDYVPTEQNALSQHLRGMRRRSLFNEKAGISNKGVDKTSDHHPVNSTTPKCKTISGDNSKPLRTPPCALPGIGLHLNALATIPKEKIVPREIQSTINESSNLIGPAGSSPAPFEQNIINDDFTQTTDVATAEASSQGSPKKKRHKFDNGDGTSCKRCSCKKSKCLKLYCECFAAGVYCSEPCSCIGCQNNQSHMETVLSTRQQIESRNPLAFAPKVIHTSEPGMDLGDFSNKTPASARHKRGCNCKKSSCLKKYCECFQGGVGCSVSCRCEGCKNAFGKREGEENIEETWDSYQT

SEQ ID NO: 63199 - protein, 401 aa, Zea Mays
MPGRADDGDAGGPSRAVTGAVEDPEAVANDVHVSIRNSTARRNLGYLSCGTGNPIDDCWRCDSDWHSNRQRLADCGIGFGRNAIGGRDGKVYVVTDPSDDDPVNPREGTLRHAVIQEEPLWIIFKRDMVITLREELIMNSFKTIDGRGANVHIANGACVTIQYVTNVIIHGLHIHDCRPTGNAMVRSSPSHYGWRTMADGDGVSIFGSSHVWVDHCSLSNCADGLIDAIMGSTAITLSNNYFTHHNEVMLLGHSDSYVKDKAMQVTIAFNHFGEGLIQRMPRCRHGYFHVVNNDYTHWEMYAIGGSAEPTINSQGNRYLAPTNPFAKEVTKRVETAQTVWKSWNWRSEGDLLLNGAYFTPSGAGASASYSRASSLGAKSSSMVGTITSDAGALSCRKGAAC

SEQ ID NO: 63200 - protein, 314 aa, Zea Mays
MDVGAELREAHRLTGHADRVWALAWNPAPGPGSSPVLASCSGDKTVRIWKRAPDGAWQCSDVLEDTHNRTVRSCAWSPNGKLLATASFDATTAVWEYNGADFECVATLEGHDNEVKSVSWSPSGSLLATCSRDKMVWIWEVLPGNEFECVSVLPGHTQDVKMVQWHPILDILVSVSYDNSIRVWAGDGDDEWHCVQTLTEANNCGHSSTVWALSFNLKGDRMVTCSDDQTLKIWDTSADLSQPKTGEGHDSWQPMETDNVIKEGLCYRCCCVRVSQSNKVCELGETIINRENHRLVAHFWEPLNEVHRNITPYF

SEQ ID NO: 63201 - protein, 77 aa, Zea Mays
MVTAPGMRPPPSMCASPTPVPPRIRVVELEACAPSTTKQVLRRGCSDHGGGGHVDERHRVRWVTSRCAGQGSAGGGF

SEQ ID NO: 63202 - protein, 491 aa, Zea Mays
MMRSSTTTAVTSGVSDKRSSTGGAANRQAAGKTASTSAGLRSGGGTKSSSISKSGPFTSAATSHGVSMDTKPEAKTKSATLSNKNRTAQRVPVHPPSKSGISKTIPSRSSGNTIPAKGHADRASPSISPSSSMDSMSSVISGASTASTVGRMSHTSESLNGLSPSLRKSNDCPPTPKLRPPVVTEGHSSGTAAPGVNLKATSEMTNQRKGFKPSGLRRPTPKIGYFDAEKYIDQNIGAQLQPQPSKVQCLPDTTQFQSMNVDAAPATYVQQDSKLTATPHEESCASESKVVKLLPLKVEVEPFKVAEPCTHQTDPVVVRPEAVQQQSMEIQCLLYATPNSQQTFGQQVLEPIVAPHEVSACKSNTVKTPLETVQMEVEAPLEAVQLEAEAFKVDKPEACRHLVSPIVVKLEDKFCDQNARALVAEREDCTLMTEAVVALATDYSKENIPVLHENIQANVDASSLVEVLTQKLSSISLGEDNSNVALRSCSE

SEQ ID NO: 63203 - protein, 558 aa, Zea Mays
MAAAAASFSALPFLLLLLLVPSLDGASNVTYDHRSLIISGRRRLVISTSIHYPRSVPEMWPKLVAEAKDGGADCIETYVFWNGHEIAPGQYYFEDRFDLVRFVKVVRDAGLLLILRIGPYVAAEWNYGGVPVWLHYVPGTVFRTNNEPFKNHVKSFTTYIVDMMKKEQLFASQGGNIILAQIENEYGDYYEQAYGAGGKPYAMWAASMALAQNTGVPWIMCQESDAPDPVINSCNGFYCDGFQPNSPTKPKIWTENWPGWFQTFGESNPHRPPEDVAFAVARFFEKGGSVQNYYVYHGGTNFGRTTGGPFITTSYDYDAPIDEYGLRRFPKWAHLRDLHKSIRLCEHTLLYGNTTFLSLGPKQEADIYSDQSGGCVAFLANIDSANDKVVTFRNRQYDLPAWSVSILPDCRNVVFNTAKVQSQTSMVTMVPESLQASKPERWSIFRERTGIWGKNDFVRNGFVDHINTTKDSTDYLWYTTSFSVDGSYSSKGSHAVLNIDSNGHGVHAFLNNVLIGSAYGNGSQSRFSVKLPINLRTGKNELALLSMTVGLQDSLMNG

SEQ ID NO: 63204 - protein, 304 aa, Zea Mays
MCIASTTLDEHRLHFEKDKALARRFQPVLVNEPSQEDAVKILLGLREKYETYHKCKYTLEGINAAVYLSARYIPDRHLPDKAIDLIDEAGSRARMESFKRKKEEQCSILSKSPDEYWQEIRAVQSTHEVALANRLKYSLDENDKDDGVNIEVIGDNKIASPSMPPTSVDEPILVGSEEIARVTSLWSGIPVQKLTADETKLLVGLDDELRKRVIGQDDAVVAISRAVKRSRVGLNDPDRPIATLLFCGPTGVGKTELTKALAASYFGSVGYAFLLASFSRSEKTCCMDHVLKKLFIRFAGISYD

SEQ ID NO: 63205 - protein, 640 aa, Zea Mays
MKISDGEDENITCHLSKSLGDKNLYVGMNGHTHLSNYFPGVRNTALSTGLSTRASHFVHNAPKLHSSFCHDNSHGDSEKCYLNHGMEQVSHYTAKAFCIDDKTTIQSQVFVSNPSLLSTSAAVTASELATKQKKWSTAYVEKQHFSPSPSSLPDLSGDLDSQFRCLRQVQYHLEYLFDGFLQSVQGASSADKFHKDPFHISACSILLDRDTGSPRLQLLSPARSNGRDPSPVSCSQSTECVSQHSQNGSPWDMASQRSVSVPSGIDIPPNGVSPCSSCADSEVSSVSWFHGSGDSAMMHGSGKDTYFTRKSCYTRWERLASSRKNGKILPNQSVKYKSNQKSAPGARFVSHKEQAAIDSRTKEITIDQALKIHEYIESDMKIVEKLSCHNQKEVRHDNEARQLPNNNQDVCLNKNFLQNRYHVESTRAPRATHQIPKYQPFKIQNTTECDRASLSKNMPRKHSCGTWKEYEILDRPTKQRPICGPLKLENRHVWDCTKKISAGNQKCNNHKDYLSFVRGAVPRSHAASTPNGLEKEAANSNKSADNGSPVRPILPELLLSCHDINSQERSPSSSAHQSYFPAANDRPLETIEFGSLGPFALPLSSLKSNGTTNTEATSKVFTDASPFVLQRSRAAATENR

SEQ ID NO: 63206 - protein, 186 aa, Zea Mays
MEELSMVALSGSIWLQAFVVTLEMNSFTSVQLLAIWGNLIAFYVLNFFISSIPTSGMYTIMFGLCRQPSYWITLVLISGVGMGPVLALKYFRYTYRPSVINILQKAERSRGPMYTLLNLESQLRSDKDSMMVAGSTAPAKNKSSVYEPLLSDSPMASRRSLAPASSFDIFQPAHSRTSHPRNIKAN

SEQ ID NO: 63207 - protein, 56 aa, Zea Mays
MEVRKLKCHSSNSNRKNKKISHTRVNSFYFPKCSIWGHQWLDKKLGKPKIRWHKHK

SEQ ID NO: 63208 - protein, 189 aa, Zea Mays
MTRKGWSAIAAQLPGRTDNEIKNVWHTHIKKRLEDGHGEEKKARKGKPAAKKAADAVGRSSEHGPFLTASPGLSSSGVTFSAAADSAAAVSSSADNAATTSHHPQQVGASKAESSTELDSGLSSAEFPPLDDSFWSSADVVDMGLGATDEELGLACPPPLSSSSTRDEDMEFWLNMLLEAGDMRDLSVL

SEQ ID NO: 63209 - protein, 104 aa, Zea Mays
MLVLVSTSMCMFRIIVSPFLVSGCLYCTACYSEFSTSATNCTKSCRCNWPSEYCHKACFYATAAYTCGGRKEEKTLEFGKREGWCHDPSEGKRGFWVRMDRCWV

SEQ ID NO: 63210 - protein, 369 aa, Zea Mays
MAAALASSPLVHLSTSRLRLPRPRASSSSAPGCSIGVCLGWRLKVGWRALRRCDRLRCFSTDGDGVEEGEKRGEEEASATAAPAPDPAPAETQVGAAEELASERSRSGSFSSSSSSGNPGVSSEPPLLSFSVDNIDTVKLLELLGPEKVDPVDVMAIKEKLFGYTTFWLTKEEPFGDLGEGVLFIGNLRGKREEIFAKLQRQLRELAGEKYNLFMVEEPNSEGDDPRGGPRVSFGLLRKEVSEPGPTTLWQYVISLSLFLLTMFSCVELGIASKISSLPPEIVSYFTDPNSTGPPPDMQLLLPFVESALPVAYGVLAIQLFHEIGHFLAAFPKNVKLGIPFFIPNFTLGTFGAITQAYYSLQILLGQVI

SEQ ID NO: 63211 - protein, 87 aa, Zea Mays
MYICHDVKQYNCLIVFCEGAWSYHEKCFQPPSHVSQVVSSNYRLDWLSKCRDLLLVTLPLLSGLRNGNTQLLLGICWVYRLQTVKPS

SEQ ID NO: 63212 - protein, 63 aa, Zea Mays
MNYCSSLKNELISVKNRVDKSEQISKERLTRARSNRNCSLVPSTAVWYLIMVERYLIMVELKR

SEQ ID NO: 63213 - protein, 63 aa, Zea Mays
MCKTRDKLCTTRELDNSFWIVICVPHAIVLVKSDVNLFGIEKQVLPFIHHYVASMFANQGKEM

SEQ ID NO: 63214 - protein, 245 aa, Zea Mays
MSIPTTLGLDPTVANSVHQVINRSLGSIIPRNVQKAVLEGLFSLGRAQVSDYILNEKNPIGSLRLARLRSILDEGKSLQLQFPAEDLGFHYAEGALVVEASCEKTHEGEKLQHSKRASREYIPSAKVGSRLPHMLVREVPASSEGAFSTLDLVSGDKLEFVLIIAPVKESYEIARATLKIADELTLSARVCVMWPRGSTDAEVEESRSELTPWTNYIDVEEVPRVSGGSWWEMCRISRKSFFLKK

SEQ ID NO: 63215 - protein, 283 aa, Zea Mays
MILYLMYFQLVNTIYPILQIFAEKPAVRRAYLDFVPKKMSETRFWEKYCRAEYLVRTKNTAAATAEAAGDEELAIFLKNDDILAKEAKLKIKRVDPTLDMEADTGDDYIHLPDHGIHRDGSKETVDADSELARRTLSQDLNRHAAVVLEGRSLDVESTDPKTLAEALARSKKEPPSTSNVDDDNHERLMKVARMTEIEDLQAPRSLLYAPLCIKDPREYFDSQQANALRSLGGSNGGRKAHSCSLSTEEVFHHLMDQMSSVKVNRLNCPIVQSDMALKEILTT

SEQ ID NO: 63216 - protein, 285 aa, Zea Mays
MYRAAASLASKARQAGNSLATRQVGSRLAWSRNYAAKDIKFGVEARALMLRGVEELADAVKVTMGPKGRNVVIEQSFGAPKVTKDGVTVAKSIEFKDRVKNVGASLVKQVANATNDTAGDGTTCATVLTKAIFTEGCKSVAAGMNAMDLRRGISMAVDAVVTNLKGMARMISTSEEIAQVGTISANGEREIGELIAKAMEKVGKEGVITIADGNTLYNELEVVEGMKLDRGYISPYFITNSKTQKCELEDPLILIHDKKVTNMHAVVKVLEMALKKMWKVKHWAL

SEQ ID NO: 63217 - protein, 676 aa, Zea Mays
MKSYGRVKPDVVAYSRDIIGSKISTGCKTLSGTSVASPVVAGVVCLLVSVIPEDKRKLILNPAAMKQALVEGASKLSGPNMYEQGAGRLDLWQSYEILKNYQPRASIFPTMLDFTDCPYFWPFCRQPMYAGAMPVIFNATILNGMGVIGYVKDQPLWQPSEDIGNLLSVHFTYSDVIWPWTGYLALHLQVKDEGSQFSGIISGNVTLTIYTPAAHGESSPRSSTCILHMKVKVVPTPVRSKRILWDQYHNIKYPSGYVPRDSLNVHNDILDWHGDHLHTNFHILFNMLRDAEYYIETLGSPLTCFDASNYGTLLMVDLEDEYFDEEIQKLRDDVIHKGLGIAVFAEWYHVDTMVKMTFFDENTRSWWTPITGGANIPAINELLAPFGIALGDKILTGDFSINGEQTHYASGTDIVQFPAGGFLHSFQLQENSKTVQDHIGTLDTESTQGKGKLSSILGVIEAGEGRIAVYGDSNCLDSSHMVTNCYWLLRKILEFTGNRVKDNVLFSEAAQLKFPVFENIHHPSRRTDVNFSTYSTVVGKELICHQDSRFEVWGTKGYGVQPIGTSRKLPEYQMHESSSSPNVTIQIAGSRQDKVERLQRNLSIPNAAKFDDKRDYFGFIGHEEVDIGMLMASQWMIPCFAATACLMLYLSCRVQQKRRRRRKGSVASANRLTSMV

SEQ ID NO: 63218 - protein, 688 aa, Zea Mays
MAPLLLLLPVVQLLLAVADAVPDSCAKATCAGHEIHYPFRLDSSMPDDCVVYPVPGIGLICQDNSTLILPFESHRYTVLSINYKAHTILVSDADIGDEYAAAAAGAGCPRLHVNLTMDAFWLRLSPSDSNITFLYNCKRNVTLPSAVELSGCQDGNDDDDDDSRSPSPSYSYALRDGGVTGAEAHELECQEVVVAPVLDVHKRAIVGAPGGPPPPPGDGSSPFREVLQGGFELSYDTHSRQCDRCERSGGWCGYQRAGATTPAAGASATMTFTCFCESGPASDRCGPKSKTAVIAGVAAGAGVAILAAAIFLFVRRKRKQKRVVNSSSKLLKYSGSGGTPRSRVGDMESGSIEDPPTHLFTYEELEEATSCFDENRELGDGGFGTVYKGYLKDGRVVAVKRLYNNSYRRVEQFQNEAAILSGLRHPNLVMFYGCTSSQSRELLLVYEFVANGTVADHLHGQRAAERALPWPLRLGVAVESAAALTYLHAIEPPVVHRDVKTTNILLDADYHVKVADFGLSRLFPLDVTHVSTAPQGTPGYVDPEYHQCYQLTDKSDVYSFGVVLVELISSKPAVDVTRHRNEINLAGMAISKIQKCQLEELVDIDLGYETDPATKKAMTAVAELAFRCLQQNGEMRPPIKEVLEVLRSIQGEYQTGKDGDKNKDGPLSPTTVHAPWESRATTPNTSRD

SEQ ID NO: 63219 - protein, 215 aa, Zea Mays
MLCPTNTRSQRNLIIILIDDIPVTSGNVAFARLGKCLTGLIRSTQVPTVISLTHYHKSESNDTAMWNSEDLESLLQDAGAHKIGFNPVTTNSIKKILVRVCKEESCHASEELLHQIATSSGGDIRHAIMSLQYYCLDPRRHSSALATSSSSTVPKNLDSLVPGHESYGPSSALPSPCGRDETLSLFHALGKFLHNKRETNSDADIDLDSCPLKET

SEQ ID NO: 63220 - protein, 527 aa, Zea Mays
MGKSMPSPPVPPPPSHGGRNGASGNIVPPPAPPGSNAKLFGPQGRGPAPPSGPMSKSFQSGQAVLRRSNLKPLHWVKVTRAMHGSLWAESQKPDETLKAPVFDMSELENLFSAALPSSDSRRSDKSGSRASGSKPEKIHLIDLRRANNCGIMLTKVKMPLPDLMSAILALDDTVLDADQVENLIKFTPTKDEIELLKGYKGDKQVLGECEQFFMELMKLPRVESKLRVFSFKIQFRSQVSDLKRNLNIVNSSAEEIRGSVKLKRIMQTILSLGNALNQGTARGSAVGFRLDSLLKLSDTRARNNKMTLMHYLSKVLSEKLPELLDFPKDLSSLELAAKSLAEEMQAVNKGLEKVEQELTTSENDGPVSEIFRKTLKDFLIGAEAEVRSLTSLYSNVGRNADALALYFGEDPARCPFEQVVTTLQNFVRLFTRSHEENCKQLDLEKKKALKEAEDNSKQLDLEKKKTQKEAETEKIKKKSDSEKACKKELENDKSSKKDSANEKGKLNNPIKELDISLQSPAQTASAK

SEQ ID NO: 63221 - protein, 964 aa, Zea Mays
MRCSDVTELADVRKHFKSKYGKEFEAAALEVRPDSGVNRLIIEKLSAGAPDVQTKIKTLSSIAEEHNIKWEPKAFEEKLQQPTEGHLYGSATYSGGNTSTMGSSTSSISTPQPTYSGVSAAPVDSATIHVPANKTAYGSANSNTFSKESIHNSSSASVPPISQHGPSAYSSAQVPGSNNISHGNPGGPPYPQYSATVPDAVSRNEDSNQNRERKPLVTGANWNVEFKDATSAAQAAAESAEMASIAARAAAELASRGNYSGDKGTGAYDSAAYSSKNTVRKQRAEHVVKDESFHDQSSGVNDPSEMPSNSRNFFGGTETSHVDSENISTAPYQQFHAYNPDSHPYVYEMPTEPPRAHSPDPRFDDLYERESDIGRSEVDPFDFPRENFQDTASVGHNFKDVEIRTPSYDQESTDDYYGNFNSSHDTLAHGSSTTAWDKQNDKAQDNSSPVVFDQYDSDVEQENLLDTFSSKHTEQLPAPGDHMRFSTADWSEQHTSESPSKQRTSALFSRTETQLSDNLGTNKSDIPSPHSYHNMRPAFDSDGGSSDEEIATTTHAVPLRSHSGGSASSVLNKGGGPDASPIFDYSGAHAVRNLNRVQSRDSDLSEEETDLDKFKGSSFARANEQQLLPSAIRTSATSDDKEDDISLNFGKLTPGLRNKPRQPPPYTKVSRESILPKQSLPKVSAGTEESVDSEENTTFKQDRSSPQSSFSARTSSGKDYDSGLYERNRSVGTHWEAKSTIARNSSGLDDAEKLSDLPTNISLPTTKSSERWNSSKVPYHEKPGIGTRREVRSTLARNYFDSDDSEEELEQQQIPQSKQSGVLIQSRRTREVTSDTKRDGRFQTGAQYGDETESVTSKTQVHQGFNSSSTERSERRDPSVYPRVAVQRSSSKAEQIESPMERGKPQGAEMRSTLFRGNEEDTETSSGTPKESTPKTPPAHVHPKLPTDYDSFAAHFRSLRTNRP

SEQ ID NO: 63222 - protein, 451 aa, Zea Mays
MIWIIGEYAERIDNADELLESFLETFPEEPALVQLQLLTATVKLFLKKPTEGPQQMIQAVLNNATVETDNPDLRDRAYIYWRLLSTDPEAAKDVVLAEKPVISDDSNQLDSSLLDELLANISTLSSVYHKPPESFVSRVKAAPRADDDEFADTAETGYSESPSQGVDGASPSSSAGTSSNVPVKQPAAASPPGPVVMPDLLGDLMGMDNAIVPVDEPAAPSGPPLPVLLPSNTGQGLQISAQLTRRDGQIYYDISFENGTQGVLDGFMIQFNKNTFGLAAGEALQVTPLQPGQSTRTLLQMNTFQNISPGAPNSLLQVAVKNNQQPVWYFNDKIPLHVFFGEDGKMERASFLEAWKSLPDDNEFTKEFPGSVISSIDATVERLAASNVFFIAKRKNANMDVLYLSAKMPRGIPFLIEVTAAVGVPGVKCAVKTPNREMVPLFFEAMEALTK

SEQ ID NO: 63223 - protein, 94 aa, Zea Mays
MNNNQQPAADSNIKPAPAPYTSDELVKVTEEQIAASAAAAWNPQQPASSQQQVYTTPSEDAPTSGGSDGPAAPALAASDSDPKQVNLDKAETQR

SEQ ID NO: 63224 - protein, 617 aa, Zea Mays
MATLVRPPALHVRAVSGGGNKDRVAPQRPWWGGNKPISPRQSGGSGARGGAGGGGVALDQVLGVLRRDGEFVQAAVGAPLRDVFWLRFLEKKQRKQQQPRPKHKPFRQQQEEEEVVVVDESPPAFPPPSYPSGLSCVELMAADFQALKVYAGSARHSLARRFLGSNSKGKSEQQPKPKPQEQQKEQQHILQAPAFPPPSYPPGLSCMELMMADLEALKLYINYYSAILTTPLPQHYDPDLLAQYFASRPHILASRVIQILFTFLSAVVKMRISKRAQLTTDATYSSGNSGNGFDDTQYMVGQLLKETFLNLGPTFIKVGQSLSTRPDIIGSEICEALAELHERVPTFPREDAMKIIEGEFGCPVSHMFSYVSDEPVASASFGQVYQGRTVDGSLVAIKVQRPDLLPSVLRDIYILRLGLAFIRKIAKRRSNISLYGDELGRGFVGELDYNIEAANATKFMEVHSRYPFMLVPKVLKQLTRKRVLTMEWVAGENPKDLLSLSKGVSEKFTQASDNQKLEAKSRLLDLVNKGVEASLVQLLETGLLHADPHPGNLRYTPEGRVGFLDFGLLCMMERKHQRAMLASIVHIVNGDWASVVYDLTEMDVVPPKTNLRRVTMD

SEQ ID NO: 63225 - protein, 173 aa, Zea Mays
MEASSWDAVRKQARRLEAQLDDQMIAYRKLVSMKSDGSEDNIESDIERSLKQLQQVNSQMQTWVSSGGSEVLSHTLTRHMEILQDLTQEFYRLRSSLRAKQQHTSLLDLRDFDRAKFDVEEPSDSADQVLLREQAAIGRSTGQFQGEPSVELLLLSGILHVSLQNDECCQLYA

SEQ ID NO: 63226 - protein, 211 aa, Zea Mays
MEASSWDALRKQARRLEAQLDDQMIAYRKLVSMKSDGSENDIESDIERSLKQLQQVNSQMQTWVSSGGSEVLSHTLTRHMEILQDLTQEFYRLRSSLRVKQQHASLLDLRDFDRAKFDVEEPSDSADQALLREQAAIGRSTGQMDNVISQAQATLGSLMTQRSTFGGITTKISNINHVLASIRRKKSMDTIILSLVASVCAFLIFIYWLSK

SEQ ID NO: 63227 - protein, 494 aa, Zea Mays
MPDPTTKLPSPRPRRRRRLFSLCLGTALLALIVSALVHVVAQPPGPAPASARFSVIIDGGSTGTRAHVFAAGPDGRPDLARSTVMRVSPGLSSFAADPARAGESLKPLLDFARDKIGGAVREAEVRLMATAGLRLLEERAQEAILASCRDVLRASGFRFEDAWAKVIPGSDEGVYAWVAANYALGRLGGDPNKTVGIIELGGASAQLTFVSDEVLPPKLSYNYTFGETTYTLYTNSFLNFGQNAAQDSFHEMLRSRGSFKNGTLADPCAPRGYSRNEGASRSTLENQYVNNGTGNFTECISSSQLLLQKGKEKCQYQQCHLGSTFVPELRGYFLGTENLYFTSKFFGLKKSSSLSDFMFAGEQFCNQHLSSLRKRHPNRSDEDFSRYCFSMAYIVALLHDSLGVPLDDKRIEYSNQVGDIQVEWALGAFITLMQNTSLKPLHTTAESTHSNRPLFAVLGMFLLCGVLFVSRWRKPKTKIIYDLEKGRYIITRIS

SEQ ID NO: 63228 - protein, 223 aa, Zea Mays
MEAVVRKVQQRVRKAREEMDQWDDLNTRLLSQFSNAAAVISRLQALGEDKNYGPLRAVPNIRVDLIGNQMEVLELIFVKIRETLEKFNDVVKALNKALRDTKQMVRGGSALTAKQMQLQVGILPSIAECLDGFQTLCEMHHDEFTLKSSAISLLTWKTCSSDIAVLRQLLVDQPNIPKDEVQSIFDIIFADEICETESVWKLYVNPIVEALWTRQVFISVSNR

SEQ ID NO: 63229 - protein, 579 aa, Zea Mays
MAAEADDPSLAATLEKFRLYETRARFYVIGSSREKRWFRVLKIDRSEPSELNVSEDPVWYSLQEVKSLLQRIDEGNRSTGGLAFVTKAYGIAGCIKFLESYYLILVTKRRQIGCICGHAIYCIDESQMITIPHSSVQTDVATSKNELRYKKLLASVDLTKDFFYSYTYPIMQSLQQSVTSAGMKEMPYENLFVWNTFLTEPVRSRCHNTLWTVALVHGHFKQVKLSIFGREINVVLSSRRSRHFAGTRYLKRGVNDHGKVANDVETEQIVFEEEAGSWKGRMSAVVQMRGSIPLFWSQEASRLSPKPDIFVQRYDPTYEATKLHFDDLARRYGHPIIILNLIKTVEKRPREMMLRREYCRAVEYLNQNVPEEKKLRFIHWDFHKFAKSKSANVLGVLGKVAGEALDLTGFYYSGKPKVQKKRLIQLSRTSTARDGSLDIRASSGDLSRLRDGSLDIRASSGDLSRLSSNAEALSSTGFQDMRNQANKQEFLGDTPCYQTGVLRTNCIDCLDRTNVAQYAYGLAALGRQLHAMGLTDVLKIHPDSSIASALMEMYQSMGDALAHQYGGSAAHNTTSSTVQ

SEQ ID NO: 63230 - protein, 290 aa, Zea Mays
MESLGVLLLHPLDTYLEQELDRRCRLLRLWEVPHDRRGEFLRAHASSIRAVVIGGGSGFGGNPALIDDLPRLEIIACYAVGYDCVDLTRCRERGVRVTNTPDVLTDDVADLAVGLAIAALRRIPHADSYVRAGLWKANDGHYGLTTRWQKGRHHWAGQDRAFHCQASGRLRLPGLLLPENKAGCVPQLHLSPDGAPARSKQRCPRGGLLAERAEPRHREPRGDRGARPHGRARQRWARRARRRARARRGARRWPPRRRGAGRVPGRAGRAAGAHGARQRRPGTAHGQRDA

SEQ ID NO: 63231 - protein, 91 aa, Zea Mays
MLKGVTPELSCPIVLFTYYNPILKRGVGNFMSFIKQAGIHGLVVPDLPLEETALLRSEAIMHNIELVHTHSHLCMHHLHKVCCVLVLLSGC

SEQ ID NO: 63232 - protein, 206 aa, Zea Mays
MNGGSNDLFAIMFAFSDSSSQVVRVEPGEGAAGFLPAVEVLDDEPLLPGSKRSAANMLLLSGQSSDSYGSCDLGWDWDDDTMTSDYASVFAPAAPSNVVPAWYTQGGPASKRTRSSYGYGVAMLQQGDGAQAMPGGFDPETNYQYQLLPYVVESSPSDGASTHDMDCLQMMRAGDVPQDGASSGGGGGGGGDIWSLDELLMAAGAY

SEQ ID NO: 63233 - protein, 1125 aa, Zea Mays
MPDNTGLEIGLKGSKGAPMPGTEGRVAKDLKKAPASLEESNASRDEDPGGGPALTGKKRKDRRGSADDNRNVTRRVLRSDAMKLRAEAEAPCGAGVEVSKTDSLERKHCDTTVEAEACKSSVLMEVACNGGEANGLVNLDASDVSEESTRCSDNNMGMPGVPATDFSQDGGLAQGSIAESDDKTVKSDEVSAVTHSEQNDSQAGINSYNADEAQDNKVRHGPCQDEVIDSAITNGANTSTDLTKTSPTSGSESVKQDDSKQENNLVHTEGVILHSGDPKVENHSQIEDTCTETEISLTGNGRCAADNHTDRTGYTKQEERGSPVNETNDISAHDIVFTRRGRKSCEAKQGTCEEESRFEKRVTRSATVRQREVSGSLCKTTTNETALGSRGRKGDIIAHYTRKVSSAVSPKGHHAELGECNTSMENQTVKQKVVDRRDSGATKNDNDANDTKNKESEKTEINLKTQPPVGSVSIVNKTTVGAVSVVGQSISGSAITERNDTDHTDSDGVKYENMTLVQKLLLSVGAKIVASKKRVLEAGPDKTTGRSPIALPSMKKTRNTSSDPEIDQPDKSSGEKLIGNNCDLGNKRVLRERQHQNQTYLSSRSSNQSNQNAIKQTQDQSDDDDISSDTSYRRTRSGRRRGAARLAVPKQEDSSDSEEVVVVKKNRRKRKKSVHKHRAGSKLKHTSGSPPKTGRLGRPPLVKSECGCLPLQPGKGKMNVPEGTGALREEKQKISDQIKAMLLDAGWTIDLRPRNGRNYMDSVYIHPSGKGSYWSVTKAYYVFRADMESEQKESSKDHILSKKSVGSPGKRQVSSSSGCTLTDDILSKLKRVVVNKRTTKVEIQRLRQKKEKKNTTNSTRLHLGNERKKRGGCALLVRGSNKESGSTTDGFVPYEWKRTIFSWLIDLNVLSVNTKLNCLDESHSKVLLEGFVTRDGINCSCCSEVISVPEFVTHAGSEVNKPYRNILVDGLDIDLLHCLINAWNMQSDAERQDFFPVSIEGDDPNDDTCGICGDGGNLICCDGCPSTFHMSCLGLEALPTDYWCCSNCSCKFCHEHSSDDAEDTADVDSSLHTCSQCEEQCTDPCLYLLCSSFEFRNLLTLFIPFSLLSYYIILMFNHVFEYFIR

SEQ ID NO: 63234 - protein, 320 aa, Zea Mays
MSIEEADLLIRKRARQSDIAASYVKVVDEEGINSLHKGDDRPSLSPKAYINGYAASFRNGLGFNNGNGIYSGEQGFAIGGEERLSRSNADPFKNGLGFNNGNGIYSGEQGFAIGGEERLSRSNGYLSELVAAAYVCHGGVQRVHIIDGCVDGSLLLELFTRDGAGTMIARDVYEGTRMATAEDLPGIRKIIRPLEDSGVLVRRTDAQLLEALESFYVVERDGSIIACAALFPFPEEQSGEVAAIAVSEECRGRGQGDKLLDYVEKMALSLGLKKLFLLTTRTADWFVRRGFSECSIGSIPEQRRKRINLSRGSKYYIKQL

SEQ ID NO: 63235 - protein, 231 aa, Zea Mays
MSVLLLDSIVDKHAIDIENDYLKMVKDMITASSDPASTTSAKEKHFLYDIVANGRNGIDVDKFDYIGRDCRACGLGCNFQYWRLMEGMRVMGDEICYPAKDYLSIHKLFSTRADLHRTVYTHAKVKAVELMLVDALVEANDYLGISLHAHDPEDFWKLDDTIIKTIETAPNNELKKAKEIIQRIRRRELYKFCNQYSVPKDKLEHFKNITAQDIVCSQVCSFSPFYSVWPK

SEQ ID NO: 63236 - protein, 216 aa, Zea Mays
MSPARPPPPSARLRAFPRDGVLTSFYAGRFPSIPGCLNRRSCGRAGRVYCLFSGGDNRKKQDEARKALENALGKKAEFDKWGVEIERRQRGYPRDPAACGGGWSGGGSWFRRLTGGGFWDAAKQTVLTILGIIAAFFLIANFNILVASVINSLLLVLRQIRRILSFIAYCVFQGALVERSGPKSSTLGLSNVAGVPVKEKAGMSAKERVVGKWAMD

SEQ ID NO: 63237 - protein, 74 aa, Zea Mays
MAFAAVLRARLLPVPTPLSSSSPPPFFAPSASPRGRGDYSVTRPDRGQRPGGPRRSQIRARAAVRHVGGHHRAS

SEQ ID NO: 63238 - protein, 136 aa, Zea Mays
MAAGLSFPRAGAPFILLRTSCFSPWAALVPRRRLLSGPPTAGDPPPPALPPTSKLAAPPVVGTPEPPLPFRAVEAEILRDIDPVVLLIKDILHSDRYGDGECLCPRDENVVVEKLLSYHPRAQDKIGCGLDAIMAP

SEQ ID NO: 63239 - protein, 641 aa, Zea Mays
MSPALAAGVEPMAVDDSASKKAKRKQLKAAAAAAEAEAEAASVKKKEKKEKKRKVKEPSPPLPSAASSDEEEKSSTSSEETAPAAKKAKEKTKKNVDVSSSASDDDGEITASSDEDPADPNALTNFRISESLRQSLRSKGIKSLFPIQATTFDLVLDGSDLVGRARTGQGKTLAFVLPILESLVNGANKASRRTEHGRTPSVLVLLPTRELANQVHADFEFYGATFGLSACCVYGGSPYRPQEMALRRGVDIVVGTPGRVKDFIVKGTLNLKCLKFRVLDEADEMLNMGFVDDVELILGKVEDATKVQTLLFSATLPEWVNKLSMRFLKVDRKTVDLVGNEKLKASASVKHLALPCNKAARAQVIPDIIRCYSHGGRTIIFTETKDSASELSGLIHGSRALHGDVAQAQREVILAGFRSGKFQVLVATNVAARGLDINDVQLIIQCEPPRDVEAYIHRSGRTGRAGNTGVAVMLYEPRYKHSVSRLERESGVKFEHISAPQPTDVAQSAGSEAADAIASVSDSVIPIFRQQAEQLLSSSSLSAADLLAKALAKAVGYTDIKKRSLLSSLEDYSTLHLQTGRPMWSPGFAFTILKRFMPEDKLADVKGATLTADGTGVVFDVPAADVEDYIQGIMVLPLFVK

SEQ ID NO: 63240 - protein, 212 aa, Zea Mays
MGLLLRERIVFLGNEIEDFLADAVVSQLLLLDAIDPDSDIRLFVNSPGGSLSATMAIYDVMQLVRADVSTIGMGIAGSTASIILGGGTKGKRFAMPNTRIMIHQPVGGASGQALDVEVQAKEILTNKRNVIRIVSGFTGRTPEQVEKDIDRDRYMGPLEAVDYGLIDGVIDGDSIIPLEPVPERVKPKYNYEELYKDPQKFLTPDVPDDEIY

SEQ ID NO: 63241 - protein, 145 aa, Zea Mays
MEVSGITMAAVYLIDVLKSMRCGSDDQTVSIQVMHFKAVNCLFLFTNLVQLNSWFDPQFGGVNKEARTVNLAIQEALAGTEIQLLNLTYMSEFRADAHPAIWLGKKDAVAVYGQDCMHWCLPGVPDTWVDILAAQIMHHFKQEKG

SEQ ID NO: 63242 - protein, 166 aa, Zea Mays
MLLDYMNLSVKASWRNVAILDGITMGGGGGVSIPGTFRVATDRTVFATPEVHIGFHPDAAASFYLSHLTGHVGEYVALTGEKLNGTDMIALGLATHYFMSGHLDLIDERLAKLVTDDPSVIDSSLAQYGDMVYPDKKSIVHRLEVIDKCFSHDTVEEIVDALVSTD

SEQ ID NO: 63243 - protein, 398 aa, Zea Mays
MGSMEASTAPENGSSAAGGGAGGTACNGAGAASNGGGMERRLRSSAASASWAAHLPLEVGTRVMCRWRDQKLHPVKVIERRKGSACSSPADYEYYVHYTEFNRRLDEWVKLDQLDLDTVETVVDEKVEDKATSLKMTRHQKRKIDETHVEQGHEELDAASLREHEEFTKVKNIAKIELGRYEIDTWYFSPFPPEYNDCPKLFFCEFCLNFMKRKEQLQRHMKKCDLKHPPGDEIYRSGTLSMFEVDGKKNKVYGQNLCYLAKLFLDHKTLYYDVDLFLFYVLCECDDRGCHMVGYFSKEKHSEESYNLACILTLPPYQRKGYGKFLIAFSYELSKKEGKVGTPERPLSDLGLLSYRGYWTRVLLEILKKHKGNISIKVTPFHPDIPFSLYKFRKLIEL

SEQ ID NO: 63244 - protein, 53 aa, Zea Mays
MKLFCRQGDGLLDESQVEALRRKGMATPQRQHNDLAVGGANNATTTRSHERGL

SEQ ID NO: 63245 - protein, 153 aa, Zea Mays
MAWGPVPFRKPVTGSLPPSGRQRQRQRQRRDREGEAGKQATGANMQASWEARAGPICPCLELVVPPRPCCAGQRWPSASTVLYYCTPPTPWRPGTGSLSLPLRVMETEASSQQSPPRPAVDRRVPPRLLACLGQAPEFFVFWLFFGKKYTFEP

SEQ ID NO: 63246 - protein, 963 aa, Zea Mays
MQEELGQRMHVPHGINLCFSTSSELFQVESSIELGTAEVNPVPSEKLSANSQAVRDDAGAVEGIDMNGKPVQKPKRKKHRPKVIKEGQSAKLQKPKTPKPPKENGNQPTGKRKYVRKKGLSTPAKQIPSEGADTHTRAKPGIAQRCLDFDVEDQHGHLDLVSQTQETEIQTGPGDTQPSISGVERSNAQVSCHWGWGGTSSSIISADPIVDIQGLQADCIPKRVNFDLNNSMASQMPTNYSSRMDSSGQFFQFGLGEKVQTNQLLDYNCNLPARRVSHLSSSVDHMRHPLANFDQYISTSQVCTENSRRHYQMPSSSRISENRTAASQYTERVSMGGNFNPGACIGEGTVIKQMAQCYRLPESPLVPPKHNERDVMNGNLNEFSVYNDYLNFSSNSNYQTGAAFGFHDSPVYSDVLAMGKKREHNAISGHQISFDIDFVNSNSTRKFCIDDLLSTSSQTSYYPEACKRMRPENHSNQLNVTTGKLSSSSAFSGSLNTNNVSTINPGIGTLADIQRLMALEKSQASQQMIDFITSQNNMAGESTELAQQNNSDKGFVALHNKKFQSLTAQNIPLPDSTVNQSGESNILRNGIHQTQPWEITSRSHHSSDNFALPNKWSGYLTAGNTQLSSITVNPSTENYIQSNAIYQYQCLENVVAKVPVLSGTHNTSSQEGHNHSTAATNEHIRTTSEEVVRSFTQRASEPTTHGNYNLNSSRVTAEANSTEKPRKRGRPRKVVKPNGEPKERGTKGKQNVSHEKPTSQKGSHTDILKTNGISYASEPSTGITPRMAIVESKSSDQDKEIHGGVIPQATAISVDLLDGIIQKIKLLSISRPDNVVAEIPKDALVPYEGEFGALVAFEGKTKKNRSRAKVNIDPVTTMMWNLLMGPDMGDGAEGLDKDKEKWLDEERKVFRGRVDSFIARMHLVQGDRRFSRWKGSVVDSVVGVFLTQNVSDHLSRARCSLKR

SEQ ID NO: 63247 - protein, 315 aa, Zea Mays
MREEMDIDATGAGWLSWREAAVAVLAWLVLHVATRVADALWWRPRRLEAHFAEQGVRGPPYRFLLGSVKEMVGLMAEASAKPMSPPTSHNALPRVLAFYHYWRKIYGPSFLIWFGPTPRLTVAEPELVREIFLTRAEAFDRYEAHPVVRQLEGDGLVSLHGDKWALHRRVLTDAFYPDNLNRLVPHVGRSVAALAAKWNAMAAAAGNGEVEVDVAEWFQAVTEEAITRVTFGRSYDDGRVVFAMQGRLMAYASEAFRKVLAHQEELAVVEAGQGDTAEPDPAHRPAQRHGRGGGGGSGRPLRRLPRPSRCHDQCR

SEQ ID NO: 63248 - protein, 559 aa, Zea Mays
MKRLIKDRASDLKVLITSATLDGLKVSKFFSGCPVLNIPGTLFPVEKFYSTDRPTNYIESSLRTAIDIHAKEPPGDVLIFMTGKDDIDKMVSKLEERIRNLEEGSCIDALVLPLHGSLPPELQVRVFAPAPPNCRRFIVATNVAETSLTVDGVVFVIDCGYVKQRQYNPSSGMYSLDVVQISRVQADQRAGRAGRTRPGKCYRLYPISIYQNEFLEATVPEIQRSSLAGSVLYLKSLNLPDINILKFDFLDPPSRESLEDALRQLYLIDAIDENGQITDVGRVMAELPLEPSLSRTLIEANELGCLSQALTVASILSAEITLRSVSKDVVDGKRKRQELPDGSGWGDHIQLLQIFESWDQTGYDTKWCSHHDLQVRGMKLSKDVRNQLCQIIQKIAKGSTDVDARKSRKNDPDYRKLRRALCVGYGNQLAERMLHHNGYHTVGYRTQLVQVHPSSVLEGDEYGKFPMYVIYHELISTTRPYMRNVCAVEQAWVQPILKKLDKLDINRLSGGSSAPGDSELLGDNKQVNSSKNDVGVKQSEVDSKIQAARERYLARKGKK

SEQ ID NO: 63249 - protein, 117 aa, Zea Mays
MAGDGNGRAELPRIAVIGAGIFARTQYIPRLREIAHLVVLKSIWSRTQESAKAAAELARDFAPDIECKWGDAGLEEIMGDSSIMGVAIVLAGQVQVELSLKMLKAGKHVIQEKPASG

SEQ ID NO: 63250 - protein, 63 aa, Zea Mays
MLPGTAARDEAADEATSPPSNTLVRVCHQHALSINNAQMVVELLAVADQNALCMFHVLLLDVW

SEQ ID NO: 63251 - protein, 183 aa, Zea Mays
MSAPPHVSYTALPPPPPAPTATSFSQLPPLPDVVGGCRVKAGAKPPGPGANPPDPFAALIVPTLVRVARTSFPPLEIRCLIHFSSMRFLKPPSNQVHAKVREDNRFYPYFKNCLGSIYGTHVPISMSPNQAAPFRNRKGTLSQNVMFVCDFDLRVTYLSAGWEGSATDSMVLRSAMTNSIGKF

SEQ ID NO: 63252 - protein, 202 aa, Zea Mays
MFLRIFGSRRPPTMPNSQTRRGGHRTWGTRHGQKTSAGAVSSSRDRVTTTNSRALQGGGERRRIKDQTVELAHAGRNMSDDDCVRSAELGRVGFDGKHEHVEARRTRSERAAMTTSRRGRVCAEIQNHARSDGDPVATGAGTELGKVAAGRAPEELATDPSRGRTSNRESSSGQHPWRAPATREPSVMRRAAGWNRDGRCHG

SEQ ID NO: 63253 - protein, 342 aa, Zea Mays
MASNADQHAAVVSAAPSDSPVGAKKAGAAAAVWKLPAAAAVPVAEVVENPIMDAHSWPALPGLSSPPPPPPPHAGPTAKASPKAASPAPTGAATSPVSLGNPGAPDASHGNDARVRNPVARRALVMPAADGLEKSAPAPEPSPVYVPNARSNGADPHQNGRPGSHHHGRGGGYGGGNRRGNGGGGGRRGSEHHGGFDGQRRGGGRRDGHGPVHQLRGHQPTYIKAPVVAGAPPPPPPFVSPATPQTPPYGPPMGFHDMSAHVYYFPAPTSEGIQGLPFVPLPASPQAVLIDPSRKNLLEQIEYYFSDDNLCKDLYLRQHMDGQGWVPLSLIAGFRQVSLQAS

SEQ ID NO: 63254 - protein, 55 aa, Zea Mays
MPRDDVETRLEQMKEDAAKKLERLEEEKESVLAQMAELKKILYGKFKDAINLEED

SEQ ID NO: 63255 - protein, 494 aa, Zea Mays
MSPSSTASYGRTDSEHGSNRSVQLKSVPASRSRFSNDPKDILCQGDTGGQVEASGQCTVSPQGPILVDKQMDPFSSQWKEKDYSGGNQIIRKECDINTKSDYEANARGESLGRKCIQKSKEGRKGGFEDEFSNGRTHGQKGRHGNTDSPEDGIVGNKYKHKADDVVISSLEDKDMSIKYEHNGSFRFEELSKRDEKCNKKDDNNILELESIARGCEQDRIKDDCGKLLHSDSRNGNTVAKNYSSVNEHTNSSSLVSSVAEVDDIQSSVGKNGDSSFFTGFLKKGLKDLSLFNQSVDSAKVYINGHPISERALRKSEKKVGPVGPGSYWYDYRAGFWGVFGQECRGIIPPFIKEFNYPMPKNCAGGSTGVFVNGRELHQKDFDLLVGRGLPRIPGKSYSVEISGSVIDDTTGTKLRGLGKLAPTIEKMKRGFGMHVPEETKFVDLLGLVTAVERLSRLEARQRCSLRTLREEMERCHNSYAFASSYLELNVVFPW

SEQ ID NO: 63256 - protein, 318 aa, Zea Mays
MLMLLFWYIPSAMIFFCLFCRSDSLPLEEIKDVYLLDFVGPPGFVEDIAPKVERITILDHHKTAFESLCVNATLGQNVTKVIDMQRSGATIAFDFFRNKLLTEVSTSRGNESGKDVAKVKYVPDNKAETVHKLFKFIEDGDLWRWKIPNSKAFSSGLKDLDIEFNVNANNKLFDQLLELDPEHVISHGQATLLEKQRLIDDCLEKSYEISLGCGQFGSCLAVDADAISNLRSELGNQLASKSRDFNLRGIGAVVYKVPELNNDQILKVSLRSLEQEDTTCISQEYGGGGHRNASSFILSVTEFDRWKVGSSRPKVLKT

SEQ ID NO: 63257 - protein, 314 aa, Zea Mays
MPVLIGLLYLNTRRTLLEKYNLLAVGSSHGALIDPKDQFMYRTGDGKYNDPDNAEAGSQYTFFGRNMKPVDQEYELMSPDPFVVATKLLARREYKDTGKQFNILAAAWIQFMVHDWMDHMEDTKQIEITAPNEVANKCPLKSFKFYATKELPTNSDGTIKTGYYNVRTAWWDGSAIYGNNDKKAEKLRTYVDGKLVIGDDGLLLHEENGVALLGDVRNSWVGVSILQALFVKEHNAVCDAIKEEHPNLSDEELYRYARLVTSAVIAKVHTIDWTVELLKTKTMRAGMRANWRTGIRWACGIEEADQPWRTLFFD

SEQ ID NO: 63258 - protein, 668 aa, Zea Mays
MSLDNISGEVCNKILRKCGGVPLSIITIASLLVGKQREDWSKVYDYIGFGHEDNEVIGNMRKILAFSYYNLPPYLKTCLLHLSIFPEDHKIEKNSLIWRWIAEGFVIGREELGLFEVGESYFNELINRSMIRWIELSSRSKIRDGCGIHDMVLDLIRTLSGEVNLVTVSDVEQQCTTSSSYSPVRSISARRLAFHKKRSIEHNPGTEIGQVRSFNAFNCSGSRMPRLLSFRVLRVLALENCNFSAGNCCLGNIGKLHQLRYLGLVETSIRDDLLPGETGRLKFLQTLDVRRSGIKILPASVGELRKLMCLRATEGTRMMAEIGKLASLEELEVHSVDKSPNFATGLGQLTKVRVLEIHFDEMDESTEKALMESLRNLRKIQSLQIWSKKERTIDLGGLLEDWTPTPSNLRQLMLRGIHLPRRPSWIDPSCVPLLSYLSLTVQAVQVQDLEILGRLPLLSYLYIWSEGINCLSYTATSRDEFQNLRYLDTNLEIMCGQQGALPMVEKLTCRASMGKYVAFARSSMPFDDGSVVNPAAVAEAELPVILPLDIGWPVNMPCLRGITYLLDYQDCSAKEWAHVETLLMHVRKIHPNCPPFRIKKNCRDKEITMIDAIIYLEDVKDVFKDNPSKYSEFLDLLQDYRRDSRDDGDGSDHVTRTNGEEEDDTHEA

SEQ ID NO: 63259 - protein, 438 aa, Zea Mays
METKFSELLDSAERTIGLHFSYDINLTLSAQRLHDLGDEYRALPLWRQAEPRFLWNGYLLEPLIENKLNQYLLPVIQGSFQNIQAEVGSEMVNVTLIARRCTRRIGTRMWRRGADAEGYAANFVESEQIMQSKGFTASYVQVRGSMPFLWEQIVDLTYKPSFDIVRQEEAPRVLERHFHDLQKKYGAVLAVDLVNTGGGEGRLRERYAKSIEPILSEDLRYVHFDFHRICGHIHFERLSQLYDQIKDYLQKHKYFLINDKGEKIEEQTGTTRTNCIDCLDRTNVTQSMIGRKILESQLQRIGVLGAGDTISKHPTFDTNYKILWANHGDAISIQYSGTPALKGDFVRYGKRTTQGILNDLRNALGRYYLNNFVDGTKQDAMDLLQGHYMTSVSRDMAVPSKAGLLQSYASFRLAFALVMGALMFMLMSLRQGKNSEYF

SEQ ID NO: 63260 - protein, 409 aa, Zea Mays
MHRSFLIVTNSQFRHGCTVPAISWKLFKSFACSSLLLVSLILFGWRHLLKHSHFLQFSRHETGVTHVLVTGGAGYIGSHATLRLLSDKYRVTIVDNLSRGNIGAVRVLQRLFPEPGRLQFIYADLGDAKAVNKIFSENAFDAVMHFAAVAYVGESTMEPLRYYHNITSNTLTVLEAMAAHNVNTLIYSSTCATYGEPDTMPIVETTPQNPINPYGKAKKMAEDIILDFTKSKKQSNMAVMILRYFNVIGSDPEGRLGEAPRPELREHGRISGACFDAALGIIPGLKVRGTDYSTADGTCVRDYIDVTDLVDAHVKALGKAQPGKVGIYNVGTGQGRSVTEFVEACKKATGASIKVEYLARRPGDYAEVYSDPSKIHMELNWTAQYTDLGQSLAQAWKWQKAHPNGYGPA

SEQ ID NO: 63261 - protein, 159 aa, Zea Mays
MEDEVQRAAVSSWNELDYEAEARLVAEARASWDRKARGEEEDEEEHDPEMTLDYYAYQAKKFRNTWNILYFGHFGRFEDTTRIPPMRFTEKPPDSPAYPRTTLQVFSIKVAGIEGGLQWPLHVFGKVALRDAVDHNRNMVFDRTRDNCQILTKEPLLRR

SEQ ID NO: 63262 - protein, 371 aa, Zea Mays
MTNRKDLLDEALLRPGRLEVHIEINLPDENGRLQILQIHTNKMKENSFLSPDINLQELAARTKNYSGAELEGVVKSAVSFALNRQITMDDLTKPLDEESIKVTMDDFVNALHEITPAFGASTDDLERCRLRGIVDCGKAHKHIYQRAMLLVEQVKVSKGSPLVTCLLEGPAGSGKTAMAASVGIDSDFAYVKIISAETMIGFSESSKCAQICKVFEDAYKSQFSMIILDDIERLLEYVAIGPRFSNLISQTLLVLLKRVPPKGKNLLVVGTTSEVGFLESVGMCDVFSVTYHVPKLKKEDAKKVLHHLDVFDDGDLDAAAEALDDMPIKKLYTLVEMAAQGPTGGSAEAIYAGEKIDINHFFSILSDIIRY

SEQ ID NO: 63263 - protein, 1082 aa, Zea Mays
MVTCDVWSWNFEEIVVGGRNKYLINGHLAQPSRVQTLFHSVQLNVNNPHFLIMQGRITKVLNMKPPEILSMLEEAAGTRMYEMKKESALKTLEKKQNKVDEINKLLDVEILPALEKLRKERCQYMKWANGNAELDRLKRFCIAYDFVQAERVRDGALNDVKQIKTKIVELDETTENIKAAIQEMDNNISTLAAEKEAKVGGEMKVLSDKVDKLSHVLIKETSVMNNQEETLKSEEKGAEKILTNIEDIKRSILERDAAVKNVENEASDMKRRAEDLTKELDEKEKEYQGVLAGKSSANEKKCLEDQLRDAKAAVGDAESGLKQLATKIKHSEKELKEKKTLLVSKRDEAIAAENELKTRTKDLEGIKASMGSINYDEGQMEALQKDRSAELEIIQKLKDRVRNLSGELANVHFSYRDPERNFDRSKVKGVVARLIRIKDSSTATALEVAAGGRLFNVVVDTEETGKQLLKNGDLRSRVTIIPLNKIQTYMIPDRVQQTARRLVGPDNVTLALELVGYGEEVKNAVAFVFGSTFVCRNMDAAKEVAFNRQISSTSVTLEGDTYQPSGLLTGGSKGGRGNLLRKLDELAKAEADLSDHEKKLFVIEQQIGALLPLQKRHTELKSQFELKSYDLSLFQNRVEQNEHHKLGELVKKIEQELQESKQELTEKQVQHEKCVSTVSELEKTIKTYGTEREGKLKALEKRIKSIKSEMQSMSKQLKAYESDRERLIMEKDAVVGELATLEEQLTTSKAQITSLSETLEKQKDKVTSIKQDYDQAESELNVGRSKLKECDSQINRMAKEQQKLQQKLSDSNVERKKMENEVKRMEIEQKDCSSIVDKLVEKYNWIATEKQLFGKSGTDYDFESCEPHKAREELENLQAQQSSLEKRVNKKVMAMFEKAEDEYNDLMSKKNIIENDKAKIKKVIEELDEKKKETLKVTWLKVNKDFGSIFSTLLPGTMAKLDPPEGGTFLDGLEVRVAFGTVWKQSLSELSGGQRSLLALSLILALLLFKPAPLYILDEVDAALDLSHTQNIGRMIKAHFPHSQFIVVSLKEGMFNNANVIFRTKFVDGVSTVTRTVPSKQR

SEQ ID NO: 63264 - protein, 813 aa, Zea Mays
MAEPEPLPQVSSEPTTPPQEGSGRTKTKNKKNRSKKQPKRAGADTDGLSSGASTMVEDPFFVLAGGKEGGFLDLEEIDEADFGIFGGVLDDVGQSVEEAGKDHGKKKKKTKKRKRGGDGEGFSGDAALVVENDQVDVEKVEKKVEDGEKGDKKGKRKMNMKKRKVKDNEMNRESDEDVASDKAEDMQDDTENMEQNEDDELILGEDDVSAWRELRLHPLLLKAMRRLGFKEPTPIQKSCFPAAAHRGKDVIGAAETGSGKTLAFGLPVLQRLLEEREKATRLQQEDEKMEERSCGSPLRALILTPTRELAKQVCDHLKDVAKFLGIHVVPIVGGLSMEKQERLLKKKPEIVVGTPGRLWEHMSMNNQHLVELHSLSFFILDEADRMIERGHFRELQSIIEMLPLTNGSDEQAARTMPNCETVPILQIKKRQTFVFSATLALSSNFRKKLKRGLSTSKASTPDDVSSIEALSKQAGMKSNAEIVDLTKASILPEKLEESFIECSEEDKDAYLYYILSVHGQGRTIIFCTSIAALRHISSILRILGINVLTNHAQMQQRARMKAVDRFRESENSILVATDGFARGMDFDDVRTVIHYQLPHSTDVYIHRSGRTARKSLAGCSIALISPTDKSRLSLARQIDKIARKTSQENANKSWLQRNAESMGLILDTSDSEEDHVQGHKKRKATSAHLQKLQQELSDLLQCPLQPKTFSRRYLAGAGVSPLLQKQLEELAKRNASNNSSKSKNKGSGFVVIGQDRVEPLQALQNSGQEVCVNIDKEREKRRVAENWRRKKHEEKKRTQEQKRKDKRKAKEMA

SEQ ID NO: 63265 - protein, 115 aa, Zea Mays
MERTKKPCLGVVALLLFLLLASAAHGAQPADAKDIAGDGDGERATVRTGHGHGYSSSHSGGHPSGGTPEQGGAGVVDPRNLNARSHHRRGAATRANVYSSWLVCTLVAGGVMLLL

SEQ ID NO: 63266 - protein, 106 aa, Zea Mays
MLCCSSLPINRRPWPHPLSLPPQCRRPSPASPSSAPGTAMTKQQLGLRACANGEKGCVGEEDGKSMVVPPSACRGALATCAHGLAGGRCPLLPSVLCCRRRNVRAF

SEQ ID NO: 63267 - protein, 78 aa, Zea Mays
MIGATSFFPYPQIFHLAVVPFALGAESMGRCCRPAGQYTATLRGHGRGRLMVVGGVDQVLVVGSKMEHGDEPYLARKV

SEQ ID NO: 63268 - protein, 874 aa, Zea Mays
MTRRVRRRTCREREGRVVRGAWCVVSARPEGEDDAAAVEVDWRALPDDTVLQLFARLNYRDRASMASACRAWRALGSSSCLWSTLDLRAHRYDREVASSLASRCGSLRRLRLRGHEAAEAVPALCAHGLREVVADGCRGLTDATLAVLAARHEDLQSLQIGPDPLERISSDALRHVALCCSQLRRLRLSGLREADADAVGALARCCPLLEDVAFLDCGTVDETALAGIHSLRFLSVAGCRNLKWATASTSWTQLSSLIALDVSRTDVSPSAVSRLISHAKTLKLICTLNCISVEEEQLHNPAVFSNSKGKVVLTINSDIFRSFETMFPIVDAKEHGVFHQCNWSHKDKIAGDITTWLEWILSQSLLRIAESNPQGMDGFWLQKGTTLLLRLLKSLQEDVQERAATALATFVVMDDETANVDPARSEAVMQNGGIRMLLDLARCSRESAQSEAAKAIANLSVNTKVAKAVADEGGITILTDLAKSMNRLVAEEAAGGLWNLSVGEDHKASIAVSGGIKALVDLIFRWPAGTDGVLERAAGALANLAADDKCSLEVAKAGGVHALVTLARSCKLDGALEQAARGLANLAAHGDNNDNNAAVGQEAGALEALVQLTGSQNEGVRQEAAGALWNLSFDDRNREAIAAVGGVEALVALVQQCLNASEGLQERAAGALWGLSVSEANSIAIGQGGGVAPLLTLARSEVEDVHETAAGALWNLAFYSGNALRIVEEGGVPVLVKICSSSGSKMARFMSALALAYMFDGRMDEVALVGASSASSSKSVNIEGARRIAFKHIETFVLTFSDPQMFSTAAASSAPAALSHVAEAVFIQEAGHLRCSRSEIGRFVVMLRNPSPILRACAAFALLQAMGLTRRKSL

SEQ ID NO: 63269 - protein, 195 aa, Zea Mays
MDTQQSVVAAAIQSRGMVAAAANHPVSVVAAGDVGSSPRATCGGFVALDVGALSSLAGDAGPPGTPTAPPRTPKVMRSLSRKGDRKPADPDANANANGTAGGGGSERPAACSVHVAAGELGDAPRQRAAGRPHAAGRHARKQVPAVRQAAAPWLDPRRVVLLFPTLSSVGTLILLYFTLSMSRADTSSGGASDAR

SEQ ID NO: 63270 - protein, 588 aa, Zea Mays
MASAAFKSTTRRALHATTTSRSDPPPCPRRTRSRSVSAAPRAAHEDYANTRTNPLFDSAASPSASPSPPPGAAAATGATSGRGDAAGRERGREPRLKSGGRGGGGGRARSASVAPPQRRHTASVADSAADVGGRKASRARSVADVARTYRGSETDAEARGVARKLQSWRSQHSVPEGKRKGTDASCSSQGSTTGAGCRQMDETTQSESSTVVSSPGHLEHQDHSTVPVDPVLEIPPEFDPDSAEFISDISDYVTEYGKKNVVEISLESRNSAAKQHWEQMEISLEFDTDASELVSDTWHHGANQQRGELEASLEFDPDTSELAPDITEYTLKLKQSHERARKLRADLAVEEQREQELSRMLKGIVTDPNFTETHKKRPRRKSSIERLKVSRRLAEEAMNYFEECVSISTMDSTDFSSPEDPQPNSVVNVPPKSNSRFFHKGRSIFQEPHTLADQHGYHVESDKQTQCSISATGSDVSDSVIFSHTNGAGLKIRSVSSDDPDGFDTPRSRSSCFSFTHEPVKKLENCDVRQYLGNFGRGNNTELKETRSSYFADDYASQKVDPDLLKDMVTFQNRIEYGGLVICNIRTF

SEQ ID NO: 63271 - protein, 255 aa, Zea Mays
MDLDRKIRRGRERLAHDSAVPMPIPGKLAELLSVRKEQVKKLLEQIEELGEAGKVDEAEALMRRVDILNAEKTALANEADNKVAMLEKKMELCETCGSFLVADDALERTQSHVTGKQHIGYGMVRDFLAEYKAAKEKTKEEERLAREQKAEEHRKQRGKEYDSGGRDRDTRRERSGERDFDRDRQYERSRGRDRVYDYRDRGSEHRSNRYRNGRDSERGGHRYRSGGMTNDRGRMRSRSRSPTRHGYGRSRSPDH

SEQ ID NO: 63272 - protein, 281 aa, Zea Mays
MTEWFYVKNDLKSREDIKRIIMRPIWQRFGLRRPKVEMNEAAEKCQRAFGVVCFFIGTRDLVQEHIAFRVWPLVEKWEMPKETIKETDEGGLVRLKYTFKYGDKFVEPDDDWLKIIEAISDELLGVYSKAEDTALSAAFGGRKRKRLNRVFDAIGFVYPDYRYPARGEKRKNTSSAKETAPAAPSEPTPKRRVKVLTHRPRYIEPATVPAFVGGTPSATEAKEIAPLPNIEVLTEVPVTEKIEETRAEEVKTSEVLSPSAKTEATKSHKGPAVTPKRKKDG

SEQ ID NO: 63273 - protein, 408 aa, Zea Mays
MRHLEEDDEIDDELDQIMALMMGQYKKRKNGQRKKRRGSVFGHKVHDRSRQEHDRKLFQDYFAENPTYPEKFFRRRFRMSSSLFKRIAKAVEKHDEYFVQDRNAAGVLGFSCLQKVTAAFRQLAYGVPADYVDEYLRIGESTAIESLRKFVKAVCEVFGPQYLRAPNEDDTARLLSIAEQRGFPGMLGSIDCMHWKWKNCPTAYQGTYCGHVKEPTIILEAVASHDLWIWHAFFGLPGSLNDINVLHRSHLFDRLVEGKAPAVNYTINGHKYDMGYYLADGIYPNWSAFVKSIKAPANEKDQNFTAAQESLRKDVERAFGVLQARFAIVRGPARFWDVATLRNIMKACIIMHNMIIEDERDAGRLEPPYEKSDAETNGWVSHVGTSNLSAFIDKHKDIAHSFFLWLHA

SEQ ID NO: 63274 - protein, 1642 aa, Zea Mays
MAMGATVRAAAADAMVTFLWVLCASALDVSIAAVTSYQGLQEGTGHYALLVTTSLLSVLLFTFDLLYGVLGGASFNFTDFATSYSAGLDSPSLFSVALHFLARTVVVVKRTTLRVARKDAYMAELDLFAKGLHERLVPFLGHCLDKEEEKVHVYRFVQNGDLSSALHKKSREEDEGLQSLDWIKRLKIATGVAEALCYLHHECSPPMVHRDVQASSILLDDKFDVRLGSLSELPAIESVLNAMKSNTNQRVSPIFALVLCPTRELAIQLTAEANVLLKYHEGIGVQSLIGGTRFKLDQRRLESDPCQPDHLLDETNRAGSKIRVERAERSSYTFQSQLDGGAQFCVSQEASRLTSLFLVFMPTAQDNTTTPMELEDFIRLDSIWMRWTLLAEDRTPKPGSQPRKPGDRRRQVENTLGGRSQAASESRGGVAVLAHGGGHSRRRSGMATPTPMPGSEGTLVAVMPRSPSPTPAEAGTSATETPVLIFLYFHKAIRAELEALHGAAVLLATERTGDVAALAERCRFFFSIYKHHCDAEDAVIFPALDIRVKNVAGTYSLEHKGESDLFSQLFDLLELDIQNDDALRRELASCTGAIQTCLSQHMSKEEEQVFPLLTKKFSCEEQADLVWQFLCNIPVNMVAEFLPWLSTSVTSDEHQDIRDCLCKVVPDEKLLQQVVFTWMEGKAAREVAESFATGNLVRNHSAEDVSDHGEIYVCSQQESKLGSKNCAESNGSQADRHPIDDILYWHNAIRMELHDIKKETRRVQQSGNFSDISAFNERLQFIADVCIYHSIAEDQVVFPAVDSELSFVQEHAEEEHRFNNFRCLIQQFQIAGAKSTALDFYSKLCSHADKILETIEKHFSNEETKVLPQARMFFSPEKQRELSYKSLCVMPLKLLERVLPWLVSKLSDEQATSFLQNIRLAASPSETALVTLISGWACKGRDKSKSGEYLCLTSGTARCLSDDVDDQGKCRSFCPCASHNSSDLSLQLQTENGSRPGKRGKDAVSFPGTNGSYCSQTADIDASPCSKKPCCIPGLRVKSSNLGIGSLASVKSFRSLPYNSTAPSIYSSLFSWETDASLSCSDGISRPIDTIFKFHKAIRKDLEYLDVESGRLIDGDESCLRQFIGRFRLLWGLYRAHSNAEDEIVFPALESRETLHNVSHSYTLDHKQEEQLFEDISDVLFQLSQLHDSQGHAQTKVNEVKQSCFHSSNDVDFTRKYNELATKLQAMCKSIRVALTNHVHREELELWPLFDKHFSVEEQDKLVGRIIGSTGAEVLQSMVPWVTSALTQEEQNKMLDTWKQATKNTMFGEWLNEWWKGAGTSDSSAEAPSAPEDSHLQDKLEQNDQMFKPGWKDIFRMNQSELEAEVRKVSRDPTLDPRRKAYLIQNLMTSRWIAAQQKLPEPNSEECSDDASIPGCAPSYRDQEKEIYGCEHYKRNCKLVAACCNKLFTCRFCHDKVSDHTMERKATQEMMCMVCLKIQPVGPFCQTPSCNRLSMAKYYCNICKFFDDERHTLVATTLVLSAANLWEIWRCILACLMPCWLLKSFRRNTVIGVRIYCAMTVRGKADVDFTGYTTNAAPVGRTIPELSRLTLQIAPHQISWREHLCLFVAFFFLLCKYLLAGRKKEMSCRIVNIISFVAISVL

SEQ ID NO: 63275 - protein, 484 aa, Zea Mays
MAGGGGGSLSSPSASFLSSPTPTPPPRLLRRCSTKSASRDSPILRPKKPPPLFCAAAATPTPAPAAASKSAGSWRDLCSLNAWVVRDYRRLVDSVGALEPALRRLSEEQLKAKTAEFRSRLTRGETLADVQADAFAVVREAARRTLGMRHFDVQIIGGAVLHDGCIAEMKTGEGKTLVSTLAAYLNALTGKGVHVVTVNDYLAQRDAEWMGRVHRFLGLTVGLIQAGMKSDERRASYRCDITYTNNSELGFDYLRDNLSRNKEQLVMRWPRPFHFAIVDEVDSVLIDEGRNPLLISGEDNRDAVRYPIAAKVAELLMEGVHYTVELKGNNIDLTEDGVAHAEIILGTDDLWDENDPWARFVMNALKAKVFYRRDVQYIVRDGKAIIINELTGRVEPKRRWSDGIHQAVEAKEGLKIQADSVIVAQITYQSLFKLYPKLSGMTGTAKTEEKEFSKMFKMPVIEVPTNLPNIRVDLPIQAFACREF

SEQ ID NO: 63276 - protein, 435 aa, Zea Mays
MASALLAGQGGARHHGWGETRAPLAPIPPNPNPSQPHPRADGSKSKPRAAASSPAAGYVTFRPASLGPREARALRDRLAGELTQVRALLSRIDTWQQQGPPPAGLRGEVRKRCGQILTRLRKDKRSVWFNAPVEVERLGLHDYHAVIKRPMDLGTVKEGLAAGRYASHDDFAADVRLTFTNALRYNPVGHEVHTFAGALLAYFERMYKEALACFEEDCKRPEPPRPVPPELTPPPAAEPVEAKVKPRAGNVRMRKPKAREPNKREMSLEEKNMLRVGLESLPEEKMHNVLQIVRKRNNNPEMLGDEIELDIDEMDVETQWELDRFVANFNKALKKSQRAVVMNGGAADVTSAAVAENDTAPVSNVLTLVDNDDVEREKPVRSATMAEQVDEYVDIGDEMPTATYQSMEIEKDAEGSESRSSGDSASGAGNAHSLA

SEQ ID NO: 63277 - protein, 246 aa, Zea Mays
MTLCDIAELNHSLLMGSLSAPPVLSPLVSGLIFSSDRVLKSRGLTTSSVMKSCRLSELSNAEVSSLKARPRIDSSSMSIFGTVNPIVEGVCVRGDAADKQYQVKNCRWRPTFALETDGPSNTDGQDFDEDSGFLGRTRLGRLIQAAARELLDKLNSARTNSPTKIFLVLLGFYTANALATILGQTGDWDVLVAGVVVAAIEGIGMLMYRKPIARPPGRFQSLISMVNYWKAGVCLGLFVDAFKLGS

SEQ ID NO: 63278 - protein, 125 aa, Zea Mays
MDDYAREMMELKTLVTRTLEKKGVLAKIRAELRASVFEAIEEEDRVMENDDGGNPALLGSCNDRAKQLHASPSECNLPKDFWKNELKDFSNKSGAEGSRSAESGPLLLDVLEGYLKYEVYLLRDH

SEQ ID NO: 63279 - protein, 770 aa, Zea Mays
MPGEAAEGVLSSADRQPEAGCHEQAVDGGERPAAEAGVPSRLRQRPSVATTDTSCESVVTSGQHKQQQNPAVLHPPQRDANNPAGLLAIAEETLAEFMSKATGTAVNWVQMVGMKPGPDSVGIIAVSHNCSGVAARACGLVSLEPTKVAEILKDRASWYRDCRRVDILHVIPTGNGGTIELIYMQTYALTTLAEPRDFWTLRYTSGLDDGSLVICERSLTHSTGGPSGPKTPDFIRAEVLPSGYLIRPCDGGGSMIYIVDHVDLNACSVPEVLRPLYESPKILAQKMTAAALRHIRQIAHESSGETPYGAGRQPAVLRTFSQRLSRGFNDAVSGFPDDGWSSLLSSDGAEDISITINSSPNKLIGSDVSPSPFFSAMGGGIMCAKASMLLQNVPPALLVRFLREHRSEWADPGVDAYSAASLRANPYNVPGLRAGGFMGNQVILPLARTVEHEECLEVIRLQGHGFSHDEVLMSPDMFLLQLCSGIDEDAPGACAQLVFAPIDESFADDAPLLPSGFRVIPLDAKTDVPSATRTLDLASALEVGSGGGLCALSDSGSGTRSTRSVLTIAFQFSFENHLRESVAAMARQYVRAVMAIVQRVAMAISPSRLGPHVELKHPPGSPEALALASWIGRSYRAHTGTEIRWSDTEDAAGSPLTLFWKHSDAIICCSLKPAFTLKFANSAGFDILETTVANVQDLQLEAVLDDGGQKALVAQLPKIMLQGLAYLPGGVCRSSMGRQASYEQAVAWKVVGDDGAPQCLALMFVNWTFI

SEQ ID NO: 63280 - protein, 171 aa, Zea Mays
MDVKCRRLEGKVAIVTASTMGIGLAIAERLGLEGAAVVISSRKQKNVNEAVEGLRAKGITAVGAVCHVSDAQQRKSLIETAVKSFGHIDILVSNAAANPSVDSILEMKESVLDKLWDINVKASILLIQDAAPHLRKGSSVIIISSIAGYNPEQGLTMYGVTKTALFGLTKG

SEQ ID NO: 63281 - protein, 1737 aa, Zea Mays
MEGEGHHGVVLACSICGFLFAVLSPFSFWVLWAVNWRPWRLYSWIYARKWPTYVQGPQLSTLCSLLTLCAWLVVISPIAVLLVWGSVLIALMERNIIGLAVIMAGVALLLSFYSIMLWWRTQWQSSQAVAYLLLLAVCLLCAYDFCAIYVTAGASASELNSPSGFFFGVSVISLAINMLFICKILFNVSGFDVDEYVRRSYKFAYSDCVEVAPVSCSPEPPDPSELYMTKSSRVKHLGLLYISSLLVLVGYSILYGLTSKEARWLGALTSVAVVILDWNLGLCSFRFELLKSRMIVLFVAGTSRAFLVSFGVHYWYLGHCISYAFVASVLLSAAVSSWLSISNPSVARIDALRSTVIKLREGFRRKGQNSSSNSSEGCGSSVKRSSGSVEAGQNGNAMDSMYRSNSQSDGVNWSSIPFDRSNSCQEGRSSDKNIDSARASLAHRSNSCLSAVQDSETAVVSVDRHGDPITSLVCSSSGLESHGCEPSGSATTSGNQQLLDLNLAAIFQDRLNDPRISSMLKKNGGLGDVELANLLQDKGLDPNFSYMLKDKVMDPRILALLQRSSLDADREHQDDVDVTATDSDRLDTTIANQISLSEELRRSGLEKWLNISRLIFHHLAGSPIRAFIVFTVMFIIETATVAIYRPETIKVINATHEQFEFGFSILLLSPVVCSIMAFIWSLRAEEMLMTSKPQKYGFIAWLLSTCVGLFLSFLSKSSVILGLSLTVPLMVACLSFAVPIWIRNGYSFWIPGREFANRENVSQAPGEKERALFVITIAVFTASIIGLGAIVSAKPLDALGYKGWDADKNSSYSPYATSMYLGWALSSTIAVITTGLIPIVAWFATYRFSPSSAICVGLFATVLVSFCGASYWGVVNSREDGVPLKADFLAALLPLLCIPAFFSLFTGLYKWKDDDWKISRGVYLFVGMGMLLLFGAVAAVIVTIRPWTVGVACLVAILFLVFVIGVIHYWTSNNFYLTRTQMLLVCSIAFLLALAAFLMGLFHGKPFVGASIGYFSFIFLLTGRALTVLLSPPIVVYSPRVLPVYVYDAHADSAKNVSYAFLILYGIALATEVWGVIASLIMNPPFVGAGVSATTLVIAFSFAVSRPCLTLKMMEDAVHFLSKDTVVQAMSRSANKTRNAISGTYSAPQRSASSAALLVGDPALTLDRAGNFVLPRADVMKLRDRLRNEEIAAGSFLCGVKDCLLICPQSLSNIDYRRNMCAHARILALEEAIDTEWVYMWDKFGGYLLLLLGLTAKAEQIQDEVRLRLFLDSIGLSDLSAKEIKKWMPEDRRQFELIQESYIREKEMEEEALMQRREEEGKGRERRRALLEREERKWKELEISLLSSIPNTGSRDAAAMAAAVRAVGGDSALEDSFARDRVSSIANHIRKAQLARRAEQTGIPGTICILDDEPRSTGRHCGELDLCLCQSQKVTLSIAVMVQPVSGPVCLFGSEFQKVCWEILVAGSEQGMEAGQVGLRLVTKGERMTTVAKEWNIGASSIADGRWHLVTVTLDADLGEATSFIDGVYDGYQNGLPLPTDNGIWEPGTDIWVGARPPMDLDAFGRSDSEGSDSKMQIMDAFLWGRCLSEDEVTVLHTAMSPAEYGFFDLAPGDAWHGSYSARVDDWESEEAYELYDQGDVEWDGQYSSGRKRPVHDAVAIDLDSFARRPRKPRFETRDEVNQRMLSVERAVRDALIAKGERNFTDQEFPPEDRSLFVDPMNPPLKLQVSHAHLLLL

SEQ ID NO: 63282 - protein, 297 aa, Zea Mays
MFGAGAEKVKLENKTWKIDTGTRTLEIELAMLSSAHHVEMNPSDAGFQDRYVVQEIIKEMAKNRPIDAKGRRAFKVLVLNEVDKLSREAQHSLRRTMEKYSSSCRLILCCNSSSKVTEAVRSRCLNVRVNAPSEDQIVQVLEFIGKKENLILPAGFAARIAAQSNRNLRRAILFFETCKVQQYPFTSNQVAPPLDWEQYVSEIATDILTEQSPKRLFDVRQKFYELLVNCIPPESILKKLLAELLRKLDADLKYEICRWAAHYEHKMRLGSKAIFHLEAFVAKFMSIYKEFLVATFG

SEQ ID NO: 63283 - protein, 302 aa, Zea Mays
MDYFSSCTRLLMLLMVNKQGVLAHRVLLENFLIMFEALALGSTLMCGGWTLCFWVVAAVPFYLATWEHFFTNTLILPTINGPTEGLMLIYVSHLFTFFTGAEWWAQDFRKSLPFFGWIPLPFLSEIEIPLYVLVLILMIVCAVIPTVRSNVSNVQEVVEARKGSMALALAMILPFIVLLAGVAIWCYLSPSSIMRNQPHLLVIGTGFNFGYLVGRMILAHLCDEPKGLKSGMFMSLVFLCFPIANALIAKINDGSPLVDELVLLLLYCAYTVGLYLHLAVSVVHEIKDALGIYCFRITRKEA

SEQ ID NO: 63284 - protein, 633 aa, Zea Mays
MESKNSKLLQALRSAGADKIIEAYHWVQANKKNLRQEVYGPVLLEVNVQDKLHATYLEDHVPNYLWKSFITLDASDRDYIAREMKQYGIPVLNYLVREGTRRRPLNITPEMEQLGIYSRLDQVFQAPDTVKDVLISQAGLDDSYIGTDETHRRADEVSKLGIYDFWTPDNHYRWSKSRYSGYMSAFVDAIHPSRLFKSNLDVSGIEDLRLQKEDHVTNIEGMREAIKTLHRKQRQLEDEEANIHRQKEEIINAMRYHKKTREEIQRRVDIKKRILKDISREDDVESSTRKLVNQVAKINDERFHAMIKLKDLLTEAVALKWSHTEKNMTLIELDTKIWEMEKGVKKLEKDANQAARNYEDCKRITQEHRRRLSIAKQNAESIAMITKDLEKEFCAMPTTLEELETAIQDTESEANSMLFLNQNVLQEYQNRQHEIESISNKLKDDKGEHEICCSEIETVKGKWLPTLRILVSKINDTFSRNFQEMAVAGEVSLDEHGIDFDHYGILIKVKFRQTSQLQVLSSHHQSGGERSVSTILYLVSLQDLTNCPFRVVDEINQGMDPINERKMFQQLVRAASQINTPQCFLLTPKLLPDLEYSDACSILNIMNGPWIEEPAKAWSSGDCWRTVVSAAGH

SEQ ID NO: 63285 - protein, 203 aa, Zea Mays
MSEGKCGKFAIEALVTVCRAMSQLEVGQFAVASFGKKGNVSVLHDFDQIFNSEAGVNVISSLSFEQDNKIEDEPVSDLLTHLNVMLDTAVARARTPSGQNPLQQLILIISDGKFHEKENLRRHVRDVLNRKRMVAYVLLDSPEDSIINLKEACFRVGEKVELKKYMDSFPFPYYVMLQNIEALPRTLADLLRQWFELMQSANE

SEQ ID NO: 63286 - protein, 328 aa, Zea Mays
MCPTKPGRPAQAAAGSGEKSWREQAVAASSLRPVDLDRGTNGWASPPGDLFHLRARGYFSCGGGKRGKAPSAAEWLLRPAGVDWLRSHARLDHVLARHDNRVAAAFRRARLRNDPTAHFLLAVNLQVPGRPDAYSAVFYFAAEAPIAPDSLLGRFVQGDDAYRNARFKIANRIVNGPWLLRATVGNYAACLLGRALTCRYHRGVDYLEIDVDIGSSAIASAILHLALGAVTSVTIDMGFLVESQSEEELPERLFGAVRIARMEMGAARYVELPPNEAMPETVCSGRAGAGFRVSSGKVDKFLVAQIHQSACMLQISLQRAHFQMQSIV

SEQ ID NO: 63287 - protein, 1033 aa, Zea Mays
MYLYSLTLQRATGAVCAVIGSFSGRDSKKSAASGSGSTQEIAVARGSTLDLLRPDPETGRLRTLLSVDVFGAIRSLAQFRLTGANKDYLVVGSDSGRLVILEYSPDRNRLDKVHQETFGKSGCRRIVPGQLLAVDPKGRALCIAALEKQKLVYVLNRDAAARLTISSPLEAHKSNTLTFALAALDCGFDNPVFAAIELEYAESDRDPTGQAANQAQKLLTFYELDLGLNHVSRKVSEPIDNGANLLVTVPGGGDGPSGVLVCCDNFVLYRNQGHPEIRAVIPRRADLPAERGVLIVAAATHKQKSMFFFLLQTEYGDIFKVDLDHNGDAVSELRIKYFDTIPVTSAVCVLRSGFLFAASEFGNHALYQFRDIGREADVESSSATLMETEEGFQPVFFQPRALKNLMRIDEIESLMPVMDMRVANLFDEETPQLFTACGRGPRSTLRILRPGLAISEMARSMLPAEPIAVWTVKKNINDMFDAYIVVSFTNVTLVLSIGETIEEVSDSQFLDTTHSLAVTLLGEDSLMQVHPNGIRHIREDGRVNEWRTPGKKTITKVGSNRLQVVIALSGGELIYFEMDMTGQLMEVEKQDMSGDVACLAIAPVPEGRQRSRFLAVGSYDNTIRILSLDPDDCLQPLSVQSVSSAPESLLFLEVQASVGGEDGADYPANLFLNAGLQNGVLFRTNVDMVTGQLSDTRSRFLGLRPPKLFPCIVSHRQAMLCLSSRPWLGYIHQGHFLLTPLSCDTLESAASFSSDQCSEGVVAVAGDALRIFTIERLGETFNETAIPLRYTPRKFVILPKKKYIAVIESDKGAFSAEEREAAKKECLDASGAAENGNANNGDPMENGDGQDGAEEGNTFPDEQYGYPKAESERWVSCIRILDPRSRDTTCLLELQDNEAAVSICTVNFHDKEHGTLLAIGTAKGLQFWPRRTLAGGFIHVYKFVDEGRSLELLHKTQVEEVPLALCQFQGRLLAGVGSVLRLYDLGKRKLLRKCENKLFPRTLVSIHTYRDRIYVGDMQECSQVAYNSTTHRF

SEQ ID NO: 63288 - protein, 387 aa, Zea Mays
MQALISKITKSIVSPLPTRYSGSFRGLIKSMLRKSPEHRPSAAELLKHVHLQPYVLQVQLKSSPSRNMSPIYQALTDKVKKMTFPSDITDSARRVARRNSLGNERTVTFCKPSPERNSISSTRSIKEYTTTQSVKELSVDSSQIDDEVTSKAIRTKTTGILRTPKSTPAKTLTTRNRLDPPKTSYSRTNHSELTSRTPLNKSAVTARRASLPLPTYRAPNSRAASVLDQLDSPDVSVNAPRIDRIAEFPLASSEDPLAPMKKNLSSAPGHDGSCSTPPFINRSITKDKYTVQVLHRGDGDNASDSSGRNATAASSGGSNDSRQQRFDTSSYQQRAEALEGLLEFSAQLLQQERYEELGILLKPFGPEKASPRETAIWLTKSFKETAS

SEQ ID NO: 63289 - protein, 257 aa, Zea Mays
MILNDPELSSTLRYRSNVDLKDKWRNMNVIVTSSSTRDRGRTSTRRTRAAPKNNDQLLAMSTITSEVDDEIVDVKPIVSMSVEGWNTSNSKKSHSRLDNIIMEAIKNLNEPTGSHRTTIANYIEEQYWPPSDFDHLLSAKLKYLATSGKLLKVNRKYRIAPSLLEDVQREPLKLGSDASRTLTRSQVDAELVRMATMTVEAAAAAAAHAVAEAEAIMAEAEAAAREAEAAEAEARAAQAFAEAAVLTLKNRNAAKLV

SEQ ID NO: 63290 - protein, 382 aa, Zea Mays
MGYEESKKHLLSLSYPELQCLCKRYNLPAKKTHSQLASSLASLLEASPSPAPPPVQLANMKEASTCNHANNKRGPYNGRDDGKPLVHAKHQKGDQTPVDETSKKGIDTGTSIPPVSMNHGRPEYHGHLSSDLRTAHNLQSQCDVGIATNTTNLEFVGKHDCSPANVIDQICPPIIQKYPSNGNGQASTKFGRMNDNTEKGCRLSDKISANAAAVQFSVMSDEGIDLLVDLNSSSATWAKNFMAEMHITPPSEHGNFSSFISSLSTKDDHSTASPSGNIIVDIQNKGAENIVPSTDSSLASDVGESSRSVLYPVDTTTVNSVSSTSTVAGTPVELSGYQEGAPVVLRITRCFLQNLLMSFCSLKESLHQLYVVQCNQLAINAQ

SEQ ID NO: 63291 - protein, 96 aa, Zea Mays
MNKRGKSKREQASSDFYFDDAILETLPELNTSFGILKVLQRKQASSCFCIFSMLSAYVRYYVLFWLNIYYSWVCCSHESHIAITFAAFRLMLCSKN

SEQ ID NO: 63292 - protein, 219 aa, Zea Mays
MFQLESKLLPFGAKILDFKDDCLRMFLKAPILTSDCEIYGQKFNCSIDSFISDHELLIEIDKINMEPKKVQIIPDDMSVDILIERMESSRDTVCSPTLIWLIQQCQHQSIINALRRSLVNDANSSRHCFEYLNKKEMIVAHLDRGIDVSIKMSSDWPLCSYGLKLISIRNAGDRPTNIASTILCKTKELANELEPQIRQHLLTLVDAVEDIIIRELRSR

SEQ ID NO: 63293 - protein, 427 aa, Zea Mays
MEDEDQYEKDMQPDDTVADEDMRYESDENRELKPKEKPVGPPLDLVVPFKQPPARPDKMNVIKVSNIMGIDPKPFDPKTYVEEDVFVTDESGTKKRIRLEDNIVRWRTIRNADGTTSCESNARFVKWKDGSMQLLIGNEVLDISVHEAHHDQSHLFLRHGKGILQSQGRLLHKMQFMPSSLFSKSHRLLTALVDSQNKKTVKMQKWFETKDPEKAKMEKERIQGQNIRAHSILQRKREKVNRKYTQPARPRRQLSPGFLEDALDEDEEPDYGSRRMPGRRRFEDELEAEALAERRIINAKKSNMSRNVPRKPPYPPARLPRRQADEYSESEREESEYETDGEDIEHSPPRGREDELDEEEEYEEEVEEEAPLSDEEMEAPKRKRESGGGGGHMREELASEDDESPPRKQPTVQHRRKAVVFDDSDED

SEQ ID NO: 63294 - protein, 254 aa, Zea Mays
MICGGSYVREISFAFLIYPSARPQHHPILQQRDNKSPPLPLRIRISPSPSMAAAAAAATSFTTLAVARSAGQRSLLASKAAPSPLLSLRGARIPSQAVSFSGGLAASPSHSRARFATSASAEPKEADLQSKITNKVYFDISIGNPVGKNVGRIVIGLYGDDVPQTAENFRALCTGEKGFGYKGSSFHRVISDFMIQGGDFDKGNGTGGKSIYGRTFKDENFKLVHTGPGVVSMANAGPNTNGSQFFICTVKHQS

SEQ ID NO: 63295 - protein, 62 aa, Zea Mays
MKDQVQCTLKVAVLHTQTHVQSNTGSVYIAEDKLEGSNAEDNYLSCCSAERWRRKVNKRRKK

SEQ ID NO: 63296 - protein, 73 aa, Zea Mays
MLSGGAWLCPRWPTGTEWMGWLRCPPPPFILLKPRTSARGNRVQRCASNARHLLRMARGKTTGSVEGVRLTGR

SEQ ID NO: 63297 - protein, 951 aa, Zea Mays
MENCERTIKGFLTLKNLASVFLQQGFEFYDNALHCYLQAVELDSNDSVVWNHLGTLSCSMGLLSVSRWAFEQGLVCSPNNWNCMEKLLEVLISIRDEVACLSVANLILNSWPSHHRALHVKKTIECAEPVPFAPRGIDILEPKHAKLIFSNKRKSVDDEICQEIGTKKSKHSATLQLNEAKWLALLDGILSLISANTEKAGEYNCSNTVDRCSISEGSAKGLAYNIIDVVISTDTLKSVETAGGNGNDSHHGEILPYDCKATVKEKDGNSDREHPHERRSTRLERLRSRKSGKDENGSDGKDISHAMTQFLESFILKGPSPVEKAYCSGNADASNPDTHNYTSNEEANDLKQFLCKISKNFGPHHIGYMLLEEMAHLKVPFQDYFVKLIELDKLTRGWAEDRSASCNLFLAELYYDRALCSGSPPTSSELSDSSYHLCKIIESVALELPFNISVREIHSTNLDTESSRTGESSSELIERSHENGHINMLNDQKSKHDSSSNMNCAFWIRFFWLSGCLSLSSDCKEKAYKEFNIALSILKNSNKTKSYGEVILLPHTKLVKSLTTDRILREINLIRLESLLWNNDENINKITHTEFMQLLPPLLLSTKDAYVGNAYGPQRESENVISLELSALDVLISACEKAKPMNIQVYLDSHRRKIQVLTVAAGMVGSVTPLKAKGSSNVEFVEAMNRNRLENVVEAVKDVSRNASKAKDIIDQCDNSDGQDGWSPLMSIVGDIQSLLLTIMCAAVKIILSRKLSCSGTSYQVDHLECSCLIDAAIAFCKLQHLDPTISIKTQVDLIVAVHDLLAEYGLCCAGRDGEGEEGMFLKFAIKHLMALDVKLKSQLNSNGMEEDAVPKDVRAEDSVADEPSVSDNKQNSDDEEESELDEIQSCLDSALDQAFFCLYGLKINPDSCSEDDLAVHKNTSRGDYQTKEQCADVFQYVLPYAKALSQ

SEQ ID NO: 63298 - protein, 210 aa, Zea Mays
MEPSPTSSSPAVARRLSPEETAAASPEAEDRKDDVGVDGDGMATSSVASDSDYETTQMCDLLKSKVGSLEFLQKLNGIQKSVDQNCAVEPDTSWDIIKSDLWEDGDSDDGYVLVKQEDVVDGITSFMAACLLSLKRTKDLPPDQLQKALRKMFSAEKKKSKIRKAWDGTKLIYNVTSWGATAVGFYNNRALLTVASTAFRTSCRVISKFL

SEQ ID NO: 63299 - protein, 63 aa, Zea Mays
MLGSCSTECPTGTKYYGLLTDRPALQAASYRRRRAKCNRRTKEKMRLFRTPPEAGHTQQNLQS

SEQ ID NO: 63300 - protein, 381 aa, Zea Mays
MRMSVDLRDLFLYEAFLYYNPLLLVALMIWLWGVNLWVFAQSSVNYAKVFDLPQTHLSHREIWRCATWLTLIVPTSMTAYLYLYSHGEVSLAASQPVLLYAILLMILLSPFDMFYLSSRFYFLRTVWRIILPLQAITFPDFFLADIFTSMSKVFSDLERSVCRMVNRQVATIAWFEADSICGSHSVAIPLVLMLPYLWRLFQCLRQYKDTKEKTCLLNALKYSTAIPVIFLSALKYHVHPDQWVGFYRPLWLISSVVNSLYSFYWDIKRDWDLSILTRIFMFKNPSIWTYLLYGQNWVLYWVLGSNLVLRCTWTYKLSAHLRHNYLTVFTIAALEILRRWQWVFFRVENEWNKMTAKQNMEMSSDMPSEGDRLLDSSNHTV

SEQ ID NO: 63301 - protein, 695 aa, Zea Mays
MKGLESGLRNDAPDSAIAMRQKWRLCEIGLEDYSFVLLSRYINALEALGGSASLAEGLPTNTSLWDDALDALIIGINQVCFSGWKPNECSAIVNELLSWKQKGLSEFEGNEDGKYIWALRLKATLDRTGRLTEEYSEALLSIFPEKVKVLGKALGIPENSVRTYTEAEIRASVIFQVSKLCTVLLKATRAVLGSSVWDVLVPGVAHGALIQVERIAPGSLPSSMKEPVVLVVNKADGDEEVKAAGDNIVGVVLLQELPHLSHLGVRARQEKVVFVTCEDDDTIKNMRLLEGKHVRLGASSNNVDLSVVSNKDDCAAMSSEPSAGGDLFAQQFSLLTTDKKLELSEGPSLQQKSYTSVANGMSGVLELSEASIESSGAKAAACGTLSVLSSMSNKVYNDQGTPAAFRVPAGAVIPFGSMEDALKKSGSLKSYTNLLERIETAQIENGELDSLSSKLQATVSLLSPSEEIIESLKKTFDQNVRLIVRSTANVEDLAGMSAAGLYESIPNVSLSDPRSFGAAVGQVWASLYTRRAILSRRAAGVPQRDAKMAVLVQEMLQPDLSFVLHTISPVDHDPKLVEAEVAPGLGETLASGTRGTPWRLSCHKLDGKVTTLAFANFSEELMVLNSGPTDGEMSRRTVDYSKKPLSVDATFREQFGQRLAAIGQYLEQKFGSAQDVEGCLVGPDIFIVQSRPQPQ

SEQ ID NO: 63302 - protein, 125 aa, Zea Mays
MSSTTTSPPPPAAGDHPRVLLRGFLSRETCKELEFVHRSCGAAGYRPSVISTSLPHLAATGCGHLLLPFVPVRERLRDAVESFFDCHFDLFIEFTGLISWCKGASIGWHSDDNKPYLRQRAFTLA

SEQ ID NO: 63303 - protein, 94 aa, Zea Mays
MAASPAEAGAQALPEATEAKEKGKRGGVLRRVWRALFGGREDFEKRLQYLSKEEAAVHARMRRRTQFSRRTVRNLIVLSVLAELSGKIRRPLKN

SEQ ID NO: 63304 - protein, 152 aa, Zea Mays
MDYDRLNSPNTSAISLEVMGHRLHISQDPNSKHLGTTVWDASMVFVKFLEKNSRKGRFCPSKLKGKRVIELGAGCGLAGFGMTLLGCDVTTTDQVEVLPLLMRNVERNRSWISQSNSDTGFVERNVCCAIHSPVSVILIAVVLDIVIWHSSF

SEQ ID NO: 63305 - protein, 216 aa, Zea Mays
MAATLLHAATASLQSSSQPARAGAATAFHPLASTPSIRLARSSFSSNRRLEVSLRAVSAGHCFAGRGAPRGRRVVAALAGEQTEGSEVGDDKDNSNEEIKPEEAQEAWKVMLEQFKAEALRMQALSMQAYDVYSKRAREVLLEASEKLKIQADKAQKDLSVIATEVSQEGQEYLVMAARNSPDSIKDITTTFRALGRLNWPSEYEDYHVGIPFVIL

SEQ ID NO: 63306 - protein, 295 aa, Zea Mays
MCMASPCVGCLGDVEVVVSGSLLTITCVALLLPRMLKILILSDQGNQIVLCKFKSKCKFNHPKDMVNALGTGTNNESLIADSAVLPVRPSEPICVETIYTATTDAADAPTEACNAKGLPIRQGEVDCSFYMKTGSCKYGSICRFNHPDRPGPAADIAFMVPLVQATLPSSAPIVPAVVEPLPMIYPQRPGETVCDFYMKTGSCKYSQKCKFHHPISRFAPHSKENGDPQQPATLASLPRREDAEACAFYMRSGMCRFGAHCKFDHPPREEAISELQAAGKEGIEGPSLVQRDHDV

SEQ ID NO: 63307 - protein, 168 aa, Zea Mays
MRFITGGGGGGVGGGVGGGGSSAARSYEPMATADTTSLHYWLHWRVGLCGLWVLACMAVAGYLIWRHEGPSADRRPGGAGAGLSSPGAAADGGKERCHGVLYDDEAWRPCLRDIHPAWLLAYRLISFFVLLSLLVVIVISDGGSIFYYYTQFSENIGSCDSVCVVRLL

SEQ ID NO: 63308 - protein, 203 aa, Zea Mays
MVYPHMAFMQILILITEKNRLKTSINLSLTPILNQYNLTCFEWQHYKFLHDLCGQFCIIICPFEIHQCILSDQWSICFHNAGVMVPLTWSIRMKIALGAAKGLAFLHEAEKPVIYRDFKTSNILLDEEYNAKLSDFGLAKDGPVGDKSHVSTRIMGTYGYAAPEYIMTGADLQENESVGILVRMGTKILEQGHLSDAEQRTLW

SEQ ID NO: 63309 - protein, 648 aa, Zea Mays
MLWIRALFLQKHTIPRFSVNIDNHSNWDEMVDSCALQLSHDLIRHHVQFLHDESHKNNNHQQKEVFASMNISAEGELKSSENERPLCGVASKENPIQLAAGRAQQEPPPSNVEDKVENDQFFFEGIVQRNPSSRLVKGSESFAIVAFGIQILQHPQFSKLCWATSKLREGPCTDINGPWKGWPFNSCLLQSSTLPGKSLNGGDNVVKGKEKSVCVRGLVAVGLLAYRGVYGSVIEVCAEVRKVLGLLVGQIQTKILEKRNQFRTHVDTRTGTSRMKSSSAKECQRTKYAAGTNVQVAPVAIPAEVQDIPAQHTQDHEVVPGPTEVQGNPVKHTAEQPGSYSMDCDLDNHVNSVSSKDAVEHDHVHSALPDVHRGNTHADTVTNDGEPIGANNNGKVSRLTYGEDKFRPGIQRSENHTESMEGLSCLQRAGDSVGSPASINNTELPKNNVSSEAHIDDNELRRNDLVNDVESNSIDGKHDTMMNLSVPKISCLYKCCSPCFQSIYKMVHGIISNTLRPNLHCLTADDMHDILSSWCLNLLGSVRKLYSSHDEASCTEVFVRMSNKETHLEHCACQSDIYLSRECVCHLESNGDVETANTDCHPLSGQSLSFFFKDGVWMPLDLTAETKLHCSFRRFCVCSILGTVSMLS

SEQ ID NO: 63310 - protein, 3455 aa, Zea Mays
MAAAAAAHRASFPLRLQQILAGSRAVSPAIKVESEPPANVKAFIDQVINIPLHDIAIPLSGFRWEFNKGNFHHWKPLFIHFDTYFKTYISSRKDLLLSDDMTEAEPMPKNAILKILIVMQIILENCQNRSSFTGLEHLKLLLASSDPEIVVAALETLVALVKINPSKLHMNGKLISCGSINTHLLSLAQGWGSKEEGLGIYSCVVANEGNQQGGLSLFPVDLESKYQHRLGSTLHFEYNLGSAQYPDQTSDKGKSSNLCVIHIPDMHLQKEDDLSILKQCVDKFNVPPEHRFALLTRIRYARAFNSTRTCSIYSRISLLSFIVLVQSSDAHDELTYFFTNEPEYINELIRLVRSEDSVPGPIRALAMLALGAQLAAYASSHERARILSGSSIISAGGNRMVLLSVLQKAIFSLNSPNDASSPLIVDALLQFFLLHVLSSSSSGTTVRGSGMVPPLLPLLRDNDSSHMHLVCLAVKTLQKLMEYSSPAVSLFKDLGGVDLLSRRLHVEVQRVIGTADGHNSMVTDAVKSKEDHLYSQKRLIKALLKALGSSTYSPGIPARSQSSQDNSLPVSLSLIFQNVEKFGGDIYFSAVTVMSEIIHKDPTCFPALKELGLPDAFLSSVTAGVIPSCKALICVPNGLGAICLNNQGLEAVRETSALRFLVYTFTSRKYLIPLNEGVVLLANAAEELLRHVQSLRSIGVDIIIEIINKLSSSLKDRNNETAILEEKTDMETDVEGRDLVGGMDSSVEGSNDEQFSHLSIFHVMVLVHRTMENSETCRLFVEKGGLNALLTLLLRPSITLSSGGMPIALHSTMVFKGFTQHHSTPLARAFCSSLREHLKSALGELDKVSNSFEMTKIEKGAIPSLFVVEFLLFLAASKDNRWMNALLSEFGDASREVLEDIGRVHREVLWKISLFEENKIDAEISLSSSTSEAQQPDLSASDIGDSRYTSFRQYLDPILRRRGSGWNIESQVSDLINMYRDIGSAASDSQRVGSDRYSSLGLPSSSQDQSSSSSDANVSTRSEEEKKNSEHSSCFDMMRSLSYHINHLFMELGKAMLLTSRRENSPVNLSPSVISVANNIASIMLEHLNFEGHSVSSEREMTVTTKCQYLGKVAEFIDGILLDRPESCNPIMVNSFYCCGVIQAILTTFQATSELLFTMSRPPSSPMETDSKTGKDGKDMNSSWIYGPLISYGAIMDHLVTSSFILSSSTRQLLEQPIFNGSVRFPQDAERFMKLLQSKVLKTVLPIWAHPEFPECNIELISSVMSIMRHVCSGVEVKNTVGNDGARLTGPPPDESAISLIVEMGFSRARAEEALRQVGTNSVEIATDWLFSHPEDELARALAMSLGNSDTPAQEGNGRSNDLELEEVTVQLPPIDEMLHSCFQLLQTKEALAFPVRDMLVTISSQKDGQNRVKVLTYLIENLKQCVVASEPSNDTALSALLHVLALILHGDTAAREVASKAGIVKVALDLLSSWELELRESGMIEVPNWVSSCFLSVDQMLQLEPKLPDVTELDVLKRDNSNIKTSLVIDESKKKDSESLSSVGLLDMEDQYQLLKICCKCIEKQLPSASMHAILQLSATLTKVHAAAICFLESGGLNALLSLPTSSLFSGFNSVASTIIRHILEDPHTLQQAMELEIRHSLVTAANRHTNPRVTPRNFVQNLAFVIYRDPVIFMKAVQSVCQIEMVGDRPYVVLLKDREKERSKEKDKDKSVDKDKATGAVAKVVSGDTAAGSPANAQGKQSDLNSRNVKSHRKPPQSFVTVIEHLLDLVMSFVPPPRPEDQADVVSGTALSSDMDIDCSSAKGKGKAVSVPPEESKHAIQESTASLAKASFFLKLMTDVLLTYTSSIQVVLRHDADLSNMHGPNRTNSGLISGGIFNHILQHFLPHATKQKKERKSDGDWMYKLATRANQFLVASSIRSAEARKKVFSEICNILLDFTDSSAAYKAPVARMNVYVDLLNDILSARSPTGSSLSAESAVTFVEVGLAPSLLKMLQNLDLDHPDSAKIVTAIVKALELVSKEHVHSADNAKGENSSKIASDSNNVNSSPNRFQALDMTSQPTEMITDHRETFNADQTSQSSDSVADEMDHDRDMDGGFARDGEDDFMHEMAGDGTGNESTMEIRFEISRNRDDMADDDDDDDNTDEDMSAEDDEEVNEDDEDEDEENNNLEEDDAHQMSHPDTDQEDREMDEEEFDEDLLEDDDDEDEEGVILRLEEGINGINVFDHIEVFGGSNNLSGDTLRVMPLDIFGTRRQGRSTSIYNLLGRASDHGVLDHPLLEEPSSTLNFSHQEQPENLVEMAFSDRNHEGSSSRLDAIFRSLRSGRNGHRFNMWLDDGPQRNGSAAPAVPEGIEELLISHLSRPTQQPGAQTVGGTQENDQPKHGSAAEAREGSPAQQNENSENTTNPVDLSESAGPAPPDSDALQRVVSNASIEHATEMQYERSDTITRDVEAVSQASSGSGATLGESLRSLEVEIGSVEGHDDGDRHGTSGASERLPLGDIQAAARSRRPSGNAVAVSSRDMSLESVSEVPQNPDQEPDHNASEGNQEPRGVGADTIDPTFLEALPEDLRAEVLSSRQNQVTQTSNDQPQNDGDIDPEFLAALPLDIREEVLAQQRSQRIQQQSQELEGQPVEMDAVSIIATFPSEIREEVLLTSPDTLLATLTPALVAEANMLRERFAHRYHSSSLFGMNSRNRRGESSRRDIMAAGLDRNTGDPSRSTSKPIEIEGAPLVDEDGLKALIRLLRVVQPLYKGQLQRLLVNLCTHRDNRQALVQILVDMLMLDLQGFSKKSVDASEPPFRLYGCHANITYSRPQSSNGVPPLVSRRVLETLTNLARSHPNVAKLLLFLEFPCPSRCRSEAHDHRHGKAVLEDGEERKAFAVVLLLTLLNQPLYMRSVAHLEQLLNLLEVVMHNAENEINQAKLEASSEKPSENAVKDVKDNTSISDSYGSKSNPEDGSKALAVDNKSNLRAVLRSLPQSELRLLCSLLAHDGLSDSAYLLVGEVLKKIVALAPFFCCHFINELARSMQSLTFCAMKELRLYENSEKALLSSTSANGTAILRVVQALSSLVSTLQDRKDPEQPAEKDHSDAVSQISEINTALDALWLELSNCISKIESSSEYASNLTPASASAATLTAGVAPPLPAGTQNILPYIESFFVTCEKLRPGQPDAVQEASTSDMEDASTSSGGQRSYSCQASLDEKQNAFVKFSEKHRRLLNAFIHQNPGLLEKSFSLMLKIPRLIDFDNKRAYFRSKIKHQYDHHHHNPVRISVRRSYILEDSYNQLRMRSPQDLKGRLTVHFQGEEGIDAGGLTREWYQSLSRVIFDKSALLFTTVGNDLTFQPNPNSVYQTEHLSYFKFAGRVVGKALFDGQLLDAHFTRSFYKHILGVRVTYHDIEAIDPAYYKNLKWMLENDISDVLDLTFSMDADEEKLILYEKAEEGVTSGLLRRININM

SEQ ID NO: 63311 - protein, 583 aa, Zea Mays
MAASSSPSSRSLLATRPLFLPLRTRRSLPPTSIPPRLSCLRSPSASSSPSASASAYNGWADLAAAPDTPFPFPLSFPLQPTTHGLLVLLPAAAIALSLSLARLPPLPLLAAAFTAGFAARHLSSSAQAQSPGRLSALLADLDAHARALREQLVSDAHPGLLVQAVDRLRDAVADAATVAAEQGDTGRTMSDALGPLGEVADYLGAWARHAVRDLSLSPPRKKPAKGNNSSDVQAAANPNNRAAQQQQEIGSNKPVDSTLQQQPFAFDPSAVDDANGRPLGMLQFDEDDNGSKDAGTGAQATLERLVSKHRHRRDPDGPPFEGRFSDESSSLLERTLEIRDRSYRLKIGVMSEAHPPVYGDDESAASAADSDGEEFSRNVKEAAEILRKARASMADEETADALLYKSARLLSTAVALRPTSLVAVGQLGNTYLLHGELKLKVSRELRTLLASSGAFLNGRERAPRSRKVDRRMVSRESISSALVDVCEECESLLVEAGRSYRMALSIDSGDAKALYNWGLALIFRAQLLADIGPEAAADADRVYLAAIDKFDAMLSRSNTYAPEDGALRCSSAPICGLGATVRR

SEQ ID NO: 63312 - protein, 283 aa, Zea Mays
MLFSCCSSQCECDDTCTNKSFQHRPLKKTKLIKTEKCGHGLVAEDEIKKGEFVIEYVGEVIDDRTCENRLWTMKRLLDTDFYLCEVSSNMVIDATNKGNRSRFINHSCEPNTAMQKWTVDGETRVGIFALRDIKIGEELTYDYKKMLGTTKYSGSSQNHHAKKKKRKTSCENCIQQFLRLWHPHKKMYVGCWIIDFDQETKMHTLKFNDLHTEKFNLKEEEWHFLEGCHGLLHRRPTSWGFICDGSIDRRTAIFLPFWSNSPSLNCDIRACLYVKVYLRADYT

SEQ ID NO: 63313 - protein, 175 aa, Zea Mays
MGPSSPALAPTATELQSSATARSARLRPSPAPAGCTKSDPTPPPPPAPPARPPVSQLPPPPPSHLPPARPSDPTACRAPAAPYQTKRVRFAFTASTTPPRIHYPSAVSRSHSATPAPTAGSKPPSGSCDRIEDEDLEGWTTIRRRRGRAARAGLGCAPAAPRLLSAHAPSRLMFG

SEQ ID NO: 63314 - protein, 237 aa, Zea Mays
MTREELMTFMSLMDYSVSQVNPPGFLVHGFGNYHVGIHGPFGSELVNTSLLNLYFLDSGDREMVNGVKTYGWIRESQLAWLRSTSLELQKKIHAPALAFFHIPIPEVRGLWYSGFKGQYQEGVACSSVHSGVLGTLVSMGDVKSVFLGHDHLNDFCGNLNGIWFCYGGGFGYHAYGRPHWPRRARIIYSELKKGQRSWLEVDSISTWKLLDDEKLSKIDEQVIWRHSTDDSDHRVYL

SEQ ID NO: 63315 - protein, 173 aa, Zea Mays
MHPGNILVRVAQPKNSNNTLKKSRPHVVFLDVGMTAELSSNDRVNLLEFFKAVARRDGRTAAESTLKLSKQQNCPNPKAFIEEVERSFSFWGTAEGDAIHPAECMHQLLEQVRCHKVNIDGNVCTVMVTTLVLEGWQRKLDPDYNVMKTLQTLLFKEDWAKSLQYTIQGLMAP

SEQ ID NO: 63316 - protein, 440 aa, Zea Mays
MTDTGHHLDEDEQIAQALQENIGHNLAEDEQLARALQESMNDGPPRQHIPVEDVNSESTPASILPSNIFRTSGLRVCAGCRSPIGRGRFLSCMDSVWHPECFRCYACDRPISEYEFAVHENHAYHRPCYKERFHPKCDVCSSFIPTDKNGLIEYRAHPFWMQKYCPSHENDGTPRCCSCERMEPKDSQYITLDDGRRLCLECLHTAIMETNECQPLYIDIQEFYEGMNMKVEQQVPLLLVERQALNEAMEAEKSVHHLPETRGLCLSEEQIVRTILKGPIGPGNRIIDMVTGPYKLIRRCEVTAILILYGLPRLLTGSILAHEMMHAYLRLKGYRTLSPEVEEGICQVLAHLWLESEITSGSGSMSTTSDASSSSSTSSSSKKGAKTEFEKRLGEFFKYQIETDSSVAYGDGFRAGMRAIERYGLRSTLDHIKMTGSFPC

SEQ ID NO: 63317 - protein, 172 aa, Zea Mays
MYKFLRKTQRGGWMSLGGILLCVTGSEAMFADLGHFNQLSIQIAFTCMVYPALILAYMGQAAYLCKHHTMESDYRIGFYVSVPEKIRWPVMAIAILAAVVGSQAVITGTFSMIKQCTSLGCFPRVKIIHTSAKVHGQIYIPEINWILMILCLAVTIGFRNTKHLGNASVIFI

SEQ ID NO: 63318 - protein, 978 aa, Zea Mays
MQPPMGNERPPPPGRTVSAFVPGAAVPPPPFAAGGPFAPPPWQGVPPPQSGAAAPHFGAVPPAAMGGFRGPPSSQGPFGAGTPPQRPFTSAPPPQSPFTSAPPSQGPFASAPPSQVPFASAQPSQSPFTSPPQSQGPFAAGPPPTGPFAATPAPFRSPLSSLAQPQSPTQGALPPPPTYARPLSQPLQAQGYYPGAPPSNPQFPMSRPAFQQPVQNMPPPPMGSAATFGNQAAYQSGGPPVGGTLQSLVEDFQSLSLSSVPGSLDPGVDVKGLPRPLDGDEEPVKLIESYPFNCHPRYFRLTTHAIPASQSLVSRWHLPLGAVVHPLAESPDGEEVPVINFGSAGVIRCRRCRTYINPYATFADAGRKWRCNLCTLLNDVPGEYFCALDASGRRYDTDQRPELSKGTVEFVAPTEYMVRPPMPPSYFFLIDVSVSAVRSGLLESSLSQPQMMVVADLDDVFLPLPDDLLVNLVDSRHVVESFLDSLPNMFHDNVNVESALGPALKAAFMVMSQIGGKLLVFQSTLPSLGIGRLRLRGDDVRAYGTDKEHTLRVPEDPFYKQMAAEFTKNQIAVDIFSFSEKYSDIASLGSLAKYTGGQVYHYPSFQAPTHEDKLKLELSRDLTRETAWESVMRIRCGKGVRFTTYHGHFMLRSTDLLALPAVDSDKAFAMQLSLEETLMTTQTVYFQVALLYTSSSGERRIRVHTAAAPVVTDLSEMYRQADTGAIVSLLGRIAVENSLSDKLDSVRQQLQLKLVRSLKEYRNLYVVQHRIGGRLIFPESLKFLPLYILAICKTLALRGGYADVSLDERCAAGFSMMILPVKRLLNFIYPSLYRVDEVLTMEPNKIDGWLKRLPLTFQCLDTGGLYLLDDGFTFLVWLGRMLPPELVNNILGVSLANFPDLSKILLRECDNELSRNFMKILRYLREKDPSYHQLSLVVRQGEQPRESYLLLSNLVEDQMAGTSSYVDWIQQIHRQTQS

SEQ ID NO: 63319 - protein, 745 aa, Zea Mays
MDAESPISGQISEYEDAETDNSRASSRYHPFTEMQQPVDGTVMGNFFGASSPSVSVNNLGYLGEMQPTGANFTSHFATRNDIASVFNDTGSELGGGPKTSIDSVLLGEPFPEYPGGFMESTLYSSVATLGNSLEDGLQTFMSEALYTNNLTQKEVDALGAAGITSSKYLKNDAVGHWSLPISMSWYDVTLYFQTENDGYTDQSVRYPLLKQSSSDLFKMEPDGLKKFDSFSRWMSNELPEVVDLDIKSSSDAFWSTTETVNVADGSSIPINEPLDVFVVSPSLSQDQLFSIIDVSPSWAYNGTKTKVLITGTFLAKKEDVENCSWSCMFGDSEVSAEVLVDGSLRCYTPVHHSGRVPFYVTCSNRVACSEVREFEFRDSETHYMDISDKHTTGINEMHLRIRLDKLLSLEPEDYEKYVLSNGNKSELINTISSLMLDNNLSNLALPSDEKELCTVQDQNLEKQVKEKLYYWLIHKIHDDGKGPNVLGKEGQGAIHLVAALGYDWAIKPIVAAGVNINFRDIRGWTALHWAACCGRERTVGALIASGAASGALTDPTQQYPSGRTPADLASENGHKGIAGFLAESALTSHLSALTLKESPSGNVEEICGLTAAEGFAASSSSQLACVNSQEESLKDSLGAVRKSTQAAARIFQAFRVESFHRKKVIEYGDDDCGLSDERTLSLVSLRNPKSGHGDSHSAAVRIQNKFRGWKGRKEFMLIRQKIVKIQAKIKVCGGGGRSYLRRTSF

SEQ ID NO: 63320 - protein, 566 aa, Zea Mays
MSARLRVAELRAELQRRGLDVSGTKPALVRRLDAAICEAEKAVVAAAPTSVANGYDVAVDGKRNGGNNKRKRSGDGGEEGNGDTCTDVTKLEGMSYRELQGLAKARGVAANGGKKDVIQRLLSATADPAAVADGGPQGEKEVIKGGDEEVEVKKEKMVTATKKGAAVLDQHIPDHIKVNYHVLQVGDEIYDATLNQTNVGDNNNKFYIIQVLESDAGGSFMVYNRWGRVGVRGQDKLHGPFPTRDQAIYEFEGKFHNKTNNHWSDRKNFKCYAKKYTWLEMDYGETEKEIEKGSITDQIKETKLETRIAQFISLICNISMMKQRMVEIGYNAEKLPLGKLRKATILKGYHVLKRISDVISKADRRHLEQLTGEFYTVIPHDFGFRKMREFIIDTPQKLKAKLEMVEALGEIEIATKLLEDDSSDQDDPLYARYKQLHCDFTPLEADSDEYSMIKSYLRNTHGKTHSGYTVDIVQIFKVSRHGETERFQKFASTRNRMLLWHGSRLSNWAGILSQGLRIAPPEAPVTGYMFGKGVYFADMFSKSANYCYASEACRSGVLLLYYEWAI

SEQ ID NO: 63321 - protein, 59 aa, Zea Mays
MTTGRINQVARPRRRASAGLRAEASCRAGRRSFGRTDSWARDANASPAFSVSHIRDQKR

SEQ ID NO: 63322 - protein, 486 aa, Zea Mays
MESESSAQIKDENKDVDSDDRPGMPAAVSVYEQKVNSKSTARKVKRQPEISNSEMVTRKKAKVTKDPHHDGSTTSDVKQQACTCGVKTEKKKRKSSTTKVSAEEGKVSSNIGTTTQGDTTQADLSSKGKSCRKIGIQQALIEECKSTKVANDTGSDKFSHSVNNVIDLKDKLSHCLSSRLLRRWCMFEWFYSAIDYPWFAKSEFVEYLNHVKLGHVPRLTRVEWGVIRSSLGKPRRLSKQFLHEEREKLSQYRDSVRQHYAELRSGVREGLPTDLARPLAVGQRVIACHPRTRELHDGNILTVDNNRCRVQFDRPELGVEFVMDIDCMPLHPMENESLRQKNIVNKYLSEVKLEDQMNDLGSGGAARFASNVNVNCGDAAFQIPSSHPVNSLTKQAKAKATVNEVAIAAQQAMYNQPCSLSQIQEREADIRALAELSRALDKKEALLVELRHMNEEVSRKQKDGETVRVEAFQDAICYGACAAKRF

SEQ ID NO: 63323 - protein, 483 aa, Zea Mays
MSIEERKISMISKSTALNPNAEEFVPSSLRSFSDSSKKSDATMIVSGSSKESSTDKPESILRSNSDEEAHQYWQQQLPDDITPDFKVLGQDESPGPDSLSLTGLSINDGIDTSIFSPNQTLGVQHHASPFIRDKLNTRPKINLSGPTYMDERSQAAILSPTAGSMSPNAAPWVKNLRNGGHYNTSRRDATASHYNGDSSIGASLHNLTDAYHGSRRSLSTTMDIMSQLESKVDGRLNQNLRSLSFGNSSPPSPASYAQNAGREHISLDVPRGRYKTTSLPVPGLGSSRGSQVLGGPYNGNHDMISTNTLQNMAGIQTGAAWLETDAAANTYLESKDEVHDFASLRHAVLEQQDRQAFLMGNNPLAKDLTLKELYSIQSRLAQEKARETTYRQRFQIPELQGLIQEQNPPIDLCGLHISEAMHVLNYELNNRRKIVRSTGRRLQAMIISSARTPARLTAAVEQYLMEHGLQYTQAQPGLFRVLL

SEQ ID NO: 63324 - protein, 969 aa, Zea Mays
MGTRMPIFPRLSSALSTALLEWILMLLLFIDAVYSFLVTRFARLCRLPAPCPFCSRLDHFLGNEKPCFYRDLICKTHKSEISSLAFCSLHQKLAGARNMCEGCCGEVAGDDKTDETDSNQRIGDAFNSPREKVCSCCGQHFKRRSVALSSRETAELEPTRAFGSPKTYTEYSVVCQVDEPLEPKDIYHQSDYRSNEPDGLLQMTSDSETEVPCAIDVRSSQSREADVKGEDLQEDPACEQPVLPSPVVIKKSEIVVRKEPSVEDTCITSSACPAVDDHPNSGGGVDQMEEKESLSRKWAPQHDPVLVIENSGLQDAGISQIMPSDELPQVSGETEPSQSTNEGNTDPYKSQFTILEEHYAVSEEGNIKCILEQFDVTEITSRSGGEFRQRSASAADSHTNALVLENTHHGASEDAEQKGAGSKTSGEVEDYTKKIEPTGDMGEHELVVQDPSGSAPKDLIVKDYVDEPHVSTTTMRSSGEVPQDHSATEENPKTIDSIVERRPSLSSQISITLRSSGEVLQDHSATEENPKTSESIVERRPSLSSQISITLRSSGEVLQDHSATEENSKTSESIVERRPSLSSQISMNEAYRLAIGNKGSLTSPTLTDVILGKDSTSSINEELRLLLSQISASRGLEAPWADPGPSPRAYGRGDELVVQNITNRLSLERNASGLESLDGSIVSEMEGESTIDRLRRQIDLDRKSIHLLCRELEEERNASAIAASQALAMITKLQDEKAAMQMEASHYQRMMEEQAEYDSEAVAKANELLTEREQLIEELEVELENYRRQYGGGSTQRRGNRVAFKQENRDTTMLDGGGLEDPLINTQQGINSLVGLEEERAYIATGLRKLEQKLQFYSNNSVSVELPSPDVKDDLSDKVYVTEDFSLHCQESSMESKEAGSSTTSGEVDLVAVQEEIAKLNRRLKTLEGDRSFLEHSINSLRNGDEGLMFIQEIACNLRELRAIAIGKK

SEQ ID NO: 63325 - protein, 427 aa, Zea Mays
MCDIWEEFRAALCISGGNRRPPPTLPPPNLAGGGDEDGGGVESGGGQEEGDIISALPDDVLLFILSRLPSAAAARTSVLSNRWRLLWAQLPVLWFPLPAEPARALPSPATAARTRDRSHRWRRRLLAHLPALRFPLPVGPARALPSLASARAALTQHSAPSLWILRIDANDADPVDAAAVLRLAAPRLTNALFLRNVVPEDRKKAVVMEVIELPCFDRAAHLFLDLGYLRLAFPPSGVFTKLTVLVLSHVRFQGALDIGDTLSSARCPSLRLLHLFDAQGVSNLGICSESLVSMVLHNLKGLQQLRVVSPMLRDLHMFNCFFKRQPVASITAPVADITAPILEKFGWLDEYDPRWVQLGELSQLQVLAISFFAGAWYGLVEHQYNRGSVKLLQRFREIRDLHITIFYPIVSICLLSWISNFSLLKYC

SEQ ID NO: 63326 - protein, 143 aa, Zea Mays
MGFAMLEHLTEILILPEVKEFWFVSNIGLLMVIIGEIIRKLAVVTAGRAFTHVIRTYYEDQHQLITHGLYRFMRHPGYSGFLIWAVGTQVMLCNPLSTVAFTLVLWRFFSKRIPYEEFFLKQFFGSEYDEYAQRVHSGIPFIK

SEQ ID NO: 63327 - protein, 133 aa, Zea Mays
MGRRWTTGPLPSIDRWPPADLALASASWSVVIRSEHSRWSGRRRDAVRGTQPAGPRASRQGGRTPPAYGRYGRTGEEDGRGPDTVCAGGRNGIYAPLLTGVRYDPHRSMGFPPAVPRPPPPCIWIRRTCDRAS

SEQ ID NO: 63328 - protein, 326 aa, Zea Mays
MDAFLYIVMKFQCTCVAWVPEREGIFVVSHADGNLYVYDKFKDGNTDWTFPTVKDQSQVLISHAKSSKGNPIARWHICQGAINGISFSPDGAYLATVGRDGYLRVFDFTKEQLIFGGKSYYGALLCCSWSADGKYLLSGGEDDLVQVWSMDDRKIVAWGEGHNSWVSAVSFDPCWSQPNSDETEENVMYRFGSVGQDTQLLLWDLALDEIAVPLRHPSGGSPTFSSGSPSAHWDNACPPTGVLQPSPRMRDVPKLSPLVAHRVHVDPLSGLEFTSESIVTICREGLIKIWARPIHSENNQQPDSSEQVIGSATAKDKMLTSSNKAE

SEQ ID NO: 63329 - protein, 291 aa, Zea Mays
MAVPLPPPPPPSRRCALPRDACAFVPVMLAPTPASSAPATPRAQPPPRDARPSSQMPAPVSSTATPLALPRLPDAGPRILGPDAAAIPRCRPPYPRPRARSPELRRAPALAPDTMLCPTLNLATTPSTTPPSFLATTPSLDGRRDWWHLPDLGARLILAPNAAPPPIRAASSDGSRDNAPSPSPEPRRLTFQGCRSAILTSSSLAVARPPDRRLRPRDPPDSPTSPSTAASITHLHADEKARPPLSPRLPTTRLLNKDLSKHPVDGFSAGLVDDSNVFEWQVTIIGPPDTL

SEQ ID NO: 63330 - protein, 272 aa, Zea Mays
MVPTTRNLLLHHDVDGKSSRGRPCYHPAGHQYYVGIAAQLEASAASAAWQQDHQSKPSRSPRLLGMADDDEQPDAAAGPSTSSASPGGAGAGNGRGGDWLQLGLAAAAASASSSGDNSTMDPDPPAPTELELSAYDKRNACRMRRPPLFPLPLRSYHPPYGYGRYRPAAAAASRSMPFMPPSRCSSSDAIIRVISPPRRRTEAPRLWLTLQAAPNQSREPVLPQIAKSYLRIKDSNMTVEVVMKYLAEKLGVARSRSRSRSHQGRPWACAGW

SEQ ID NO: 63331 - protein, 389 aa, Zea Mays
MGCITQLQPKQLTDCRGPGRPGRERRAGAASTTPVRLPLSLHSPLSPSACARVAASVPVRPPPFPSPIPATPHPAPGARARSGPRVYSPPPAPLLPNRRRRGCRHSGCFRSRSRGGRRQAMARRVRPSHLVLALAAAYLLLISLKFRRVLDLAATDLADDPAAAAAAAFSSPSSADHLPPPGSASATSSSSSPPFPVRPFWHRYDRVSLPDLASRNRSALDRMADDAWALGLTAWEDAAAFAGDPWALLAAATSRASDAAKCPSAVSQRARGRVVFLPCGLAAGSSITVVGTPRASHREYVPQLARMRQGDGTVMVSQFMVELQGLRAVDGEDPPRILHLNPRLRGDWSQHPILEHNTCYRMQWGAAQRCDGTPPDDNDDKGPLLLVAS

SEQ ID NO: 63332 - protein, 229 aa, Zea Mays
MLSWRNCIQCVVQVTLVAQGDVPLSVVMTVCSTLAAVFLTPLLTKILAGAYIPVDAVKLSLSTLQVVVAPILLGSLIQTAFPSVAQFLSPFAPLMAVLASSLLASSVFSENFVRLRSTIADASPVNGMFFGDVGTVIFSVFLLHFAGFFVGYAAAAIGGFKEKQRRAISIEVGMQNSSLGVVLATAHFSSPLVALPPAVSAVVMNMMGSTLGLVWQYTSTSVSENETSA

SEQ ID NO: 63333 - protein, 133 aa, Zea Mays
MSPTINTCRGAEEALRVAARGAPYSGTTSPATTSGLSVRWPGRHRGAGSNRRSCGSCPASSGCSSIGGRGSPAPSSPHRWPSSATRSWCPRHRTSRCVPWVCSLEQCNIIWFFGWFRTRYIENAQLLLVFAFV

SEQ ID NO: 63334 - protein, 1463 aa, Zea Mays
MANTRSGGGGDAPPPPSSPPAAASATATRKLADGRETRNTAAASAHTPNLRRSTRENKGKHKSRLADTPPLHRSAKTPTKDATAIATPKSTPLPNNPKDSTKKPSRVRNTSVSPSPSKQEPNETSTPASTKRKTQDDALTASTPSKKQKRLLHAKSYIALFNIGEESVLATLREDEEKASEVQPEGDGAVLVHEESNAPEQPNQEASNVVASEVLGGHSSDLHEIEVILEGDGLKIGSHQSDVVLERCILTETRSLNKAVESIPMLETGEQATGGSNQKPLLELPNSACSTAHHEEASKSVEDGNSIGIQGACTSRNTEAIQCDETWYDDNICVVCRSREISDILKSCGGKGCKRHYHLSCMDPSLDVSLGIWLCIMCMKKRIQFGVYSVSEGIESLWDVKEGVVNSKQYFVKYKNLAHVHNQWVSESDIVDSTPQGSDLISKVSKKIHKEKTIRWKQEWAEPHRLLKRRLLMPQKEAEVFFNSLGDKFVYCNVEWLVKWKDLGYEHATWELESSSFLCTPEAEELKRSYEDRFKTARKASDPSKVDKAKGGIFQQLERLPDGCPPGLDDDHLRSLNQLREFWHNSCGAIFIDDQERVIKTILFVASILPHICQPLLIVSTTTTLSLWETKFNRLAASINVVVYNGEKDVRKSIQDLEFYQDGSVMLQVLLSHPDAILEDIEVIERINWEAVIVDDCQNSRVSKWLEQLRRLPTNFRMVLLSSSLKESIAEHISLLSFLNPEENGTLSVSNGVSFDTAGTLVVLKEKLARYVAFERKTDSSKLLEYWVPARLSPVQLEMYCYILLSNSPALRSHSKTDSVGALRNILISLRKCCDHPYLVDQSLQSTLTKDHPVTDILDIGVRSCGKLLLLDRMLQQIRIQGLRVLILSQSGGESGKPMGDILDDFVRQRFGYESYERVERGLLLQKKQTAMNMFNDKTKGRFIFLIDSRACGPSIKLSSVDAIIIYCSDWNPMNDLRALQRVSMESQSEPVPIFRLYSSFTVEEKALILAKHDHILDSNIVNITPSLSHCLLSWGASFLFNRLEELQQHSYSNVSGDELFMDNVDLEFLTKLLSKVELRTESGNTAISQAYLCGSFYSRAIVVAGEREGIPSVDGDLPKFWAYWLSLLNGRSPQWQYISEPVQRSRRKINNMEQQLKNTDKQLKITTEETDEARVKRRRIGEIMDSSAIDSPGKNKDTILPGNNTPPSSHQISVEDTWQELERSNLHATQKGLHVQLKPEISKLYKLLQLPEPSSDDLRSTDHVEENTVGSQIQGGTSKHLGDAAMEVETGNRNTALADSPHFDKPALTAPSRQATLLVSRETEMLSNLVDQCAQQSLVSAQPLQDESEQADLSSAASTQPLQSERQQLISVSNNLLERAQLDQSQPNYQTDAAPGCAQSTELFPVTSMMFNHAPIDSEPLKNELHKLRLHMDTLNKVHEMKVSYFWSLFLPLYMLFQYHNV

SEQ ID NO: 63335 - protein, 253 aa, Zea Mays
MAAAVPNGHTAAAGDDDAPPAASSSLVFLGTGCSSAVPNARCLIQPPDPPCPVCSQSLSVPPELNPNYRCNTSLLIDYCQDERAHKYIIIDVGKTFREQVLRWFVRHKIPCVDSILLTHEHADAILGLDDVRVVQPFSPTNDIDPTPIYLSQFAMDSICQKFPYLVKKKLKEGEEVRRVAQLEWKIIESDIQKPFTTSGLEFVPLPVIHGEDYICLGFLFGRKSKVAYISDVSRFPPSTEYVRSDRSVHRGDW

SEQ ID NO: 63336 - protein, 107 aa, Zea Mays
MGQGKLEPGYSIHEKTIAHWEWRDDESDTYPPGKGLPKRGGVLSGGADLFMQLRIHGNGRHARFTRNICRVVRDLELSKSIRIAVISPESGDLISDLQPKSECEPHE

SEQ ID NO: 63337 - protein, 673 aa, Zea Mays
MAEAGVARGSGSAGDALFRELWHACAGPLVTVPRQGELVYYFPQGHMEQLEASTDQQLDQHLPLFNLPHKILCKVVNVELRAETDSDEVYAQIMLQPQTEQSEPTSPDPEPPEPERCNIHSFCKTLTASDTSTHGGFSVLRRHAEECLPQLDMTQNPPWQELVAKDLHGNEWHFRHIFRGQPRRHLLTTGWSVFVSSKRLVAGDAFIFLRGENGELRVGVRRLMRQLNNMPSSVISSHSMHLGVLATASHAISTGTLFSVFYKPRTSRSEFVVSVNKYLEAKNHKMSVGMRFKMRFEGDESPERRFSGTIIGMGCMPANSTSPWANSEWRSLKVQWDEPSAILRPDRVSPWEVEPLDRTNPQPPQPPLRNKRARPPASPSIAPELAPVFGFWKSPAEPAQAFSFSGLQRTQELYHSSPSSMFSSSLNVGFNPKYEGPTPNTNHLYWTMRETRTESYSASINKAPTEKKQESTTSGCRLFGIEIGSSAVSPVVTVASVGHDPPPPALSVDAESDQLSQPSHANKATDAPAASSDRSPNETESRQARSCTKVIMQGVAVGRAVDLTRLDGYDDLRRKLEEMFDIPGELSASLKKWKVIYTDDEDDMMLVGDDPWRMVKRIYIYSYEEAKSLTPKAKLPAIGGDTGVKPDPSKLPPESDVPQSDSDNSAPVAADKD

SEQ ID NO: 63338 - protein, 799 aa, Zea Mays
MASPDDPVLSACKDLVDRVMAVLLSQQDQAFETNGLPKAKSAVKIVEDTFRKMQDPTNTVAVSRSHELGDSVTCKKKPDDSAQAVKVRCPCGDSKPNDSMIKCIDPQCNIWQHVGCVVIPDTEKSADNISPELPSCFYCEVCRLSRADPFWVTVNHLLLPILIGPSTVAADGSYTVQYTAKSFQLSRANREILQQAECNIQVWCILLSDKVPFRMHWPLHSDMQVNGIYVRVVNRQPTQKLGANGRDDGPLLTDYLKEGPNKISLSRNDTRTFCLGIRIAKRRSLEQVLNLVPKEQDGENFDDALARVRRCVGGGAEANNADSDSDIEVVADFVSVNLRCPMTASRIQIAGRFKSCAHMGCFDLEAFIEINQRSRKWQCPICLKNYSLENIIIDPYFNRITSLIKSCGDDTSEIDVKPDGSWRVKGRPKLKDLTQWHLPDGTLSLSTDTAAKPGMCIVKHEVKEEPLSEEVGCHLKLGLRKKSNGQWEISKRVDADLVPSSGNDHDHSGHDENKNCITHSSNIDDTNIADEGYNLEPATNGYPMTHVHDLDSSSADENGPPASTGQDIVVLSDSDDDAIMVLSPGAVNCGSMHNTGNLFPPNTPENLGVCSGETGGCPKETSFLALKEDFGDPGLSFWESHGSPRDASTSQIPDASTKAVDNPGEVDNYPANDQSKQGQVSGADFGVAANPVPLEDGHDSALQPCSMSERDSAMGLASLGADTQSCVDVHSDNWTSVSISGRDEVLTAAKIASRKRSNPGDRIEDLDASLVGSPNQDECSGGRCSVRPRLILEISSDSD

SEQ ID NO: 63339 - protein, 568 aa, Zea Mays
MDFVRQDALLLLENALEGSGGGGAAAAYQEAFRIIMRGVSDKSFIVRAAAARCLKAFANIGGPALGMADFDSSMSYCVKGLEDSVSSVRDSFAEALGAILALAVNPDAQVKKGGKKQTASAKKIEDGVQKHLIVPFVKANGANAKELRIGLTLSWVFFLHMIHMKYGTPDSELQNYAIQTMEILQGNDSLDPHALACVLYVLRVGVADQMTELTQRDFLLFLGRKLESLNYTAATRVATLRILCYLLRSVGEVPAEFKDVLDNTVVAALSHSSAHVRVEAALTLRALAEVDPTCVGGLVSYGLTTLQALRETVSFDKGKSLNLELDSLHGQATVLAALVAISPKLLLGYPARLPKSVLELSKKMLNGFSRNPVAAIAEREAGWLLLASLLASMPKEELEDQVFDVLLLWAGPFTGNPESYLRHIQDWASELRVLSVAVEALTAFIRSFVYPSITTTDCGILLNPVLAYLGGALSLISSLRSKQVPNVRSALDLLTTRTLMAYWSLSNPVVYKTEHQQILQLCSSPFRRTVSHYIKKVKQGLKIDPEQGLPYRGLKLSNLRRSIIHSSI

SEQ ID NO: 63340 - protein, 1521 aa, Zea Mays
MKMCMPLLSPASGVIHCMMSEGQALQAGDLIARLDLDDPSAVKRAEPFDGMFPLMDLPVAASSQVHKRYAASLNAARMVLAGYEHNINEVVQDLVCCLDNPELPFLQWDELMSVLATRLPRNLKSELEDKYKEYKLNFYHGKNKDFPSKLLRDIVEENLAYGSEKEKATNERLVEPLMNLLKSYEGGRESHAHFVVKSLFEEYLTVEELFSDGIQSDVIETLRHQHSKDLQKVVDIVLSHQGVRNKAKLVTALMEKLVYPNPGAYRDLLVRFSSLNHKRYYKLALKASELLEQTKLSELCSSIARSLSDLGMHKGEMTIKDSMEDLVSAPLPVEDALISLFDYSDPTVQQKVIVTYISRLYQPHLVKDSIQMKFKESGAIVFWEFSEGHVDTRNGQGAILGGKRWGAMVVLRSLESASTAIMAALKDSVQYNNSEVNTMHIVLLNAETESNISGTSDDQAQHRMEKLTKILKDSSVASDLQAAGLKVISCIVQRDAGRMPMRHTFLWFDEKNCYEEEHILRHVEPPLSALLELGKLKVKGYNEMKYTPSRDRQWHIYTLRNTENPKMLHRVFFRTIVRQPNAGNKFTSAQVSDTGLGCPEESLSFTSNSILRSLMTAIEELELHAIRTGHSHMFLCILKEQKLLDLVPFSGSTIVDVGQDEATACSLLRSMALKIHELVGARMHHLSVCQWEVKLKLDCDGPASGTWRVVTTNVTSHTCTIDIYREVEDTESQKLLYHSATSSAGPMHGVALNNPYQPLSVIDLKRCSARNNRTTYCYDFPLAFETALQKSWQSNCSSVPEGSENSKSYVKSTELVFAEKHGSWGTPIIPMERPAGLNDIGMVAWILEMSTPEFPNGRQIIVVANDITFRAGSFGPREDAFFEAVTNLACERKLPLIYLAANSGARIGIADEVKSCFRVGWSDERSPERGFQYIYLTEEDYARISSSVIAHKLQLDNGEIRWIIDSVVGKEDGLGVENIHGSAAIASAYSRAYEETFTLTFVTGRTVGIGAYLARLGIRCIQRLDQPIILTGFSALNKLLGREVYSSHMQLGGPKIMATNGVVHLTVSDDLEGVSNILRWLSYVPANIGGPLPITKPLDPPDRPVAYIPENTCDPRAAIRGVDDSQGKWLGGMFDKDSFVETFEGWAKTVVTGRAKLGGIPVGVIAVETQTMMQLIPADPGQLDSHERSVPRAGQVWFPDSATKTAQALLDFNREGLPLFILANWRGFSGGQRDLFEGILQAGSAIVENLRTYNQPAFVYIPMAGELRGGAWVVIDSKINPDRIECYAERTAKGNVLEPQGLIEIKFRSEELQDCMGRLDPELINLKAKLQDAKHGNGSLPDIESLQKSIEARTKQLLPLYTQIAVRFAELHDTSLRMAAKGVIKKVVDWEESRSFFYKRLRRRISEDLLAKEIRRIIGDNFTHQSAMELINEWYLASQATTGSTAGWDDDDAFVAWKDSPENYKGYIQELRAQKVSQSLSDLADSSSDLQAFSQGLSTLLDKMDPSQRVKFVQEVKKVLG

SEQ ID NO: 63341 - protein, 234 aa, Zea Mays
MHKPTPPSTSRLPPTHRDHRPAAATQPTKHKAPRDKTTRLPEKREKTGERNSLKILPVGHFYYQHSSSKSSLPPHLTISTPNKGKASDRQTHPIAPPLSPLLPTRPNVAAPRAPRLHRPLRRGRGRAADPDPDLLLLFVLLAGPPSHPSPRPAGLRVPRPRPGLLRGRRRHALPRPAAGGRGRVRSWAHVREGEHGWRALPQEGGHQDVLQLRGPLPGAREDVQLLHRWSKWSA

SEQ ID NO: 63342 - protein, 87 aa, Zea Mays
MIPEKTQSRRQVDPCPQAIGGGGSFPLQTAGPRASTAGLWMRCPKNDVLPSPTFYGGHPAALISSENGRLGAKSGSFPDQFFLTSSG

SEQ ID NO: 63343 - protein, 92 aa, Zea Mays
MFHETQQKKFINIMKALYFRLHKTSMTEKYSFFAHFPHQTLEDRPQTQKASKHDYSSVASPMVTSVFGLNGVTFVDNTSANNSTPNLVYLCT

SEQ ID NO: 63344 - protein, 673 aa, Zea Mays
MVRGSRPLGQTISKKFSDMRYSNISWPFLLLLCFVSMADAEYMKYKDPKQPINSRIRDLIGRMTLAEKIGQMTQIERQVASANVMKQYFIGSILSGGGSVPSPQASPAIWVNMVNEFQKGALSTRLGIPLIYGIDAVHGNNNVYNATLFPHNIGLGATRDPGLIKRIGEATALEVRATGIQYTFAPCIAVCRDPRWGRCYESYSEDHKVVQQMTDIILGLQGEIPVNHTKGVPYVAGKDKVAACAKHYVGDGGTHNGINENNTIIDEHGLLSIHMPPYYDSIIKGVATVMVSYSSLNGVKMHANHDLVTGYLKSKLHFRGFVISDWLGVDRITSPPGANYTYSVQAGINAGIDMVMVPYNYTDYINDLTSLVHKGVINISRIDDAVKRILRVKFTMGLFENPLADLSFAEQLGKKEHRELAREAVRKSLVLLKNGNSPDQQFLPLPKRARSILVAGSHASNLGYQCGGWSIQWMGDSGNITTGTTILDAIKSTVADSTSVVYSENPDDSFMKHNDFSFAIVVVGEPPYAETVGDSTDLTMLDPGPDTIRTVCAAVKCAVVIISGRPIVIEPYVPLVEALVAAWLPGTEGQGVADVLFGDYGFTGKLPHTWFKSVDQLPMNVGDLQYDPLYPFGFGLMINSSLPGFSGVDNLGYRKQRVLFAVLCSLLSLVLIS

SEQ ID NO: 63345 - protein, 230 aa, Zea Mays
MAAAGTLPSAADFSRDYDGACLQMRMSYSPAAHFFLFLVQWTDCSLAGALGLLRILIYKVYVDGSTTMSTHERKASIREFYAVIFPSLMQLPKGISDVDDRRQKAACTERYRRRDEDEGKRPVSEADIEREEECGICMEMNGKVVLPSCSHAMCIKCYRQWRSRSQSCPFCRDSLKRVNSGDLWMLTDCRDVVDMATVTRENIRRLFMYVEKLPLVAPDNIFYAYDSHVK

SEQ ID NO: 63346 - protein, 57 aa, Zea Mays
MKARRNISPFMAARFQQWRRKLPISLFFLAAAVGLLMAFSNIGSKLRIQRHGDSYSV

SEQ ID NO: 63347 - protein, 57 aa, Zea Mays
MQGCWWLKDVRSEAGHALPMQWLCQEDEGRGEGDDEPLARLGQQQRGTVLVQSGAKP

SEQ ID NO: 63348 - protein, 259 aa, Zea Mays
MVAHAKSSKSNPVARWHICQGSINAISFSPDGAYLATVGRDGYLRVFDFSKEQLIFGGRSYYGALLCCTWSSDGKYLLTGGEDDLVQVSGVAFDSYWSPPSSDGNGENVYRFGSVGQDTQLLLWDLALDEIVVPLRHPSSASPTFSSGSPSTHWDNACPPTGVLQPSPRMRDVPKLSPLVAHRVHADPLSGMVFTSESILTICREGLIKIWVRPEQSENNQQSNSSEFALGPASKDRAITSSNKASSSSFKKLPPVLVT

SEQ ID NO: 63349 - protein, 292 aa, Zea Mays
MQRAVNSSYPTGSGNAFQVGGATETVVEELVSPLVANRVQEINMQGSYASLTRETTETSMHTTHEYDPTHITEKSTGTVMEERPDPPILANSVHEQMQRVQPANGAQSSNVGKINQMEQSFILSGENEKPFTYIYSMLIDWGRQQDTKAYIQGKIKGLITSVKKFQYKQRTKYELYVYIDDGSFISEAFIDSDIVNNMLGLSPGEVTAALAGELEFASPSEVKETLKGFQKFLVKFEGMMLIELNKNSPVPVVRELNEGCSSSTAWLLLGRLKTISSQKKTIQTQDIMDTTP

SEQ ID NO: 63350 - protein, 377 aa, Zea Mays
MVSRGCLAKCLTVHKRYPFGKVLTMDLSQALTSSSDDETRALGTLLDMFSSSFSLDDIADAYIKANGDVNKAGDFLYDLQHSLPHTKDVESSVEANLSHTDKAVEENCMDNSSQPRTLLRTEQAVEENHFENSDHTKMPENLHKSSAAFGTVSSMLRKESIRATTTASRASKKGKPLRVELPEYMRDDFKVTSDESDSAPRRETLNNRDVEEFLFCMLGEGFKLSKELIHEVLGSCGYDIKKAADAFREGNQKEVDYLIQEGKRYYQMARLADEKSAREIIKPRETESKNEFCLDLRKQDAGNVSNLLRLHLKQLANIPSFDYLRVIIGIDDSSFKMGQRRRKVMKYVEKNSLQWTEEEPRSGNILIRINQVENRQG

SEQ ID NO: 63351 - protein, 781 aa, Zea Mays
MMVNLTLRSRSPAVRYRPSYRTTTERAASRLQFSHSRYSPFCLFFSRQVNNSGSSPADVTLLFTWANSVGGKSELTGNHVNSKMTEHDGVRGVLLHHRTAGGQPPVTFAIASRETDGVRVSVCPSFTIASGGPSSSGEPTAAAMWDEIKKHGAFGHAGAGNGNAARAAASKAGSSVGAAVAASTAVPAGATRVVSFSLAWACPEVKFPAGSTYYRRYTRFYGTDADAAAEHLAHDALLEHMNWESQIEEWQKPILHDQRLPEWYPVALFNELYYLNAGGTIWTDGQAPKRAGFASSLTATEPFSIDTLLPVAAGGSAVDGVVRAVASATERSHSAAAFGAALLRGGEDNVGQFLYLEGMEYNMYNTYDVHFYASFALLSLFPRLELSLQRDFARAVLLHDPRPRRTLDGRTVARKVLGAVPHDVGLNDPWVELNAYMLHDAARWKDLNPKFVLQVYRDAVATGDAAFAEAVWPAVYVAMAYMDQFDRDGDGMVENEGVPDQTYDMWSVSGVSAYTGGVWVAALQAAAGMARVVGDRPAEAYFRARRDRAARVYDAELWTGAYFRYDNSGGGGASESIMADQLAGQWYARACGLEPVVEDAKARSALATVLDYNVMRVKGGAIGAVNGMRPDGAVDASSTQSKEVWPGVTYAVAAAMVHEGMTEAAFRTAKGAHDAAWGNDGFGYAFQTPEAWTEDGGYRSLHYMRPLGIWAMQWALSPPELHRDLRTPEARSSEEPSPADAALGQAQFDKVASMLRLPEEQQPKGYLWAIYNLVRQIVLPA

SEQ ID NO: 63352 - protein, 493 aa, Zea Mays
MAPFGDGGVGCGDGGEALRGWDPLRSGSAPPTMEGAAAAAAAAERRVFGGGGDGASFFSGIDGLMFGARMDEVSRCRGAAGAQEHFGNSTSLSVGPSGQLFNGAGDWDEWQFGPSTVHSGGAMANYAFDMNLLWTDMNPDNAEYHRNIQNHFMSNIENMNAYGNRDLDASSMFDSDISDALSGLRLSNNSVMDQRNNREELADEILERQRDFSKTVDETRSSLVGNVFHAPRSDVHPSRIYGDGILRRQTSACALDGSNVSRINRHHIKGVDRPSLADQLAIMQSGNFPRGTNLSRNVSVTNMSNPMSNRYNSNTDLDLARSRMTFFKEILAQQYLQEDNLSYNDSRIYHDEPCFPCSRMQRSGSHFYSNSRCILSHGDRQSRLLSLNRKAMGRNIGSHAYHDNTLSNYLDVLSLDNADRNGADSVELIDLVGHVKEISMDQYGSRFIQQKLEIASLDDREKIFPEILSNAIALTTDVFGNYVIQKVYLSILL

SEQ ID NO: 63353 - protein, 900 aa, Zea Mays
MAPSSPSSARPTRASGRKRSAMAEEIHQNQEEEEEVVAASTAKRRRKAASSGKKPKPTPKQAKPAVAGMKKKGETEKTEPVVDDVCAEEPDEEELAMGEEEAEAEEQAMQEVVAAVAAGSPGKKRVGRRSAAASGDHVPEFIGSPVAAAEAHSNWPKRYERSTAANKPEEDDELKARCHYRSAKAGENEADYIGRITEFFEGTDRCHYFTCRWFFRAEDTVINSLVSINVDGHKHDPRRVFLSEEKNDNVLDCIISKVKIVHVDPNMDPKAKAQLIEHCDLYYDMSYSVAYSTFANISSENGQSGSETASGISSDDAGLETSSNMPERTATLLDLYSGCGGMSTGLCLGAALSGLKLETRWAVDLNSFACQSLKYNHPQTEVRNEKADEFLALLKEWAVLCEKYVHQDVDSNLAGSEDQEDADTLDKDEFVVQKLIGIRYDGTGRKKGVYFKVQWEGYGPEEDTWEPIDNLSDCPLKIREFVQEGRKRKILPLPGDVDVICGGPPCQGISGFNRFRNRDEPLKDEKNKQMVTFMDIVAYLKPKYVLMENVVDILKFADGYLGKYALSCLVAMKYQARLGMMVAGCYGLPQFRMRVFLWGALSSMVLPKYPLPTYDVVVRGGAPNAFSQCMVAYDETQRPSLKKALLLGDAFSDLPKVENHQPNDVMEYGGSPKTEFQRYIRLGRKDMLDWSFGEEAGPDEGKLLDHQPLRLNNDDYERVKQIPVKKGANFRDLKGVKVGANNVVEWDPEVERVYLSSGKPLVPDYAMSFIKGKSLKPFGRLWWDETVPTVVTRAEPHNQVILHPTQARVLTIRENARLQGFPDYYRLFGPIKEKYIQVGNAVAVPVARALGYCLGQAYLGESDGSQPLYQLPASFTSVGRTAVQANAVSVGTPAGEVVEQ

SEQ ID NO: 63354 - protein, 101 aa, Zea Mays
MDRMVLSLIHCFVLYVDQPITMPLTVTLLFKVQSIHMASIKLQKKLFVVAKRISNKILVELKFLHQIIFGRLQMFYEHNDNKMSYPAMAQLLSNILYYKRN

SEQ ID NO: 63355 - protein, 365 aa, Zea Mays
MFVYFIQGKAEGVLFEDAGDGYAFTQGDYLLTYYIAELHSSVVTVKILKSEGSWKRPKRNLKINILLGGGAMISTDGVDGEVIHLTMPSESVVSSLVATSEFEHKKRMEMIQPIPDIEEPSGQEGAELSKIPVDLKSGDWFLKIVPWIGGRIISMAHIPSDSQWLHSRIEINGYEEYSGAEYRSAGCTEEYKVIRRHLEQSGEEESICMEGDIGGGLVLQRQISILKDNPKIVQIDSSIQARSVGAGSGGFSRLVCLRVHPTFTLLHPTEVVVAFTAINGSKQEISPEAGEITFEGDLKPNGEWMLVDKCVGLSLVNRFNPREVSKCFVHWGTGDVNMELWSEERPVSNETPLRICHQYEVQQTT

SEQ ID NO: 63356 - protein, 90 aa, Zea Mays
MIVFQLEKTFKTTFSSFVLHMGLVSRHLKEEGNGGVKFGQYIYTSWSIGINVLNLLKFQIILVRAAIKVKALVIICFTSSGQAARYILHK

SEQ ID NO: 63357 - protein, 148 aa, Zea Mays
MPRKKIQKRPEIKPAEPSKSNLVLKSDVSKVVDHEVSTTPMRVQEQLLDDETKALQVELTSLLDAVQETETKMIEMSALNHLMSTHVLQQAQQIQYLYDQAVEATNNVERGNKELSQAIQRNSSSRTFLLLFFFVLTFSILFLDWYNN

SEQ ID NO: 63358 - protein, 200 aa, Zea Mays
MNTKGEILLEQSGVVRSNCIDCLDRTNVTQSFLARKSLDSQLQLMGALLSSESISLSDNIHDTFKKLWVEHGDELSLEYAGSYALKGDLVRYGRQTLPGLIKDGMSALSRYYLNNFHDGVRQDALDLISGYYTVSQGSSSPFHNVSAGGFSNHSWWDYRDNFHSQSSWTERAALDLLHYLCGLNSRSSSLGESQWETVLL

SEQ ID NO: 63359 - protein, 378 aa, Zea Mays
MSIGPVLDNSLQCGPDAKFSAQLFDLRRLRTLSFYSCFPASNPTAIPTGSWEKLAGTLETLEFRTNPGLNGAIPASLGRLASLQSLVLVENNLTGPVPAELGALSRLRRLVLSGNGLSGPIPVTLGGLTGLLKMDLSSNLLQGSIPPELAGLRSLTLLDLRNNSLTGGLPQFVQGMASLQDLLLSNNPLGGGLPQSGWGALAGLATLDLSNVGLVGAIPGSMAALTGLRFLALDHNRLTGAVPPELARLPSIGALYLNGNNLTGTLEFSAGFYQRMGRRFASWDNPGLCYNVAAVDAAHAPSGVVVCKDLQEPSVGGGARDGDGDGDAEEDGTKPEAGSSLVASSSSGMPVGSVGGLRYLVVVRGMAAAVLGLVSLLQ

SEQ ID NO: 63360 - protein, 1554 aa, Zea Mays
MGFDPLEWYCQPVKDGVWSHVVENAFGAYTPCGTDTLVVCISYLALFGVCFYRIWRTTRDYTVQRYKLRSPYYNYLLGLLVVYCIAEPLYRIITGTSIMNLDGQPGLAPFEIVSLIIESVAWCCMLVMILLETRIYINEFRWYIRFVVIYMMVGEAAMFNLVLSVRQYYSSSSIFYLYCSEIVCQFLFGILMVVYLPSLDPYPGYTPIRNEVLVDNTDYEPLPGGEQICPERHANIFARIFFSWMTPLMQQGFRRPITDKDIWKLDSWDETETLYSQFQKRWNDELQKPNPWLLRALHSSLWGRFWLGGFFKIGNDASQFVGPLVLNLLLESMQKGDPSWSGYIYAFSIFAGVSLGVLAEAQYFQNVMRVGFRLRSTLIAAVFRKSLRLTNDSRRKFASGRITNLISTDAESLQQVCQQLHSLWSAPFRIVISMVLLYAQLGPAALVGALMLVLLFPIQTVIISKMQKLTKEGLQRTDKRISLMNEVLAAMDTVKCYAWEQSFQSKVQDIRDDELSWFRRAQLLAALNSFILNSIPVVVTVVSFGVYSLLGGDLTPAKAFTSLSLFAVLRFPLFMLPNLITQVVNCKVSLKRLEDLLLAEERLLLPNPPIDPDLPAISIKNGYFSWESEAQRPTLSNVNLDVPVGSLVAIVGSTGEGKTSLISAMLGEIPPVSGSGTSVVIRGSVAYVPQVSWIFNATVRDNILFGSPFQPPRYEKAIDATSLRHDLDLLPGGDLTEIGERGVNISGGQKQRVSMARAVYSDSDVYIFDDPLSALDAHVGRQVFDKCIKGELQHKTRVLVTNQLHFLPYVDKILLIHDGVIKEEGTFDELSNSGELFKKLMENAGKMEEQVEEDESKPKDVAKQTVNGDVTIADEGSQKSQDSSSKTKPGKSVLIKQEERETGVVSARVLSRYKNALGGIWVVSILFFCYALTEVLRISSSTWLSIWTDEGSLKIHGSGYYNLIYGILSFGQVLVTLSNSYWLIISSLRAAKRLHDAMLRSILRAPMATSREVKRLDSITRSPVYAQFSEALNGLSTIRAYKAYDRMANINGRSMDNNIRFTLVNMGANRWLAIRLETLGGIMIWFTATFAVMQNQRAENQKAFASTMGLLLTYTLNITNLLTAVLRLASLAENSLNAVERVGTYIELPSEAPPVIEDHRPPPGWPSSGVIKFEDVVLRYRPELPPVLHGISFVINGSEKVGIVGRTGAGKSSMLNALFRIVELERGRILIDDCDTSKFGIWDLRKVLGIIPQAPVLFSGSVRFNLDPFNEHNDADLWEALERAHLKDVIRRNSLGLDAEVSEAGENFSVGQRQLLSLARALLRRAKILVLDEATAAVDVRTDALIQKTIREEFKSCTMLIIAHRLNTVIDCDRLLILSSGQVLEFDSPENLLSNEGSAFSKMVQSTGPSNAEYLKSLVFASGEERSRREEIKLQDIQRRWVASNRWAEAAQFALARSLTSSHSDLLALEAAEGNNILRRTKDAVITLQSVLEGKHNTEIDESLTQYQVPADRWWSSLYKVIEGLATMSRLGRNRLQQPSYNFENNNSIDWDQM

SEQ ID NO: 63361 - protein, 207 aa, Zea Mays
MLFSALPRLVQMITLGMSENACRLAASNWTGEGSFLFTSSTALYDCSDNSMCNEDCLSVPIGRSPRTDILLKVENVVLEAGGCVLRLAGLYKIDRGAHVFWLRKGTLDTRPDHIINQIHYEDAASLAVAIMKKGLRSRIFLGCDNKPLSRQEIMDAVNNSGKFDTKFGGFTGTDGPLGKRMENSKTRAEIGWEPKYPSFTEFLGISS

SEQ ID NO: 63362 - protein, 164 aa, Zea Mays
MDSGGGGGSGAHKAASGSAPSPAPNPTAMLSALMSKRAKLQEELRSIERQVYDMETTYLQETNQFGSVLKGFESFLSSSKNTSKLTRGYSPCHPLLLQRLMNIWLDEMMEESMEQVVLRVEAPLRTGKANRRREGALAGETARDYGRRMTQTWTTKMTTNSSIM

SEQ ID NO: 63363 - protein, 625 aa, Zea Mays
MGLCFSKKQQEKRRDVQPSSDAKKSGCRKSGRDTVLVADAKKAPQAKAPALPKKAVARPEEATADKRTVFVVKAAAAAAAAEVAAAAKGRPEDAQAKRAAPEEELRPGAVGRAPVRTSSCTKEELDAILIQCGRLSRSSSSSGKAPSGEHRRYAGSKRSYDFDHERRGGGGDVDECDWGREGAAVARPSPRRRSPERKRSSSHDGRAGSGSGSQSRRISRSPGRRADVVPAPGSSATGERGARQQPGKMVSVPAREKGRAPSPVKAASSGKRYPSPRSNSPARAAASGNENAGVQSTHGPSLSRSTSRKAEQSPFRRNPMAELDENTLGNHHHHNSNGRPLKTAERTKDQISSCRTAKEIADEAVASDTKAAPARMNATHSVSIVAENVTNPRPGSRSSRRSSRDFEHNGNTYASLLLEDIQNQQQQSTSAATVAAAPTFALPACVSKACSILEAVADLNSSSSENKNFELERSVNDKESVNGRYGGKGAVTLVMESEVGVKDDLMEPSMHKYVSVRDIRGETEPQESAGSNSFAGNAWTCSWEPNSVDSADRTWTASQSYNGDEVEQSWQSKQKPSSSKEPSHVGSTSDVQVQRVRGAHRLRGSSSAVNGQSDVRGVSASSSIA

SEQ ID NO: 63364 - protein, 114 aa, Zea Mays
MINEVRELLRPAEMPGFLTDSTVRRFLHARSWSAAQATKAVKETVKWRRQYRPDEIRWDDIPGREHEVKRAYIADYLDKDGRTVVVTVPAIKVIIIKLLATGCTRSMAVRRGKY

SEQ ID NO: 63365 - protein, 1338 aa, Zea Mays
MILLHTRDDDAKQDEVRMMATAESDDDAIWVPPDEAAAAADSMMQDDDDDDDDYHAGTGEEDDESEDDDDATSSICRWRHDSDHQSAAHREERQKAMLRAMNGQLRMLAARFLESAGIDTSSWLDIVISLSWEAALAIKPDVGTAVGNQMDPSSYIKVKCLASGTPRQCEVVKGLVFRKNVAHKHMPTKCHNPRLLLLSGLLGHSHVGFSSFSSIEQEKDHLDKSVCEMMEICRPDVVLVERTVSRDIQELLLKEGVTLVLDMKLNRLQRVARCSGAPIVSFSEVLSKPKLKQCDYFHIEKVTEEHSLITCSAGVGSRPSKTLMFLEGFHKPLGCTILLRGANTQELKKIKQVMNYTVFAAYRLVLETSFFEDQRLILNNKDSSKEEVSVARKAGPSSLGSVQETTDSNALNPLDKGFPNQALLPSEGLVVSAVPESPRRFIDILRYHNIYLPVTSSQEATDHQIQDSIHISPNVGVPIGSVESVDHLSDPQEQASSETNQQMALDGPSVSEKHEQSLENIKTSDTDEVDDVLESQSILILLSSQCITKQVICEQSRLSRIRYYGNFDVSLGRYLQDILQKQNLSCSSCGEPPEAHMYSYTHRNGNLTVLVRHLLPKYRLPGESEGKIWMWTRCLRCERESGISRSSRRVIMSAEAHYLSFGKFLELSFSNHSTARRLSICGHSLNTDCLRFFGLGSKVAMFQYSSVEIYNACKPQPTLEFHNPDMHEWYGQEVLATGVTLFSEVTSALQKLKDQFPVKDLSQLEEMLIKEKAEFMDLLLELYVWDCRLHQLVDCTLAENAIVANGQTAAAAEADGIGERMSSIAPFENRCIKEPEKFIEAGTASALLDDAWNDKHCNDQHNTNCECDGGEEKWIWNPVNESRLAFRQEVEVGCLERFEVVNHYCPSHLSPLHKHRESGEEMGGSPQFTVGPGGSILCVSEDEISSIISRALAVSEERRHLLMDAVAETEPADTTRSKTMDKSYSSLSESSSASLWSSDSEASISSDDLSSYDTSLLLSSSLHPEIAVNGITALKGRYSVICVHSNQFYNLRRKCCPSELAYVASLSRCKRWDAQGGKSKAFFARTMDGRLIIKQIKKTEFESFIKFAPDYFRHVNHSLDTGSQTCLAKILGIYQVKQTRHGKEIKMDLMVMENILFGHNVSRTYDLKGAIFSRYVSDPNDHAGTVYLDQNFVDDMRVSPIYIGGRAKHLLERAIWNDTSFLTSINVMDYSLLVGVDRQKRELVFGIIDYLRQYTWDKQLETMVKASLVVPKNESPTVISPRDYKKRFRKFMSKHFLTVPDEWSTESRPPVAWESCAHAGELPGVKPQHPSPILLACA

SEQ ID NO: 63366 - protein, 1016 aa, Zea Mays
MVKEREEQVAIVRMVLGEGTPEMDIIRALHMAGDDPTKAINILLDLNKAAPPLPPSPSPFPCPSPSPSPGKPAKALVDSTPPCKAPTRPMPTAEKPKSTTSNGGSEEHWWLVGSAEMVGLSTCKGRRITSGDVVTFSFPNATTAVGKSRPSRPALASCSSEIMRFSTPSHGEVGRIPNEWARCLLPLLKENKLKVKGSCKSAPEVLTIMDTVLLSVSIYINSSMFHDQKQSSPKAARFAPYDSTFHPLPALFKLIGLAPFIKAAFTPEDLYSRKRPTETKSSIGSPAAKLTSGRLRLSSDGNEDDHGEETVSDSDLDDIIGISDSCALEERAPPDSLMCDLRSYQKQALHWMLQLEKGSSSQDAATTLHPCWEAYKLEDKRELVLYLNVFSGDATTEFPSTLQLSRGGILADAMGLGKTIMTIALLLSDSSKGCITTQNAAQTPREASGLGESHDAVKKLANPFSFSKHKKPKAPLIGGSNLIICPMTLISQWKAEIEAHTKPGTANIYVHYGQNRPKDASIIGQSDIVLTTYGVVSSEFSIDGSTENGALYSVHWFRVVLDEAHMIKSSKSLISLAAAALTADRRWCLTGTPIQNNLEDLYSLFRFLKVEPWRNWALWNKLVQKPYEEGDERGLKLLQSILKPIMLRRTKNCTDKEGRPILNLPPANIEVKYCVLSEAEKDFYEALFRRSKVKFDQFVEQGRVLHNYASILELLLRLRQCCDHPFLIMSRGDTKEYADLNKLAKRFLRGGNGAVNGDSCIPSRAYIKQVVQELQKDEGECPICLEAFEDAVLTPCAHRLCRECLLSSWRSATAGLCPVCRMSMSKQDLITAPTDNRFQIDVEKNWVESSKISALLQELEALRSSGAKSIVFSQWTAFLDLLQIPLSRNNFSFARLDGTLNLQQREKVIKEFSEDKGILVLLMSLKAGGVGINLTAASNAFVMDPWWNPAVEEQAVMRIHRIGQTKTVSIRRFIVKGTVEERMEAVQARKQRMISGALTDQEVRTARIEELKMLFS

SEQ ID NO: 63367 - protein, 96 aa, Zea Mays
MSEALQKDKEIGEEEEEEEYVLLELDNCLYSDISPGAQFVLSGLDTLTPTLIVGDNLKMVGEYDETIGTCYLFSESESDAVLLRRFCFLRNGIICT

SEQ ID NO: 63368 - protein, 480 aa, Zea Mays
MNVLVYTRVSAVLTNAPIMLNVDCDMFANNPQAALHAMCLLLGFDDEVHSGFVQAPQRFYGGLADDPFGNQMQVIFEKVGHGIAGLQGIFYCGTGCFHRRKVMYGVPPGSGTGATKADSPSYKELQKKFGSSKELIESARSIITSKEAPAAVADLTSRVEVAKQVSACSYETGTSWGQEVGWVYGSMTEDVLTGQRIHAAGWRSALLSPDPPAFLGGAPTGGPASLTQYKRWATGLLEIVLSRHNPFLLSASKRLRFRQCLAYLVIDVWPVRAPFELCYALLGPYCLIANRSFLPKASEPGFVVPLALFLAYNAYNLGEYVDCRLSARAWWNNQRMQRITSSSAWLLAFLTVVLKTVGLSETVFEVTRKEQQQQQGSPDGDGADADPGRFTFDSSPVFVPPAALAMLSVVAVAVGAWRAVTGGGGGPGVGEFVCCAWLLLCFWPFVRGLVGGRGSYGIPWSVRIKAALLVAAFVHLSTRK

SEQ ID NO: 63369 - protein, 165 aa, Zea Mays
MAMSLSRFSQWIWPGSRTRNPRGREPPAGSTALTEGLFPDSPSGFRDPDPGSGAAQRRKGKSRRRGGRVEAKVDGEHGMVIVQSDGDGCLSDSDSDGSDWSIGWLEPLAPDLQSDVDSEGSFAVLVRCYRRGRADRPDRPDGKFPAPGGVAHGHGGVSVCGVPCS

SEQ ID NO: 63370 - protein, 166 aa, Zea Mays
MEQSQGQGGRRRQIPAFGRWNQHSVGDEVPITQYFESAVQASLLARPGHCYHDAGAGEVLLFRSSASPPPHKPPKKVRSTTECHGHHQQVQVEEVGSRRRQQQRRRQEPLPPFVSGDVSRAARPRVVRAAVDEDLYKVPSDMLRKKKGRKHVRSVWMGCVGLTCVA

SEQ ID NO: 63371 - protein, 384 aa, Zea Mays
MYKIGNGKTPSQLHASTAIPLFLSAFPFQWNPVASVPQPRLLPFPPLLLHLHPRAPHAPYSDFPPRKGRQIGVRRRASGFDAFASFAGKVFVDEAIGAEYGEGFETFRMDGPLKVDVDYLNEKLQECFLQRIRHAMKPDEAFGLIFSWDNVIADTDSLKLNAWRQLALEEGKDIPSGAHVRKSIIHGAADHVLRKVLYWAKEEDKMEKLKARLIELYYENLFKLDTPVEGLREWLDAVQTAGIPCAVASPLDRRCMIEALDRMALSKYFKAIVTDEDDMESIANRFLSAAMKLDRKPSKCVVFEDDPRGVTAAHNCTMMAVALIGAHPAYELVQADLAIAKYSELSVINLRRLFANKGISFMDLQKQIIEKSPPKRRLTVDTIF

SEQ ID NO: 63372 - protein, 86 aa, Zea Mays
MAFTMRAVKVPPNSASLEEARHRVFDFFKQACRSIPTVMEIYNLDDVVTPSQLRSTIAKEIRKNQNVTNPKWNPTYVRLIGAWNRS

SEQ ID NO: 63373 - protein, 110 aa, Zea Mays
MAARIGADGKAMARRGRVELRRIEDRVSRQVRFSKRRSGLFKKAFELSLLCDAEVALIVFSPAGKLYEYASTRQKAWCVTYPFKHRNLLQSRDCRRKLQDVMMLMLHKSC

SEQ ID NO: 63374 - protein, 262 aa, Zea Mays
MSGWRVEISGGFAFIYMEDERDAEDAISRLDGIDFGRKGRRIKVEWTKEDRTADRRGNSRRSPTNAKPTKTLFVINFDPINTRIRDLERHFDKYGRVANVRIKKNFAFIQFEAQEDATRALEGANGSHFMDRVISVEYALRDDDEKGERATNGYSPDRRGRERSPGARRSPSPYGRGRERGSPDYGRGKERGSPDYGRGGRSPDNGRGGRPAGGGGGGRGDHARGGGRRRSPDYYDRERREASPGYDRPPSCSPGTGRDARD

SEQ ID NO: 63375 - protein, 280 aa, Zea Mays
MAKETGTNEIVALKKIRMDNEREGAQSGTSKGVDDNKYKGSIYMVFEYMDHDLTGLADRPGMRFIVPQIKCYMKQLLTGLHYCHVNQVLHRDIKGSNLLIDNEGNLKLADFGLARSFSSDHNGNLTNRVITLWYRPPELLLGSTKYNLAVDMWSVGCIFAELLNGKPILPGKNEPEQLTKIFELCGTPDDTIWPGVTKMPWYNNFKPHRPLKIRVKDFFKHFDRHALDLLEKMLTLDPSQRISAKDALDAEYFWTSRAMSAAVNTMRIRAPRWRRLCRRP

SEQ ID NO: 63376 - protein, 609 aa, Zea Mays
MAPPRPPTGPILFLPLVFLFLFTTAAASAAAPEDEKFTEELLLRPLPDRKALAHFHFRSSAPPAASVGRHHHLFPKAISQLVKKYHISELELSFTQGRWNYEQWGGFDPMSTNNAKPPGVELWAVFDLPLSEIDATWKNLTHTLSGLFCASINFLESSTAFSAPRWGFKLNEGNLRYGALPREAVCTENLTPWLKLLPCRDKAGIASLLYRPSIYKGYYHSQKLKLRSSQSLGIILDQTLTVVLQPNNVHGEQLHSNHGQLQPNWSMRHLFNRKLSGKCLVSKSSRVFIEVDKGIADEVNISGSVHSWSNEFFVLSNSPDKLIKGQNHLEMQSSFLYVYDASNYSEEQPLDLGITWKLPLIWTCTPSPFHASRFLMGSGNERGSIALSFMSTNLHKKISGSANDCSIKAVIFQVVPWYVKVYYHSLEIFIDGSRKTVSEVVDKIHVIPSEDKLLPGTLEMLLRFPCSMQSGTLTLDFDKGFLHIDEYPPDANQGFDIPSALVSFPEFSSARSYPEIDPVLGSPLLENFQEDSVVKSYTEVLLVPLTTPDFSMPYNVITFTCTVLALYFGSLLNALRRRIGEEERELKKRGRLAKTGLPFLASCPLLPSS

SEQ ID NO: 63377 - protein, 174 aa, Zea Mays
MVDAEKRLLANALEDVDNQVFILLSDSCVPLHSFDYVYNYLMGTNVSFIDCFKDPGPHGSGRYSIEMYPEIDERDFRKGAQWFAVTRRHALMILADSLYYKKFKLYCKPAEGRNCIADEHYLPTLFNMVDPGGISNWSVTHVDWSEGKWHPRSYSADDVTYDLLKNITVCFMDT

SEQ ID NO: 63378 - protein, 126 aa, Zea Mays
MGRPPSAGAPAFRFLPSEVAEMEARLLQLNNGIPTRAVLQTLADKFSASPERAGKVAIQPKQVWNWFQNRRYSHRAKTPRAASSPPAKMTPSGADHHQHAANASAFRAAQLSSVAAAHHGSSSTGD

SEQ ID NO: 63379 - protein, 112 aa, Zea Mays
MTKKTTRPRQVRRRHRHRRRRRRRLRWSCRSPESKLSRSSRVPPLFQCMLQRRRMTCCPGKRAPSKAHQKKSSRSRSPRTRQRRSAGRRGSAAMTMPPEEPRPTCRGSWLKS

SEQ ID NO: 63380 - protein, 168 aa, Zea Mays
MHAISHSMHRRYLQRKARRDALKESGQSFETSSVVPSIDDDKVLSENSGLEHGLTSTDGLSSVSEIISARSDDFEHQAENDTEIPGEHLHSDQRAYGDDADACTKELENLDIEGEDEGGGDAHFIVDESNEQSWTLRSLSESSIPRYSLCKERDVNLKYEKHKRWSVG

SEQ ID NO: 63381 - protein, 90 aa, Zea Mays
MEAHLPAFKEKIPHLEVVTELVRGQHPNLKGIYKNHNERVVCVRNLPPEEILLQATRLRNSLGRKVVKLRTRHVTKRPSVQGTWTTELKM

SEQ ID NO: 63382 - protein, 497 aa, Zea Mays
MSGFLAVVGKVGTFLLWVLFLVLQTATRIVGSLLASSAEQQDDHHQESAAARRRSPPASPHPELYEPASASLAQLWDPPPLPHLAFAPAADESSSSSSLRRRASAPLPRADEDFVVPSSAYSRPTVGVAHTHSVSAPPLRAIETRAVPSRLVTAGGKRPRLERKYSKIVDQYRSLDEVIEALAQAGLESSNLIIGIDFTKSNEWTGKNCFNGMSLHNISDNPNPYEQAISIIGKTLSAFDEDNLIPCFGFGDASTHDQDVFAFYPDERPCNGFQEALARYREIVPHLRLSGPTSFAPIIDMATTIVEQSGGQYHVLVIIADGQVTRSVDTEFGQLSTQEQMTVDAIVQASQFPLSIILVGVGDGPWDMMKEFDDNIPARSFDNFQFVNFTAIMSKKISQSKKETEFALSALMEIPLQYKATLELGILGRRIGESPERIPLPPPFASYSTVSRAEPSRANSYRSVPSHPREEPAVNSTITASVTSPSAAESRVLEPQR

SEQ ID NO: 63383 - protein, 208 aa, Zea Mays
MAAHAVTPLTICCLRRGVPLNHSRRLLAVAAAAPESPAPTPAPSQLPLPPVPPRKGYFPKRGETVELTCEALAFKGKGVCKVAGSTFVLLCDGALPGERLIARVRRLRRGAFAEAAKLRTLEPHHDAIEAPCPLAADCGGCKTQSLAYAAQIRHKHHQVRDLLVNFGKFDPKRLESSEPDDILKPTVQCDEIFRWSSRLGRRDGCKKS

SEQ ID NO: 63384 - protein, 278 aa, Zea Mays
MQVNNEAPLGCLKPNISQYNSPEQIGGVEGFPENNEKRNDIVAAEKIWEATPNQGLSRPIYRQEFYAWPYIYSDYQIVRQPLPYGFDNQFYQINRDHGFPIENRVQYLPFKMLPQGHPHDAQLQEFQYFVVIDFEATCDKVNNPFPQEIIEFPSVLVNSATGKLEECFQTYVRPTYHQFLTDFCKELTGIQQIQVDRGVPLGEALLMHDKWLEDKGIKNTNFAIVTWSNWDCRIMLESECRFKRIRKPPYFNRTDARVTWLVLALAVMILNIFGSLTG

SEQ ID NO: 63385 - protein, 256 aa, Zea Mays
MDLERPPPASAAEAAGAAACSICLDPVLACVAGRSVAKLQCGHEFHLDCIGSAFNAKGAMQCPNCRKIEKGRWLYASGRHPPADIDMGGWVTSDNYDITSELPFGFQWCPFSGFTQLASMLGVREAEPTYHTTGDHSSAASSSLVCPYLALRGFLHPVNVPSTSNSGAESTSFHRHSTGLEGHVTPDLNNAPVFHATESRNHDSEHRHLSNLPVSGTPEYSMTPFGIGVPRYDSGSQQGFRSYAHHHPLIHRIGAH

SEQ ID NO: 63386 - protein, 474 aa, Zea Mays
MAAALASSPLVHLSTSRLRLPRPRASSSSAPGCSIGVCLGWRLKVGWRALRRCDRLRCFSTDGDGVEEGEKRGEEEASATAAPAPDPAPAETQVGAAEELASERSRSGSFSSSSSSGNPGVSSEPPLLSFSVDNIDTVKLLELLGPEKVDPVDVMAIKEKLFGYTTFWLTKEEPFGDLGEGVLFIGNLRGKREEIFAKLQRQLRELAGEKYNLFMVEEPNSEGDDPRGGPRVSFGLLRKEVSEPGPTTLWQYVISLSLFLLTMFSCVELGIASKISSLPPEIVSYFTDPNSTGPPPDMQLLLPFVESALPVAYGVLAIQLFHEIGHFLAAFPKNVKLGIPFFIPNFTLGTFGAITQFKSILPDRKTMFDISMAGPVAGAALSFSMFFVGLLLSSNPVGASDLVEVPSQLFQGSLLLGLISRATLGYRAMHAATVSIHPLVIAGWCGLTTTAFNMLPVGCLDGGRALQVKIPVKF

SEQ ID NO: 63387 - protein, 537 aa, Zea Mays
MKYVLVTGGVVSGLGKGVTASSIGVVLKACGLRVTTIKIDPYLNTDAGTMSPFEHGEVFVLDDGGEVDLDLGNYERFLDIKLTRDNNITTGKIFQAVINKERRGDYLGKTVQVVPHITDEIQDWIERVAVVPVDGKEGPPDVCVIELGGTIGDKIFSPHNDSGILDAGDIESMPFIEALGQFSYRVGPGNFCLVHVSLVPVLNVVGEQKTKPTQHSVRGLRGLGLAPDVLACRSTEPLEEHVKAKLSQFCHVPDQKAHEAILKVLDLQYDGKVPREPELTKWTKRATKFDKLKTPVKIAMVGKYTGLSDSYLSVIKALLHASVAMERKLVVEWVPSCDLEDSSAKETPEAHKKAWKLLKGADGVLVPGGFGDRGVQGKILAAKYARENNVPYLGICLGMQIAVIEFARSVMKLRGANSTEFDPATTSPCVIFMPEGSKTQMGATMRLGSRRTYFHVSGCKSAKLYGNASSVDERHRHRYEVNPDMVPDFEKAGLQFVGKDESGKRMGSLSFPLTSSSSVHSSILNSSRDQGSHLRFS

SEQ ID NO: 63388 - protein, 669 aa, Zea Mays
MEDFARAVEDGLKLSKRLVLPGGVPPPRPPAGMERTMSSASASGPDPRLLPTAPMAYAVVTDPAAIDTPDVPSYQPYVYGHLDPPALIPLQMKEVDLAVDCALDAAHVTLRARWWLHCITRSRDCDVRLVVPLGEQEQGSILGAEVTVGRRSYNTQVIEVEETLENHAKIESGGLLKPHLFFLTISQVEGGADICATFRWSQKLLYDSGCFSVDIPFHFPYFVNPLPKVFMKREKVQLTANTGFSKEVFLQGTSHPLKEKSRQGDKLFFLHEAIVENWSSKVFNFSYSVYSGDLSGGVFVQPSILCDYDDRDSFCIFLLPGSGNRKVFRKAVVFVVDTSGSMQGKPLENVKHAVSTALSELVQGDYFNIITFNDELHSFSSCLEQVNDKAIASATDWMNANLVAEGGTDIMHPLSEAMALLSSVHDTLPQIYLITDGSVDDEHNICQTTKTEVTNRGSKSPRISTFGLGSYCNHYFLRMLASVGKGHYNAALETASIENQIVKWFRRASSTIVENISIDAMTHLDEFEVDSEYIPDLSANSPLCVSGKYRGKFPDTVKAKGYLADMKEVLIELKVQQLKEVTLDKVLVTQHIDLMTAKAWLSAAKQLERKVIKLSIQNGVPSEYTDMVLLQTNLDNTGTQKVKQKLKGQKGRDEQQIPLHGLKLGFGNN

SEQ ID NO: 63389 - protein, 735 aa, Zea Mays
MGRNGSVKRSASSSAAGAAAGPPSFSVNPADYRLMEEVGYGAHAVVYRAIFLPTEDVVAVKCLDLDQLNNNIDEIQREAQIMSLIDHPNVIRAYCSFVVEHSLWVIMPFMTEGSCLHLMKISYQEGFDEPVIGSILKETLKALEYLHRQGQIHRDVKAGNILIDGAGVVKLGDFGVSACMFDRGDRQRSRNTFVGTPCWMAPEVLQPGTGYNFKADIWSFGITALELAHGHAPFSKYPPMKVLLMTLQNAPPGLDYERDRRFSKSFKEMVAMCLVKDQTKRPTAEKLLKHSFFKNAKPPELTIKNILSGLPPLWDRVKALQLKDAAQLALKKMPSSEQEALSLSEYQRGVSAWNFDIEDLKAQASLIHDDEPPEIKEDDDIPRNIEDLSSRNHLAKSSANECNSSQRAFATTLNSDGNSPTMNEAFDFDISDADTTRRADGYESNTRQNDSLPSTSKRDPESNHWASDGQRQLTSGGNNSSTSERGYGFERDASVQMISDKQRSEMRKTASLSGPLSLPTRASANSLSAPIRSSGGYVDSSGDKSKRSVVEIKGRFSVTSENVDLAKVQEGPLSSLSRKSPEGSLLRKSASTGDYFVNPKLMCNANQLKELCNSSVSSSVLIPHLNNLVQQTMFQQDLIMNLLSNLQQSEKVDGTQPIISSQVRTMENDKVADTVNSVKERSLLVKISELQSRMIILTDELIAAKLKHVQLQQELNALYCREEIVDIRDEDNEET

SEQ ID NO: 63390 - protein, 62 aa, Zea Mays
MPSLVYREQSMECHHRHGHPPPTALVPGLKRPPCPPNINPQPNLPPSVCACSKYPRHHLSPR

SEQ ID NO: 63391 - protein, 531 aa, Zea Mays
MLTLQYLNLQFNRLSHSYVIPSWICCDMRGNVENTMKGCKLKYTGVATMNSLAEPSTSSHACDSALLCVQSESSPNLKHHAPHKIKKGWRRRDCLQQRARQERLESSRSKLNEKYIDEMAVNMAEDECPSSLHDMENKLGIRTIDEETSVQDSLKETSSISEDLFSIVDDDLDGLTKDCGTMVQDHYDEEKPGFNMRGYNDDNSCISGEPACFSRSRVCSVEKELDDTASSVHDVGEIARDNSSVTPKFALKSKRHPDMDSNPKPSKCPRPIDERSKLSYKYSVESFCSIDDHLPDGFYDAGRDMPFMSLEEYERSLGLYAREVILLDREQDEELDTIASSAQLLLSSLTRPSSCEMEEDAGHDLLRASVLALFVSDCFGGCDRSASLGRTRRAIVSLRKEQPFVCTCSAGNLGDNNEAKQTNILSGHFDFAGLCNRSIHLIKERRNSGIVPIGSLQLGVCRHRAVLMKYLCDRADPPIPCELVRGHLDYTPHAWNIVPVKKRNGWVRMIVDACYPTNIKEETDPEYFCRN

SEQ ID NO: 63392 - protein, 84 aa, Zea Mays
MGSARETDGFAFRGREQKRTAISFEGPPVLLVVHRTRTWLTAYRTAAEEQGSLDWIASTAHRTPDTGRLRIWWALVARKLKTHE

SEQ ID NO: 63393 - protein, 201 aa, Zea Mays
MVLPPHLTKGPSHALLPRCTVWTTAAATRLSRPARVVKPEDEEEPPHSTSDRKGTSMHGLRLTRPQIAEAKKAPAALRCVLHQLFVVPPGRACRPVAGWRSAGRPRLPLQRQTPQDGRPCSRNRSAVRARGRCQSAREGAIAAAAWCVAPPACLPFARSGRPSAGVESLSDLAPPPARGPLRSPRDMARAPGRRTGPRAFE

SEQ ID NO: 63394 - protein, 368 aa, Zea Mays
MGNMTRSNSPVSRRIVLSFLDFLNSVELAPGVDPEALEVAKDCLESIFSVNSTATGDAIQPGLLFELFASLEANERDQSDSQVEDTFELDHSGDELFAKFYAALDEINFFKTSPAGAEDPGLLSKATQYFDDALLAMQKLGKKRASLVDIAESFKSRGNEFMRSNQHLKAVELYTCAIALNQQNAIYYCNRAAAYTLLNMNNKAIEDCLKSIEIDPHYSKAYSRLGSAYFAMGNYHDALYKGYLKAAELDPSNENVRQNIEVTKKKLAEQRVPPEEQNTHAGQAQGPHPIFTSGGVPFNLFPPGNEGTQARQASNGLEGEHGEPGIHRDDDVHINLAGPEQAAEALRAVMQMLGPQMGQHEGAPRGPG

SEQ ID NO: 63395 - protein, 347 aa, Zea Mays
MGNICGGSGKDRVAEDFRPSSPGTTMTSKTSGSITTSLSTTGKLSSVGSSFMASASSRSTSGGFDEGAKYSDGQILEAPNLRTFTFVELKTATKNFRPDSVLGEGGFGRVYKGWVDEKTMAPTRNSTGMVVAVKKLNSESMQGFEEWQSEINFLGRLSHPNLVKLLGYCWEDKELLLVYEFMAKGSLENHLFRRGCAPLSWELRLKIAIGAARGLAFLHASEKQVIYRDFKASNILLDANYNAKLSDFGLAKLGPTGSNSHITTRVMGTYGYAAPEYVATGTCPHFSHVTSWYDHTLLPYNELSTLPPRASRFEAETYTATQTRLSVRHNQYNAVVLALQTFPHLIV

SEQ ID NO: 63396 - protein, 74 aa, Zea Mays
MKNQYYNQIFTMIATDQSPISSHDRSTEEMGKAAGTPGHSLEKPCLFQSAQRCVQDRFLGSQPDPSASDMLTIH

SEQ ID NO: 63397 - protein, 836 aa, Zea Mays
MAEGDAGKAEAGSCSAAAASGAGGCDAVKKRPEQSVAFHELFGFADPLDWLLMAAGSAGAVVHGAAMPVFFLLFGELVNGFGKNQHNLRRMTDEVSKYSLYFVYLGLVVCASSYLEIACWMYTGERQVGALRRRYLEAVLRQDVGFFDTDARTGDVVFSVSTDTLLVQDAIGEKVGNFIHYLATFLAGLVVGFVSAWRLALLSIAVIPGIAFAGGLYAYTLTGLTSKSRDSYANAGIIAEQAIAQVRTVYSYVGETKALNSYSEAIQNTLKLGYKAGMAKGLGIGCTYGIACMSWALVFWYAGVFIRNGQTDGGKAFTAIFSAIVGGLSLGQSFSNLGAFSKGKIAGYKLLEVIRQRPTIVQDTADGRCLDEVHGNIEFKEVAFSYPSRPDVMIFRDFSLFFPAGKTAAVVGGSGSGKSTVVALIERFYDPNQGQVLLDNVDIKTLQLKWLRDQIGLVNQEPALFATTILENILYGKPDATMAEVEAAATSANAHSFIALLPNGYNTHGASALRWSEATHRHRPRDAEEPEAPATRRGHQRTRRWFGEHRPRSPRPVDGRQDHRRGCPQAIDHKVCRHDRGDPARPGRGDWHSRRTPRQRKLGSVRRAHQVPGDRQEPRVPVDPQVQVVPSEQLPLHPVAEPQVGEPEEPELLVQHRRRRPHRDGFQRRQRPQVPGAEGLLLQAPETERAGVALHHTGRCRVRPVRVHRPHVRHRDEQHDRGVLLPEPQQDGEQDQGVRVHLHRHRAVRRRRLPRPALLLQHHGRKPHNQGAEDDARRDFEERCWVVRSGGEQLEPCRRSPLHRRRRCEVGHCRADIGDPAEHDVPARVLRGGLHH

SEQ ID NO: 63398 - protein, 107 aa, Zea Mays
MFKPPNASALSVSRPYAANSLPRRAPCPLIGPCQVMALALVPCLRSLLVARPLAIGLTFMTQRHRLPCPTRRQPAVRASSTSPARVSLRRAWQQVLHVEAIATIDST

SEQ ID NO: 63399 - protein, 183 aa, Zea Mays
MNISWNYFLHSKLIKSFRIFISLLADFYLSYLSIVQRNCRYFFLFVVSSSLLCIYLFVISALYIKFLMDGDYPTVWKALKHSPASLALMIYCFISLWFVGGLTGFHTYLISTNQTTYENFRYRSDGRLNVYDQGCLSNFQEVVCAKIEPSKHKFRAHIQEEVRGPLANRAGETEEEQVGGPRA

SEQ ID NO: 63400 - protein, 488 aa, Zea Mays
MRDATRGTHAAAEALAARRPRRAMASPLLCGCALLLYLLGHLATCHAARDTITPSSPLAANETLVSGGDGNFALGFFTPPGANSTYLGVWYNKVSLRTVVWVANREAPIAGAVGDNPGATLSVSGGGTLAIAAGNGTVVWSVRSASSRRLASPAAQILDNGNLVLKDGAGGGGAVAWEGFDYPTDTLLPEMKLGIDYVKGKNRTLTSWKSPSDPSTGPVAMVMDTTGDPQVFIWNGGEKVWRSGPWDGVQFTGVPDTATYSGFTFSFINSAQEVTYSFQVHNASIISHLGVVSSGNYGLLQRSTWVEAARAWNLYWYAPKDQCDAVSPCGANGVCDTNNMPVCSCLRGFTPRTPAAWALRDGRDGCVRSTPLDCRRNGTTSTTDGFVAVRHAKVPDTERSAVDWSLTLEQCRQACLRNCSCTAYASANVSSGGGGRGGGAGGGSGCVMWTTGLTDLRVYPDFGQDLFVRLAASDLGGWTSYEGGGPNI

SEQ ID NO: 63401 - protein, 329 aa, Zea Mays
MVMACFIQAVYLLELDRQDMKGEEDGLAPKWWRPFKYKVTQTLVDERDGSIYGAMLEWDRSSALSDFILMRPSGAPRAVLALRGTLLQKPTMKRDLQDDLRFLVWESLKGSVRFVGALAALKSEVEKFGSANVCVAGHSLGAGFALQVCKELAKHGVFVECHLFNPPSVSLAMGVRTMSEKVSYLWKKVKGSLPLKEDTTPPLETAKADASDKKRLRAEKKWVPHLYVNNSDYICCHYNAPSCSSTTTDGASNEQQQQQRKASEIAGDVVAKLFVTSKGPQKFLEAHGLQQWWSDGMELQLALYDSKLINRQLKSIYATTTEMQSPAKS

SEQ ID NO: 63402 - protein, 417 aa, Zea Mays
MMGRTGDGRRRDVDGRLEALLSGAGGEEPWLRRVALATALELRLLAPLAAPAVVVYMLIIVMSSTTQIVCGQLGNVQLAAASLGNNGIQVFAYGIMLGMGSAVETLCGQAYGAEKYEMLGVYLQRSTVLLTATGVPLAAVYALSEPLLLLLGQSPEIAGAAAEFAYGLVPQIFAYAANFPIQKFLQAQSIVAPSAYILAASFALHVPLSWLAVYGLGLGLLGASLTLSLTWWVLVLGQFAYIVWSPRCRATWTGFTWAAFADLPGFAGLSAASAVMLALEVWYFQVLILLAGMLPDPQIALDSLTVCTSIQSWVFMISVGFNAAASVRVGNELGAGNPRSAAFSAWVVTALSAFVSGIAGLVTFLLRDKLSYIFTGGEAVSRAVADLCPLLVGTIVLCGIQPVLSVMRLFCSSSHWY

SEQ ID NO: 63403 - protein, 296 aa, Zea Mays
MEMVECSLVATLAPRPLPGQVRKALPRPAAFGARARLRVRSVGREEPLHPQQTAVRASGPDHGGRALGQAAVGFAAAAVVSLTGFSGDVSPLPTPPARAESLTVAFPVSKAREVNRVQRTLVETWGLIRETFVDPTFNHQDWDQKLQQTMVEIFPLKSADAAYSKISGMLSTLGDPFTRIISPKEYQSFRIGSDGNVQGVGVFINKEPSSGRLLVMDCIQGGPADRAGIHEGDELVEIDGKSVSGLDGEAAAQRLRGRVGTTVKVKLLDVFPYLELHSRYLASVKSILLVVKYTST

SEQ ID NO: 63404 - protein, 105 aa, Zea Mays
MVMQLRKTYMIKLIMPSSSSPSSIMSIQQRSRPSATKPSASSHAFAASMFTRSSAAFLLQYASCTCRRFASLSIRVVPEIHFLNPKVRYFEGLRLSRPSKCMMLK

SEQ ID NO: 63405 - protein, 975 aa, Zea Mays
MFCSDYYHIKRQIESELIQSGGIASSKPFLDLSKPEHLLKLKDRLKKYCQKAHKRVVDKPITEVREAGICMRENSFYVDTVRSFRDRRYEYKGLNKTWKGKLAEAKASGNSMKIQEAQDMVVLYDSLQLAHKCILNSFYGYVMRKGARWYSMEMAGVVTYTGAKIIQNARLLVEKIGRPLELDTDGIWCVLPGSFPENFTFKTKAGKKLTISYPCVMLNADVARNNTNDQYQTLKDPVNKTYTTHSECSIEFEVDGPYKAMILPASKEEGILIKKRYAVFNEDGTLAELKGFEIKRRGELKLIKVFQAEVFDKFLHGSTLEECYSAVASVANRWLDLLDNQGIDIADSELLDFISESSTMSKSLVDYGEQKSCAVTTAKRLAEFLGDSMVKDKGLHCQYIVAREPQGTPVSERAVPVAIFETDPEIAKHYLRKWFRFSSDANIRSIVDWSYYKQRLSSAIQKIITIPAAMQKISNPVPRVLHPDWLHKKVREKDDRFRQRKLRDIFSPLAKEEGLHNLNRTGDMEDLLISNKDLRKNPSHGLDIDKENNPNGASVGSGLNISKKQQNCMTGLNVPCTSQIQNAASYETVDKGTDYQGWLDAKKRKWKYVREQKKRRRLGAAATFDDPNALLSARHANQLPVNSRNRSTFFQKQELALFRSHWQIIQLASSTVPGHFFAWVVAEGIMFKIPINVPRTFYLNSKAPVTEEFPGRRVKKILPHGRPCFNLIEVVTTEEQFRAEGKKLAAHLAEPDVEGIYETKIPPELNAVLQIGCVCKVDKSAKRRSIQDGWDLAELQMKTTAECSYLEQTFSFFYLYHSLSEGRAVYVFYFPTSFRIHAVIVNPFRNKEISPSFLEKQFGDACQALGSVPENLSFHVDYQTSIDAGSKYAQRMLLEYRQQHSGPVVGIIECPKLQAIKVAIRALDDLPCVTIPSNARDNNYQLAEQVCSVVLHQPNGSMNGFHSLNMHMCHWVILN

SEQ ID NO: 63406 - protein, 1009 aa, Zea Mays
MPVYSIRGVNVDFPFDAYDCQITYMDRVIESLQQGKNALLESPTGTGKTLCLLCASLAWRRTFGEFLRVGRGGGGTKQLPYGSQPSASQQSEDSTSQKQQQSRYPVIIYASRTHSQLRQVIKELKATSYRPKMAVLGSREQMCIHDEVSKLHGRAQNNACHFLCKKRRCPHNNHVAEFIKNKPELGNEPFDIEDLINIGRHKGPCPYYISRELSKSVDILFAPYNYLIDPGNRRSLNGIPWDNAVLIFDEAHNLESICADAASFDLFPNNLTACIAEAHECIKLCSAKRSIENSADKQFDPENYAILKALLMALEKKIAELLIGSELGYTKAGSYIYDFLSELNITSDTSKKLIETIDCASLLLEEGNSAQTGPGVQAKAAVSRLESIRDMLDIIFRGGGQNHAKYYRFHVNESQQTHGDALKFLGKSSRTLSWWCFNPGLAMEEFLKLGVRSIILTSGTLSPLDSLAMELNLEFPVRLENPHVISSDQVWVGVVPVGPSGHALNSSYRTRNTIQYKQELGTAIVNFARIVPDGLLVFFPSYSMMDMCVDFWKNRNHSNSASENTIWQRICKHKQPVIEPRQSSNFQSAIEDYRAKLHDSSSGAIFFAVCRGKVSEGLDFADRAGRAVIVTGMPFATPTDAKVRLKREYLDKQGTPSNKNTKMLTGEEWYVQQAARAVNQAVGRVIRHRHDYGAIIYCDERFVWPNYQSQMSYWLRPHIKCYSKYGEVVQGLTRFFRDKASSDPLTLEPTDCNNCIAPPANKHMLKEKLSDLAASAQDECPQITLSGNSTMRRSNFMKLAQITPANRSTLTTKHNFVSTSTKHNLPEDQLSQDTNVDITVDLAIQGHLKEHTFKSLGLKKAKTMDRSKDAVVLDDVSSKLPQNIGSRALARYQCGGPTPESKKSTIATACGKNDGACEKTEGQESNSGPAFLKLVQEKLSPAEYTEFVEYMKALKLKTMHTKDSLEAITKLFSSPGRLPLLEGFRVFVAKNHLPLYEQLVRRHNNVSST

SEQ ID NO: 63407 - protein, 301 aa, Zea Mays
MISLLRRALAASASSPAATYRRLLVVAPLSRAAAPPGPCQAPAAGSQEPPRRAFHCSTTPLGFRSTPASWAGPCPGEGEGEGVDTGAEKGLEIARLGTSPRIVEKLAARGITRLFPIQRAVLEPAMQGKDMIGRARTGTGKTLAFGIPIMDKILSYNEKTGNGRNPLAIILAPTRELARQVEKEFRESAPLDTLCVYGGVPINQQMRALNYGVDIVVGTPGRVIDLLRRGVLNLSQIQFVVLDEADQMLAVGFDEDVEVIMEQLPQNRQSMLFSATMPSWIRKISNKYLKDPVIIDLSCIE

SEQ ID NO: 63408 - protein, 190 aa, Zea Mays
MKKSGKWETMEIPQSIRSIVCLNLPSFSGGLNPWGTPSKRKQRKRDLVMPPLVDDGLLEVVGFKDAWHGLVLLSPKGHGTRLAQAHRVRFEFLRGATDHAYMRMDGEPWKQPLPTDDGKVVVEISHAGQVKMLATKDCIAKGVHDHESCPAISTVHPESIYNDMNDDFEEERRNFGAALSFRYLSDVNKQ

SEQ ID NO: 63409 - protein, 85 aa, Zea Mays
MFPTARTMTPSRRRRKGSGRRWRLPAPAPGFKPPIRPRSVAVRHPAFHFGHYSQLRSSSYPRPAIAADPAFPTPCGSRSGARAAA

SEQ ID NO: 63410 - protein, 88 aa, Zea Mays
MPSSPDLLLPADATKMRRYSALPNGGRQETLADRVHRYQGVMLVILASLALVSLVLLLMPRSPAGTMGGARGRQRDRALRPGTHSPAR

SEQ ID NO: 63411 - protein, 328 aa, Zea Mays
MPPLGAGLYVGPGSMSLGLSQIHGFADQAQSSSAAAAPQFDHIMPSSSGSSSMFRSQASASSPSYFLGGSAPPAAAQDFSEDGSQGSQGPLLHGKAHFHGLMMQLPEQQHQPGSSNAAVGANGSNILNLGFFSAGNSGGTSGSLQDARIAIQDQFNLSGSGSGSAEHGNNVMVASIGSHLGRGFPSLYSSSPSAGMAQNSATALLMKAAQMGSTTSSTTHNNHNGPTTTSTLLRATGFSGATGSGQLGTTGGRAAAGEEGAASHEAHFHELIMNSLAGGGFSGTAGFGGGVDDGKLSTRDFLGVGRGAATMAPPGLHMGALDPAQQMK

SEQ ID NO: 63412 - protein, 175 aa, Zea Mays
MTHTCTCKRAPTLSLSLSLSLLMTLRTLKCAFWPFQSDQSSSLFLNAVAANQRGPGTLGDNQARSYGNTSAIEMAAAKAAQHRLMRGVWTNARFGDMRRALAALLYHCGYYEDCLHYLSLYQTAKSGKSPTNRLEILEDEAVNTLKARLMLILAEDGWSRCRPVARYWTKNSEPW

SEQ ID NO: 63413 - protein, 338 aa, Zea Mays
MAPGTDAGYGQWAAACPPLRRNLQLLSPDEVELAKMLLNEGQIHLFEHWPEPGVDDDNKRGFFDQVRRLNSSYPGGLVSYIQNAKKLLADSKEGKNPYDGFTPSVPSGEVLTFGNDNFVSLETAGIKEACNAAFVLVAGGLGERLGYKGIKVALPRETTTGKCFLQHYIESILAFQEASCKMVDEGCQTKIPFVIMTSDDTNALTIKLLESNSYFGMEPSQVKILKQEKVACLADNDARLALDPSDKYKIQTKPHGHGDVHSLLYSSGLLEQWKTEGRKWVLFFQDTNGLLFNAIPSALGVSATKGYNVNSLAVPRKAKEAIGGITKLTHVDEQWSST

SEQ ID NO: 63414 - protein, 285 aa, Zea Mays
MNNLLTDSFELPRRDSSRDADIEMGMHQADASDNLKDFLKKTANEESKAVTKASSMKAIKQRMEKDIDEVGKIARQAKTKVDELEKDNLSNRQKPGCGKGSAVDRSREQTTGAVKKKLKERMDDFQTLREAIRQEYREVVERRVFTVTGNRPDEETIDDLIETGKSEQIFKDAIQHQGRGQILDTVAEIQERHDAVRDLERKLLELQQIFMDMAVLVEAQGDMINNIETHVSNATNHIQQGVSALQNAKKLQRNSRKWMCYAIIILLVIVVVIVVAVIQPWKKGT

SEQ ID NO: 63415 - protein, 121 aa, Zea Mays
MPIFALVDWNPAGLAILCTYKYGSISMGLESYRYACNVKWLGVRGGDLHLIPEDAFQELKPRDLQIAKSLMSSKFLQESHRAELALMVERGKRADIEALYSHGFDFLGKYIARKIVQGDYI

SEQ ID NO: 63416 - protein, 112 aa, Zea Mays
MQIQLRHLKGEDLNSLQPRELIAIEEGLQNGQTNMREKQMDYWRMHKTNGKMLEDEHKILTFRMHQQAVDLSGGMRELETGYHQVQHDRDFISQMPFTFRVQPNHPNLQEDE

SEQ ID NO: 63417 - protein, 109 aa, Zea Mays
MAGRGGGSKSSLYAALGVASDCSDAELRSAYRKLAMKWHPDKCAGAGSSGGGADAAKARFQKIQGAYAGQRQGGEPGGPAAAVRGAVPEAVAVVLLAAERRSWEVGFQE

SEQ ID NO: 63418 - protein, 112 aa, Zea Mays
MNREHSSSSSSKLINEKLEEHRISTAKHCPHCGEKIDSKPDWVGLPAGVKFDPTDQELIEHLEAKVKDEGSRSHPLIDEFIPTIDGEDGICYTHPEKLPDIFLAFRALLSME

SEQ ID NO: 63419 - protein, 331 aa, Zea Mays
MLLCSCAPRARDLGRTHGDRADAPDQRPLPQPGAERRRVRGAPLAGRAAACVRAVRVRGHPRRAAPRRRRSDAGGEAEHDEAVAADGEQLLCQPELVAAAAVDAALWHHGRERPGLHAPQHRLRPAQRRRPQRRHLHLAARPRRPCLRLRPRRERALPVGCPVARQSGSGGVAHPQRLQPRQLHLPAKRSEREPEQHADPSGELHGRVGGAGGVLADRHPGGERGDERRGPVGHPAAAVGLRHPAGVRRGRVQQRRRPAAGLRGHRRVPDPRQQPAVVQAERRVRRHRQQPHRHHRAADQGGAQLCRPLIASSPFHPRSAATVTDESWLAR

SEQ ID NO: 63420 - protein, 53 aa, Zea Mays
MDLPSPLSRGGGALMTISRISRQSMAIASFVPSPRVAIAHSKQDLRPNLPQLT

SEQ ID NO: 63421 - protein, 212 aa, Zea Mays
MYGTSDPTAAERTAFRRAEKQYKLYKTLNVKGRSRSRSRSGCRPSSGEGGGADLSAVVDFHALLAADGELPDGIGRRECPGFDRPVFCFLDRPGFYFIPGALSTEEQCCWIRESLKTFPQPPNRTNLTAIYGSISDLLIAAENQQILVEAENPDIQERNKQNNCGGKTESKYFKFVDSESQKGEEHRSNAATTLVRKLRWSTLGLQFDWSKI

SEQ ID NO: 63422 - protein, 154 aa, Zea Mays
MVQMGVLVPTGDMTVVRRTAQFFLNSFQECLTAQRKEREMATAELGFKKQLTKEEKFEKRKQRLAAIGEDLLAIAADQPFRFPATFTFVVRAFSVLDGTGKGLDPRFHITEIAKPNAKELLRFNDAGVEIVVKASFNIWSKLLTYLYDSTSPKG

SEQ ID NO: 63423 - protein, 90 aa, Zea Mays
MLIAIGLPIPPRLGRLRRRAERHVPLPQPSDELCLSLVRWLSTAFRFPPAAAWSFVAGNAAPVAIPGGARRPAVITGRLIGCQFPKAWLP

SEQ ID NO: 63424 - protein, 96 aa, Zea Mays
MGFVSFVGRVLFVAAFLLSAYQEFNEFGADGGPAAKALRPKFNVFVKNVSAHLGVAVPHIELKHVIAATIGLKGLGSLLFILSSSLGAYLLSPLFC

SEQ ID NO: 63425 - protein, 79 aa, Zea Mays
MLQQRLLRQGRRHQPVGDELPGGGLPLRRRVRPQRVAGDVRPLLHGPPGRDAVPGAGGSSSSSRQYKSAQVLLVRRRRR

SEQ ID NO: 63426 - protein, 131 aa, Zea Mays
MFPLITSETLAQELVQMFVSEQKLKRLLLLEFLSIALKEGVELQTSLNWGDELYDGESNELQSIGLQSGDAYSPPENWCAERLGSQRPGNLPLHEVLQVYLTTWHANMNINRSRIGEIFELVEEEMKIKLS

SEQ ID NO: 63427 - protein, 323 aa, Zea Mays
MGKSMPSPPVPPPPSHGGRNGASGNIVPPPAPPGSNAKLFGPQGRGPAPPSGPMSKSFQSGQAVLRRSNLKPLHWVKVTRAMHGSLWAESQKPDETLKAPVFDMSELENLFSAALPSSDSRRSDKSGSRASGSKPEKIHLIDLRRANNCGIMLTKVKMPLPDLMSAILALDDTVLDADQVENLIKFTPTKDEIELLKGYKGDKQVLGECEQFFMELMKLPRVESKLRVFSFKIQFRSQVSDLKRNLNIVNSSAEEIRGSVKLKRIMQTILSLGNALNQGTARGSAVGFRLDSLLKLSDTRARNNKMTLMHYLSKSILELLFLI

SEQ ID NO: 63428 - protein, 61 aa, Zea Mays
MTVKKEEFLALKQGPSSVSEYRDRFLQFSRYAPEDVNTDAKRQYRFLRGLVDPLQYQLMNH

SEQ ID NO: 63429 - protein, 317 aa, Zea Mays
MDLKPQNILLDDNMVPKIADFGLSRRLSENQSRIITKTIIGTPGYLAPEFLSSNAITFKADIYSLGVIITEILTGHKECTSVDKVLESWTDMFQTLGSHPLLEQVEVCAEIAINCMNDDPSNRPTIQDIISSIDETDARSVTSSSPGGQVITMAGSESSSSRSRSPCASCRMLRQQCTQECVFAPYFPAEEPHKFAIVHKVFGGSNVFKLLQELPAHQRGDAVSSMVYEANVRTRDPVYGCVGAISVLQQQISQLQMQFSMARAEILTLQQQMDVNDSLPSQNSFDRYGNGDLKPDSPPEILSSEDEVEEVSSPMSP

SEQ ID NO: 63430 - protein, 166 aa, Zea Mays
MDLLFSFIKPDHPHSTLLAGYFSKVVICLMLRKTAPLMNYVQEHPDIVVQLVDLIGITSIMEVLVRLIGADETIYLNFADTLHWLENTYVLEMIVDKFSSSDSPEVHANAAEILSAVTRCAPPALAAKICSPRCEEILGKRKPIGKISSKMETPNQDPILRARLAA

SEQ ID NO: 63431 - protein, 893 aa, Zea Mays
MFVSDGGLAMDAGGRAGVSGPAAANGSFGLVRTVVGYSTSPLFFWLLTVALVAAIHIVSGSSSKPARNNETEERKKARRDRFLPAAEEREASGRGDDRVLEMMRSFSFMQATEEDFMEGMTAYEHNGVGDGTAHGPVAPEPPALTATSLSFRFQHQMPEVPTETALVSREFTAARQETAVVSRELTAARDDDGRQREEEKEPHFPLEPFAPLQTAADMQEHRHDEAEETEFLAEEPAEERSGEVAQEEAAPPKTVAATHNYQFLTERDFRGFVREPEAVTVRVQESFVPSPPPAHQPEERRVVDVSSRSGRFLTARDFRPANEPDVCESVASSGKWTPPPPRPRPKPKPKPASSPSAASMGGGGGFTSEFSGFGDSDSESSASDGYSVKDLVVDSDSDWFLSEKEFPASALGSGNLKTYKAKVLRAIEAMEAASNLEPSYQEDSATTVSPSSVRQRSPDTVPDGSPKFPEDVWSRSPSPDVEYKEDEEEVTREAEAQYDEDIEQRSTGEEEEGKGIDMSDDEHSSGGKEVESAPIYDLAPVADDCMDHSEKGIITLNDHSGGQAASDAQRSPEAVSARQLAAVPSDQVAGPVKRSPEPPEQEFVGMVDHSLEHSSYDRKQTASESDQSYEIVFDDKRRPQRAETGFLGTSSPSHELVSEVWEEIVTRNDQPPLGPHADEQGLDTAEEEYVGTGDQPHGAVSDEKSGAETPEQEFSLTDHRNVAVPDARNISETREDEEQASADDHSDNAVTGKAKVYDEDGEDREARWKDLTDEEEDELESLWEHQDLVEQLKLELKKVRSSVGLPTILEESDTPKAPVEDLKPWSMDAKFLREDPMDELNKFYKSYRERMRKLDILCYQKIFPTAQRVPAVQQQQQQLCKVLVAYGGVHPVA

SEQ ID NO: 63432 - protein, 75 aa, Zea Mays
MARSVSYVSAAKLVSMARGNPRLAIIDVRDEERSYQAHIAGSHHFASGSFEARMPELVRAASGKDTLVFHCALSQ

SEQ ID NO: 63433 - protein, 137 aa, Zea Mays
MLNTRNILKRKNFKVQGDNYICVLCQLQREETAFHFFFNCPFSQDYWRHLNIQWNYQIDFFATFQQARDLHGSPFFMEVFIIVAWQIWKQRNNFIFDRGRLSFLGWNKEFCAEALLQANRFSEEKSTLFSSFVNSYR

SEQ ID NO: 63434 - protein, 348 aa, Zea Mays
MIQNPWRASFPKFLCGSRILTMIEFLELMWPYLNKAICRTAQDIAKPIIAENTAKYNIDTVEFETLTLGSLPPTFQGMKVYITEEQELIMEPSLKWAANPNITVVVKAYGLKATIQIVDLQVFASPRITLKPLVPTFPCFAKILVSLMEKPHVDFGLKLLGADVMAIPGLYIFVQTMDPNDVQNEKSRGELTLELIYKPFKEEDIEKEDTESADVIEKAPDGTPAGGGLLYVIVHEAQDLEGKHHTNPYAKIIFKGEEKKTKVIKKNRDPRWEDEFEFVCEEPPVNDKLHVDVLSKASKKGLIHGKETLGYIDISLADVISNKRINEKYHLIDSKNGQIQIELQWRTS

SEQ ID NO: 63435 - protein, 364 aa, Zea Mays
MRRSTPPAGTDGDVLGKGASKIVYKAFDEYQGMEVAWNQVKLHDFLQSPEDLERLYCEIHLLKTLKHRNIMKFYTSWVDVSRRNINFITEMFTSGTLRQYRQKHRRVNMWAVKHWCRQILSGLLYLHSHNPPIIHRDLKCDNIFVNGNQGEVKIGDLGLAAILRKSHAVHCVGTPEFMAPEVYEEEYNELVDIYSFGMCVLEMVTFEYPYSECTHPVQIYKKVISGTKPEALYKVKDPMLRRFVEKCLVSSSQRLSARELLEDPFLQGDDVAVSLDGGDYHVPTKYVRQPSYLGHTYSNGSMVSNGFSESMDEDALSEDCEDDDMKGQDGIDLFNENEDEPLGNVDITIKGRKSEDGGIRISRF

SEQ ID NO: 63436 - protein, 135 aa, Zea Mays
MKPMNTTEKLGQFLEPIASLFKIDPQDFQDSEPDILANSASSIIERIKENSDQCAAALRSLCRRKKGLTVEEASLIGVDSLGIDVRAFSGLEVKTVRFSFNAQALSERSAEKKIRRMLFPRYQRKNVKASTEDES

SEQ ID NO: 63437 - protein, 228 aa, Zea Mays
MAEDKETDSPQPPAKLPRLSRADTSAGEVTMAASSPLVLGLGLGLGGRGGGGERDADVSPATVTPKRPSALTFMQQQELEHQVLIYRYFAAGAPVPVHLVLPIWKSVAASSFGPQRFPSLMGLGSLCFDYRSSMEPEPGRCRRTDGKKWRCSRDVVPGHKYCERHVHRGRGRSRKPVEAAAAPAAAAGGSSPVLRVAAPQHVLGLSSPTSVLLAHGAARATSRENNPV

SEQ ID NO: 63438 - protein, 501 aa, Zea Mays
MALVKSDAEEEWSDSDFDDASDSEVAEALDWLDAVEGPDGSARPHVAFSASGGGAAARRPNAHGGVLSRPLQPLSNRTQKLASHISATPLEEWEGRMNVAMSNSVTTAIRDSIRDTAIGKIRNTEKADRATVEQAIDPRTRMVLFKMLNRGVFNNINGCISTGKEANVYHATKTDGQELAIKVYKTSVLVFKDRDRYVQGDYRFRHGYCKHNPRKMVKTWAEKEMRNLLRVRAAGIRCPAPLLLRLHVLVMEFIGKGGWAAPRLKDAALSDDKLHESYFEIITTMRTLYQTCKLVHGDLSEYNILYFEGHLYIIDVSQSVDLDHPSALDFLKEDCLHVSDFFKKRGVPVMTVTDLFNFVIDQSISDEDVDDYLEKAQQKILENGGAVPNDDEITPTVMVQTLDYVKQWFVRTKNTNTEKEQGQPARNLVEVEEDESESCLSSDEDDSWHEDDPKVGPEERKAARKENKKKVKEEKREARKTKIPKAEKKKRKKMAKAKCKR

SEQ ID NO: 63439 - protein, 263 aa, Zea Mays
MDMALSKLNSGGWVHIFPEGSRSRDGGKTIAPAKRGVGRLVMDADSLPVVIPFVHTGMQDIMPVGKRIPRAGKRVIVVVGDPINFDDLLIDNCGDTQDIPRGILYDKVTQRIGQRLQELKVEVDRLAAEQEPELQNHNVGDDGYRLWQQVDWEGFGIGSSMLPSEPSAAAQVPSREAEPEPHVEVEQSVSPAPSAATSYNVAVPHWFQRHADPSELMGFASRGLIKHGKFLEEGYREFQQSATTLHTFWVSRANNAAHRWSTA

SEQ ID NO: 63440 - protein, 966 aa, Zea Mays
MLRAAVAAAEELRSPLLRVIGTLRDGRGSVLLGRRVRFCSNSSASDTEAAVAEAEAKAEDASAAEGEADSKASSAIVPTSTNIDDCLSVIALPLPHRPLFPGFYMPINVKDQKLLQALIENRKRSAPYAGAFLVKDEEGTDPNIVTGSDSAKSIDDLKGKDLLKRLHEVGTLAQITSIQGDHVVLLGHRRLRITEMLQVEEDPLTVKVDHLKEKPYNKDDDVMKATSFEVISTLREVLRTSSLWKDHVQTYTQHIGDFNYQRLADFGAAISGANKLLCQEVLEELDVYKRLKLTLELVKKEMEISKLQQSIAKAIEEKISGDQRRYLLNEQLKAIKKELGLETDDKTALSAKFRERIESKKDKCPPHVLQVIEEELTKLQLLEASSSEFSVTRNYLDWLTVLPWGNYSDENFDVHHAQKILDEDHYGLSDVKERILEFIAVGKLRGTSQGKIICLSGPPGVGKTSIGRSIARALNRQFYRFSVGGLADVAEIKGHRRTYVGAMPGKMVQCLKSVGTANPLVLIDEIDKLGKGHSGDPASALLELLDPEQNVNFLDHYLDVPIDLSKVLFVCTANVIEMIPNPLLDRMEIIAIAGYITDEKMHIARDYLEKNTRQACGIKPEQVEVTDTALLALIENYCREAGVRNLQKQIEKIYRKIALQLVRQGVSNEPDHESVSASVTEESGNGDNTTTKDEILKDPAVEDASVTNNVTNPASEEANEENLTSEAAKEDSTSKGNKGTDGAADKAIEKVVVDSSNLGDFVGKPVFQAERIYEHTPVGVVMGLAWTAMGGSTLYIETKKVEEREGKGALVLTGQLGDVMKESAQIAHTVGRAVLLEKEPDNHFFANSKVHLHVPAGSTPKDGPSAGCTMITSMLSLAMGKPVKKDLAMTGEVTLTGRILPIGGVKEKTIAARRSAIKTLIFPAANKRDFDELASNVKEGLEVHFVDTYSEIYDLAFQSDAGTETS

SEQ ID NO: 63441 - protein, 210 aa, Zea Mays
MDEEEVHIAVGKNSRKEKANILWAAANFPRATIVLVHVHWPSKWMPFMGGKVLYKFADEKEKEMHRGREMKVMVNMLSQYKKMCGTRKVSAHYLTHDDTVAGVVNLIKKLKIKRIVIGSRNMSRQVVVRQCCQVWLVLNGKHISTSNDHLEYSENIGYGGGSSGILASIHELGEESDGYVTPRSDLVDETMDEESAEMNDSDQLVTEEID

SEQ ID NO: 63442 - protein, 288 aa, Zea Mays
MPASLNCDLVDPVVYNMLHEDPGNVSYSAVGGLSDQIRELRESIELPLMNPELFLRVGIKPPKGVLLYGPPGTGKTLLARAIASNIDANFLKVVSSAIIDKYIGESARLIREMFNYAREHQPCIIFMDEIDAIGGRRFSEGTSADREIQRTLMELLNQLDGFDELGKVKMIMATNRPDVLDPALLRPGRLDRKIEIPLPNEQGRMEVLKIHAAGIAKHGEIDYEAVVKLAEGFNGADMRNLCTEAGMAAIRAERDYVIHEDFMKAVRKLNDAKKLESSAHYSADFGKD

SEQ ID NO: 63443 - protein, 233 aa, Zea Mays
MEPTSSASIARQTWELENNIPAAASDPDAMDAIYRYDDASQARAQQEKPWANDPHHFRRTKISALALLKMVVHARAGGTIEVMGLMQGKCEGDAIIVMDAFALPVEGTETRVNAQADAYEYMVDYSTINKQAGRLENVVGWYHSHPGYGCWLSGIDVSTQMLNQQFTEPFLAVVIDPTRTVSAGKVEIGAFRTYPKDYKPPDEPVSEYQTIPLNKIEDFGVHCKSRLCCWADL

SEQ ID NO: 63444 - protein, 81 aa, Zea Mays
MMLWRLPHGLKMDSSWLLATRSTNTSRVSSSIRRASSPLKARKSSSTLSDSLRSWRSSVPNLGEVYANATGGFIDQAEAET

SEQ ID NO: 63445 - protein, 793 aa, Zea Mays
MSRCFPFPPPRYEKTVRPDAQLASQQQQLDKEKHKEKKHKKDKKDKDRKEGKEKKDKDRSRDKHKDKKDRKEKHKDEKKDKSKDKNRESGEGIQRNDEALHGQKVGESSRGSEEIKDLKFREELVRGVQDEKGAASQTIENYAVSNDRNRKGFIASPAMETERSAHNKVHIQSGNASRKTEGFIQQSINANRQKNGTSVQHSESFTTSARRTAGGFPPAPTTEDKFKAARLSSSNEAAPRKEGVGQRISNISISLQKRTENTNKDVAKKEVGTSSPLPPNPANAMHKGNGKVGRPMDNTQGSMQRFGSPSTSSATWGMDRGAPRSSIPSPSITIRRPNGMVRPAENLSVSAKKPDAGGLSPAMGKEKEQGGRLLQANISTDQKLAAESRSASAKKPDAGGLSPAMGKEKEQGGRLLQANISTDQKLAAESRSVSAKKPDAGGLSPAMGKEKEQGGRLLQGNISTDQKLGAENRSVSAKKPDAGGLSPAMGKEKEQGGRLLQANISTDQKLVMSKPPAVEKAADGRAERMEKVRDGAPDIAKKEDKKSDRHEKKKRKEKDKHKEKKKEKEAKKEKREHNHKEHNKTRENSISYPIDSLNLKHSVPPLAPPVDDGKSVVPDENLKKRKNHETNGYLQNNLDMRPTKLPRPALPSNRVENGTASHVAAPLSSVKQEAINIEKAERLHKEEKVNGNQQGQQRGPVDPVAAYENGTSSRKPPHPDCKYLSQIYSIPEAPQMMELPGQEGEDWLFDKGGTQPRKPASSAPEADGVPQVWAQALKIDHADVIALPYVIPF

SEQ ID NO: 63446 - protein, 492 aa, Zea Mays
MIFLDRQKHSKNPKYILVHCTHGHNRTGFMIIHYLMRTHVSCVAEAINMFAQRRPPGIYKRDYIEALYSFYHEVPENMMIACPPTPEWKRPDDLDLNGEAKQDDDDDNGDPEPPRNESEDKIITNDDVLGDEVPYDQQEALRVLCYKLLEMPLIRGHSQFPGSHPVSLNSENLQLLRQRYYYATWKADGTRYMMLIMRDGCFLIDRNFCFRRVQMRFPHKSLEGLHDMTLIDGEMIIDTVPDSGLKRRYLAYDLMALGAVSKTKLPFSERWKMLEDEIIRPRYYEKNKFESGSKSNPLYKYDMELFSVRRKDFWLLSTVKKVLKVFIPSLCHDADGLIFQGWDDPYVTRTHEGLLKWKYPEMNSVDFLFELTNDNRQLVFLYERGKKKLMDGARIAFTDDVDPSSIAGRIVECSWNKEEQCWSCMRIRSDKSTPNDINTYRKVMRSITDNITEEKLLEEIDEISLLPMYADRMQQAHTKMAQQQRRRLPPQC

SEQ ID NO: 63447 - protein, 294 aa, Zea Mays
MAWLQPPKAPRTTAAAAAPPPPPLAPLLPDSRHGETVGTVAQPQPRSQPEARPPDAAAVTTSSVCSGNGGRSQLKRSRHLAADCSVSPDEDLDDEPGATRRSAARSAKRCRTAEVHNLSERRRRDRINEKMRALQELIPNCNKVDKSSMLEEAIEYLKTLQLQVQMMSMGTGLCMPPAAMLLPAMQQQLLHHHPMAHFPHLGMGLGFGMGAAAGFDMLPFPCVAAGAHFPCPPGAMFGVPGQAMPSLPAAFAHMYGAGSGAGPAGQTEAADAAAPARPGEAEQGDQQVQHAKQT

SEQ ID NO: 63448 - protein, 743 aa, Zea Mays
MSSNKERAKKALNAMKLLGFSKKQATPVLKELLNIFNNNWEPIEDECYRALADAILDRQDNKQTPPSQQGNQAAHAHSEHDRQQYVSAIHDDRGEDDNETPLVKRPRMGTANFRAELQPFESGPQQPTVSTQGALSVSPQNSRGVTRSLTVVLQDAGCEYPLAVDDSFIVKEPKPEPQIDIAEINIGDHLTEPQVDIAEISVGDHLTDRDFLTGPDAIQLSDGSSEQTAGSGARGSMVKQAQSLGRSKQKAPLCKNGVGSMIQNTQETSFVEVDVASSANGEVKMSLKCSLESSNFSISMEEVFKMVEEKCLHSYKVLPPDFSIGKLMSEVCQSVVQLGTMHSEVNRDSGSLHNEVVAPFVKPIACEAAVDINDNVAGGSSVLDSSEPCLQNSLVAWDPEFAHCKQKTTHDTTDISKGEERVRIPIVNEFGSEKCPPSFYYVPRNLVFQNAYVNISIARIGDEDCCADCSGNCLSSLVPCGCARVTGGEFPYTPEGLLKTEFLDECTSVNHFPQEHHRFYCTVCPLERSKNKASPGPCKGHLMRKFIKECWSKCGCGMQCGNRVIQRGITCKLQVFFTREGKGWGVRTVEDLPKGSFVCEYVGEVLTSSELHERAIENARNGKHKHQVLLDAGWGSGVLRDEDALSLDGSFYGNVGRFINHRCYDANLVQIPVEVETPDHHYYHLAFFTNKKVEAFEELTWDYGIGFDDTEGPSKPFRCMCGSRYCRDPNNLRRMARAAAKRK

SEQ ID NO: 63449 - protein, 124 aa, Zea Mays
MPLALAQLQDLRDRISDRLRPWSRSAQFWVRAADIYTSYKVCQLRAGFVKDEDELETMWERQHELGAEKMYSLCSELGGLFLKAAQILGKPDLAPMILRLTKLEWRASRRSYFQCFEQSSFCEG

SEQ ID NO: 63450 - protein, 708 aa, Zea Mays
MVDQNRISATAFEGDLKDINMTNDDKPGESIESSQGKPSQTSEPVGTATEIGTEQPYKSDKANYGTNDSSEGQHITEQDNEMTPKQVSDDQSVANCNGPSKEREQSADATTDQNLQSNTTTEKEGDTSRTGEDKTAHNVNDQSTQVSKTEESKPSPITVTQALDALTGFDDSTQMAVNSVFGVLENMIDQFEKQQDSENGESADGNDGITSVDETESHVKENTENVSSGEDINHSSKQPEGSSPGKTDSIMSKYDCAFGEENPNLSIVSYGRGKMRYYRGNKVGDHVGADGIERVSGLPDYLLDIAVNSYLKAQYAMYLREFLYTELQLKSPESNSATDLFLDPQEGKWKIEEQMGNVQNDNFESSQESSKMDNAIEPPYFIPGKNPDIAYKSNKWNNTVATRSKPGNDLNEALTHFVRDELSSALKIEVGRKIGITDTKQLERSLANDVEQIAAEVSKTVVLDCELYSAIHVQRSPTTIKFGSTHGKNVVEAVSTAVQQSQHLRNILPVGVIVGVTLACLRNYFHVGVSKHGDHMIATMKSDIFGEEVIVQDSSKENVQDSGKANTNDNNIEKTSGENQQDMTKSQGQDMMVGAVTAALGASALVAHQQNKDENCKDFVEIEGAKHEETAQEKSQNSLMSSFAEKAMSVAGPVVPTKGDGEVDHERSVNIAIVVFLCLYFFFFFFPFLCENVYHVLTFCKQACCSSS

SEQ ID NO: 63451 - protein, 150 aa, Zea Mays
MQGMGDFIGEMTQMMSQRQESFEELQQLFVDMFQSDIDSGFCNGTAKGHQVQGQAKSRTCSPRSPPTTIVKEAEVSSCNGFNKRGSSAMDSGKPPRPVECGAGQSQAGFCFGVSDTPKPRGPNANRKRNGRKQKLFPKHYVTSEDDTAGS

SEQ ID NO: 63452 - protein, 837 aa, Zea Mays
MIQDSPGREFLLRVSYLEIYNEVINDLLDPTGQNLRVREDAQGTYVEGIKEEVVLSPGHALSFIAAGEEHRHVGSNNFNLFSSRSHTIFTLMIESSARGDEYDGAMYSQLNLIDLAGSESSKTETTGLRRREGSYINKSLLTLGTVIGKLSEGRATHIPYRDSKLTRLLQSSLSGHGHVSLICTITPASSNMEETHNTLKFASRAKRVEIYASRNRIIDEKSLIKKYQKEISSLKQELDQLRRGMIGGASREEILSLRQQLEAGQVKMQSRLEEEEEAKAALMSRIQRLTKLILVSTKNNIPALTDGHQSHNSLSEQDKLITSQDSSTLVQTEGTTKDPLSSALPDSLDEINQLRSGTGEQSSVTGSATDSMQVGFTASDHMDLLIEQIKMLAGEVAFGTSSLKRLIEQSIDDPEATKDQIENLEREIQQKRRHMRALEKQIMESGEASVANASMMDMQQTITKLTAQCSEKAFDLELKSADNRVLQEQLHQKNLEIYDLQEKVLRVEQQLSAKVDISPEKETDCAQQETIDLKSKLQSKEAEIEKLKYEHLKISEEHCDLINQNHKLSEEAAYAKELASSAAVELKNLAEEVTKLSVLNAKQAKELLVAQEMAHSRVHGRKGRTASRGRDEVGTWSLDLEDMKMELQARRQREAALEAALAEKELLEEEYKKKFDEAKKKELSLENDLAGMWVLVAKLKRGALGISDLNVDDRTVNLADITNSTKENKGGKNFALVEKQASEDSVKSLSSEEHTSPEFEPLLVRLKAKIQEMKEKDIDPLTDKDGNSHVCKVCFESAAAAVLLPCRHFCLCKPCSLACSECPLCRTRIADRIITFT

SEQ ID NO: 63453 - protein, 332 aa, Zea Mays
MTAYDPKDDVDRLFACFKCGVSPPKSAFRERPLPQAKKSRGSPVSETAGSGGRSSSDVSTTPDAAADKRAAPSSAKSTGRKHMSPFVFYGSPRGVQVKRPQSFLRLLHVIRIDLKKQTDFNPRDVVWATFPRQDEAIRFSKAYAHTNVFCYQEHMSGTRRFLVSTYDEFWKRYNDMDSKIRHHYEVIQEFSRHLIIRIPKIAFKDNSHVGAFVCEVCSQIAAQRTTNHDLDKLYITKEISSGPVDRLFMDTAVYSRNRCFRLVFSSKSGKKSFLVPTKRFKCQELNDKDVFMESLICRLDDNCEKLLICKLDLECKKTLHFDSEISMSQVSV

SEQ ID NO: 63454 - protein, 213 aa, Zea Mays
MDEAADVRQSALALLGDLSRVCPIHLHPRLQEFLTVAAKQLDAVSVANNACWAIGELAIKIGKEIAPVVITVVSCLVPILKSPEGSNKSLVENSAITLGRLSWVCPDIVAPHMEHFMQAWCKALCMIRDDFEKEDSFHGLCAMVAANPTGGAGSLAYICQACASWTEIKSEGLHNEVCQILNGYKQLLGNGGWEQCMATLQPDVVQKLARYGV

SEQ ID NO: 63455 - protein, 371 aa, Zea Mays
MAPKESQQQQSPAEVAAPAARSIPDEARRLLHELAAAWEDVAGCGSREPEVVPLKGAMTNEVYRARWATGSGDSSAPGQSDARTVLVRVYGEGVDLFFDREDEVRTFEFMSRHGHGPRLLGRFPNGRVEEFIHARTLSAPDLRDPGISAIIASKLREFHSLDMPGSKSVLIWERLSCIVSARNWLRTAKSLYSSSDETEEFCLDSMEEEIAALENEFSGECERVGFCHNDLQYGNIMIDEETRLLTIIDYEYAGFNPVAYDIANHFCEMAADYHSEKPHILDYSKYPDTDERKQFVRTYLSSSGEESEEEVENLIKSIEKYTLASHLVWGLWGIISDHVNDIDFDYKDYARQRFEQYWLKKPTILASQTAE

SEQ ID NO: 63456 - protein, 649 aa, Zea Mays
MDARLDLRFARLQQLQAEEVDEPYRDAVSPLPPLPVVYEPYREASHPPPVHDDVAGVVSTGSDDDLDLQQIAKEPSVSSPPRHSSRDAVRGPCPRPLHHQLTIPIAANLDQICRLSRPCDVADRGLLCDLLWSDPSSMEDREWADNKDRYVSCTFRADVATDCRRAQDLDIVCRAHQVVEDEYEFSVDRQLVTFFSAPNYRKLGCSFTIIKLKADRNSSSPLGCSTKCPSQALHPIVKPNLVVVLNIAGAGGKLCGGFNIKVFTRVHQTGDVSLMSNVSIELVSNMMEQGKQPSVAAIPGLALGGGLELTMSCQAQIPTHVAHTICSLVNNVMASQAHVVGQGIVDRAAFSGDHQWIVQGTANGHGLSSKVAAEVNNQFRVGIQTTAIIHVLPRGVLQFGSTGLALGNKKIVMFAKKLCSQLNNRSSLAASASAKNTSRQHGQSLIDNAIVSTSTPPNVLLIASLLWAAQQNGHPELIGKTPIVRPSLDVERHILLKGAFDKAEEIVLRMKQWDGTAGLVWQKDSLMVPKWLTDRLMAFLIFYSEAITALLCCALIPGLLLLELVKFTETWQGTVCWEPTILLMMRRHLYKQNELYATLFEGAMIGYTPGGMQFAQETIETMISSNLFLTAEMANTLSPWPWFNCVQVC

SEQ ID NO: 63457 - protein, 973 aa, Zea Mays
MSRFLSPSSPSNPLPLSEKKVILSGVQAPTRSGPPPPPPNKLGHAQQLMRSLRGVLIPLVLLAGLAFRVDDGGAALLPLPPPALPASPSRLALPGGTPKDDGAAASRSTEVVTAGVRSTEIVAPVGPKKQSLRELLVRPQPARHEPSSLVSGEAKAETRSVLQFYDNGTIQLVDKLSQSPLWEIATGPPLSDHITTTESGPNYLIYPFNGNENMNGNSTELWEVYNGNSVRLPWKLEEFVARSPYIRDSVVTIGSKVSTVFVVDADSGEIIYRHSIPSALKELEGPGVEGAPSKLNVRTSDDSDNIIVLVRTDYSLSASDLGNHLFNWTRTSFTANYYVKYKHPDMLDQSSCLQGDIPCIRTEGLPLALPDLNSANVIVLKDGTPFVSMHGSDALEPVQTPRKLPNTAGKSNILLDDSQNQTHDVARSHAISADPEATLNPTRNTSGWLFPLFPIFLVTGYLLSLISASKSCRQFMIQLIEPFTHNKKTVDIRGRSEGTPKKRKTRKKDGLVNSSETLTASDKECSDTGGSTEAPMKNSALTDALGGRQIGKVYVSNKEIGRGSNGTIVFEGSYDGRQVAVKRLLRSHNDIAEKETRNLIISDHDPNIVRLYGCDHDSDFVYISLERCHCSLADLIQKQSYLSSGESISNNEVSMSINSKISNVKGIDVELWTQDGLPSAQLLKLMRDVVAGLVHLHNLGIIHRDLKPQNVLISAEGPIRAKLSDMGISKHLQDDMTSVSHHGTGIGSSGWQAPEQLRHGRQTRAMDLFSLGCLIFYCITKGKHPFGEYYERDTNIVNNRFDLFVVDYIPEAVHLISQLLQPNPETRPTAVYVMHHPLFWSPELRLSFLRDTSDRIEKTSETDLINALESIGPVAFGGKWGEKLDAALVTDMGRYRKYNFESTRDLLRYIRNKSGHYRELSNDLKGILGSLPEGFDHYFASRFPKLLIEVYKVLWVHCKDEEAFSKHFNGSSL

SEQ ID NO: 63458 - protein, 297 aa, Zea Mays
MYYPQPTVSLAAAVALLRPSLRRHSQRASSLLRSSTPPPWVSARRRTAVSDDFFTVELDATGVEPEPDSIDDGLPSPWEGAVVYRRDAAVQHLEYASTLERLGLGDLSSPDSRARAADLGLAGGTLDSTGAQPRTPVLVSVDVTRRRGRLRLDGIVRTVITLGCFRLSFRCAEPAPQGIFANFSLLLTEDPVEEEPDLGTIFQEDDDKGGASLACAMDGDQDIDWDDRLHFPAADKEIDISKHIRDMIHLEITLDAVCNPNCKGLCLTCGANLNTTSSCTCKPRNVQGLSPLKGVFK

SEQ ID NO: 63459 - protein, 70 aa, Zea Mays
MTIRTDYTQLGIPNHTTYGALNLCICQPFPQILHNVNRSALTGSIVLLHPASSEDGTRYSHHLPRPVRGE

SEQ ID NO: 63460 - protein, 177 aa, Zea Mays
MEMSRDHRANHVEERERVAASGGYIEDGYLNGVLSVTRALGDWDMKAPGASASAALIAEPEFRRATLGEDDEFLVMGCDGIWDVMTSQHAVSLVRRGLRQHDDPARCARELVMEAKRLETADNLTVVVVCFAPEMGSPFTPQQQQEEELPARPRSCKKGLSTEALCSLRSWLDTDHR

SEQ ID NO: 63461 - protein, 175 aa, Zea Mays
MVVPWLIEEGDRDVTTWLQERQVASELLRERLAQAQNRMKQMADRGRTPREFQVGEFVLLKLQPYAQKTVVNMPYPKLSFKFFGPFKIVARIGAVAYRLELPENAQIHPVFHVSQLKAFHPKHTPVFVELPKVADLSGPGIWPEKIVDKRLVRRGNHAVPQVMIKWSGLPVSSAT

SEQ ID NO: 63462 - protein, 119 aa, Zea Mays
MNGCFLAKTGSHDNRITEITPGVGDGIPPSVRQQQGPLPACCQRWLDYDARRVGHNGAEGARSQRGLAGGREATHSKTGRADGAYLEMVSSPACCAVLRRGAALAKLQRGAMARIGVTP

SEQ ID NO: 63463 - protein, 853 aa, Zea Mays
MDAASMLELYRRDRRRLLSFLLSAGGGGGRALDLSRVDLDAVSADYALECVASGAHFNASEATRRYFDERRYPIMIGSSSGNSYFLLSRPMPSDSSPKEAAPSIGPQAPVQDNSSSTGQPTEPRDFFRDALSTSGIGYDTEDDKLADISPQQVNKVDILSLGLPRLTTELSDDDIRETAYEVLLASLFVSGKVHFSEEKREKKHKFLKGRRTKTEGSNPSPQVEDGYAHILDLTRVQMEISESMDILTKRALRHISLKTVKETLDVPRISLQLLSSVGKLDFPTERLRGQWQKRQANVLEELLLFSASLEYDTSNTLRIVLSKLKSTEDWVVTVPEGRVEVLTIIERYNTKLCSLTKKFDIKDETYHWTHNYHFNFRLYEKLLCSVFDILEDGQLVEEADEILEITKLTWPILGVTEKLHHIFYAWVLFQKFSQTGEILLLKHASLQIREFRLYHDVKEIELYTNSFICSVDAYGGNKVLSLVDSVLLKINVWCRRQLGNYHAHYSKNNYSIFEATLNLVLLLVTNSSEDDFEETMFIESPVGSTPELKLIHLLIVRSIHAAYKQALISSNGRSDSEFKHPLTILANELKAVAEKECTDFSPILNKHYPEAQRVALIFLHMLYGKQLELFLERTDNSENSKEILAASNNFELFIAQKLYSVYGETVGSSFSNYLKPYMVGHFSSPLVLQWLHAQHENVLEWTKRTIEIEDWTPLSAHEKQARSVVEVFRIVEETVDQFFNTSLPLEIVHLRSLLIGITRSLEVYLLHMENQQVPGSTLLPSAPVLTRYAESMNPFAKRKLIEPTVPEEKVAMKLNNLAVPKLCVKLNTLQFIRDQLDAIEEGVKQSWVSVLSG

SEQ ID NO: 63464 - protein, 277 aa, Zea Mays
MGQMSRQVQKAKNHHQLALAILVLLFVYWLSYWRWRLPYASADQDLEFELGHVKHFTFHDLQSATDNFNSRNILGQGGFGIVYKGCLRNGTLVAVKRLKDPDVTGEVQFQTEVELIGLAVHRNLLCLYGFCMTSKERLLVYPYMPNGSVADRLRVWDTIGHIAPEYLSTGQSSEKTDVYGFGILLLELITGPKTLSNGHGQSQKGMILDWVRELKEDKRLDKLVDRDLIDSFDILELECSVDVIIQCTQTNPMLRPKMSEILHALEANVTLAETSSS

SEQ ID NO: 63465 - protein, 162 aa, Zea Mays
MICGNHVRARPPAVSAPPADRLGPLMPPINLRQASPESVSKSATTSEMSTVSRASLDQKLALAKRCSREATLAGAKAAAVATIASAIPTLASVRMLPWAKANINPTGQALIVSTVAGMAYFIAADKKILSLARRHSFEEAPEHLKNTSFQGTGRPHPAFFRP

SEQ ID NO: 63466 - protein, 599 aa, Zea Mays
MQQEIDLLKNLNHKNIVKYLGSLKTKSHLHIILEYVENGSLANIIKPNKFGPIPESLVALYIAQFLYDQVLEGLVYLHEQGVIHRDIKGANILSTKEGLVKLADFGVATKLTEADINTHSVVGTPYWMAPEVIEMSGVCAASDIWSVGCTVIELLTCAPPYYDLQPMPALFRIVQDVHPPIPEGLSPEVTDFLQQCFQKDAMQRPDAKALLMHTWLQNLRRALPGSLRQPTPLRNIDGDDEGSRGDNSLGFCDTPGDIQTTITSNVDQENGSKEPIMDSTVQSKSEELHDGNLKLTEGSSSNSVALMKDNVVLNKGPTLVLHEKLPVESSSGGADLNGKVMAHELLQGGPPGKVELENKESSSSDVFSFQAGRQNIGFQKVVEPSVVEGPKQLSRFSDKPEDASLEDLFPPNDKWGDNGAEPSTSTTVQELKYNGVQNAFLKGLNARVEKQKENDNESMNGGKLIEFAMQLENIDALGFGEHIPGESLFPVQSVEYNKIVAQLRPGESEDVILLACQKLLSIFSYRPEQKHIYMAQNGFLPLMELLEIPRNRILCSVLQLINNIVKDSTCFLENACLVGLVRLMFQSNSRPSCSVDWDR

SEQ ID NO: 63467 - protein, 1011 aa, Zea Mays
MPMRLLLLLLLTFLATAAAVAGAAGGAAAAGSDADALLAAKAVLSDPAGALASWTNATSTGACAWSGVTCNARAAVIGLDLSGRNLSGPVPTALSRLAHLARLDLAANALCGPIPAPLSRLQSLTHLNLSNNVLNGTFPPPLARLRALRVLDLYNNNLTGPLPLAVVGLPVLRHLHLGGNFFSGEIPPEYGRWRRLQYLAVSGNELSGRIPPELGGLTTLRELYIGYYNSYSSGLPPELGNMTDLVRLDAANCGLSGEIPPELGNLANLDTLFLQVNGLAGAIPPELGRLKSLSSLDLSNNALTGEIPASFAALRNLTLLNLFRNKLRGSIPELVGDLPSLEVLQLWENNFTGGIPRRLGRNGRLQLVDLSSNRLTGTLPPELCAGGKLETLIALGNFLFGSIPEPLGKCEALSRIRLGENYLNGSIPDGLFELPNLTQVELQDNLLSGGFPAVSGTGAPNLGAITLSNNQLTGALPASIGKFSGLQKLLLDQNAFTGAVPPEIGRLQQLSKADLSGNTLDGGVPPEIGKCRLLTYLDLSRNNLSGEIPPAISGMRILNYLNLSRNHLGGEIPATIAAMQSLTAVDFSYNNLSGLVPATGQFSYFNATSFVGNPGLCGPYLGPCHSGGAGTGHDAHTYGGMSNTFKLLIVLGLLVCSIAFAAMAILKARSLKKASEARAWRLTAFQRLEFTCDDVLDSLKEENIIGKGGAGIVYKGTMPDGEHVAVKRLSSMSRGSSHDHGFSAEIQTLGRIRHRYIVRLLGFCSNNETNLLVYEFMPNGSLGELLHGKKGGHLHWDTRYKIAVEAAKGLSYLHHDCSPPILHRDDSGASQCMSAIAGSYGYIAPEYAYTLKVDEKSDVYSFGVVLLELVTGKKPVGEFGDGVDIVHWVRSTTAGASKEQVVKVMDPRLSSVPVHEVAHVFCVALLCVEEQSVQRPTMREVVQMLGELPKPAAAAAAAGQGDEVPGSGDGDECSAAPSGAPAADESVEAPHGEATKEPSSQSSPTTDLISI

SEQ ID NO: 63468 - protein, 1266 aa, Zea Mays
MVNGLLKTAQGPPAGVPTTLVPPQDTTMKSEAMKCLVAILRSMGDWMNKQLRIPDPASPNVESEKNDNDDGNELPQADNNGDESSEASDSHSELSNGISEAASLEQRRAYKIELQEGIYLFNRKPKKGIEFLVNASKVGETPEEIAAFLKSASGLNKTMIGDYLGEREDLSLKVMHAYVDSFDFQRLEFDEAIRAFLQGFRLPGEAQKIDRIMEKFAERYCKCNPKAFSSADTAYVLAYSVIMLNTDAHNPMVKNKMSPEDFIRNNRGIDDGKDLPEEFMRSLYERIWKKEIKMKEDEFVPQQQQSTSSNKILGLDNILNIVVRKRGSSMETSDDLIKHMQEQFKEKARMSESVFYPATDVVVLKFMVEVCWAPMLAAFSVPLDQSDDEIVVSQCLEGFRSAIHVTAAMSMKTQRDAFITSLAKFTSLHSAADIKQKNVEAIKAILLIADEDGNYLQEAWEHILTCVSRFENLHLVGEGAPPDATFFALQQPDLDKSKQAKSSILPVLKKKAPNATSASKRGSYDSAGVGGKASGVDQMNNEVTSLLEQVGMAEMNRVFVRSQKLNSEGIIDFVKALCKVSMEELRSASDPRVFSLTKIVEIAHYNMNRIRLVWSSIWHVLSDFFVTIGCSENLSIAIFAMDSLRQLSMKFLEREELTNYNFQNEFMKPFVVVMRKSRAVEIRELIIRCVSQMVLARVSHVKSGWKSMFMVFATASYDDHKNIVLLAFEIIEKILREYFPYITETETTTFNDCVNCLIAFTNSRFNKDISLNAIGFLRFCAAKLAEGDIGSSRLKDNPSNSNPPSPHLTNDGKQECTVLVDKEDHIHFWFPLLAGLSELTFDLRPEIRKSALQVLFDTLRNHGHLFSLPLWEKVFDSVLFPIFDYVRHAIDPSGNPPQGQSVENDPAELDQDAWLYETCTLALQLVVDLFVKFYDTVNPLLKKVLLLLTSFIKRPHQSLAGIGIAAFVRLMSSAGSMFVDEKWLEVVLSLKEAATETLPDFTYVSSGAYLENVPTENGVSADNREDESEPVADDNEESSRSRNLYFTIGDAKCRAAVQLLLIQAVMEVYNMYRGQLSAQNTVILFEALHTVAAHAHKINSDSDLRSKLQELGSMTQMQDPPLLRLENESYQLCLSILQNIFLDSSPDHGSTEVVESHLIGLCKEVLEVYLSTARPSQPSSGTQPLGHWLIPVGSSKRRELAARAPLVVSTLQAISGLGDSAFEKNLRQFFPLLAGLISCEHGSSEVQVALSDMFSTWVGPLVLQSC

SEQ ID NO: 63469 - protein, 60 aa, Zea Mays
MHLIHAPKKTTYIITECIEINVTITSEYLLHSESHTKIKDKYKNKLNPSLVPISQLGDAT

SEQ ID NO: 63470 - protein, 247 aa, Zea Mays
MAHPTRDLPLMAHQSPRPRPSFNSAPIIPPAATNQRRIPPEAFLQWRVEGRLLLIGATTDDTMAPPDAPLPATRKPDIVGVLAPTDLACLPQDCRRSPPSPSRRAMPAVIPASARPTSTNLLCRCPPAHRHPSPAAATDDLPRPPQGGFCKRACRGSYRRARRGTRTRRRPRGCWRTSSPSRSTLGPPTRSFWPRNGGGDAAPSRPSAGGRTNEFHAATLHLPRRRCPPRTCCSIEIRPENGHKRCP

SEQ ID NO: 63471 - protein, 68 aa, Zea Mays
MGEKQEDGKYKHSVDLPKTTFELRANSVQRELELQKLWDDNQVLKRVSEEHWVIFTWAMRSIKSSRIL

SEQ ID NO: 63472 - protein, 1718 aa, Zea Mays
MNVGQAAHLSGQMSGQTAQMNQVPATGVGIGVGTADGLPQHQPMQEMAAFSGTDQQFVMFRTTMREKIFNYIGRKQSSAEWRKRLPELAKRLEEILYRKFPNKTDYYNMMKGPVEPQLQFAIKTLSAQNQHNQQNPQMARQIASSSSYGTMIPTPGMTQGTNASSRIPYVTENNGLSSSGAGMVPQNANMGASMQGPMSNGFQHLNASIPQNSTTNNIQSTMGSVGVQRQLPHMIPTPGFSNQQNVPSNPDYSNGTGYFNGEPAVASHMQHQNQFPSNQIQHIGGHNNSGIHSSMLDSSSAYGLSDGHMNGGIGVHGSNMQLTNRTTAPQTYMNISPYGNSSKPMQQQFNQHPQQRIPIEMTGSGSFYATGSTPLTTANSQSMNVANLQSRSRMNQMLVSNQLNIQSIQQQPQIKNEVLDQTEKVNFQSPQLTHDQLLRQHPMPQHQVQPNSQFVQNQYHINQQQPNSQHQQAMLRNNSFKQSQMASTHSMQLAEQGSLLHTELVSSQTSDPADLPSFQGQYQQRNALDNVKGGQMLGHLSSSQNFHPSVSHGSQQLLPSNQQLDDGSNAVSYVLKGSQAEQMLRPQWQPQTMEKAPVTTNSTLEKQIQEDFCQRAMSQDGAQQPFSSDWRLSNCTAASIDPALPKPAAGGFEQVNGNIHYLRQIKWLLLLFHAKTCTYPVGSCKFHGCVQVQELLKHFQNCQSKDCSYRSCSKSKMMSHHYKTCVDEQCPVCSVVRKFLRQSTEQASKQKALESRKLAQQNVPQRIMNGIEGDRMDVDPMSVEAFDDQPFVPKRLKTHPPSPSGLENDISVVSNYHVNSGFALQETQPEQLDHNNRTSYLKREVDAKADMRAPQKPIKISYGIDGNVTASRHNVIPGVPSEINSHIKQENLLVDKETSETALEVKNETNDPTDATVSKSGKPKIKGVSMTELFTPEQIMEHIDSLRLWVGQSKAKAEKNQAIGHSENENSCQLCRVEKLTFEPPPIYCSPCGARIKRNAPYYTVGTGDTRHYFCIPCYNESRGETIEVEGQTFPKARLEKKRNDEETEEWWVQCDKCECWQHQICALFNGRRNDGGQAEYTCPNCYVEEVKCGLRKPLPQSAVLGAKDLPRTVLSDHIEDRLFKRLKQEKQDRAAAAGKNIDEIPGAEGLVVRVVSSVDKKLEVKPRFLEIFQEDNYPTEFPYKSKAVLLFQKIEGVEVCLFGMYVQEFGAECSFPNQRRVYLSYLDSVKYFRPEIKTVSGEALRTFVYHEILIGYLEYCKLRGFTSCYIWACPPLKGEDYILYCHPEIQKTPKSDKLREWYLSMLRKASKEEIVVELTNLYDHFFLTMGECKAKVTASRLPYFDGDYWPGAAEDMINQLRQEEDDRKLQKKSKTKKIITKRALKAAGHTDLSGNASKDAMLMQKLGETIYPMKEDFIMVHLQYSCSHCCTLMVSGRRWVCHQCRSFYICDKCYDAEQQLDDRERHPSNNRDTHMLHPVDILGVPKDTKDRDDILESEFFDTRQAFLSLCQGNHYQYDTLRRAKHSSMMVLYHLHNPTAPAFVTTCNVCSHDIETGQGWRCEICPDFDVCNSCFQKGVVTHPHKLTNHPSAADRDAQNAEARQMRVQQLRKMLDLLVHASTCRSGSCQYPNCRKVKGLFRHGMQCKTRASGGCVLCKKMWYMLQLHARACKDSDCNVPRCRDLKEHLRRLQQQSDSRRRAAVNEMMRQRAAEVAANE

SEQ ID NO: 63473 - protein, 489 aa, Zea Mays
MHEMHPGVQDMACDTFLKIVQKCKRKFVTQQVGENEPFVSELLSNLATTIADLEPHQIHTFYESVGHMIQAESDNTNRDEYLKRLMSLPNQKWAEIIGQASQSIDILKNQDVIRSVLNILQTNTSVASSLGPHFFPQISLIFLDMLTVYRMYSELVSSTIAEGGPFASRTSFVKLLRSVKRETLKLIETFVDKAEDLPHIGKQFVPPMMDPVLGDYARNVPDARESEVLSLFATIINKYKGEMLEDVPRIFEAVFQCTLEMITKNFEDYPEHRLKFFSLLRAIGTHCFQALIQLSSQQLKLVIDSINWAFRHTERNIAETGLSLLLEILKKFQASGFQNQFYKTYFLTIEQEIFAVLTDTFHKPGFKLHVSVLQHLFCAVDGLTEPLWDASSVPYQYTDNAMFVRDYTIKLLGTSFPNMTVTEVTKFVDGLLSSKLDLPSFKNHIRDFLVQSKEFSVQALGATSRLATNSVPAAALCLQVILSCDGHVL

SEQ ID NO: 63474 - protein, 335 aa, Zea Mays
MVMGASGSKLEKALGDQFPEGERYFGLENFGNTCYCNSVLQALYFCIPFREQLLEYYANNKTPGDVEENLLTCLADLFMQDAHEFLNFLLNELVDILEKESSAAKDSPQSSSPEKAPNGPVQPLANGVKKEPPVTLVHKNFQGILTNETRCLRCETVTARDETFLDLSVDIEQNSSITSCLKNFCSTETLNAEDKFFCDKCCSLQEAQKRMKIKKAPHILVIHLKRFKYIEQLGRYKKLSYRVVFPMELKLSNTSDDVDTEYSLFAVVVHVGSGPNHGHYVSLVKSHNHWLFFDDENVEMVEEQTLQTFFGSSHEYSGNTDHGYILFYEGLGGKS

SEQ ID NO: 63475 - protein, 275 aa, Zea Mays
MALLRLQEQCSLLRISSSHHPNPIDIPRNPRKNQLLVPNAAKIANASEIPVPRIPTSTSKAAILARKAALWRDALVPVAAAFASCPLPSLAAEGDGKVSLESIVEYVFKKYKPVSAIDAFRKLRDVPEVQLLDIRRGKSVRFMAPPKLKLIDKSTVQVEFDEEDEKGFVKEVLARFPDPANTVVCVLDNFDGNSSKVAELLVENGFKEAYAIKGGLRGPEGWQAVQENYLPPSVHVFPKKKRGAKLAHTDASNDGTYVQQEGSEESSAPPSSTLT

SEQ ID NO: 63476 - protein, 651 aa, Zea Mays
MPALYAYYGDGGCLVSAPAELAGLFCRGAVQQRKRTLVTASAVAAAAAEFVRAAKKQRQLPLPSLDALPDECLFEILRRVPGGRGRGASACVSRRWLALLGSIRASELGQAAAAAADTPSLPDLNEEFVMEEDNEESPADRCVDRVLEGKEATDVRLAAMAVVAGSRGGLEKLAVRGSHPTRGVTDQGLSAVARGSPNLSSLALWDVPLITDAGLAEIAAGCPSLERLDICRCPLITDKGLVAVAQGCPNLVSLTIEACPGVANEGLRAIGRSCVKLQAVNIKNCPLVGDQGISSLVCSATAALTKIRLQGLNITDASLAVIGYYGKAITDLTLTRLAAVGERGFWVMANAAGLQNLRCMSVTSCPGVTDLALASIAKFCPNLKQLYLRKCGYVSDAGLKAFTESAKVFENLHLEECNRVSLVGILAFLLNCREKFRALSLVKCMGIKDICSAPAQLPLCRSLRFLTIKDCPGFTDASLAAVGMICPQLEQVDLSGLGEVTDNGLLPLIQSSEAGLVKVDLSGCKNITDVAVSSLVKGHGKSLKKINLEGCSKITDAILFTMSESCTELAELNLSNCMVSDYGVAILASARHLKLRVLSLSGCSKVTQKSVLFLGNLGQSIEGLNLQFCDMIGNHNIASLEKKLWWCDILA

SEQ ID NO: 63477 - protein, 569 aa, Zea Mays
MKGATIPSVAIMPSPLFLWRFKVVLFLLWGLCCCKISWDSVMRMSVDLRDLFLYEAFLYYNPLLLVALMIWLWGVNLWVFAQSSVNYAKVFDLPQTHLSHREIWRCATWLTLIVPTSMTAYLYLYSHGEVSLAASQPVLLYAILLMILLSPFDMFYLSSRFYFLRTVWRIILPLQAITFPDFFLADIFTSMSKVFSDLERSVCRMVNRQVATIAWFEADSICGSHSVAIPLVLMLPYLWRLFQCLRQYKDTKEKTCLLNALKYSTAIPVIFLSALKYHVHPDQWVGFYRPLWLISSVVNSLYSFYWDIKRDWDLSILTRIFMFKNPSIWTYLLYGQNWVLYWVLGSNLVLRCTWTYKLSAHLRHNYLTVFTIAALEILRRWQWVFFRVENEWNKMTAKQNMEMSSDMPSEGDRLLDSSNHTSTQEEANWIMFHVHLLNLHKRLILYYKSYGAEKASSSGHGRCRSVPSMPSGSADRGGACTMERSVSWRRSWRLRWRMRRSTASLSSAPAPGRRYRQLVTGAASTTLPSPSPYPAGGGAFLDTMEDDMARQVLVPPPDELAGEQREQVR

SEQ ID NO: 63478 - protein, 779 aa, Zea Mays
MTTMSDDGDRTCPLCAEEMDITDQQLKPCKCGYDICVWCWHHIIDMAEKEETVGRCPACRTCYDKDRIVKMAATCDRTVAEKNAEKKHRTQKVKPKAAPSAAATSTVESKKHLASVRVIQRNLVYIIGLPAHLCNESVLECREYFGQYGKILKVSVSRPTGPPSQQASANSNISVYITYAKEEEAIRCIQAVHNFVLEGKVLRACFGTTKYCHAWLRNMTCGNPDCLYLHDVGSQEDSFTKDEIISAYTRTRVPQMASGVSQRRTGTVLPPPGDDFSYSAVVSAKHTFKNGTLNTTSQPRLSPPNSSSGRSTLPSAASWGQRDLNARTTATGATSSQSHTKPKSESQSNPFSSSSVFSCTKTPSSWNDDTSTAAKISEGQQLSEKESRTLQPYKPGISKETQALSSLESSLDIDFSTIPSAWNDDDIVVPDVMPKGSDENQVANKNGELTHPASKSLVLSKKDIKMNITSKTPSDFVSSPAISKSDVSTSDGDHSLTNITPKCLASNAVECQSSHTAVEKMLEDIGSKDTDMEKLSAQISSVTLGGNDEIQSMAGNQQPDVMPCTSVDVLMDQNFGRDLAHPNPDELLLPSENKDSIVSCQYSSDKRLDWSLEMQNCSVTPLNDRMDSALLTDKIHSRQLDGSEQSSYSSFVEFPSTVDTSLWNDTENNAALTIDNITSSQMQPGFSSTDNTYALLNGGQDGLGCLGNLKIMMSIALRLHGNQEPGSKSPDFHLLDRITKETCLIHLSETVVLVLSRISVCYPRILEEIFTRMALHSNL

SEQ ID NO: 63479 - protein, 226 aa, Zea Mays
MATVMAAAASAVEAPATAKAKKESKKQEEGVVTNLYKPKEPYVGRCLLNTKITGDDAPGETWHMVFSTEELSEESVKSLYQTGKAYVHDSLDIYGRPVLIVVAAKHFPSTQDPVENQKLCAYLVEKAVNRLPPGAENILGIFDLRGFRVENGDLQFLKFLMDVFYYYYPKRLGQVLFVDAPFVFQPMWQVVKPLLKSYASLVRFCDAETVRKEYFKEETVPPDFRD

SEQ ID NO: 63480 - protein, 422 aa, Zea Mays
MFGRGSPRMNLIQAATMKKISPRSTTNKRKKRTSPKVGRLRANWNSGLEKGLVEILQDHNNDCYKGQNGWSSEAWNRIVKLFHEKFSYVTFTKCQIQDKEKELKRDYKALKEARQQSGVSWDERLCRIEAEEPIWNNLTTSNERLKKFRTKSFPLFEALGELYDGNIAEGTMNFTSIEPSRPPVTQPCQGAATQPSQAAFTLTQPSQIAFTQPSLAAFARPSRTAFRHPSLAAFPQPSQAAFAQPSQTIFTQPSEATFTQPSEATFTQPSEATFTQPSQAAFTQPSQANISQAICDEDDELRVLDPPAPASVSKRAKNVGTGNSRTRINKRTQDGNVVEMMGRFLEMKEKQAEADERATTNANEDDFPIQTCIAIVDGMEEFSDDEKVDSYDVFKDAQNRAIFMTAKDATRIKWLRKKIART

SEQ ID NO: 63481 - protein, 205 aa, Zea Mays
MHCALPPSEPPDGERPRCFRLAAVGGAQLRGGWHLSAIARLQGFSSGSPAAFPHQWSRRMVTIGLMVERSKPGCGLCPALSFKDLHHPCWGGERGEAGPTFAWAGVPLLPLASGGGNHPLALRRRRPPAMRGKANCCCPARVQHSVLYPGDCGRLYRRVSQHVVRREGGTRVLGRSHSRFRGEDGSEDLPVRFGAACARWCGVGR

SEQ ID NO: 63482 - protein, 379 aa, Zea Mays
MVHQGKALIRILHLIFSIEVAQAKGASHMETNSQSNQKQESCGPNGSKDRILRSTSRSSSSREKSMEKSCSSAHRGKRTLWGRTSARKDLSTEEIECCSDDESLIEKLESNKVDLQSKIAKEAKENAILQSSLEKRKEELHERRLALEKEVENLREQLQKERSLRTSLESGVMNLRRGQVSLPSTTDSKVSGQQLCCESCNKRLLNTDRLGGPESSSVAASPTIGSDSASGMGDIEQSRKQTAQDSPSSTDKPGHEAVGGSSQRAPQRRQSIAREGQDGWSSSSSNSKWNLAQKQYSNSPLIRGLHGSSRLEDFGGSIPPAASSALVKLTNRLNFLKERRALLASEMQSLDLGRPPAAAAAPSAKSPTPKGHERKKSRD

SEQ ID NO: 63483 - protein, 283 aa, Zea Mays
MISARYHTSVASNQGGARYGESSSPQDNSSEAMKTDSTCKMKSNSDAAPIKQGSNGSSNNDVGSSTKNVAARPSGDRERVASPLAIKSTQHASAFHTIQNQTSPANLIGEDKADEGISNTVKMSHPTEVPQGCVQHHHHVHYYLHVMTQKQPSTDRGSSDVHCGSSNVFDPPVEGHAANYSVNGGVSVGHNGCNGQNGSSAVPNIARPNIESINGTMSQNIAGGGIVSGSGSGNDMYQNRFLQREAALNKFRLKRKDRNFGKKVACFQLHACCSYDLKSVIVI

SEQ ID NO: 63484 - protein, 119 aa, Zea Mays
MAFRLSVQHRQLDAPGSTPKAGARRAACNCIGPPYQVDKFFIRRRAHGPNPKRARDNVGRRISLDSSLARVSKLVVRLFLRCVRSDATRFRPSSGSSPCISVRHGQRRGRACLSGQGSL

SEQ ID NO: 63485 - protein, 527 aa, Zea Mays
MADLVMAPPPAMDLFGEPIEAHPPWFKPDAFLRAGFDADAYVAELRSYVPLDSLAAELRAHLAALRAELVGLINRDYADFVGLSAHLKGVDAAAARMRAPLADLRDKVAAFRAGASAALAALREGLQQRAAATAARELLELLLDTSHVVSKVEKLIKELPTAPSDSSNAEIPINDTGTPNGKAGTGVRETQSILLERIASEMNRLKFYISHAENLPFIENMEKRIQGATKLLDGSLERCFVDGLEHRDAKVIYNCLRAYAAIDNTSSAEELFRTTVVSPLIQKIVPQNYARAVAGASSDELEEDYQQIKACVEKDCKFILEISSSENSGLHVFDFLGNSILKEVLSAIQKGKPGAFSPGKPKEFLRNYKVSLGFLDFLEGYCFSKSAVTKLRYEPAYTDFMRQWNVGVYFSLRFQEIAGGLDSTLTNTFSPTGLNEAQQKPLLLKQSIKLLESLDSCWSDEVLVFSHCDKFLRLSLQLISRYTTWLSCGLSARKASDRSPNSPADAEWALSIPIEDFIYVSYICNNV

SEQ ID NO: 63486 - protein, 656 aa, Zea Mays
MAAAPEERLDVLNAAGDKIGVSKPRSEVHRDGDYHRAVHVWIYSESTGELLLQRRADCKDSWPGQWDISSAGHISAGESSLFSAQRELEEELGINLPVDAFELIFVFLQECVINNGTYTNNEYNDVYLVTTLTPIPLEAFTLQESEVSAVRYMRCDEYKSCLAKESREYVPYDVNGQYGQLFSIIEERYKENTESQSLTLQKQMNRYVPIHLEPDLTSLSEGDREALGYILKAAIVIDDIFYEQVWNSNKMLRDWLKGHSEFSPFDKLKWAYYSINKSTWSCLDENKAFLSTADSAVQLLTEATKPVSGWKGIEYRAAFPLHKPPGANFYPPDMDKAEFELWKSKLTDKEQNDATGFFTVIKRHDSLSSSSLTQSDGSDQTKTKDDLFIVPYSKEYRPFLEKAAELLEKASACSDSPSLKNLLRTKANAFLSNDYYESDIAWMELDSNLDLTIGPYETYEDSLFSYKATFEAFVGIRDDTATSQVKLFGDQLQDLEKNLPMDNIFKSDSISAAPIRVINLLYNAGDVKGPQTIAFNLPNDERIVNERGTSMVMLKNISEAKFKHILKPIADACIREEQKEYVDFEPYYTHIVCHECCHGIGPHSITLPSGKKTTVRRVHTQTAAQKIIDFNSAPAVVFHFPSKPFHFPIYVLTVCT

SEQ ID NO: 63487 - protein, 68 aa, Zea Mays
MGQQEVPNISFIYQSIDTCPSLFHVSITITRFQPLSVYASTNLVQQSKRKMYLIGIKHRECGKQRRKQ

SEQ ID NO: 63488 - protein, 66 aa, Zea Mays
MMDCIIYLCPPNIKQDLDLHHVVYLIHIYLNFIPPTPIKYTNLESMRLRPEKDKINLVKEGEKSNS

SEQ ID NO: 63489 - protein, 894 aa, Zea Mays
MFLFGTGLTLQQVLFFCDLCHAFNIYIVFCHITISSPINLICRSGGSYNGRRSVDEGFPRDSYGRGAYCQDTHDRNMYAPPPSVGGIWSQPRRNHDEEYATARDHRSRPDFGVDRSKRIGSRESAEFHGEFEDRYHSSNQSRDDSYERDHEYGHYDYDSDHERGRRDSSWKRRDSCESKRERSGLSREREESPYMRHSRSRSHGRDDRSRSWSRSRSPRARSHGRNQRDGLYDDNRFDRRREYDWDDRRHGDSVAPSATVVVKGLSMKTNDDDLYQILSQWGPLRSVRVIKERNSGMSRGFAFIDFSTVEAACRMMEATGKSGLQIDGRNVFFQYSSKPTGVMGGSSPGQENLTRPTYGPRTVAALCDWICSICGCMNFARRTSCFQCNEPRAEDALPADATGSSPHFGRKGSELGPTHVLVVRGLDENADEEMLRYEFAKHAPLKDIRLVRDKFTHVSRGFAFVHFHSVEDATKALEATNGITLEKNGQVLRVAYAKSTHGPASGGSQSNSLAAAAIEAASFAQQYDAIGWAPKEYNPDDKQNSNFESQKDDGSGTAQSGFVWDEKSGYYYDSASGFYYDGTTGLYYDSNSGVWYSYDQQTQQYVPCTDQSNTKAAGETSSENMISDSICGKKVVISAPAATIKQNKKTSLPDAVQAAANAALAAEKREKEKAKEIKLASKSSLIANKKKMNNVLAMWKQRNQEGQAARIVIDDKEPPNSDDRFNHSHSGTGFSSKSKPNFEFENAMDNSVRQGIASTQMLDSDVKPRPVSNSLGTTVMGVIRGSTRGVIKSDTTFHALSDAGSTDSRTTIITRSNGLMTSPVELVTPAPYKTDVSALVSNTSSGVSGSGKRRFSEAPGQSQYRDRAAERRNLYGSSLRTDAVGLDSSKNTLS

SEQ ID NO: 63490 - protein, 126 aa, Zea Mays
MEEEAPPMELVREKKLSEKIRLCKMEVLKKSHTSVEDSDHIFLESSGLQDGLSCKKDLHSCGTKASDEEISDRLQENHDNTQPSDNHNYSVDQTQLPFLQALLRVQMKRRCVYSSITHLNFPQQPL

SEQ ID NO: 63491 - protein, 182 aa, Zea Mays
MLQSIQGQLAEFRSYEGQEMQIKEKIVPLKIDLRVNNTVIRDQFLWDIGNLDSDPEEFARTLCDDLNITDPEVGPAIAVSIREQLYEIASQSVSVMREKQMSKKGRRAPEFSSNSKAVNNAVDLFKYFGSKGSVIRKRKEWYLYEPVVDVVANDEDGKEEANNSSRPKKRADEEKAASLQSL

SEQ ID NO: 63492 - protein, 828 aa, Zea Mays
MTRWDEILTLPVQNPPSLEFSAADISWSMVEGWRDSMDRLALIPYSRVNDFVRGESNNKDCPSRFHVEARRRRPPTMNCKPKVDGILEYILYWCSFGPDDYRKGGNVRPSRPIAEKRKTPAGRPNTKRGCVCHFIVKRLIVEPSVALVIYNHNKHVDKKGMPCHGSMDKMAVGTKAMFAPYISDELRLQVMSLLYVGIPVETIMQRHTEMVEKQGGPSNRDDLLTHRYVRRLERKIRRSVYELDDDDAISIGLWVENNQDCVFFYEDFSDTDTFVLGIQTDWQLQQMIQFGSHSLMASDSKFGTNKLKYPVHSILVFDQHKNAIPVAWIITPNFAHGEIYKWVGALYDRAHTKDPTWQLGGFIIDGPLTDVRTIREVFHCPVLISLWRIRHAWHKNLVNKCSDIEKRSTMAKRLGDAISIICRGTGDVELFEAFLQDFVECAGFLDYFKAVWLPRLGAWITVLKATALASAQVASAIESYHHLLKLRLLNEADESVYWRADWLVDKLGTKVHSYYWLDEFSGKNSFSRYWRSEWSSGPNPWCQGMQIPDSDVVIEGNYASVVSQKNKEKSHVVLNPGSEFALCDCSWSMKGNLCKHVIKSAKVCRDRGLALPSLAMFHYYQALANLVHCPPSDTLISDHAMALAVSVKTQLDAVLCAVNGSSSIRPGFQDPQSTSKTREAEIEEANSENGVCTSQPQPGAGDDEDQAIRTGKRRKLGDASGDTEDGSIYQDSLARKKCKSGEASGDDEEASTEEGSRACESRKPGEASTNNEEVSIGQGSRDHEKRKSGEPPGNEGTSATQATEPSETETSQATNGLVRSLLPSSECT

SEQ ID NO: 63493 - protein, 605 aa, Zea Mays
MESRGRRLRSPERQRPASRKVPVVYYLTRSRHLEHPHFVEVPLASPERLYLRDVINHLNVVRGKGMAAMYSWSCKRSYKNGFVWHDLAEDDLVVPATDGEYVLKGSELVDQSSSGPFYPVTVSNGSQKQQSRPKEGARQALPRDHSHPSCPPSSVTVREAKARRSPCVPPQDEDDDTTSPRRDRSLETMPQQELEPQQRNERAQPPASGSASPVEFRVHKQHAGCMDAATQTDDLGRRTPELRKKSLRSTDHDAVVREVTECWQRQSHPCRSADLPGVSREELLHQSTTPPSTPSTRGKSASLESLIRADNATSSFRILEEEEEEEEEEEEEEEEDIVVLSACPKLKPANVLVQLISCGSLSVKGHEDAAGPVRAYKPRLPSMKLPSPFVSRAMAMGELDYLSENPSRLVGVRMEEKEYFSGSLVETKTQRDGTAERYSALKRSSSYNAERERASDALDCTRREEGETDDRSSSRARCLPRTPMILASFLHPRGDPLKSPVSDCRRNSSARRQDCDAASGDGGSRSGLSQAAVSSDPSRIEGCALNPWCSRIEGCALNPWCRLSSGARVVIHCTIACNDSDEGSERSGSGESRWLQGDHAAALEN

SEQ ID NO: 63494 - protein, 633 aa, Zea Mays
MLLVMGNPGRSRQLSALVASAAILLSLSALPICRPYTYEQDVFAINGLYTALGAPQLPNWTSNGGDPCNEGWQGVSCVASNITSIILSGANLGGQLGNTLGNFTSLITFFLSANQLSGSLPSTLSSLTLLTSMSLNSNHLTGAIPDVFSALTGLANLHIQNNQISGTLNVLQDLPFQDLNVENNLFSGPVPVKLLNLPNFKKDGNPFNTSIAPSAQPPIAPTPLPSIPPSSGHVPSKEPAHSSSVPGGSTSGSGKHTTLKLVGYILIGVVLAVVLVLIAMYCLSKYKEKRSRDDIYMKNKIGRVPQKLGEPKIKEPPLKLKNDAEKETSNVVYDPSPRDGAELRFITDSFSEENIIRDSRFGKVYLAKLPDGELLEILKIDSSNSKVPVDAFLELVVRISELRHPNILGLVGYCAEFEQRLLVYEYCSKMTLHDELRHVDDSSKPLSWNARLQVASEAAKALQHLHDGCQPPVVHQNFEPSVVLLNSTLVVHISECGLASLASKSVSQLSGHTLFHYEAPEVHESGSVSDRSDVYSFGVVMLELLTGRKPYDSSYPRAEQHLVRWATSQLYDIDAITKMVDPSIRGQCSDKALSRFADIISRCIQHEPEFRPPMSEVVQDLTRMVSNVSRASM

SEQ ID NO: 63495 - protein, 529 aa, Zea Mays
MEGAILQALDIEKDSALGPVTKAYLHAPSCSPSPKVGMPNGQVKDAAPKDPSPAIQPPLPPPRSKRKRKTPYDSEDDTPQGSCRMRDLRDIGSKTVPTMDLSNAAAIFAPKYNDLPNVGQARRIVRSQATTKRKHAAAHQDQPCGIPRKKDRSRPLSELCNGDIWNGSRPNGQKADEHLLGVATCSSSSSGTSTLDTPLDTNSCHRSAASTDQAKGTAISCMARLLSDDSRHGNDFVGTPPAAQNISEPDHLHRYQPCGLTNNPTWKAGKHACKSIKMRTIRSVGHEGKDRTRDSNNDHGCQKTKTGKHEAARDDEVVLLENRLEKRSLNKNKPAEHDTKMHIAIVPSGMDCVGTVQQQHCKSKCGPEESLETLSSHSNCESGSVSSVVFEKPLHLNPSLYDVELSVLGSSNTWRRVPLVSLMSRLNCKPVVGYPVSVEVSDDLFGCPSSRRDVQLPATSRFQRAVPSSALEKEEVDRLWQPHAKRGGAGAGAVTSSSRKTRGAASGATIACIPLRVVFSRINEALRMP

SEQ ID NO: 63496 - protein, 201 aa, Zea Mays
MKVGKAYLVIKQTLQQIVEKQYNLSDVFSELIDEVLRAESGDNEDVYDVQKTTTKSDDILPQSAESCPDEADIDPLGKHGDVGKNMPTNTNVTPQATPHTESCSPIFDATPQIKVSVETDPATNTPQVDQISLDSEMQTVLALREYLCDTQSDTSSHYSTLRNRNDIVGTLNLLMNLYCTLLDNALPETDEMDKCKAVTII

SEQ ID NO: 63497 - protein, 124 aa, Zea Mays
MFIPFCLFMFFCIHSGTGALAIFLRKAFEVNITTSDYDDGEIEKNISYNCRANALDVLPHIRHTWGDPFPVCTPNWDIVIASDILLYVKQYDNLVKTVSFLLNEYKQKDHKSGCITITDKSGTF

SEQ ID NO: 63498 - protein, 212 aa, Zea Mays
MEAVRASAAWVASRSSHVTVDLQEIEKVVDQIQGDVPKVEWDYEGIHYFDNGPLTVQYLFVLDALNFCFWPDKDLSYDHLASGLKSALEKDKNALDSDRLQNYTGPQLRQLLNWPRPLPIEEERVRLLHEELKRSFGGQAANLVKSAGNSAATLIELITRHFPGTYSESETGMAHPPTTTVCLHMDLCSACYFGSESQETVMIDELVPHLGI

SEQ ID NO: 63499 - protein, 343 aa, Zea Mays
MAPEERMKTEASHKAIAAGGGKMTVLHSPVGVRSIVTSLVAFFILASSIVFLLDRGQEEQVQVAVEHGRQEVQVKLESGLQEPAIRGTTQEGDASNEECNWSRGRWVYDNVSRPLYSGLKCSFIFPEVACDKYGRKDAMYQHWRWQPHGHGCDLPRFDAIKLLENLRNKRMVFVGDSVNRNQWVSLVCMVEASIPDDRLKIRTFNGSLISFKALEYNATIDFYWSPLLVESNSDNPIIHRVEYRIIRADRIEKHASVWRDADIIVFNSYLWWRKQKDDMRMKVMYGSFEDGDAKLDEMEMVDGFEIALKKLTEWLGENIDKNKTRIFFAGSSPTHSCVHICYF

SEQ ID NO: 63500 - protein, 377 aa, Zea Mays
MSLLGPPARGAICLLVVSSSIVVLSTAGGLGSDATSRSAAAYLSVDDDYGEEDESGDSSFSFPDPETSSASTGLVFGFYDDKCPDAEEMVSSMVRKLYHADPNVAAALVRLFFHDCFIHGCDASVLLDRVGGQRSERDAGPNQSLRGLGAVEAIKRGVEKACPGTVSCADILALAARDSLVLVGGPTYPVLTGRRDSAQSFYYDADGGGIPPPNATYAMTLDAFARRGQFTERAHSIGKVRCRFIADRIYNFAGTGAPDDSIDPDMVGEMRAACGGGDGAAPMEMGYYRQGREVGFGAHYYAELLEGRGILRADQQLTAGSTVRWVRVYASGARGEELFRDDFAHAMVKLSALAPLTGSAGQDLGLEFEGKGGLMPF

SEQ ID NO: 63501 - protein, 52 aa, Zea Mays
MVRLYSRLTAVEPIVRDGAERGPNRVTQELRWGSGLAREASLFLWVGEATSW

SEQ ID NO: 63502 - protein, 101 aa, Zea Mays
MWSRGCDRARRGAYRLVIRGIRRASEHTPPTRYEISVASGSAAARRATATGYPGSGVPAVGAMALCLCGRRAGRCCNACCAGRRSRRGERVVGPSPSGSGV

SEQ ID NO: 63503 - protein, 254 aa, Zea Mays
MSYYGSSSSGGRSSRRVDYGRTYVVRPKGRHLATIVWLHGIGDNGASWSQLLDSLPLPNIKWICPTAATRPVAAFGGFPCTAWFDVEDTSIDGRDDIEGLDASAAHIANLLSSEPSDVKLGIGGFSMGAAVALHSAACYAHGKFTSGIPYPIALNAVISLSGWLPCSRTLRSKMEGSHIAVRRAGSLPILLSHGRVDEVVVYRDGERSAEVLRNSGFSFLTFKPYNGLGHYTIPEELDDLCKWLSSSLGLGRSR

SEQ ID NO: 63504 - protein, 493 aa, Zea Mays
MVVVVSTSLCSFLPAHPFSLARPRRPHPTNPTAKPLSRTLSIRCIATTAAGPPPLPPPKLVRCPALDRQAARASRLRFARKLLTLLLSKPRHFLPLRVLNRCRRFLGLPRRGRPLIPMVLRYPTLFRLFQAHTSLPLSPSLSTLAVALTPAAEALAADLAALRATGTGAGALAAKIHRLLLMTPRRNIPVNRLVHLAPDLGFSMDFRATLCPRHPDLFRLVNTSRGHALQLADPPPTPPPPPLSLRPAAPPDRLMDRPRRFPHLPLRRGLNLRRVHRDYLLRFHSLPEVSPFEPLDEGASLEMLERRACAVVREVLAMTVEKRTLVDHLTHFRKDLGLPNRLRAMLVRHPELFYVSVKGVRHSVFLVEAFDDDGRLLVEDEMLVGRDRLEELVREGKRMRRARKKGVLTFDGDSDEDEDDDAAEEEGSLKVDDEFGDLFEDGVIGEDWEEVGDGGGSDAYEEYDAESGDMEEFWVKKAVAQGLVGNGNEQDVW

SEQ ID NO: 63505 - protein, 587 aa, Zea Mays
MALHHLRLAPLALLRAASLPPLASSRIAARGHRRVLLFAPPSWPWRLLSPGARPRALATAAAEADDATSGSGNEFFAESTSWASLGVSERLASALCSAGLSRPSLVQATCIPHVLMANDVIVAAETGSGKTHGYLVPLIEKLCSKSSTTKDDNCQDTTPGAHDMVLVLCPNVMLCEQVVRMANSLLDESGKPLKRAAAVCGPNGWPAVHPDILVATPAALLNYLFDYDPEKRRRERFMRNVKFVVFDEADMLLCGSFENQVIRLINMLRFDEKLLSRAQDSGKDISLGSDDEYHEDSKFETAEFGSSDKEIEDNIVEDRLVKLENSHVGAHKDWRRVRKIYRRSKQYVFVAATLPQSGKKTAGGVLQRMFPDAVWVSGTYLHRHNPRLERRWIEVTADTQVDALLNAVKYGLKSEVHDAKDVPRRTMVFTNTVDAANSVSDILHRVGIPCILYHRESSLKERANNLQSFRENGGVLVCTDAAARGLDVPNVSHVIQAEFAACAVDFLHRVGRTARAGQSGIVTSLYTEANRDLVRAVRQAEELAQPVVGFRFHHPLEGGSIQQEKKLSQQTKEASITKTRSTAILIA

SEQ ID NO: 63506 - protein, 830 aa, Zea Mays
MVALDLDATLKGLFQQVLHCLENIPKPQGESVPDITADLADLRKHWLSILMIVTSSRSSINIKHLEKATVSTGKEGLVSEGNAAYNWSRCVDELESQLSKHGSLKKLYFYHQHLTTVFRNTMFGPEGRPQHCCAWLGAACSFPECASAIIPEEVNKIGRDSISYVESLIESIMGGLEGLINILDSEGGFGSLEMQLSPEQAALRLNNTRAKGVSSLLTPGYESYPDNSSSIKMLEAAMQRLTSLCSVLNDMEPIGVLNHVFVLREYMRDCIIGNFRRRFHSMIRTENCIQRPSIIESLLRRHLGIIHLAEQHISMDLTEGIREVLLAESYTGPFPNLQMFETPVGTQGGGSAVEMICNWYIENVVKDASRIGVAFDAIQNCFRSSQPIGGGCLAESFTDKREMKSLVRLFGGYGIDKMDKMLREHTSALLNCIDSALRSNRDALEGLAGTVNSGDRIERDVNLKQIIDLETLADLCIQAGQAITFRRLLVEAVGAVLEEKVPLIYSLLKGLALQLPDEVPDKNEIIRLRKVASSVGVGDKHDAEWVHSILADAGAANDNSWILLPYLCAAFMVSNIWNGAVYDVNIGGLSNNLHCLARCVSAVIGGSEYTRVEREQRINSLSNVHTDELQEAELPSRVSAEANIKSCMQIYVKLSAGIVLDSWNDTSRQHIVPKLTFLDQLCELSPYVPRSTLEAHIPYTILRSIYHQLYGGSLLASEPAEQSPRQSPLISLAHASPSARQMQNRPETTPRSHTFDPGYYSSSGSQHDDGYDADRRTGRLLRSLRRSGPLDFGASRKAKKFVEGSSSGSSHGAGSLQRFAVSRSGPLSYR

SEQ ID NO: 63507 - protein, 1729 aa, Zea Mays
MKPRTYSNFVSLYMKKVASAFDAKFSNQASSKDESFRCTLTLHVLLENPPSDYPDIMREEVLNGFSAIFLHIREEGKLTRKLMECINTFLLKDGPNLGYKSVKIHNAVQEFIFRCWMTTHDQALKSLFITYVKVQLKIARNIPEILEKLIDVIIKELDKNVNTGPGLLWCEAPRDEKAVSLRCFQEEWMDLSATVFYLACKCTTKTANREKRMKKEHIMNLIVDGLFRGSLFWSGSVCFLIHKYGYHLEKSLLISWFEASCKALRSILIHANAIRFQDSLLWLLRTFKEFSTVLMLDTRDKVQFCLTKGEMSIVEDCWQAIWNSLVHAFPLLSSIDLVADSALILLGGMIMRDQVHTSFLSEDTWNLQIFKKFPSPSALYFVACYFSRIGFQGDLSNSIFVRKTLLRSTLELIHSKEFSLLNEQNVVIIPEAIFSLCAGFSSPVINSSDILQLFGHCKIHSKMSLEDDNWVLKDELPYSVEALSEITLDTCTKVMSHKCHLIHLPGTIQQPMLLELMEFMKGFVASNEQFEKVDLNNLVLVCSLLCNLIHCALLSRTMEEKSSLLQETVDYVTNILKHIVSFVVKKNDELSHGLTNISSALDTMGSAFSSIKSLLSSPIFNLSRVDNGVCSVVIKSITELLDELLVAISQLFCQISSLVSNFDAESTGKMLPTSSINLEDLNPVLDCKSSVADMDLDVMDSSEVDSVTASASGSMGSFLRPLEWKLDLVCIISTFFSVSSLHTWEILYSLVDKEGDVKVRQAILLNLCRNISASSKTVSLVVHFIVDMRDRGASSLLGPAECLTHIHALLKALIAIHGGQNADGKQPGREVFFSENQDILFDLLNRATDISSVDWFSRIKFIDCVSSFVCLFPDVAQDLIGCLLDMLHDADYRVRLYLARQIVVLFQTWEGHNELFNDVCSSIGAKMVKFSNISPVTAREVLAVGPQSVLVIETALITLAHLAVHSEDVEVECLFMISAAAAIEPSQRELAFALFDSISRRLGYASRSKYLDQVMGPILFRWVACEMNLISLVEVQEMFGYGSAEPNNFVEHCSSWLLPFLILRGDGADMNWISKILSQPLSIIIKRYFVPIFGMCIAVRCGTGPEKDLAETVLCESVLQLGEISELERDDLIKKHMVAIVAFLLSVSSSAHGPQIPYFSKKNVALSVRMVVDGFVDTMDDNLADTVVSDKVNIFRADRVFKFLLSIHQQVADASHSRHMGHRLCAIEVLIDVLGHRVVLESTCFYIISIVGNYIQQKPLQGQCCNILSKLLAAFDGNTSAETLQVLGRQLQVVVPKLIFSCLINEKEERSGTEDSSRVLSLLHQLTVEIDPLLYDYIRELEPLPDLDCLKDVQEFHASLSASHSSRNQFLKFVNKAPYLPPELFLLSLRAYHKKLFLGEIIRRSDLSAADTNMVSCWHSDPDVISAVWALVDICSSSSVANEASWVLADFISRAGISDAHQVIFRLPTTTENYSLQLHTGSASKEDKLSTNYGISDDVLVGLLKLLKTYLSDESVEIIDAASQTLRGILSTARGLNALQFLDSPDRSLLMVHSRGVNIQIVEQTISQMEQCAGVSLDDADVWDTDGRTCKQWLCTLVSSLICHCEDTILRLCRSIVFVKVKAAELLLSSTLVNIAGNVDSNTAICKLISTKVEKIIFSDSNHSLKSIHLFLDALNVIRSFYVAEKARTFPSNTLKDGRSARSKSRSPVTTPSSSWKKAIPPSVSTSAR

SEQ ID NO: 63508 - protein, 84 aa, Zea Mays
MPLPPPGCRAHDALPRARRPASRSGLPLAPSPRWQLRALLSTRAAAPRRACHPHPHRIWRSRRRDGLGAPAAVRWSSYWHAAMP

SEQ ID NO: 63509 - protein, 224 aa, Zea Mays
MLQAKATRIHHHGQPPVRRRGEHEHGAFLPASIDEGCTNDGVRLRLSDDDQPAGAGAGSAGFRLQGRGAGQRLFQRDDDPGPVHGLHLQQGVGAGDLLLLGAGWSRADRPPLPLHGPGRHRHVLRHRHQPDQGTGAPRRLQGQGAAAQPVHRRPCGTCTDASRRTSSGSGGRSRHSCRCPFSKWSLKLHKLKECSELTASHLRIAVCLLISGDTTSLAMSPCRN

SEQ ID NO: 63510 - protein, 213 aa, Zea Mays
MATTATRRWWRRHDGGDDDPDDLVPMDTQEQEELVRSLEAKQAQQGRRWRRVFAGFLLGYVAFLVYSSFHHAWSPWELRYHAYFMEDLPAPMVIIADWIAALACLFAVKGLLQNSGPSKKWMWYSCYVGILVAIFWTYYILRLPRIRWDVAWLPLGPLMAGALSLYVDHVLLESMQDISTLRSYMQNLIWAQGTICPTLEILLQSLCLFLFFR

SEQ ID NO: 63511 - protein, 121 aa, Zea Mays
MLQVSWLHSHEESTYLTDSVSVMHWQIPLLRGSNKLEKMAYRLSWIAGRSGKHLFLKDMEDEKPPLLLQMVTDYGGLHFMSALRSFKRRVAYSNVCNDFIVGWRTSSIRRQHELPEVVYSL

SEQ ID NO: 63512 - protein, 265 aa, Zea Mays
MYFLRGSLPWQGLKAGTKKQKYDKISEKKMLTPVEVLCKSYPSEFISYFHYCRSLRFEDKPDYSYLKRLFRDLFIREGYQFDYVFDWTILKYPQIGSNPRMRAGERTSGAAGPSMDKIEKATGEAGGRRNLSGPVNQTDSYAQRPRETVSMSLKEIMHSTDRSGERTMERPRTSSRTGSASRRAVASSSRQASSVEPSEQQYSRASRLFSSNSGSRPSSTQRVNPSPGEARATSLSRAAVARGARDEPLHRSLELLSLGGGGKRK

SEQ ID NO: 63513 - protein, 382 aa, Zea Mays
MESSPWFALWSACAAKEVFLSVNVKQRHETRWAKAGHLLASAQLCLPQKNGFVPSVIALSSSPLVCERIGDNVTICKNNAWKIKVNSQLGTIDSWKVNDVELMSKGILPCFWRAPTDNDKGGFFTKPYDSRWREAFLDNVSFHSSQFSVKELPDNTVEFSTLYYGVPGHLPKPDDEASESILFRVKMVCRIHGSGDVVLDYEVNPRSDLPPLPRVGVVFSAGRSLSHVTWYGRGPFECYPDRKAAAHVGVYESSVEELHVPYIAPVECGGRADVRWVALRDAGGLGLYASAHGGSPPMQMSASYYGAAELDRATHVHRLVKGDDIEVHLDHRHMGLGGDDSWSPCVHEQYLLPPTRYAFSLRLCPLLPSSSCHDIYRSQLPS

SEQ ID NO: 63514 - protein, 215 aa, Zea Mays
MCGCAALVAGARPPRPVLPRRLRRRRGSSVRAEVSPGGESQPKKVTVAGAGWAGFAAAHHLIKQGYDVTLLAAESGPTEEVGLRGFWQPYRNIFALVDELGISPFTGWNKAAYYSTEGLAVEFPIFHNQPRLPAPFGVFAYPEFPNLPLSDRLTSIPVIAAVIDFDNTDTAWRKYDASKEVPLSIQLVQISVRVTCTTCLHNGLSLSNYCWYLHL

SEQ ID NO: 63515 - protein, 629 aa, Zea Mays
MAGTTTVVGWVVSPILRKMLSLVQSYVSSQYNWKSNMVSDLKNLEATLMEVLLVVDEAERRHLKDRNQVALLCQMREAVCDTEDVLDKFDYKLIREKVEHQSMARSIVASSLSLGKRLVGLDKLRSELHMVIKSMARVKSCAEMFASVMAVESTNSIKPSDCVGTRVTGSFPREGTIFGRKEEVDELVSWLLHRRNINPSNDEGSFTIQLHSIHSKKNIELHSIVGIGGIGKTTVAQSIYNDQRIVNAFDKRMWVSVSHNFDKINLIKEIIAHASDDKNIKLIHFNFNMLQEELQRIISNKKFLLVLDDVWYDESYGEHINREKWWELIAPMENAVAGSKILVTTRMELVAKVLDSSRSFLHGLGQDDSWALFRHCHNSILSSSTLESIGMQIVRKLNGSPLALNVIGRHLYGRHKVAEWNEVLHSNILNSDDMLTILRPSYEGLPVHLQRCFSYCSLFPKGYHIDPEKLIYMWIAQDFIDTKGSTNKSLKDSGRSYFDELLSRSFFQMLKPGSETFYVMHDIMSDLALHVSQGECLRVECESMEPMPLYTQHLSIYSENLENLVNCDLPKLRSLIVLNKSWFCSKICLNHAILGKLKSVRVLDITGCCLEQLPDAVNRLIHLRYLGIR

SEQ ID NO: 63516 - protein, 308 aa, Zea Mays
MSSDSSLTESLHERTIVFGLKLWVVIGIAVGASLLGILLILLICLTIQSCIKRSRKPLNDRRLHQIPPAYKDIKEVGMVDQFPAKDFVVHDGLLLTIQNGPEPVEPVDRDAIQLAQEEKLKQREETNVSASFPIMDGCEGTQIVSVDEQSSTHATVDSAPLAGLPEFSYLGWGHWFTLRDLDLATDHFAKDNVIGEGGYGVVYRGRLSNGTPVAVKKILNNLGQAEREFRVEVEAIGHVRHKNLVRLLGYCVEGTQRMLVYEYVNNGNLESWLHGELSQYSSLTWLARMKILLGTAKALWFGQDAWCW

SEQ ID NO: 63517 - protein, 599 aa, Zea Mays
MDMVVADAVVDDVSRCRDSVPASACSSRLVAHAAAELARHATGENGDKAAAKRDSSSAAGSSSSGYSSDGTGDDAKSAEPDDGEPCSLGRMSPTAASPKLMRSCSNIETTRSVLTGSDLPAKSRSYDDLKTLPSHGSSSARSGGAVRASPTPASSRTSCSADRVMLKKRSSRQVLPSRSRKLWWQLFLWSHRNVHRRRGASAPTPTTLLWPSPGREGGGAAHRRDGYASDTLGTATADDAKEKGVAVEEEGPRVPTQWVAFSAEASPLDRVSAWVNSLGNGSFHAVDEDGGATGHGGDGASRLRPRPRRSEIVELPTSAAGGRRHPQPQARRRAAAAAAEAGQASGIIVQTLNTFSSVAHIAGMGLQAVPAIAAFSTLRAVNLSGNVIVRITAGSLPKGLHSLDLSRNKIAIIEGLRDLTRLRVLNLSYNRISRIGHGLSSCTAIRELYLAGNKIGDVEGLHRLLKLAVLDVSFNKIGTAKSLGQLVANYGSLRAINLLGNPVQANAGDDTLRRAVSGLLPRIEYLNKQAVKPQRAREVAKDSVAQAALGNAAGANSRRRPARRLGQSPAGSSAAKGRRGSRGRSVTRPQSSSLPLPRR

SEQ ID NO: 63518 - protein, 854 aa, Zea Mays
MVEGRSYLPAEVRSGLETLKQRRLERMRLSAQNEEGGNPALAARSGGDALRSPTNCRVRLHPDNNTGGLPGDVQGKNPFAKRKVEKFDMSNLEWINKIPECPVYCPTKVEFEDPIAYIQMISPEAAKYGICKIVSPVCASVPAGVVLMKEQPSFKFMTRVQPLRLAEWAEDDTVTFFMSGRKYTFRDYEKMANKVFSKRYSSSSCLPGRYVEEEFWREIAFGKMDFVEYACDVDGSAFSSSPHDQLGKSNWNLKNFSRLPGSVLRLLQTPIPGVTDPMLYIGMLFSMFAWHVEDHYLYSINYHHCGASKTWYGIPGDAAPGFERVASQYVYNKDILIGDGEDAAFDVLLGKTTMFPPNVLLDHNVPVYKAVQRPGEFVITFPRSYHAGFSHGFNCGEAVNFAVGDWFPLGSLASKRYALLNRTPLLAHEELLCRSAMLLSQKLLNCDPRSLDKLEHPCSQYSVKSCFVRLIKFQRRARDLLAKMGSEICYKPKTSPNLSCSICRRGCYITHVLCGCNFDPVCLHHEQELRSCPCKSSRVVYVREDILELEALSRKFEHDVYLYKERSSIRSCKEAEISDANVEHVPNLGITLDFANSKAGSSGFITVDGGNSSSAVSILTSSAHHEALMHSEARVHATQTDQIYSTAKQAINTSVTKGTCTTDESSSGMDCACNEHGSCNASVMECSDDSGSENEIFRVKRRSTLFDKPTSETKTSTLSEQQVLRRLKKVRPGVQQVSKRPEESGNGSVRSTHMSPSSNHASSDDEIDMAPLFLRIKRRQLENQDVTSRGARSQSYPSSSGSREEFVERSRDAAAELRPKRVKIRLPSSASRQIEQQRSSGQRFAREDKLPLAF

SEQ ID NO: 63519 - protein, 497 aa, Zea Mays
MAPEKPRKEQEEELMLEDGGIEESPRRSFEDCGDSEEDRGEGDDEEERDSDRDGVGSTRSFLPQKWPQSYRETTDTYTIAASPSFGYLGSSTSKYSLLDLGRSILGSDLKSPLISAKADSVRNLPKTLGSMRDGRVSFQLQHTGEIYISQGCNVTQTVFNGINVLAGVGLLSTPFTIHEAGWTGLAVLACFAIVCCYTGILLKHCFESKDGISSYPDIGEAAFGRIGRVLISIILYTELYSYCVEFIILEGDNLTSIFPKAGFDWLGIHVDGKHFFGVLTAILVLPTVWLRDLRVLSYLSAGGVIATLLVFLSVGLVGVTDGIGFHSTGKAVNWSGMPFAIGIYGFCYSGHSVFPNIYQSMSDRSKFPKALFICFAICTAIYGSFAVIGFLMFGKNTLSQITLNLPKHSFASEVALWTTVINPFTKFALLLNPLARSLEELRPEGFMNETSCAIILRTALLASTVCIAFLLPFFGLVMSLIGSLLSILVFTAAYRAI

SEQ ID NO: 63520 - protein, 186 aa, Zea Mays
MFLDRAGRQILLVNSSTRMTVSLLVVAIVFYIKDNISHDSDLYDILSMVSLVGVMAYVIALSFGMGAIPWIIMSKFKKVLPPSCSVVTSINSTNCLHSLFLLRNVLYDINHFSVEPYKLSFRLDYVAYMIHLTVFGFFWGNSNISHEVLSDSCYLICVDLCKCGNTWQFHAFTNGEIQMLEEVAEE

SEQ ID NO: 63521 - protein, 2244 aa, Zea Mays
MGERDALPPLPLALGPPHLIPPAPTRDPRAIAFLPDLVGFHWVAYAAGSFLVVSHLPSPCRDDNNNDSCSPFFRQVIDLRAPVSAVAWCRRGSGEVAAATDNSIHIFQPAPASSPGSFGWLLRWSITETFAIVAVSWTGCGNGIVAVGAGVSMWARLESSWQLAWRSTPQVPQALVSTTCSMQGPVATVAALAPAEGSVPVLVFLNDARRGLEQAELVHPQPVCMIQWRSCSLYPHDLSEIRREILMTCCFDGTVRLWSKDEVSRSKKQRGLLISFSVIAVIEVNNTLNGVLGVDIIVRWSMESGSVVSRDEQGRFKLFSGDLRESQVGKCEWLVSLGPGPCISFWAIHCLDDVFPPRYPRITLWKQSKLQGWGDSYVKSGPLKSMEQSIFVEAVISRRLCSGPPATCFLLHLLVDDSFAWSTVSTKLLADSGNHALSDSAKNILCCLTKPVKQDGHKGSIRQVSVHPYSCEIELAVSMDSNRMIFFWSLSTFSTLIPTMHAPMYPLWKLLCKFDLRNISEDFEYSCLCWAPSVTRDNRFLVLGWESGVDCFVVRIQKEEVLSCQKIFTIPFLAESNTEGPPDSIHTIPLASKCSRCFVNNSFLVVCIWKKTFKGFSWKVVLHSENQYVNGRCLCGFAPSSLSTTNQGAHACFSNEMFSAVVYEGSSVFPSGLEGEYTTCISVMPLNNTVLPIQQHDPYRTVPGYHIATGCSDGTVKLWKMTCAEDSLQTKKERHIWELVGMFGAHQGPIDIVSLSGCGRVITVGRNLKKNSTSIHIWEATKIRGDGNFLLGDTLMLQDHIVGLDGLSLGDGRFLLAVYLANELRIYSHKHPSFQNVLHTKNSKEEHLWSCIVLSHSHHDIVGFLWGPKATVVLVHENHLSLFSSWLVTGDNEYMTQIHSCPVVHEMLPCTNNFNEATFGKLKLPENFNSGNIDSNNVLLTDQHSHYSHGLWSLLHIAHRLSGPLASYHPRALIQYLYSGEWKRADAALHHLVRSMKVSETSKGVSNYSTCHSIPELPLSEYFAATVSNNISTKGFMWGENRSNTTFNLLSPSTSFLYEDGNLGINTTTSASEKPDIVELLDKSFSKYGISDSEKNQILAISDLMAGITDQSHSSPYKNLDEAGRRFWVAVQFEQFHALRRSADSSSNEGCRVDSASIAWAFQSDCQDDLLNSVLPAEPTWPEMRKLGIGLWYTNVSQLRTRMEKLARLQYLKSKDPKDCALLYIALNRIKVLVGLFKISRDEKDKRLYEFLSRNFQEERHKAAALKNAYVLMGRHQWELAIAFFLLGDDTSSAVNVCAKNLQDEQLAIVICRLIEGSGGPLERNLISNVLLPDAVERGDNWLSSLLEWMLGNYCQSVNRIFGCHPKLLIDQNVLADPELGHYCAILSAKSSFRNSVGEAVSAKLSKLSFAVAACALNKCGLPLEALECLSTNSSIDGKDSIIAHGDGDHKIFYGILSPVSASKNWLSSSVISGIESNLKLTMASKYLSSLLRKHSLCSQLNAPLSEEKVLNEYNNHQIEKLTCDITTVISIFDKRFSLKFADIAEKRLREFFEKEGLEHEAGVSGSEFRGLITSVAAKFVMDSIHFVSSSLVPLHASFLRKNLPMNSSSSLLFWLESKLPQQLPVSDSYDHLSRISQLSNSENMEALFNILWEISVNPVDVCNAFVSEGVNCFSLSNTNVTRSWKDIRCPVVECDKIITERSGEEHEHRLGSKRLGQGFAEKASYNGEVLYETKRRELIIQKEFQSPREILRRSGELLEAVCLNSVNEKQAAIATNRKGLVFFNWSDKQHNKSFSEYVWSGSDWPLDGWAGCQSTPTPTSISPGVDLGRKKGSQLGSVGATTGLSSLAKPGRDLTGGGAFGIPGYAGIGASGFGWGEPEEFEDFIDPPATLENIHSRALSRHPSLPLFLVGSSNTHVYLWEFGKASAMATYGVLPAANIPPPYALASISSVQFDCYGQRFATAALDGTICTWQVEVGGRSNVYPTESSICFDSHASDVAYVSASRSVIASAGYSSNGSNVVIWDTLSPPATSQTSIMCHEGGARSISVFDSDRGYGSISPLVVTGGKNGDIALHDCRFLSTGKSKHHRVTTEHGVEASSMHDIKSSTFGGTDSGMVWHIPKAHLGSVTKVTTIPNTSLFLTGSKDGDVKLWDAKNSQLVFHWTKMHERHTFFQPTSRGFGGVVRVCSTVKTIKCLMTSFINFVHVMAAVTDLQVLPNGFVSCGGDGSVKLVQIKDDLAAAYQR

SEQ ID NO: 63522 - protein, 475 aa, Zea Mays
MVALKTLVVIHRLLREGDPAFREEFLTFTQRVRILQLSNFKDDSSPVAWDYASWVRTYGLFLEEKLECFRVLKYDIEAARLSKQGQGPEKGHSRTTELNSQDLLEQLPALQQLLYRLIGCRAEGAAKNNYLVQYALAQVLKESFKIYCAINDGIINLIDKFFEMPKHEALKALDVYKRAVHQAGNLSDFYESCQGLELARNFQFPTLREPPQTFLSTMEEYVKEAPRMMPVVEPLELPERLLLTYKPEEEVHDTVPIVAEKLQVVEEIAPVPSSQIALPPKPEIADTGDLLGLGDSTPTVLAIEESSALALAILPTGIDNSTTTTQQDSGFDPTGWELALVTTSSNATPLSMESNLGGGFDKLTLDSLYDDGTYRQMQQQQLYGSAPPNPFMASDPFAVSNQVAPPPSVQMAAMAPQPQHLPMMIEPNPFGPPQQHHAGVAPAANPFLDAGFGAFPAVNGMHPQTNPFGGAAQLL

SEQ ID NO: 63523 - protein, 265 aa, Zea Mays
MAAVPEDLRCKRSDGKQWRCSAPSMPDKTVCEKHYVQAKKRSASSALRASLRRSSASSLAPVFPFSSSPSSAARLRAADEDPPMAVARPLYGRVAGEAVYVAEPVPAPARREVAYEGLPRGNAAGGRTAAGLVGRGPLWFPGGGSEGIRSCHQCRKAGGVIWCTSCDRRGYCARCISRWYSDIPMDEVRNVCPACRGICNCKVCLQGDNLIKARVQEISAVDKLRYLHCLLVYVLPVLKGIYSDQCFEIGVETRSSDVLRAKITS

SEQ ID NO: 63524 - protein, 264 aa, Zea Mays
MNIPLAGIEAILWSNDLQVASEDAIYDFMIKWARAQYPKLEERREILGTRLLPLVRFCHMTCRKLRKVIACSDLDHEQATKCVTEALLYKADAPHRQRALAADVMTCRKYAERAYKYRPLKVVEFDRPYRQCIAYLDLKREECSRLFPSGRIYSQAFHLAGQGFFLSAHCNVDQQSAFYCFGLFLGMQEKGSTSVTVDYEFAARTRPSGEFVSKYKGYYTFTGGKAVGYRNLFAIPWPLFMADDSLFFIDGVLHLRAELTIKQP

SEQ ID NO: 63525 - protein, 129 aa, Zea Mays
MKQQFAIGVNDVTRVLERMPHSVTAHPAQMSNEAPTVSGRRQAPLVPLQAVLVAADCNPKWLTKHIPTLASTRQVPVLCVKDNKGGSVRLGHVVNVRTALAIGVKAKDSVLNKTIDEFLKDSKLVANEP

SEQ ID NO: 63526 - protein, 517 aa, Zea Mays
MVGGGEGDRVGGGVGVGGGQQFVDRSKVRILLCDGDASSSREVLRLLCNCSYHVTCAKSPRQVINILNYEGGEIDIILAEVDLPVSKCFKMLKYIARNKDLRHIPIIMMSNRDEVSVVVKCLRLGAAEYLVKPLRTNELLNLWTHVWRRRRMLGLPEKNFFNDNFELVLSEPSDANTNSATLLSDETDDRPKENTNQETGTSNQLEYESNPSVAERDQRDKIGAPGSALDASQSSTPGRMFSRPIKTNLKVAESSAFLAYVKSSTPATSSFDSGLQRGDSRLDSLDNHGNCSSATDRSDTGADVNIRNKEAFEMPVQYPMVCFSSSSMHMERSNEGHNDTSGTPPAYHFPFYYPGMVEHNMALSSVQNFQANINSAQAHTPPAMLHQYNVFSQCHSLPMISPFQFNTSGMSMHSSHLPTQNVWSSASSTPTPDETCNRSERRAAALAKFRQKRKERCFDKKVRYVNRKKLAETRLRVRGQFVRHASNMDIISTGDDISEDEDDDPTSREVDMISSPE

SEQ ID NO: 63527 - protein, 363 aa, Zea Mays
MRAPRGGGGCRGGQEHVELIPGIPDDVAVDCLARVPHASHRAMRRVCRGWRQRGPRVPDAVREPVRRRRAQGRRRRARQHPGVRRGGVQRDDGRVAAGARRAPRGAGVRAVRGGGDPRGRAGRLGPAHLRARGGRARAGRRHGAVAPRRAHAVGALLLRLRRGRRQDLRGGRPRQAQERAQDRRGVRRRGRRLGPAARHVGGARRVRRHGHRGRRPLPGRQRLPHGAPGWVRARRRVVRPGGARVAQARPRARAALRRARRRPRPRLVHRGQRRHGVDGHPPRLARGRPVPAGPQGRHRARRLRRRRGEGRGHRRARRRGRPPRALGVRRQDQELDRGPPAAGVCRIRLLRRVRPDLRISIFY

SEQ ID NO: 63528 - protein, 86 aa, Zea Mays
MAAHKPVIACNSGGPVETVVNEVTGFLCDPSPAEFSKAMLKLVNDHDLAVRLGEQARDHVVQKFSTKTFGDLLNSYVLNIYHERME

SEQ ID NO: 63529 - protein, 130 aa, Zea Mays
MSEKLDSEGARLFKYANIPLSCFLNFYNCAPACSNLSPVTEFEQMRSSFIRHNYKNIDFARLLETFQSRSQLKRYSQYRRLPHDWISRTNKLSLVCLHQSRSRLTWIKIKSISQSMPQNNPSLLRFFLFS

SEQ ID NO: 63530 - protein, 118 aa, Zea Mays
MIVPLFSLCLMASICSFDRAIRFWAQNTLPNKKLSLFILDRLQKGKLNLVLLPSSSMRLTFVCDDGYPEQLALLSNDFEFSEVMIEEISADNSGRSFLIRISESKVFYYWCAEKSKED

SEQ ID NO: 63531 - protein, 311 aa, Zea Mays
MVVNNKVDSLSYDVEAPPPSAAGAAAGQAPPPASPAPAPAPATHAPVTREGGAASVLELHKVSLPERRTTAKALRQRLAEVFFPDDPLHQFKNQSSARRLVLALHYFFPIFQWGSAYSPRLLRSDLVAGLTIASLAIPQGISYAKLANLPPIVGLYSSFVPPLIYALLGSSRDLAVGPVSIASLVMGSMLRDAVSPDEQPLLYLQLAFTATFFAGVFQASLGFLRLGFIVDFLSKATLTGFMGGAAVIVSLQQLKGLLGISHFTSHMGFLDVMRSVVNRHDEVRACPCCSVLCRRPPVPAMTEQQSCLRLQ

SEQ ID NO: 63532 - protein, 402 aa, Zea Mays
MAFGRRSPGSSRHPPALTIVTALLLASLYFAAAAAALSPTDAMHNNNWAVLVCTSRFWFNYRHMANTLSLYRTVKRLGIPDERIILMLADDMACNPRNSYPAQVFNNENHQLNLYGDNVEVDYRGYEVTVENFLRVLTGRHESAVPRSKRLLSDEGSHILLYMTGHGGDEFLKFQDSEELQSHDLADAVKQMKEKHRFKELLIMVDTCQAATLFSQLQSPGVLAIGSSMKGENSYSHHLDSDVGVSVVDRFTYYTLAFFEKLNMYSNASLNSLFTSYNPSMLLSTAYYRMDLYERPLNEVPVTNFFGSVMKTLHTDSAYTGFLAAHDNETPMSTGDNLDDHFMLKGRAIARRSTIEKEAQLTPHGWTEVLAEQLEGKNTDTVVMYGLGAMGILLALSTWLSM

SEQ ID NO: 63533 - protein, 435 aa, Zea Mays
MNASQPNGLVVPDATVHPVNSTSDVIELMRIGHANRAVGSTMLNERSSRSHRFIFIIVTIHIRGVDLKTGATLCGALHLVDLAGSERVDRSSVTGNRLKEAQHINKSLSALGDVIFSLPQKNAHVPYRNSKLTQVLQSSLGGHAKTLMFVQINPDVSSYSETLSTLKFAERVSGVELGASKANKEGKDIREFMEQLSLLKHKMAKKDDEINRLQQLKTQTPRVRTAKRADSPLKHSSSSPGISNLGSKIQHRRTVSSGKAMSIASRAGSDTFSDTSDRHSESGSMQSVDDILPRRGIMGLPKLSIGEMGQNSADPELVCFDYADSEERLSDISDSGLSMGTETDVSVSSIVELTRFQEQENIPSTLKEQESARKIPNDQLSKVATRVQKTTVPKLAQTSLWPKLRDPPALRSPATKLVDASRVTIGAATKDSTIS

SEQ ID NO: 63534 - protein, 173 aa, Zea Mays
MAAAASSALHAVGAVASAKPRSVAPAVATRRSVRVAPAAKRGPGSGGGRLVARSAVAAKADEAAAAAGSKSGGHELLMFEALREALIEEMNLDPTVCVMGEDVGHYGGSYKVTKGLAEMFGDLRVLDTPIAENSFTGMGVGAAMKGLRPVVEGMNMGFLLLAYNQISNNQVST

SEQ ID NO: 63535 - protein, 213 aa, Zea Mays
MDTGAQAMFIISLVLWCTTSFALDDAAATRIPIVGTLPLSMKENPQLCQLCEEFASEALFYLNENETQTEIIDTLHQACSKFGSFKLECTRLVDYYVPLFFTKIASLSPEEFCASASFCGGVTFIRLPRHEDTCTLCHEVVDELKIIEILLKGCNNAEDYVQKCKRLIIQNAPIIMENIKKFLEKRDFCNSIHVCGSKSVRAGSQVLRSLSSA

SEQ ID NO: 63536 - protein, 339 aa, Zea Mays
MSFQDLEAGHVRGAPPGGGRRSGRAGGAGAGAGASQAVASGVFQINTAVATFQRLVNTLGTPKDTPDLRDRIHKTRQHITQLVKDTSDKLKQASEADHRVEVSATKKIADAKLAKDFQAVLKEFQKAQRLAAEREAAYAPFISQAGLPQSYNSSEVNNGADRLAEQRTQLLESRRQELVFLDNEIVFNEAIIEERDQGIQEIQHQITEVNEIFKDLAVLVHDQGAMIDDIDSHIENAVVATSQAKGQLSKAAKTQKSNSSLMLVARYFRSGPAHSDNSTCSLKAWKAAGVPKSDRELIATNSFISYFCCAARNDSWYPGGDWRSACGVAVYVVMMKSDT

SEQ ID NO: 63537 - protein, 437 aa, Zea Mays
MAYGSSRFLIFFSLSKIHIKWAQVGPTDLGQARPNPTFPVSQKPTGRRPGGPHPVVTPTDPSQEPLPPLPASCFFPMAGIAGDDPFGFDSDSDSGDDGPVCYDPFEDCDGDGDEDEDAGLVGGHFALSYGGGGQYRISDFAFRGGEGDGGDVLVGQRQGPLSSHDEPILETLGRSFDSDGGLSQFYPHLFPASQLVEDTSGEEEEEEEMISRNALGGVGSEFERGAVDEETADDDEDGIVLMLNGFTLDSGPPVGGFQGPVDAVEEATSDDDVGEVGGLMLSGFDLRAPAPHATRPFRMVVGGEDTDSDDADLNLVDALARRVREATRRLPASRAVVDGLPEVALSDQEASHGCAVCKDAVVAGQSVLRLPCNHYFHGECIRPWLAIRNTCPVCRFQLPTGDAAEYDSPRSTTGGVVVSVPQQHSAPAQHRGRSQDF

SEQ ID NO: 63538 - protein, 298 aa, Zea Mays
MSGASARGRLSPASGGAGDSEPRSAGGRTRSVSATRGRKPSPRPGRDAAAAAGATEERKPAAVPTLLPSLSAPAGMRRQELLLRSGLSLDASCSSDASTDSFCSRASTGRIGRPAFGARKKKTLSQTDYKPVSMLEREGGLAYQTDAAGVKRRCAWVTANTDPCYSAFHDEEWGVPVHDDRKLFELLVLSGALAELTWPAILNKRDIFREVFMDFDPVSVSKLSEKKIIAPGSPSSSLLSEQKLRGVIENARQILKVLPSSACQNIESRRHKQRPGPKGFPQRRPNGRLYLHASLWHD

SEQ ID NO: 63539 - protein, 437 aa, Zea Mays
MVPSDWWVEDLCELEVDLYKRVIMTIKAKGSTPAAVIGEALRAYAYRRLLGSLEDAVSNGVDCTKRRAALDAIVFLLPAEEGSVSCGFLLKLLGAACLLESGESHRVNLIKRIGTQLDGASVPDLLIPLNTNEDNISSIDLIMAIVEEFMSRNGDSGTEKFQDDEGIVDIEKSTSVSSASKLAVAKLIDGYLAEIAKDPNLPLPKLIALAEMVSSLPRPTHDGLYRAIDMYLKEHPSLSKSEKKKLCGLMDCKQLSQDACMHAVQNERLPLRVVVQVLFFEQVRASSSVASARSDANSTSGLPSAVRSLLPRENGNSIGSSRSAATTMTTEEEESGVPTSSDINSLRSMRLANNSGGSERSSGSSDVNNKSSDDRSAAATGKAKGTMLMPKKMLSKLWSGKTNAGESSSSDTSDSPGSANPEEAKSTQSRITWRSVS

SEQ ID NO: 63540 - protein, 383 aa, Zea Mays
MGKAKMMDWWLWARGPLVMDICMIGFSVSHVKGLARFRESKVWPRSSCTSQYGYDVEKALDALLDISGVSSVENMETNHQSARRNDTCHLDMFSGNGLSVENLTAGNRRSLRQLTDEISNTGLQSELGHEFLWGEPQISYAEAVKEAPRSSTLPSRSTVMKAGPQQVLDSLFKIPETRTYEPSSMDWKKVVKKLQTINYTAASNNHERPKDGGGYRELRGVAARHYDKMKEYYQKAAFAYSKGDRSYASYLAEEGKHYRELGRIEDEKASRNIFEARNKHITNTVTIDLHGQHVQHAMNLLKIHMMICICIPSVLLRVITGCGSEGTGKGKIKRSVIELAEKEHIEWREENSGTVALRLGGPREYRFLEHESDSDLVGNFNID

SEQ ID NO: 63541 - protein, 349 aa, Zea Mays
MILHSELKRQRKLVKNLKKKSLWSRTLEEIVEKLVDIVIFLHKQIRDSFNETGTDFCASEQTQNKRLGSCGLALHYANIINQIENIVSRPLSLPPSARDNLYHGLPITVKSALRSRLQTYNPEEERTVAQIKAEMQKTLRWLLPIAENTIRAHQGFGWVGEWANLGSDMSKKSGSQHSVTRIQTLHHADKAKTEHYMLELVALLHHLVIQVKNRGYGTSKSSRHDASSRSRKAAATDLRPETETRHNTSPVNSRTASSPLSDCERAALDHLSFRRTAYGRSQSCEPPPGHRRSKAHRSWDPCRSHGSSPATEFGRTPAVQQRGRGRDLDVIDGLDRLPSYSHPPSPTFC

SEQ ID NO: 63542 - protein, 93 aa, Zea Mays
MLSNHRNYRTSYDRLFEQVRRLETESDSLKKDAAIYNFVQERLQKSAPYKMIMELSAMELEAQEISFEELLAREKEDTAFWQRNGKMRSVSSK

SEQ ID NO: 63543 - protein, 471 aa, Zea Mays
MASRTASKDIIALRGSAAIVSEFFGYAANSILYNRAVYPGESFAKVKKYGLTMPLTQDEWVNFITSATSKNSGKLQGIVMVIMSKATSEVIERWNFNIDTYPEVVEKGSIKEKSDKKIMREIRAIKRQIDSCITDLPCLDEPCVFDMLAYTDTDVDAPDTWIESDTKLIHNTQMVKLHSFDTKVHKVDTVVSYKKNEDDTSSSSSSVIREARIELLEAELGRFVMLANESAEEMYTRLKKIIKKIRSYGSKKWTDHEVVKIMLRAYFLRNSVLCFMIRDSPNYEKMTPEVVLGRFIRHEMMENEGLLEAELGRFVMLADESAEEMYTRLKKIINKLRSYGSKRWTDHEVVKIMLRAYFLRNSVLCFLIRQSPNYEKMTPEVVLSKFIDHETLLEEAKYVDIMSKSVTASKNQDIALKANKKQKGKCVFEESTSEDNEDSSSLDEEKIALIKSFKKIMKSRNYKSNKKNDKE

SEQ ID NO: 63544 - protein, 233 aa, Zea Mays
MGARDLNIQTEHGHLGMPSNICCVVVEYLPGGALKSFLIKNRRRKLAFKVVVQIALDIARGLCYLHSEKIVHRDVKTENMLLDKTRTVKIADFGVARVEASNPSDMTGETGTLGYMAPEVLNGHAYNRKCDVYSFGICLWEVYCCDMPYPDLSFSEVTSAVVRQNLRPEIPRCCPSSLANVMKRCWDANPDKRPEMAEVVSMLEVIDTSKGGGMIPKDQTQGWLSCFRRYRGP

SEQ ID NO: 63545 - protein, 411 aa, Zea Mays
MQDWRVREFEGKFTDEFAHSSSNEHKGGVEASGVISSKKLKHAVANEKIQGVIPGTNSSGSLKRNSENIQHANGVLSQNISCAGDYKNGSIAFPLREENTITETRCPDDNWNSCQFALNNGSSILNNHSAPQDSLTYGDNDLNYIEWPGIDNFEDVDTLFRSSDSTYGQQQLENADGLSWIPSSDAVYSTDVALQQGLDSSYSDYGILDDLSAFQCAEDKSLPLVDPSSALCDNQFNDTYLFSEQKNVNAYGEQIYQEDLMELLPTDQICSGHENIDMVGNQYPSENAIQGTEDKKFSIASTSQLSSQNLLNQRHHLDSSSPSNITSESYPGKFGPSSCSSAQRNSKAGVTLKCANAVQKKTVNIQPRQPANDNVMNTSRASYPCENYETERRGLGKELWGILKLQWVVQW

SEQ ID NO: 63546 - protein, 141 aa, Zea Mays
MNLYLRPQEFLLFVLQQLITILEGATGYIQVFPRRADQLFHVSSQGLSAHSSVPVNYGGYNPPNYPPQNLRPRRGQPILHQRYNQATSSPMRPMGSHHSGQPAWPSFGMGDGVPWGGTGGHSFTTSGLSSSLARKDYGSIF

SEQ ID NO: 63547 - protein, 257 aa, Zea Mays
MPLMSIKNGGRVAIVNLQATPKDKKASLVIHGLVDKVIAGVMSKLSLRIPPYIRTDFVQLTLRHSLKKKCVRWTLRVTSIHGLRAPLPFLQSVKVSFPERPDLKSVVLKEQPFSLQRETSMNKPFFMLLTLNFSDGCSCLSSSIGWPVDFQKRKDSFVRDRALVLRELYSAAQRESCIGQQEILERENLPRAETSIHGIVTNIVRYDTEDEKLAPPKNDLMNHSRSNPAKRHVEGTDCHSSLPKKLKYFLKDKKLNC

SEQ ID NO: 63548 - protein, 403 aa, Zea Mays
MRALEKQIMESGEASVANASMMDMQQTITKLTAQCSEKAFDLELKSADNRVLQEQLHQKNLEIYDLQEKVLRVEQQLSAKVDISPEKETDCAQQETIDLKSKLQSKEAEIEKLKYEHLKISEEHCDLINQNHKLSEEAAYAKELASSAAVELKNLAEEVTKLSVLNAKQAKELLVAQEMAHSRVHGRKGRTASRGRDEVGTWSLDLEDMKMELQARRQREAALEAALAEKELLEEEYKKKFDEAKKKELSLENDLAGMWVLVAKLKRGALGISDLNVDDRTVNLADITNSTKENKGGKNFALVEKQASEDSVKSLSSEEHTSPEFEPLLVRLKAKIQEMKEKDIDPLTDKDGNSHVCKVCFESAAAAVLLPCRHFCLCKPCSLACSECPLCRTRIADRIITFT

SEQ ID NO: 63549 - protein, 404 aa, Zea Mays
MAWARLASRSRLRPAASAAGRSRHASTPAPPPPPSPPTTRTVPAATSAPPLRRLLLLPRHRFADATPSASTAWLLGARWRQGHGRRCFASAAYPAQATPGEASELVDVPLAQTGEGIAECELLRWFVAEGDQVDEFQPLCEVQSDKATIEITSRFKGKVHKIHFVPGDIVKVGETLLKMVVGDSQIVSPDNIVPSAGKSLGVESAVFSSEGNVPGGNLSTPAVRHLAKQYGISINEIVGTGKDGRVLKEDVLNYAVSKGVCKQQSLASEGNIGQVELLEEGKALLDEDFYEDKKILLRGYQRSMVKSMSLAAKVPHFHYLEEINCDSLVQLKTTFQNENKDQTIKHTFLPFLIKSLSMALSKYPMLNSSFIEETNEVVFKGMQSLSFSFRSCFLLSQKRIQKTV

SEQ ID NO: 63550 - protein, 222 aa, Zea Mays
MVSGFGCSYAVTGRKRVKLLAAESSDGEPLGCCVPICDDSLGDLIEWCSEWHHMPSDCGDQTQHTGVFAAMQEYTCSTGNNGVIYPQSGISHSSGQNGAQGTYLQHQHFEGCMYMSGNGQMCGPYLPEQLYEGLSSGFLPQSLAIYAVFGGKTVDPVQLIFLKQFLSQWNVGAVASTPNVSTETERVTSHAKMVFPDSLSSEESCWMFEDAEGCRQGPHSLA

SEQ ID NO: 63551 - protein, 682 aa, Zea Mays
MAFRKRPLQITSRSANLSLRLLANRHCVVIAVVIAYHPRFQRKGSKGVSRCFVGTVKSITLQLLQSKQYCGICKKIWHHTDGGNWVCCDECQIWVHVECDLTCNNMEDLENADYFCPDCKSKCKTVPATEKMNTSHSSECASTSKGKSTPMIAVFCNGEEALYVPEKHMILCQCKACKERMMSLNEWEKHTGSRKKNWKMSIRQKSTGEPLINLLDDIPCGTSKSSKPGIKKGELLQLQANAYSPVCAKWTTERCAVCRWVEDWDYNKIIICNRCQIAVHQECYGARAVQDLTIWLCRACEFSQQKRECCLCPVKGGALKPTDVDGLWVHVTCAWFQPKVSFPVEETMEPAMGIMSIPAEYFKKTCVICKQMHGACTQCYKCSTYYHAMCASRAGYRMELQHYERSGRHITKMVSYCDFHSTPDPDNVLIVKTPEGVFSTKFFVQNGEKQTAARLARKENYQEKVLPPIVSDCLVAKCLTYEMLKYKKEPGEAIAHRIMGPRHHSQDFIDGLNAYMGHKDDQSFSTFKERLGYLQKTENLRVSCGRSGIHGWGLFAARNIQEGQMVIEYRGEQVRQRVADLREARYHREKKDCYLFKISEDVVIDATGKGNIARLINHSCMPSCYARIVTVSGDRSQIILIAKRDVSAGEELTYNYLFDPDESEDCKVPCLCKAPNCRGYMN

SEQ ID NO: 63552 - protein, 334 aa, Zea Mays
MEKGASEASPPCARCGKPAQLQCPKCVELKLPRENAAFCTQDCFRAAWSSHKSVHPKPGAPASQQSPEGWKYCLRKGRERALQLPRFDWTGPLRPHPISKMRVVPDEIEKPDWALDGIPKIEPDSDLQKRVEIKTPDLIERMRVTCRIAREVLDAAARVIKPGITTDEIDRVVHEETIARGGYPSPLNYYFFPKSCCTSVNEVICHGIPDARKLEDGDIVNVDVTVYYKGVHGDLNETYFVGNVDEASKHLVRCTYECLEKAIAIVKPGVRFREVGEVINRHVSMSGLSVVKSYCGHGIGELFHCAPNIPHYSSFTAGEICWCFLMQETRPLVS

SEQ ID NO: 63553 - protein, 453 aa, Zea Mays
MDAEAGVAGADQLPRRQYYLNLLLLAYQSFGVVYGDLSTSPLYVYKSTFSGKLRHYQDEETVFGVLSLIFWTFTLIPLLKYVIIVLSADDNGEGGPFALYSLLCRHAKLSLLPNQQAADEELSSYYRNGFAPRNGSSPWSRRFLEKHKKMRTLFLLIVLCGASMVIGDGVLTPAISVLSSMSGLHVRATGLHHSSVVLLSCIVLVGLFALQHRGTQKVAFMFAPIVIIWLLSIGGIGLYNILHWNPNVYQALSPYYMVKFFRKTGKDGWIALGGILLSMTGSEAMFADLGHFTSASVRVAFITVIYPCLMLQYMGHAAFLSKNTFHMPTGFYDTIPEPVFWPVFVVATLAAVVGSQAVISATFSIVKQCHALGCFPRVKVVHTSRWIYGQIYIPEINWILMVLCVAVTIAFRDTTLIGNAYGSSGRMGASCACIHIHVSHVHLALWVKEEVPV

SEQ ID NO: 63554 - protein, 93 aa, Zea Mays
MGMYDLTSFPQDSDFWQLVAFCAGTGGSMLIIGSAAGVAFMGVEKVDFFWYFRKVSGFAFAGYAAGIISYLAVQNLHLSLPTSLVEIPFISGS

SEQ ID NO: 63555 - protein, 130 aa, Zea Mays
MPHPPSTPSSPSAPLPDLVIRCEAAINALLPLRSAPLPGSRRAFIAALMVHGCTHIRHRLSARKLLPAPTCVHRCVPPPTSSAPNLYPSSAPLFHPRTHARDPHVPHPSRAPDAAPPFHPPHAAPCWPPP

SEQ ID NO: 63556 - protein, 269 aa, Zea Mays
MAYGLTCTLDLEGNTEGKIRATEELDKLKEQRAEEQAKMLLEAFNKDRASLINSLQNATQTTTPVPPAAPDARTQEMINEKLKKAEELGENGMVDEAQKLLDEAEALKKAVPDSTKMSAHVQITDQKLRLCDICGAFLSVYDSDRRLADHFGGKLHMGYMLIRERLSELQEEKNKKRKLDRAEYDRRSRERSGERARDSSRDRYIDRSSSRDREYDRRRSHDRYHDRERERDSRQSRSYDSRSHRRSYSPRGSSRDYDRSGRHERRDRY

SEQ ID NO: 63557 - protein, 324 aa, Zea Mays
MCNLGPDGRRRDADDRPELSRGTVEFVATKEFLVRDPMPAVYFFLIDVSMNAIQTGATAAACSAISQAISDLPEGPRTMVGIATFDSAIHFYSLKRAQQQPLMLIVPDVQDVYTPLQTDLILPVSECRDNLEQLLESIPSMFENNRVADSAFGAAMKAGFLAMKSTGGKLLVFQSVLPSLGIGSLSAREAEGRANITTGDKEAHKLLQPVDNTLKTMALEFAEYQVYYYYPFSALSDPAKLFNDLRWNISRPQGFEAVMRVRCSQGLQVQDYYGNFCKRVPTDIDLPAIDSDKTVMVTFKHDDKLPENVECGFQVYLGLCCVPW

SEQ ID NO: 63558 - protein, 218 aa, Zea Mays
MTESAAVGTRGFNTSKHKKYGSVGLLAPNMHARIVHVETGCSLPPGSCGELWLHGPAIMKGYLNHVDPCAINGGWLRTGDIAYFDFDGYLYIVGRLKEVIKYKGFQIAPADLEAVLIEHPGIVDVAVTSTEDEEAGEVPVAFVVRKSGSGLSCTQVMEYVAKQVSPYKKVRKVVFVESIPKSPAGKVLRRLLRESLAASAVAGPTSYSESNSMRHSRL

SEQ ID NO: 63559 - protein, 1095 aa, Zea Mays
MSSLQLLQLTERGRNLLSSRRRTLAIVSGAVLAGGALAYAQSGRWKKHQEANSCSDANSHSSNNGRTSQNGIDGKLVKTRKKKSGLKSLHFLAAILLKKIGPNGTNYLIGLILTAVLRTAVGHRLAKVQGYLFRSAFLRRIPTFTRLIIENLLLCFLQSTLYQTSKYLTGSLGLRFKKILTDLVHADYFENMVYYKISHVDHRITNPEQRIASDIPKFCSELSDLVQDDLAAIVEGLIYIWRLCSYASPKYVLWILAYVIGAGGTIRKFSPAFGKLKSTEQQLEGEYRQLHSRLRTHAESVAFYGGENREASHIKQRFRALVKHLNVVLHENWWFGMIQDFLLKYLGATVGVILIIEPFFAGNLKPESSTLGRAEMLSNLRYHTSVIISLFQSLGTISISSRRLNILSGYANRIHELLDVSRELSGGRDRLITQNSSDGNYISEANYIEFSDVKVVTPSGNVLVDNLNLHLESGSNLLITGPNGSGKSSLFRVLGGLWPMVSGHIVKPGVGSNLNKEIFYVPQRPYTAVGTLRDQLIYPLTADQETEPLSYGGMVDLLKNVDLEYLLERYPLDKEVNWGDELSLGEQQRLGMARLFYHKPKFAILDECTSAVTTDMEERFCKRVRAMGTSCITISHRPALVAFHEIVLSLDGEGGWDIQDNRNGSFSPEVEFDVLKASESDRKSDALTVQRAFITSTKGNASMKPKKHSYSTEVIASSPSMEIEHTVQSSIVTQLQCSPRPLPVRVAAMSQILVPKLFDKQGGQLLAVVLLVFSRTWISDRIASLNGTSVKYVLEQDKAAFIRLAGTSVLQSAANSIVSPSLRNLTSRIALGWRIRMTNHLLQYYLKRNAFYKVFNISGMSMDADQRMTHDVEKLTNDLAGLLTGMVKPLVDIIWFTWRMKLLSGRRGVAILYAYMFLGLGFLRAVSPDFGDLANQEQELEGTFRFMHSRLRTHAESIAFFGGGSREKAMIDAKFMTLLNHSKVLLRKKWLYGIFDDFVTKQLPHNVTWGLSMLYALEHKGDRALTSTQGELAHALRFLASVVSQSFIAFGDILELHKKFLELSGGINRIFELEELLQASQSMPQAWTLRSICTG

SEQ ID NO: 63560 - protein, 410 aa, Zea Mays
MAAPDARPSSAGPPPARSLLLPLLLVLLLAAYSLPADSAARPSSNSNPRPAFTPPLLKRHQLRRPSSSSAELVAGPANASTKPFTAHYFPQLLDHFAFTPNASTVFRHKYLLNDTFWRRPGAGAGDDGPGPLFVYTGNEGDIEWFATNTGFMFDIAPTFGALLVFIEHRFYGESKPFGNDSYRSAETLGYLTSTQALADFAVVIRGLKRDLGAEAAPVVVFGGSYGGMLASWFRLKYPHVAIGALASSAPILQFDHRQRAPGPQQTLQSLQDCEVRLFNPELAVDSIHLHCHGGLPDPSQLPGEPACLPSQGDVQDHRRVPRGRRRPGEGVRGGEPVLQLHGRPGLQQDRGRRRPARPRWLAMAGLHRDDHAHDDLQREHVPAVRLQLRRQVRRVFPELGGSAEAALDHH

SEQ ID NO: 63561 - protein, 362 aa, Zea Mays
MVVSTPVLINCSIGFVETLENDLLELRAKGVDAQIASGGGRMYVTMDRYENDWDVVKRGWDAQVLGEAPYKFKSALEAVKTLRAQPKANDQYLPPFVIVDDSGNAVGPVLDGDAVVTINFRADRMVMLAKALEYADFDNFDRVRVPKIRYAGMLQYDGELKLPSRYLVSPPEIDRTSGEYLVKNGIRTFACSETVKFGHVTFFWNGNRSGYFDATKEEYVEVPSDSGITFNVAPNMKALEIAEKARDALLSGKFDQIILDAVEQVGGIYLVTADHGNAEDMVKRNKSGKPLLDKNDRIQILTSHTLQPVPVAIGGPGLHPGVKFRNDIQTPGLANVAATVMNLHGFEAPADYEQTLIEVADN

SEQ ID NO: 63562 - protein, 76 aa, Zea Mays
MLPASAISFPVLTSTKKVLKTSPADISPDCASFPPYQKSSAHDKNERQGDNPVVIPATHDFFLAFFKGSSCACSNS

SEQ ID NO: 63563 - protein, 476 aa, Zea Mays
MAALASAARSRRRLLPYLYRLLHSASTTAVSPSPSTSRFLRHASPVPRTPDHSPYLRFPAARVSTLPSGLRVVTQAYPVATRIASVGVWVDAGSRFELPGTNGTAHFLEHMAFKGTRRRPNAQVLEVEIEDMGARLNAYTSREQTTFFADVQARHVPAALDVLSDILQHPRFPERAIQRERGVILREMEEVQGMMEEVIFDHLHAAAFQGHPLGDTILGPEENIRSISKKDLEQYISTHYTCPRMVVSAAGSVSHDEVVDQVKELFTEFSTDPTTADQLVQANPAIFTGSEVRVENAEFPLAHIAIAFKGSSWTDPSSIPLMVIQSILGSWNRSIGVGNCSGSSLARGISNANLAESLMAFNTNYRDTGIFGIYTIAPPDTLQDLSRLIMAEFRRLASQVSETEVARARNQLKSSLLLHIDGSTAVTENNGRQMLTYGRVMPFLELFARIDAVDCATVMETAKEYIIDKVCSIVVT

SEQ ID NO: 63564 - protein, 231 aa, Zea Mays
MLLPPYLSDILHILSYMPKGLNFIEHTINIGWKEHQRARPIIVDPALQVPNKTEVVTTKEKRSSSWVMLSRSFLEFCLRWDNLPRTLLMYFTNFLSSSEGYFHTVICNSEHYQNTTVNSDLRFMAWDKPPLTHPVNLTTEHFDAMANNGAPFAHSFANDNSVLDMIDAKLLGRAPGRFTPGGWCLGSSVGGKDPCTFLGRSFILRPTKGSAKLEKLLKLLEPDNFRPKQCK

SEQ ID NO: 63565 - protein, 92 aa, Zea Mays
MLVRPPKQQMAYFLPLSVCLPRTANKQSSKPFNLQTMTCFFLPFFCHARPATKTANGLFSLPLCPCLVVASHDSFFYLYRIRSAPILILRTE

SEQ ID NO: 63566 - protein, 359 aa, Zea Mays
MPTPLAAALLPLPASPALHFPRPRPGPSWRARPAVVRAAALRALPRRLELCPPCLAAVESNPAPPPLAPPPPDEASAGSGLDARAGGGGGGGDGGGGADLGWLRAFPHVFTASMANFLFGYHIGVMNGPIEDIATQLGFQGNPFLQGLVVSIFIVGAFFGSLGSSALVDKFGCKRTLQIDSIPLIIGALLSAQADSLDEMLLGRFLVGIGIGVNTVLVPIYISEVAPTKYRGTLGTLCQIGTCLGIIAALSLGIPSESDPHWWRTMLYAACVPGILIVAGMQFAVESPRWLAKVGRFDDARKVVESLWEPSEVEKSMEEIKAVVLNDDSRGSWSDLLVEPHNRVCWNKWCSLFFIIDIP

SEQ ID NO: 63567 - protein, 885 aa, Zea Mays
MEKPCSLLVHFDKGSAAMANEIKADLEGSDGPAKADAMRRAISLLLNGETLPQLFITIVRYVLPSEDHTVQKLLLLYLEIIDRRDPAGRALPEMILICQNLRNNLQSPNEYIRGVTLRFLCRLSEPEVLEPLVPSVLANLEHRHHFIRRHAVSSVSAIYRLPHGDQLIPDAPELVERFLASEQDASARRNAFLMLCACAQDRAVAYLLSNADRVAEWPDLLQMAVVDLIRKVCRSQNRANKGRYITIITSLLSTPSTAVVYECAGALVSLSSAPTAVRAAANTYCQLLSSQSDNNVKLILLDRLNELHTLHRDVMVGVVMDVLRALASPNLDVKRKVLDLVLDLLTPRNVEEVVLYLKKEVVKTQAGDLEKGGEYRQMLVQAIHACAVEYSEVAGSVVHLLMDFLGDTNVAAAVDVVLFVREIIETNPKLRVSMIQRLIDTFYQIRASRVCSCALWILGEYSLSLSEVESAIATIKQCLGDLPFYTVSDEGEATDSAKPAKAVVNSVTVSSRRPVVLADGTYATQSAATETILTPSVAPGSLASTLNLRSLILSGDFFLAAVVACTLAKLVLRLEEVQPSKVESNKACTGALLIMTSILQLGQSSYLPHPIDNDSYDRIVLCVRLLCNTGDDVRKIWLQSCRQSFAKMLAEKQFRETEEMKAKAQISHAQPDDLIDFYHLKSRKGMSQLELEDEVHDDLKAATGGFTKDADDANKLNRILQLTGFSDPVYAEAFVTVHHYDIVLDVTVINRTKETLQNLCLELATMGDLKLVDRPQNYTLAPESSKQIRANIKVSSTETGVIFGNIVYETSNVMERSVVVLNDIHIDIMDYISPATCADVTFRNMWAEFEWENKVAVNTVIQDEKEFLNHIIKSTNMKCLTPRLH

SEQ ID NO: 63568 - protein, 1098 aa, Zea Mays
MELGASVSMSILEKLVQSCSFPDSWRGPPDAEVQALIGYLEELRSSVLDLSKEDEDEDDSATSSSTLKMSLTSQLQELCYDAEDYLEMAQHSRGGCSWQISWVRSKATRQRPALISAKDLSGLISRVNPAKEIAQAYIKSASSRTTTKENGPRPQEEPAKSSSRRAVYSDDTLQPDSHDEQLVRLLALESDQQLKTVAILGLPGVGKTTLARRLYHCYEGRFHCGAFLRASRNLQDTTRLLATMLSKIKGQQGCRYWGGSGDEQDLIDSIRQHLQGKSYFIVIDDLWATSVWDFLSRAFPKDNCGSRIVITTQVTEVAFACCNNHTVDIFNMKPLDDDQSLQLFYSRVKHINGYNAEECKAISHGIVSNCGNLSPLAIINIAGMLAGWADFNMNDWEYVSKCCTSTANLTTEEATERFLNLMYNKLPAKLKTCLLYLSMYPEGCVIGKDDLVRQWAAEGIFSQVVEPKGREHEVGFIYFDELLKRGLIQPVDTDYNDQVLSCIVHQVVLEFITKKSMQENFITVVDYRETGTVLDDNKVHRLSARFEGAKSAQIPRSFRVRQVRSFMFSGFIKSLPSLLKYCLVRVLILHVWSDDQGKTVVLDLSPVGNMLHVRYLKVVSNMIVKLPLIIRGLRHLETLEVDAEEVAVPLDVFILKSLLHLRLPSKAYQPDSDIQRIDLTNTFPLRFLPFVRALSMLGRFLLSHGHRIRHLTSLQSLGYFDLSTCSRYTVWQLGKLTNLRDLHLTCSAVRSRHRISNIQCLASVLGKCTSLESLTIRGEASSNQSISFDGLSSLSSPPYNLVSFVLSPRIFKMAKLPKWIGQLSRLSTLKIAVGELSSEDVDILKGLSALTALSLYVRRNPKKGSWILFSKGFAVLKYFKFTCTALCVKFSEQAMPAVQRLIVCFNANTMQQYRPEDAGIWYLSGLQVISARIGAAGIDQASREAAKSRLLDAILSNHPKPPPIRNVQMVDWVIHGDTEECSTGVMIRKDESSREHTRSFLSQFPFRRRPLLPSIFTRRGQDDEQHKIEENDVLQDSIILRKSSSLMQKPGLPYRYNGAPYRCYSGSGRWWGIGEGFRGNRCTGWRYRGEENTDVTRE

SEQ ID NO: 63569 - protein, 155 aa, Zea Mays
MEDEVQRAAVSSWNELDYEAEARLVAEARASWDRKARGEEEDEEEHDPEMTLDYYAYQAKKFRNTWNILYFGHFGRFEDTTRIPPMRFTEKPPDSPAYPRTTLQVFSIKVAGIEGGLQWPLHVFGKVALRDAVDHNRNMVFDRTRDNCQILTKEA

SEQ ID NO: 63570 - protein, 250 aa, Zea Mays
MLAASMALRKDRGNIEPTEQSYSEENRPGCACVAVPRVLLPEDATEPTTGIKFPTVLEDNSNLTTEVLVGMGFRSMRIMRVKNLNLYAFGLYIQPDSVCKKLGPKYAYIPDAELKDHPDFYEDLLRENIDMTVRLVVSYNGLSIGTVRDAFEKSLGFRLQKMNPNTDYGCLKTFGSCFSEDIRIPAGTKIDFRQTSDGQLITEIDGKQIGTVQSKDLCRAFFDMYIGDPPVSVETKQDIAQNVAGLIRRC

SEQ ID NO: 63571 - protein, 650 aa, Zea Mays
MQVSARVPDPANSSSASVSFVPIIKESALSNMTHRKHREHKLDWCYLNDDSYTDIFHNEVKQLVDKIFSSDGHNHACVVTCGSTSKTHLVIGSDHQPGLLTMAMERIFDYAKPIRATVSVSSYHVLQDSHVFDLLDPKNNEVLVREDADGRTHLKGLSMVEINSIQEFQNLCYDSDKHQNRTKVSKAKGHNGFIIFISKSDQNGKESSVSKMHFLELADHINDKQKSHGERFVQQNSKKSLYAVMDVVQALNSHQSFIPYRKSKITHILQDSLSKTGGALLIACLDEVSCQDAISTLSLASRSSQVVNEQRYNLSLITKGCSKSNVKLSVNNKNLSRSLLSSIQQQSPVLEKPYKTQVNNIAVKATRSLNANKRSETSTHSAKKTVNLVSASINLKHSGAKSILRERNFFIPTTNSSKEDKKTFVTTASDMQENHNGTKNIVVSSEMQVVPCSMKEIVSSDMKEEDHSSPGFLAENLFADLGFTCSSNAADKTTEENPATVLQSSPKISDQLRKISNSLKLLNSMAPSIVKQKTDIVRPQSFDLVEAEPKTPEVNLKLWHAQDAQESLKARSTGIKKSLAKECLLFLNSANKEQLKSLKGIGEKRANYILELREESPLKEIDDLKSIIGMSKREIDKMMSKLISDSEMNE

SEQ ID NO: 63572 - protein, 344 aa, Zea Mays
MATGPEHVAAAVEETPEKKAASTTELPAPSGWTKKVAPTRGGRFEVIFVSPTGEEVKSKRQLTQYLKAHPGGPASSEFDWGTSDTPRRSARLSEKVKATESPEGEKTPKRGRSSSKRGKKEEKEDTEAANEAGEDGASEEGKGTDVEMKDAENAEDEKKEVPNADAAEKTEEGEDKKEEAPAVDAAEKTGEKEVAPAVDATEETEKSTEGQAQPNYVAAPESEYKGDGKPGESEAAPLAFVDETAPHVIIGEEKKEENTENENSQAAESAVPSLASLEGEKKENGGAPEQPALPVAETKADAPPAEAEKGAENSGQPNTGSQEPKAANCDEGQIQPGASAVRCT

SEQ ID NO: 63573 - protein, 662 aa, Zea Mays
MHVMRTCGDVLLVQFEEVAYKVKLGKPTTTTAGWCDKLSAAAASMAVGGGRKKKATAAAAGSSPSSPAALREKTRTIISGMSGVVRPGEMLAMLGPSGSGKTTLLTALGGRHGGGGRALLSGKITYNGQPFSGGVRRRTGFVTQHDVLYPHLTVAETLWYAAALRLPRALGAGEKRARAEAVARDLGLGKVAGSMVGGVRGVRGLSGGERKRVSIGLEVLVDPSLLLLDEPTSGLDSTTAARIVATLRRMAAEGGRTVVVTIHQPSSRLYHMFDKVLLLSADGRPIYYGRAADALSYFASVGFASPLSLNPADLMLDLANGIAPQTTSGDGMAALLAGGGEGEHKEVRGRLSAAYERHIAPAVKLDVCAREATPGGQQAASRRASKAASEWTTGWWTQFAVLVQRGLKERRHESFNKLRVFQVLSVAALAGLLWWRTPASHLQDRTALVFFFSVFWGFFPLYNAVFTFPLERPMLLKERASGMYRLSSYVASRAATDLPMELGLPTAFVLILYWMGGLDPRPGPFLLSLAVVLYSVLVAQSLGLAIGAVLMDVKQGTTLASVITMVFLIAGGYYVQHIPPFVAWLRWLNYSFYCYRLLLGIQFPDGGGYYDCGHGALCPVAEFPAIKAVGLNNHWVDACVMALMLVGYRVVAYIALDRLKPR

SEQ ID NO: 63574 - protein, 183 aa, Zea Mays
MERFQLFKHLQFEWPVNHASLSPDRKVVVIVGDDPDGLLIDANSGKTLHSIKGHRDYSFASAWSPDGRTFATGNQDKTCRIWDARNLSKSVHVLRGNLGAIRSIRFTSDGQFMSMAEPADFVHVYDVKSDYNKRQELDFFGEISGTSFSPDTDALFVGVWDRMYGSLLQFGRLYNYSYLDSVF

SEQ ID NO: 63575 - protein, 664 aa, Zea Mays
MAVSDEARAMYNGGRAGLTFWSPNVNIFRDPRWGRGQETPGEDPAVSARYAAAYVRGLQQPYAAPNGGHRNRLKLAACCKHFTAYDLDKWGGTDRFHFNAVVAAQDLEDTFNVPFRACVEDGRAASVMCSYNQVNGVPTCADAAFLRGTIRGRWGLDGYIVSDCDSVDVFFRDQHYTRTPEDAAAATLRAGLDLDCGPFLALYAGSAVAAGKVADADVDAALLNTVTVQMRLGMFDGDPAAGPFGRLGPADVCTREHQDLALDAARQGVVLLKNRRGARHNRDVLPLRPAAHRVVAVVGPHADATVAMIGNYAGKPCRYTTPLQGVAAYAARVAHQAGCTDVACRGNQPIAAAVEAARQADATVVVAGLDQRVEAEGLDRTTLLLPGRQAELISAVAKASKGPVILVLMSGGPIDIAFAQNDPRIDGILWVGYPGQAGGQAIADVIFGHHNPGAKLPVTWYHQDYLQKVPMTNMAMRANPARGYPGRTYRFYTGPTIYPFGHGLSYTQFTHTLAHAPTQLTVRLSGSGHSAASAASLLNATLARPVRAVRVAHARCEGLTVPVHVDVSNVGDRDGAHAVLVYHAAPSPSHAAPGADAPARQLVAFEKVHVPAGGVARVEMRIGVCDRLSVADRNGVRRVPVGEHRLMIGELTHSVSLGVEQLGV

SEQ ID NO: 63576 - protein, 812 aa, Zea Mays
MPTIIIATHKQQMILLSSKEQTNIQTVPGYGSSSYYYQNNTWNGGSTGNTFAQSYQNYSSSDTNAQQSSTSVPANSLPYQQQYNQWPYYYNQSVPSASSNPVAGNSTTDNLTGNMPSGYSYPSSQPPPPGTTSWKSNSVASVAPPMQVPGVPGQQSQYGNQAEGHYNQGPGVQWSQNHYAYQTQPYPQKTNSNHPQLSNHEDQQETVYSNSPSTNLSSNHVSENFKPNLQDSVTMDTSSEGKIQVPINPQIAPGFSMVIPKNEKKHSGLDLSKKPAYVSVSMPTNDAKATQVGLDARLPFSLRNYATRNLNRCKNDAQREACRSIMNEITKKAFAEGTLLTKNWDTEPLFPLPESTVGMTGTSSVNNLSPFSSVSTPRKRVKSRWEPVVDENVTNKVEQIAKGLIGSNVHSTSDPKNRMGSSWDHRKFLQSSQAPSNKVNQRSAKKQKMGSNLSQIQNGNASSDSEKEHDLTKYYASATALANSPEEKKRREHRSKRFEKSKDSSFKSRNVSANKDAMTNLRARRAILSFRTRTYEGGTLAVEDMDWDALTVKGTCQEIEKRYLRLTEAPDPAKIRPEDVLEKALAMVETSQKNYLYKCDQLKSIRQDLTVQRIQNELTIKVYETHARLAMQAGDLHEFNQCQSQLKRLYAQGIKGCYFEFSAYNLLCVMLHSNNKRDLLSSMASLSKEAKQDAAVKHALAVHASVLSGNYVLFFKLYKKAPNLNSCLMDLYVERMRFEAMKCMSRSYRPTVPVGYVAQILGFMRTDTGCATNGDDGLEECEKWLKAHGIVLSEGFVFYTLHARARECGCTW

SEQ ID NO: 63577 - protein, 361 aa, Zea Mays
MRGREPARAPVSDSLFFPLKTRKNLPGDATKRAGPHRPNLTESTSIPVPTPTAEHQPRRKVGRNARDVCPRRMRRAAVAATTTTTRMAAEEMRRASASTATAEMPASPAPAQAGSRWARVWPRALRWIPTSTDRIIAAEKRLLTIVKTGYVQERVNIGSAPPGSKVRWFRSASDEPRFINTVTFDSKENAPTLVMVHGYGASQGFFFRNFDALASRFRVIAIDQLGWGGSSRPDFTCKSTEETEAWFIDSFEEWRKAKNLSNFILLGHSFGGYVAAKYALKHPEHVQQLILVGPAGFSSETEHSSEWLTKFRATWKGMLMNRLWESNFTPQRVIRPEQHKKDAHRGLRRGYGGVFVTSQED

SEQ ID NO: 63578 - protein, 207 aa, Zea Mays
MWGFKGFPTSDAKLGRWVLTAEDICFKNVVMSYMFRLGKCIPITRGGGIYQEHMNEALDVLRNGGWLHTFPEGKIAQEDQPIRRLKWGTASLIVRAPITPIVLPIVHSGFEKVMPENSFFGRRPPVPLCSKKIDIIVGEPIEFDLPSLKQEASTVPHDSSSERKGWPAITPDGLDEAAQRWLYQKMSDKVQSVMERLRKTVTNLKQR

SEQ ID NO: 63579 - protein, 116 aa, Zea Mays
MPLRLTAGTVPGGDATARACEEERRQGRRMRVRPAGAGRAAAACRRRHREGVGGCGACGGAGWVLCDFCQGKKNNVKSETGSRVYRRCPTCKAAGFILCPRCRVYKCVTFPESTES

SEQ ID NO: 63580 - protein, 127 aa, Zea Mays
MGILLVYDVTDESSFNNIRNWIRNIEQHASDNVNKILVGNKADMDESKRAVPTAKGQALADEYGIKFFETSAKTNLNVEQVFFSIARDIKQRLAETDSKPEDKAIKINKPDQGSEAPAAQRSACCGS

SEQ ID NO: 63581 - protein, 59 aa, Zea Mays
MKLHAFFLLTASGIPTIMYLPSLLHVSFNCKYSNTYRFCFVIVPLLHLHSVEYILQICF

SEQ ID NO: 63582 - protein, 411 aa, Zea Mays
MPAATAAGGPAALLRGSYVGALEGWWSSGAKPAARGTSGASDGRGGTGNGLGGVDKTGSTGGGTVGGRGGWGLGVVTSHYPYVFILTLPTSLSFAPRTSLLYSIISSKGGGWLGPRGSKSPTTSGDIATLGGGWLGPRGSKSPTTSGDIATLGGGWLGPRGSKSPTTSGDIATLGGGWLGPRGSKSPTTSGDIATLGGGWLGPRGSKSPTTSGDIAAMEGGFIGPADGILHDGGIAAMGGGWLGPDGGALTDQDTSFSNKQAKLLKTQKFTSELDHLVDTSKVKLDVMNPGLPSGSLSYLGSTNVSDPCRGSLLNENPNSFTIVIGPKFTSKLCTTSAACLLWCPVPICCMLRVSDTMLKQCTGTQSCNCRQLRLHYTCANNSNRIYSTTPIQHPLQYMDDIVSSVINTIR

SEQ ID NO: 63583 - protein, 467 aa, Zea Mays
MDRVHRTAQTSSVNTEDTSRYTASMQQNSFPLRPSLSSSLPPRAPYPPTANDHPGILPPMSAAADDRARRAAAFRPAPLPPPAQKQQLSGVAAAVLDAGGRLGRAVGDVFRRLRIDDTFYSGGGGGGGGAPNRSWRDAGNNGGRPAAAGAPAAASREEATGGGASSGRFARAQGSMNLSATYDSRTHDVESSVVARGDLWRAEASHSSSSSAGAGGNGANNNLFLVQLGPVLFVRDTTLLFPVHLSKRHLIWYGFERKNGVHSVCPAYWSAHKRWFFMSMLCLNPFAFSFMDMQFPNGQLRYVAGDGFTARAFLPLRGGVLQAHGKFPGEKRLSFSFKNRNGGSVVPMVQWPDKSLSVGVVQALSWRRSGLMLQPATQISICPTIGGRHPGVCVELIHSADDNVGVVCGYSHTASSPASAYASISIGRSKLNGGAARSGLAFRVDAPLLHGFGRPWFSVQMNSGIEF

SEQ ID NO: 63584 - protein, 158 aa, Zea Mays
MARKQVERSRSDPNMLVITYTAEHNHPWPMQRNVLAGYSRPHTATHMSSNCKKKKNSCSVEPTSSWPTTTTSSPSSKNGNYECQQMTNMTMEENAAAGYVAYAIDDEECAAMHQPINCGSVQPSADEVFAELEELEPTTSPVNANIFSRGVTYEWHKF

SEQ ID NO: 63585 - protein, 374 aa, Zea Mays
MVRGSFSNEAVNSDMSGEGISFIGSELENIPSTVSTNETGGSAAESGLGPSLMASERIMSDLEGEVSPQGTSSTTAMTSERSDVSQASLTSMFPNSSIASSVIVEPMPDPISTRADVPIFSGPHGEPGGSILHDDMMSIFSNDGLGRSRDSSSSETRRSHRRILWDTFSRRGSRGYPEFDADDLGFYSTWLDLGDDIFEELGESRYFHRRRHGSIRIREHRRAVFDSGNEQGTAACPLGIHQTGRCTCDSFLVAEESSARASISRIVMLTEALFEVLDEIHRQPASLSLSMVSVQAPESVVNSLPCKSYKKLEAPQRSDDMEQCHICLTEYEDGDQIRILPCKHEFHLQCVDKWLKEIHRVCPLCRGDVCEVAS

SEQ ID NO: 63586 - protein, 135 aa, Zea Mays
MEPAAAAGESDSSPPPPPEDLSTVEPSPSSSSSATAVVAPETPPPPGAQAVAAAMEAVERDAAAIAESYASLFASLRVALSNVTSTSAENMECLGDVVGRLQESGEAARLLTCTSVLSIVRIFMFGRGVGVGGGT

SEQ ID NO: 63587 - protein, 169 aa, Zea Mays
MQVDATPNHTLNLPHSTPNFSTGDFPALPTAEDQNGFNQGNVDVLGMFNGRSSSAMPTGAGDFVSAVRKLASQNSGQWKFKKGPEYGNGISALSVPKQYSSSTKQSSGNKFQSISSGRVAPWLETGDAVVCTQNQGERLVILLGSGIPALSRLDRLTWLATRLLRRSSA

SEQ ID NO: 63588 - protein, 692 aa, Zea Mays
MKVSSRKKPPPQQQREETEEQGSSGAAEAMDAAAAAAVQEEAEAEAEAEAEGRTVLVGVRADAESRALLTWVLVNVAAPLDRVVAVHVAPPSAAEAVDFDAMLAVYEGFCNLKQINLNLKICKDSSVRKALVREASLFGAAKVVLGVAKKRRAISSSHSVAKYCAKKLPAKCAVLAVSNGKIEFRRESSVHPDDGEGDATRDFGTKGSELENLSTDQVEIDADPSSTNAEESTVKQGDEISELPGKGASVLYCVLPERSSGSVASTSSRQDQDSVDLPSEGAGELYCLLPPRNGHSVRSIGDSKRSNASQKDDKPANPSLEGDGDLYCRLPRTGRPGRNSGGSNRSAGIRGAVRRSSSFSSDIHLSSETSPIKKDGSVSMTATERSSSAVSTEAEDSPKYTARTAETPSSSPMSLRRMVEGRSDRCHLHRRIFRHQRSSSFEWAKISMVQWAMRLPSRYTSVHPDGKPLKPGASPRLNCDSETESTAAVEPESMFSFAFYDVAWPPSELESLREKYSSVCRMFSYEELKLATSNYSPDMLIGKGGTSQVFKAQLDGGTFAAIKILKPSVDAIHEFVTEVETVTSLQHENIVALRGFSFENYNLVLAYDYMPRGSLDKALHGKNDGTEFLVWERRIKIAIDIARALEFLHLGGVTQSVIHGDVKSSNILLSEDFGARVHGAGVFFTRGGQRED

SEQ ID NO: 63589 - protein, 98 aa, Zea Mays
MALQARLDQKHITRERALPAERPQPHTPRPYKAGWTKNTSLVKDPYPQKDHNPILHALTRQVGPKTRQLVNHYPQKDDGLEAQPRTKNRTLAFKFQAR

SEQ ID NO: 63590 - protein, 422 aa, Zea Mays
MAGKTKGGKNKGKAQGAGQSASAEPEVPATDGAEVVNPENGEVNEPPVTEDGVKNVEKGDGDALEVVQPARKPAEGELHLYAVPVRTQSGEKLELQLSPGDSVIDVKQFLLDAPETCFYTCYNLILHTEDGSAHQLEDYNEISEIADITSSGCSLEMVAAIYDERSIRSHLRRVRELLSLSSLYVSLSTSLALHQESAQGKSAGPEKGPIQELDGLNFMEDSAGALTNLLASAPAEIKCVGSIVFSSFNPPPSYRSSKGSIFDSKPTKQGLEASTLIGLLQKISTKFKKGFRELLDRRASAHPFENVQSLLPVTSWLGAFPVPEHRRDEARAEDSVVLSYGTELIGMQRDWNEELQSCQEFPHGNPQERILRGRARYKVTCDFVDAAVKGAVGVINRCIPPINPTDPECFHIVNNVNRFYVA

SEQ ID NO: 63591 - protein, 1416 aa, Zea Mays
MPGSTTSTKGRIYHETYGCQMNINDMEIVLSIMKNEGYDEIVPDPESAEIIFINTCAIRDNAEQKVWQRLNYFWFLKREWKANVAEGRAKSMRPPKIAVLGCMAERLKEKILDSDKMVDVVCGPDAYRDLPRLLQEVDYGHKGMNTLLSLEETYADITPVRISDNSITAFVSIMRGCNNMCSFCIVPFTRGRERSRPVSSIVREVGELWKVGVKEVMLLGQNVNSYNDTSEVEELEPGKNWQLSEGFSSMCKVKNMGLRFADLLDRLSLEYPEMRFRFTSPHPKDFPDELLYLMRDRYNICNLIHLPAQTGSTAALERMRRGYTREAYLELVHKIRDVIPDVGLSSDFITGFCGETEDEHAETLSLVRAVGYDMAYMFAYSMREKTHAHRNYEDDVPEGVKQRRLMELINTFRETTKKNYDSQVGTVQLVLVEGPNKRAPKTEVIGKTDRGHKVSFARVPVPHTFEGEEAREPAVGDFVEPNFCAVLVLPEQILCSVAKSSIRANSKPQIHSTTLQIKTKLNDSREPSTVDHLQPSIRGRTVQTRIKSNGRKYPQSPKPRSLPTNATLCHPPPSMAMASSPACHFRHPPRLRLLLPLSTSAPHPWLYSWSHPRQRGRLRAPPAALDLRPEPSPSSDSDDEDAVGASRSSGRSTMSLILSRLRRAGYSGEDPRAAAPPHPPRGSVEDVFRADDGVLPNARGGFDADDEERALGDARFPWERPMPPPEAAPRSARSPTWMAELTLPAAELRRLRHAAIRIKSRTKVGGAGVTREIVEKIKEKWKTEEVVRVKVSGTPALNMRLFHEILERKTGGLVIWRSGTSVSLYRGVDYDEPEPTKKSKKNSQSLAMDFPIKGSSNPSLLPTETANSVRDSNVALVSNAAKEELVVQAPEIKYEDEIDKLLDELGPRYTDWPGSDPLPVDADLLPANMPGYKPPFRVLPYGVRPSLSRRDTTNLRRLARGLPPHFALGRSRQLQGLANAMVKLWEKSSIAKIALKRGVQLTTSERMAEDIKKLTGGVMLSRNNEFIVFYRGKDFLSSELAEVLLERERLAKSLQDEEEARRKAASYFSSAETYAQPTVAGTLGETLEANSKYGTKHDENHADKMARTIEAARHADLVRKLEWKLSLAQKKMEKAERVLGKVETALRPTEDSRPPETITDEERFMFRKLGLRMKAFLLLGRRGVFDGTIENMHLHWKYRELVKILVKAKSFADVKRIALSLEAESGGILVSVDKVSKGYAIVVFRGKNYRRPSSLRPRNLLSKRKALARSIELQRHQALSRHFAKLNRKVERLKAELVQMEDVKEQGDEELYAKLDAAYSSDDEDMEDEDDEAYLKRFDNEVAGATADDDGSDDYTSAADEADYPDSDDEAGDCSEDEGEDDEDEAAAGVSDAGFHGEVVGFSSDTDRRNHDVNEY

SEQ ID NO: 63592 - protein, 436 aa, Zea Mays
MREEMYKKAKEYESEIIGFELAIRRPYFHVKPLDNPELENWHSYLDFIEKEEDINKVIKLYERCVIACASYSEFWIRYVQCMEDKGSLDLANNALARATHVFVKKQPEIHLFSARFKELNGDISGARAEYQHLYSDLCPGFLEAIVKHSNMEHRLGDKELSCSVYEKAIAAEKGKEQSQLLPTLLIQYSRFLFLAIRDLEKAREILTVLHEQLNVTKTVLEAVIHLESIFPCEKRIDFLDSLVEKFVTPESSQGEVASLVDKEEISSIFLEFLDLFGDAKSIKKALTRHTTLFSCKRSILPSKKRKADDTVVSDRDKFAKTVVTQSATGTDPNASNPPVWPATSEASGQQWGASYAQQAAYPAYGTYDYSHQMPQPAPQAAAYGAYPPTYSAQAYTQQSYPQPAVIPAAPVPAPTAPSAYPQQPAAAQPYYGTTYY

SEQ ID NO: 63593 - protein, 238 aa, Zea Mays
MLLSAFCSAVLNLFSKNMSMAVENFQVVLDSHRWVPMPSVGFVANGVVDDTSDDVTPPSVLMEHPPLAVFVNGVSAAMNELRPCTPLSLKVILAQEVVKGLHAVSDSLVRYKAMRMLRGNESALFLSLCQAFIEVVHPYCAACFGRCYPNGATLISECQGTLDAVRQLLTIPARSNSSSIERKQSGAIERKQSVESPGTAVTNNELSADGPGLEINDAATTTTPPVEDDVSTHPPASK

SEQ ID NO: 63594 - protein, 728 aa, Zea Mays
MTVPTKDDSQSGTVADTVPLPTYRSLAAPVRKPVDKFALLPAFLKVRGLVKEHIDSFNYFVNKGIKKIVEANNRIEARNDPSIYLRYLGVHVGMPSVHVEYNIENITPHFCRLTDRTYSAPIKVHIEYTVGKQHEVRRKNNFIIGYMPIMLRSHACILYEKDEAELAKYGECPLDPGGYFVVKGTEKVILIQEQLAKNRIIVDTDSKGRVIASVTSSTHAIKSKTVIFMDKGKIYLQLNQFNKPIPIIVVMKAMGMESDQETVQMVGRDPRYGDLLFPSIQECASERIYTRQRALQYMDEKVTYPGATNQKEGRSYSILRDVFIAHVPVKNGNLRPKCIYTALMLRRMMDAIVNSDTFDDKDYVGNKRFELSGQLISLLFEDLFKTMNSQAVERMNKNSDKTHSSPLDFSQLIMQDSITFGLERAISTGNWDIKRFRMHRKGVSQVLSRLSYMASLGYMTRITPQFEKTRKTSGPRALQPSQWGMLCPCDTPEGEACGLTKNLALLSHVTTDQEEGPLIYLCYSLGVEDLLSLSSEEIHTPGSFLVMFNGLILGKHKDPQRLVIDLRNLRRSNVIGEFVSIFINEKQHCVHIASDGGRVCRPLIIADMGISRIDETHMEKLRHGTCGFDDFLRDGLIEYLDVNEENNALIALYEHMDQDDVERSSITHIEIEPLSILGVVSGLIPYPHHNQSPRNTYQCAMGKQAMGNIAYNQAADPTTTQQVLSSGR

SEQ ID NO: 63595 - protein, 421 aa, Zea Mays
MTFSMDMDLNASPVPDDDEQQPYNEPVEAEYAQEEHVESAVATLRREREERRKRLKREQQDDGSRLHSQQIRVDYAPQPKRHSRIKEAPQGWLDCPAFGEPIDKIIPSKVPLDETFNESVPPGKRYSSKQLVNKQRKAGREIGLVIDLTNTTRYYSPAEWTKQGTKYAKIACKGRDAVPDNESVNKFVYEAMIFLDRQKHSKNPKYILVHCTHGHNRTGFMIIHYLMRTHVSCVAEAINMFAQRRPPGIYKRDYIEALYSFYHEVPENMMIACPPTPEWKRPDDLDLNGEAKQDDDDDNGDPEPPRNESEDKIITNDDVLGDEVPYDQQEALRVLCYKLLEMPLIRGHSQFPGSHPVSLNSENLQLLRQRYYYATWKADGTRYMMLIMRDGCFLIDRNFCFRRVQMRFPHKSLETRYQIQA

SEQ ID NO: 63596 - protein, 219 aa, Zea Mays
MAEDATSSHPSRYVKLTKDQDAPAEDIRPGELNQPVHVPQLEGRRCSECGQVLPESYEPPADEPWTTGIFGCTDDPETCRTGLFCPCVLFGRNVEAVREDIPWTTPCVCHAVFVEGGITLAILTAIFHGVDPRTSFLIGEGLVFSWWLCATYTGIFRQGLQRKYHLKEHRERTGRLAENNAVPMTVVNPPPVQEMSMLEEVEEKGAEKSEHDDVEVIPL

SEQ ID NO: 63597 - protein, 218 aa, Zea Mays
MKGLKQKKAHLMEIQVNGGTIADKVDYGYKFFEEVPVDAVFQKDEMIDIIGVTKGKGYEGVVTRWGVTRLPRKTHRGLRKVACIGAWHPARVSYTVARAGQNGYHHRTEMNKKVYKIGKAGQESHDASTEFDRTEKDITPMGGFPHYGIIKGDYLMIKGCCVGPKKRVVTLRQSLLKQTSRLALEEIKLKFIDTSSKFGHGRFQTTDEKQRFFGKLKA

SEQ ID NO: 63598 - protein, 1065 aa, Zea Mays
MNEKRFVVALSQTLVRTGTKPQSPMRPRQRFDRRIKHAIAASSVCGPAPVFYRLDAKVNAGRHGLHRAPQSYAGRTPVRGRGRRSPTGPRLPRPPRRRRQAPQDLPLRHAPRTRRWGPGASARLKSFESSVVLSRKGFRLGKFVQSLRAHPHLPPALALLAYGSEGVYYFVEQFVWLAKAGILPAHLLAKLLLKPEGMGTGEGSPPARRGISGRRRRWPDEDDDEYVLEEEEEEDYVEELSASSAGEEGVDSDAEYQEAEEEDEIEKPRPKRPAKGITSSAGERGLDSDAEYQEAEEDDEIEPPRLKRPAKGSTSSAGEEGLDSDAEYQEAEEDEMETPRPKRPAKDSTSSAGEDGLDSDAEYQEAEEEDDDEIETPRPKRRAKGSNRVRKGKVDLAAARSRRRKYEEDEDYEEEVDEDDEVEEEYHDDLEEVEEEEEVAPQRPKSIVKCGARGRNVKLSLAAKRSHQRKQEDDEDMDFDPELDDEEVEIDEDIDFDPDVDGDEEDEYQDEEEEELVPARARKVTVKNPVKRKSISKRRTPKKKKKNRGSKVSRRKGASAKVKKSAPVRRRRKRSVIDDYEDEDVDDDDDDDFIVDDEVIVNRHPKKKARIGSGRETVVDPQVSIEEETWPDLESDSSDFEFATSDEEPNNVETPVAEQTTVRKGRKKRISESESSSDSEFVVSGKELEELREPEPPKAAPNLHVSLRRICITRHGEGKGKEKQEQEEAGKPICGICLSEELRATVQGVLNCCSHYFCFACIMEWSRVESRCPLCKQRFTTITKSSKVDLGLGVRKAVVKVEERDQVYQPTEEEIRRWLDPYENVVCIECNQGGDDNLMLLCDICDSSAHTYCVGLGREVPEGNWYCGGCRLGDEGPSYTGIQRTVAYERQNYRSHVGSSVSFGMAVPGGTFERPSSINPRHSFQGIDLNLSPREFPGESHPAESQVSTDSVSTPTGRAGRTISGRRELQRYIQSLFRPSLPSRPDTYHNIAQNSGGVSRNEPNRWNFPSSSEANTSQNLPDGIQNHHSDLPFVQAHSNFAPFMSPDGDDFQQIEGVKSNLRNMQ

SEQ ID NO: 63599 - protein, 457 aa, Zea Mays
MAAQVVAAAGTPVARPLGGGSGADALRPAARMPRERRTGAVAARGRRESQVVSVISRAPRPDAGVLPVSPDDDAAVKEEANFQHLKAIQQLATAANGVWSKPNVRRKTKIVCTIGPSTNTRDMIWKLAETGMNVARLNMSHGDHASHQKVIDLVKEYNASHADNVIAIMLDTKGPEVRSGDLPQPIFLESGQEFTFTIKRGVGTDTCVSVNYDDFVNDVEVGDMLLVDGGMMSFLVKSKTEDSVKCEVIDGGELKSRRHLNVRGKSATLPSITDKDWDDIKFGVDNQVDYYAVSFVKDAQVVHELKDYLKSCNADIHVIVKIESADSIPNLHSIITASDGAMVARGDLGAELPIEEVPLLQEEIIRMCRSMGKAVIVATNMLESMIVHPTPTRAEVSDIAIAVREGADAVMLSGETAHGKFPLKAVKVMHTVALRTEATIPGGETPADLGQAFKGEG

SEQ ID NO: 63600 - protein, 2804 aa, Zea Mays
MSRQDRHQWPRPNHGYDPRAAAAAAQWYGAASMLFPDPGAAALHGINPYGFAPNPFFNNFLPQNSAALAAYQLQQQQAHHFASHAYHQAPTGNTMHRSTKPAAAAKPAPPPGNQQAVLDRAQEAARKAREELVKGGDGVTAWKVAQAVLVALKADSWDSLGVQPQDVPLLRDLFLIEGKVNAFIHCYVAARKIVTVYDLEVEICKNEGVVQFEELGLGPFLQHPLVAHYFLVPADLSVVPKLCSEEIINTLLKFVDKSKKKITIEDFLNHLAEKKSVSGKEKLGVRVQSLGLHISLLRQAKQTEVSAAKLRANMSGSGNSSQEKDLLKNASFHTHKKALDKRFISLTNRIKELPGINKHIHFDSTDDETNSCTGSEDGKSDGNENENECSILDKKDGDKRVNSCPYPSKTEELERLGLKSEINKRQSLENSKPRDSGKKGKVSEKRKYEEIGSPSCSFKQPKKQQKLQKHEASPKCFLSIGKLENFVTTWKETCREHPVQQVLEMLANYYGRTISGKRRIRNFFSQYPGIGLLNVAVKSMGCGLLDSIYDVIQLADENDVASSPPPNTTTEVMEIEPPSVAIDDVIRRISEYIESNSKISGDVALQVRALNDCETWVTTQFSANQFSALGHGTFLEFLDKHCHQFRTALSSFFKEGPSNSSSLEVSVLQQQIEFLLCQAESNWLEDSDFSEDSFVMLLKKQFPTISFNIVQDKSDGGVSGFIEGQKKDIRTYSLKFSISLLEKRWSGTLPSRHGNVDELGNIVAEQSCYHTTVCSREAINCLLRAPMLSDLHLWSHWDSLFAPTLGSFVHWLLNTGPIQELACIATTDGRFIRVDSSATVDQFLEAIIHRSPLQVAVKLLSLLYIYNGSMNTPMSLLKCYAQRAIKLIVDNNNDLMNAKSENKIFMPDEPQNLSSESSTCFADQCQESSQASPGRLIRSDSLPNINNTVHLITKFVLDCLDHLPSEFRSLAADILLAGFRVVTKNWHAVMLHEATENGQLCMLHDIGLSLGVVEWVEDCHRLCLTDEVHVQTEMHSSAKLATPASVGATHEDSNMHISSDVNMMDKRKQLFPVINDRAGIDKEDNKMLNPAGTEADVAELHTTSRSSMMEETSLEEASLVIETIRREEFGLDQALSDTENSLLKKQHARLGRALHCLSQELYSQDSHLLLELVQNADDNTYPEDVEATLAFILQEDGIAVLNNERGFSAENIRALCDIGNSTKKGSNQGYIGNKGIGFKSVFRVTDAPEIHSNGFHVKFDITDGQIGFVLPTAVPPYSTTSFSRMLSVEDDKDAHSLWNTCILLPFRSKFRECTGMCSIVSLFSDLHPSLLLFLHRLKCIKFKNLFDDTLLIMRREILGDGIVRISHGIETMSWLVVSKRLQGTIVRHDVCTTEIAVAFTLQQTEEGDYEPYLKQQPVFAFLPLRNYGLKFILQGDFVLPSSREEVDADSAWNQWLLSEFPSLFVSAQESFCALPCFQRCPGKAVTAFLSFIPLAGEVHGFFSQLPHLILSKLRLTRCMFLDGSTVQWVYPCNTLRGWDEQTKMLFSEGLLHEHLGLGYLSKNIVISDKLSRALGIHDYGPNILLDAISSICRIDGCIESLGLEWLCAWFVNLYLTLLSHSSQNVSSARNLEDILLDKVRKIPCIPLSDGSFTSISDGRIWLPYDVASSIPECSSIPNFPALYGNLRTVSPNLLSACCKNKYLMEEVRINDLADMLQRIGVRKLSGHDIVKNHIMVSLRNGLDANVADIVIREYVSFIMVHLQSSCTSCNFERGEIVSELRKSPIFLTNHGYKSPADEPIHFSKDYGNSVDVTRLLQNVEISWIELDSSYLQHHGSQSSSFAREKWRQFFEEMGVTDFVQVVKVEKTLSQVDSILAGGLSLADVSTKQCTVYDWESPELSRILSIFSSKRCKENCVYLLEVLDRFWDDHYSAKSRIFTDATHCGENRAVESSFMKCIQSFKWIASRMDEDLHYATDLFYDCENVRSLFGSVAPYAVPQVSSSSLKKAIGFKTEVSYCDALMVLKSWITSKVPFRASMSQMCKFYTFLSEGVADAKIDIKREFMSSPSIFTPLQRPRASEVIPGRFLAPEDLYWHDPTGCSEITEDFVATKNRSMFPRKMLSAAYPNLYELFTLTCGVPKAPTTSNYVEMLLRLSTIALPSQAGNHVFCVFVRWAKCMHSESDKMNDILYLKESLQKLETTILPTSADKWVSLHPSFGLVCWVDDDELKQQFVNSNDVYFIQFGDLSSEDKQMLYGRVAALMKSLGIQALSKVVYREAIFYGTSENREKVSLICWLLPYMQRYIYKMHRDTYINFQKNDIMKISNLQVVVVDKLFHKYVLRGLESSSKKRFQCHCLLQGDTLYATQEADSHSVFLELSRIFFDGSHDLHFANFLHMIKTMAESGTHAEQIETFIVNNQNVPELPEHEAIWSFSSLSAAKHGSANQGGADTQGVDFQPVHEFSIPNHQKAQVMVSSWPLNYWRTAPVFRTPLINQHASMQEAKVNDAGPSSNLNMPAMYGHTEDSLLSADLERDWIIEENPRTETTLFGDSSSEILDEPQMVMSAEPFHAPAYLNLEAGNSSPTVHVELTNSDEKLANLAEDKNRRLSDASQLRTGSNPMVDVELTNFDEKLANLAEGKNQRLSDASQLRTGSNPMVDVELTNFDEKLAILAEDKNQRLSDANQLRTGRLGEELVEKYLAKQLGSNNVRWVNNRIETGLPYDIVITHPEGFTEYVEVKTTVSSRKDWFDVSAREWQFALEKGDSFSIARVILGTKKASIEMLKNPHKLCKQKALRLALLISRSAAT

SEQ ID NO: 63601 - protein, 1049 aa, Zea Mays
MKHNGAIDKTRAGFTALCNRLLCSNDSRLCKMTESWMVLLMDRTIAKGQTVDDLIRRSAGIPAAFIALFLAEPEGTPKKLLPRALEWLIEFAKNSLANFQKDSNQRSGVMKELLESQSETTSVYSNGNLSKGRDEGVVPTVHVFNVLKAAFNDANLATDTSGFSAEATIVAIRAFSSPYWEVRNAACLAYTALVRRMVGFLNVQKRESARRSLTGLEFFHRQQLSIFYMIHGQIDQNFFSIVAALRYPALHPFLSSELQTTTEQLADGVSSNLESHITKAIHPSLCPILILLSRLKPSPISCGTDDSLDPFLLLPFIQRCATQSNYRVRILASRALTCLVSNERLQYVISDILDNLPRGSHKAMAHSVQHTDPAISANMGKANVLLLSKSFNSIHGLLLQLASLLDNNFRGLTDGSMKDQIIGLLLEVLSRCSWLGCTKLCSCPIVITSYLRVLDLMLDVARTGKSRHTEVIQALLLELTSQCLSNTASTQYAFHDPTRIELKQQATESFLSCVGLSKKTDETNDDDVQLQILGEPTLEMPRVDYSLHEVHKEILSCLTDPSYDVRITVLKRILWLTKSIRHGYADNILHQWAGVNLQPALMERLFVEEHPKCLYYNLKIIFSWNMEFPFNNGEDSSTLLSLWDRLVHLNSTMSHAKTREIVLCCMGMCMKLFTKQSRGGISMDCLKTSEISASFVRINEGDGLSDAMLRLNLFVTLVKNQSEPSESMNARRAAAEAIVASGLLEEASYVASSVSNMYSPSEFDEDHTKEKCMEDSVFEFVSLYTCKILDLWFVCIQLLEDEDAYLRQKLAKDIQKIIAKGSANTFCDDSTPLQVDRVIELSLDYLTSLFGLWLKYVEFLLRIVLGTGNALNSRGDLVRQIFDKEIDNHHEEKLLICQICCSNIQKLLNSKCQMEAGAETKLFLQNWREIFLKQLTSLTGGYIEKEGKNDWIGGIGNHKDVFISVYAVLLGLYALTQSGSLDQLEDHCAVYLQEFANLERSITPFLKNPLISNLYALVKLSHERFISSDKPEDQVGDSGSSFDPYFLIR

SEQ ID NO: 63602 - protein, 517 aa, Zea Mays
MYNALRPTMAVLITNELLEHPDPNVKVALTSCLTEVTRITAPEAPYDDDVMKDVFKRIVETFAELDDMNNPSFARRVSILDSVARVRCCVLMLDLDLDHMILDMFRHFFKTASTRHSEQVTHCMEIIMMFVIQESDDVHAELASCLLQNLTREAQETLPASFGLAERVLGLCRDKLKPVLHELLKGTPLDEYSNVVTTLFQDAGENNVDASGEDMAAKGKLSEKPVSDESPQETSKVDQNVNCLGQEGSSPNSTPTTAISNGAAPVDNVKSPDGPDSSKQKQELTSGDEQTPDSSKQKQELTSGDEQTPDSSKQKPELTSLDKQTKSSEQLISCDQEVREPVTVETEKLSDVNSKKDHKLCSSIGSEMAEQSKVVKDNESIVASEELSPGTNDVDKKQITETGNITTEESSKPSDTKPAVVKPKRGRPPAAKSQEKKPAGKKHASDLKSAKLDPITDSGGRATRHLNKDAAKSSSTKAAEGESEKKQHKTSMKLQKEDAVSDKDTNEDISLKSFTVT

SEQ ID NO: 63603 - protein, 531 aa, Zea Mays
MATAMSVSAVSPPAAAVTRPRTMVCVPATARAPREMAAELAAAAALGADVAELRLDCLAGFAPRRDLPVILAKPRPLPALVTYRPKWEGGEYEGDDESRFEALLLAMELGAEYVDVELKVADKFMKLISGRKPDNCKLIVSSHNYETTPSSEELANLVAQIQATGADIVKIATTATEIVDVAKMFQILVHCQVPIIGLVMNDRGFISRVLCPKYGGFLTFGSLKKGKESAPAQPTAADLINLYNIRQIGPDTKVFGIIGKPVGHSKSPILHNEAFRSVGFNAVYVPFLVDDLAKFLDTYSSPDFAGFSCTIPHKEAAVRCCDEVDPVARDIGAVNTIVRRPDGKLVGYNTDYVGAISAIEDGIKASESEPTDPDKSPLAGRLFVVIGAGGAGKALAYGAKEKGARVVIANRTFARAQELANLIGGPALTLADLENYHPEEGMILANTTAIGMHPNVNETPLSKQALRSYAVVFDAVYTPKETRLLREAAECGATVVSGLEMFIRQAMGQFEHFTGMPAPDSLMRDIVLTKT

SEQ ID NO: 63604 - protein, 734 aa, Zea Mays
MDESRKRAVSTANGKNISSSLDEDFGNDFLSSWKLPKSGKDTIDFSVDSVPKSSKKFSFDNLDDFGLNGAFDKLPSFQMGMSDLDFSSPDKKKVKHTSSNADLFEKKKETDKDNFSFSFDFNELGKFSLDGKLGIEEKSTNRFNGKSDPVSSEVKKDTQRGLLAKGNAILEENNSKDKMHTLDTRTSRPSHLTNHENVKNASQPTSNIDVADSSDKMQEHTSVNPATMEQTKVDSVLNDNPGEHPKEIYAMKAAVNIPSQDFSCGAISSEDPTQGPADHVNSKDAPIVNCGKVHVSRESNDDEQSNGLQSRDTSIINSNVSRRPSGQFNSQNEVLEESVSLNEGSQDNQSFSGAPKKFLKKTSHGTTNTEEEISGPKILSCSVQREIRSVEPAPMKERGSFSLLSKSVHMKATRVELTSETALNQSSSASKVIKKMTTHPTDLKREHMQANAVPHKSKTALSKTYSKLASNGLLATSMNAKVDTNAKLGLEPPISGKSSLLNARSSTPHSAGHKVVASHVLLKASNTSDSLQGVPSKDNKSSTISQLTGARITKLGIRSLKSDMALEKESVQVSGTKCSPVTTSRILDSIPEGKPALPSPSIMQKVPEESALNPKAPKVLKHIMRSPAVRKSPRTVPELGNEMILGSGTPKAHVDNAISSRMPPGMGAISDLELPVLENDGNIEKAEACRKELEDICILLKRKHAEAKELAVRAIVNNNTMLMLNHPMIEEKIS

SEQ ID NO: 63605 - protein, 245 aa, Zea Mays
MGEKLIQRMRERSMYFIALHLRFEPDMLAFSGCYYGGGEKERRELGAIRKRWKGLHPNPEKGRRQGRCPLTPEEVGLMLRALGYRKDVHIYVASGEIYGGARTLAPLKALFPNLHTKETISSKEELAPFSKYSSRMAALDFIVCDESDAFVANNNGNMAKILAGRRYPLLLCHQWFITCPDHISCPLQEILWAQENDPTKCQKALSLIFEQRKHVVGCILLKSTHGSERIYGRAQRAEAREGRVS

SEQ ID NO: 63606 - protein, 389 aa, Zea Mays
MPLGLGRIASYCTHRSGPSRSSLPCMSGACDAITSANRLIGKHLRAGRVDAVREVFDKMPQRDIVSWNSLMAVYARSGVHDSAVTAFLKMRREGFCADHTSFSTVLSACARMETLALGRCIHGLATKTRSSLNVFVGSSLITMYANCGVYSCLEWIVDDVDSPNLALWNALISGLVVNHRVEDARRVFDQMPEHNVVSWTVMIKGYFTVHEVGRALELFNLMPTKNSVSWCVMIGGLVNHKRFREVNELFNTLMSCREIVTNAILVKIVNACAGLKSIGGGRCVHGFAVKSGFIHDHIIEASLVVMYCNSLDIDEAQLEFCKMERKHVGSCKIDEARKIFYSMDGRDKISWNLMVDGYVKHGKIHDAIELYSKMPEKNLEASTTLMSCF

SEQ ID NO: 63607 - protein, 231 aa, Zea Mays
MSELVKQHLERAKLRMKRQADKGRSEREFAVGDWVFLKLQPYVQSSVAVRAHQKLAFKFFGPFQVLQRVGTVAYKLQLPPSSRIHPVFHVSQLKRALGTGFTASVTLPTDQFHFSVPFKILQHRTVMKGLQACAQVLVQWSHMSPELATWEDIQDLRQQFPYAPVWGQTASLPGGNVSDTGEVLEEQSKEREQSGPDGGPDGPRRSTRPRRSNKMVTGPTWINFMEVLREA

SEQ ID NO: 63608 - protein, 408 aa, Zea Mays
MAGSSGGAASSSSSRGVPENRFYNPPHVRRQQQQQGQRPLRPASPSPSPRPVRQKPPPPAAAVAASADVDIRVDSDDSSSTTSSKPSVASTAATAAAGEVNVAVAEAEAGNLERFLASTTPSVTAQFLPMSSLRMRRGGDAMDSRPYFCLGDLWESFREWSAYGAGVPLVLNGSDSVIQYYVPYLSAIQLFADPSRPASRNSESSIENDVERLRVSSSLEGKHRLENGGIRSDDGEGDASSSFPIFQYMERDPPYGREPLTDKVSTLAHRFPALKTFKSCDLLPSSWMSVAWYPIYRIPTGPTLKDLDACFLTFHCLATPCKDCDPPTPACPGFGGINRGTTAAGKLSLPIFGLAPYKLRASIWTSDKTQERDLVTSLMQEADSWLRRIQVDHPDFRFFVSHFSTTWR

SEQ ID NO: 63609 - protein, 140 aa, Zea Mays
MAFVFSLTLDQAEHYSSPILSFWMMAASTPWRRNLPLLCGGFGPERGGRPTRIRSISPPTRPNSRTLRRRKHSRRCTPSRHRKNNPHCRRCSSSPHPTSLIQSIDAALKSSSPPIAAPSQSTDLDVLHQDSWGARSPMEE

SEQ ID NO: 63610 - protein, 120 aa, Zea Mays
MVPIDELCFIGLSPSVRHMCGRRMRSLLNPVVLELMISLSSEFSLDSCPRQLAPDSISSSFGHPTSMSVPTCCLRLMLAPTKESQEDVEKQAPGRCPKCSTESSNKSSIVILVHAKIWED

SEQ ID NO: 63611 - protein, 559 aa, Zea Mays
MATSAPAANADGAAPGGVDGRSGFCEVTRTFRSLRPPVPLPPTDSPLSFPEFAFSLLASSPTPAHPALLDAATGEAVSFPAFLSQVRALAGALRSVVRLGRGDVAFVLAPTRLDVPVLYFALLSFGAVVSPVNPALTADEVARLVALSGASVAFAVSSTAAKLPAGLPAVLLDSDHFRSFLQKQSDGRGEEGLAADTAVVRQSDTAAIQYSSGTTGRVKAAALPHRSFIAMAAGSHALLGKPRRGRERSLLGAPMFHSMGFYYTLKGVALGHTTVMLTDAVARRGVKGVIEAAGRWAVSEMTASPPVVVAMVKERCHLEALERVVCGGAPLPRTAAESFRRRFPNVDLCMGYGSTEAGGISLMIQREECGRICSAGRVSENVEVKIVDHVTGEALSVGQKGELLVRGPAVMAGYVGDEEANASSFDSEGWLRTGDLCYIDQDGFLFVVDRLKELIKYKGYQVPPAELELVLQSLPEVIDAAVMPYPHEEAGQIPVALVVRQPGSKVTEAQVMDHVAQRVAPYKKIRKVLFVDSIPKSPAGKILRRQLTNHVQAGAVSRM

SEQ ID NO: 63612 - protein, 352 aa, Zea Mays
MLKDENVNLLEKLGLAEEKLRQSEARTTELEKQVANLGNGLSMEVKLMKRREEMLVRKEQEIRKALISKNGKSEELTTLQQQLQSAREEASAAVKKLKEAESETQELHTMTRRMILSKEEMEEVVMKRCWLARYWGLAVQYGIYPDISMSKHEYWSSLAPLPFEYVTSAGQRAKDGSEAEGNGLEDVDKLVHDLTVTAGEGNVETMLAVDKGLQELAFLKVEDAVLFALAQHHRTNVAGAADPDIKSSGDEKFTEAFDLSKEEEEDVQFKQAWLIFFWRRAKTNNVEEDIAEERLHMWIDRHGQQPTSHDAVDVEQGIHELRKLGIEQLLWELSRHEANLAKDSPSDVEDLT

SEQ ID NO: 63613 - protein, 539 aa, Zea Mays
MSVLYLAEDLILKVVQNISYELDSFNKRKWDHIIVNQFLRDLREAKKRGNSERRHKEALAILAATAPSVTPTSRNTTVRKETENNVTPAKRENMPRSITGSSRIGQLSSSPQAKDLSFSNSDVSDETNFGIFNLAKFSKKSALPCDICMRCDTILNRIFVCSSCKATVHLDCYQSLVYPTGPWKCELCHEMPSDSVTSGEQSDQNGPKACLVQCGLCHGTSGAFRKTVKGQWVHAFCAEWLLETTFRRGQHNPVDGMERLHHKDKDTCSICHRCVGACLKCCTLDCQITFHPSCARDAGLYMNTKRLGNMLQHKAYCCRHSIEQRKAYSQQYGPDEIKGMKQMRVELELLRFLCERIVKREKVKKDLVGCAHDILAARRITAVSSLWTSCYTSGPGASSESATTSVNNKSYGGTIQRSDDVTVRLEDVTVDSTVTKKHTVRFSLHNRDTDRNTADSSTSTISYKRKLDDGESLAFKSHPGTPATALLESRDAEKPIDKKGYVSKGACHGYFSPSFVEEQDPSREICLHSPQLHVQKEAM

SEQ ID NO: 63614 - protein, 911 aa, Zea Mays
MPDSADPLPTQPSPDPDMPPRKPLAGGKLKKPLTDKQRAAAEQRLSHLRAHLILRSLDSPAGGARALPPPQEAALDALGLLNFFRLDLQSDTPRPDLIAPLVAYYDPVCKRSFVRGVRVSVSRHHITRALCLPSKPASAAPAPADVDPAAVVPAVMQLLQDYVLLPFQGGDMCILPQEVAAAEQMVREGAAHRVDWGGLIWGLVEKEMLELPKREDGVCYYGPHLQRLIYSEKPHLLELVEEGPVPEASADVEMEDEDGDVDLKSKNLVELEPGDGDGEAGNDVRSESLKDSELGNAGARNDGLDKLELGDAVTRNKVMEELGLRDVDARNNSIEELEVVEEDARSKSLNECEAVDAINNNIVELDAVNEDARCKSLNDESELVEEEFKSPSFDDMNTVDEHVNGTDTDGLCLGFVEVEAVPAVHEAMPDNNEETTEEAPAGGADVAGSDNVAVPTDVDCEEHYVEAVVVTQEVVAVAEELGDEEAKRDEEKDVMGLSLGFNSTNGYGAMDVEKETNVESLDEDESDSGNEEAEESEDGAFDVNDGEDMNWRIGDVNGGEGMTHSLQRCNTFGGMEFENLNKGEDEMRDELRFDDFPARASLERMTSSNLLQAMNSIPSSYNVSENVHDLPSGDFLAMGADAHKSGVDLGPGSSYLFGNNGKRNIDDIDGYNGNMQVQEGFPRSNQQKRMRHSNSSNISPGSGFFNASFSVPIQNLMVEASRLYEQNEQKLQSLQFEKQHWSDMLQQKEAIIQSLNSARFEQHNKYQAELRRFEHDLNVMAQLVTTYKKALKQTRASFDEYRKKFPCNVPLYGDVACGGGLVLSVRELEKRRCEEQQQNIAMVNGMIERFQYKWLSKFEEWGLSVNSLWSRMEGLYKEIELLKENRRARFATPATEESTLATEGSTPATEE

SEQ ID NO: 63615 - protein, 615 aa, Zea Mays
MTFLISRALADPNVDVRGRMINAGILIIDRHGKENVPLLFPIFESYLNKRASDEETYDLVREGVVIFTGALAKHLSKDDPKVHSVIEKLLDVLNTPSEAVQRAVSDCLSPLMVSKQEEGQTLVSRLLDRMMKCEKYGERRGAAFGLAGVVKGFGISSLKKYGIAATLQKNLEDRMSAKSREGALLGFECLCEKLGKLFEPYVIQMLPFLLVSFSDQVLAVREAAECAARAMMSQLTGPGVKLVLPSLLKGLEDKAWRTKQSSVQLLGAMAYCAPQQLSQCLPKIVPKLTEVLTDTHPKVQASGQTALQEVGSVIKNPEISALVPILLSALMDPNAHTKHSLDILLQTTFINSIDAPSLALLVPIVHRGLRERGVETKKKAAQIVGNMSSLVTEPKDMIPYISLLLPEVKKVLVDPIPEVRAVAARALGSLISGMGEEIFPDLVPWLLDTLKSDNSNVERSGAAQGLSEVLAALGQDYFDHILPDIIRNCSHQKASVRDGHLTLFRYLPRSLGGVFQNYLQAVLPAILDGHYLCCFLLLRMGSSVIIGVSDKVPLNFLGISYLRSLELLGRQSLKVEVMMKVLVQRLRGVLLLKYLEGRNAMKFLPPFIWFVLMSA

SEQ ID NO: 63616 - protein, 270 aa, Zea Mays
MHGIVSAKHLLFLWTYGVVSRTSLKGKKKLHKEKHKSRSERPHRQSNITELDKGKKRPAQSSKSDLPNKRSKKEGSQVPSRKKDTGGRMAKKNGPCQDKSICTGQNSSLCKDNREKHSHATFQKKCHAEPLNNGPSGSGWNRTAGGHSQFEGRHITPASHVEANHGNFVSVQHPCVERLQRPTQSREVALAHPGGGHPYVLSSAAMGLRHQNGATAGVHAPAYFRGLPLSQQRAAFPSASTPQTGYHPHPEELFVAPHFRYPRGSAGFRR

SEQ ID NO: 63617 - protein, 200 aa, Zea Mays
MGAALTTQLATAQRLLLECATTPPPVAPEAPHASRLDADTIASLHAQDVGVKIYGPLCPLYWTRCPLTTTASVIKCSSHSVSSSSHTTFSTTALPRCPRLGSRWTAWSSRGSRALSPPSSGTLSVSTRASLAKPGSPSRTSSSGTGRLVHSTSMPRFVCSPEGPVCQRVLSSDEGHGRFSMCPRRAHHRPHPGAELSVWP

SEQ ID NO: 63618 - protein, 109 aa, Zea Mays
MAAAEARRRSAVWALLPLLLRLLHPVALVLANTEGAFVAGQFSGRASVSVFGYATQSDLNFNNIFSIHDAHLHLSRHHIVPQVCKQFLFLIFLLVSLIDLSPVFICGLG

SEQ ID NO: 63619 - protein, 103 aa, Zea Mays
MGVFGTSRPASVTLCAFLTFLNLFAFLLAVGAERRRSTGKVVPDEYDERSYCLYDTDASTVYGVSAFFVLLLQQAIVTAATRCLCFGPVLSSRGCAVTAFVLS

SEQ ID NO: 63620 - protein, 1045 aa, Zea Mays
MIDDEESQGIKKVHFRDSFSQHPIVTYKRRRQQKPQTQQQLRQPPPSLQQHPEPQLQVKLEPKTEDVPEQQFPILRARDIGWEHAVDLDGNKRRWQCKFCSLCRSGGVTTLKAHLIDDSCPNVPKEISKKVSNFIEEKRATRLLLNNYVFNVDEDFNTILQEGTVEYVNEQQPSRKATYVQTLSKCAINEIAAGSKQCGAECSGQPVEHCDQPEEQCTMDYGRMDRLTSNKNQILDKNTENSKNTKMLKPCRKSEFNTRKHIIIVDKIGRHWKCRYCGMDVYGKKFQLHYHLAGAFRQAKCPNVPREVFAKARQHVLTKKMLKKSKAEQQIPSSPHILAQSGEERQNNDPFCGNQSQLSINNEPREVHNYPAVLRDSAWEHSLIYEKENGHWKCKWCSIEGDHGLTRLMWHLVGWQNRPQCPNIPKDVAEKMKDQMMSKKEQKARSGLFDGNGCCEVLCSSNSSQLDQNHLTARIHDRCSSQAFDHANSELKGCNMLSNTILSQQSSNPQVHHEDPQVCHEQERKEVATSSEPGCEQGQRMQWQSQNKPMMEGPHDNGLCGDTNQLEEQKSGFGISDCWRYVLDGQMHLPDVQEGAGIGTCIRDALLYGCAEFGTVPDKMEMDCDKTVDANTAKCQNILKDVLRSENFALLCSVLCRTVHQDGERTRYFDFGVIDSRMKNGNYGPEPELFVHDLKLLWEDLKVAGQDIVHLANNLSSLTEDSYEKLVGRERGSDDDELNEAVVARSEPKNLVQPNASVPLTSQGFNQLLDQPGPSDPSVVYKDSICNRCGKVAGAGSVLKCYRCMLPCHISCIEATGSPISTGRWCCKNCSAGTKEPVEGDMVLAHGNPNCLHESCVVCDRLAACRSPKCDNSRALVISSVDPEIDTCYSCKICGGTEEDEKRFLICGNVLCRYMYYHIGCLKSMQISTSVERGSPCWYCPSCLCRVCLCDKDDDLTILCDGCDEAYHIYCITPRHTSIPKGQWYCSSCSVERAEEGMRQYERRTLKLHRKEDAGLQSWNFDGVDLLLSAAEQLRIDEQLETRTD

SEQ ID NO: 63621 - protein, 334 aa, Zea Mays
MFRKYFRWALTHPSTDLEDEKLKRHMKPDFLDMVPWYSGTSADLFKTAFDLMVSVTLFVGRFDMRMMQAAMKGPTGNTPNDDLLYDHFNEREDLWFDFVADTGDGGNSSYTVARLLAQPSIRTVIGGSMHTLPRGNLLIIGGDLAYPNPSSFTYERRFFRPFEYALQPPPWYRDEHIALDKPELPPGVSKMTEYDGPQCFIIPGNHDWFDGLHTFMRYICHKSWLGGWFLPQKKSYFALHLPKGWWIFGLDLSLHGDVDVYQFKFFADVCQNKVHFLRLLIFFFFKLLSFPYFWFHVGQHALVIASSVQPCMPVIIFIYSKHKKSCCIFFVVLG

SEQ ID NO: 63622 - protein, 1641 aa, Zea Mays
MDGGTGPGAEVLSPGEAEWPPELRLPPLPSVPEPPGPPPPAPASASLRLRSVGVAPHLHGEVFDDDPQFLGSIMGAAAPPPPQQQQQQPAAAAPVKRKRGRPPKNRDGAAPVPAPVKPGNKKDEEEVCFICFDGGSLVVCDRRGCPKVYHPACIKRDESFFRCQGKWDCGWHICSSCEKAVQYMCYTCTYSVCKGCIKQGKFFGVRGNKGFCDTCYGTILLIESKEDGAKVGVDFDDIYSWEYLFKLYWLDLKGKHLLTIEELKSAKSHWIVPTTAGRREKEESSDELYDASNGQDATFDISSKKRIQNNSSGKRGQKRKKDGNITSRKCGISINSAGGLPNGSTGEGMALAGDKNWASSELLEFIGHMRNGDNSYISQFDVQVLLLEYIKQNNLHDPRRKSQIICDARLSNLFKKPRVDHFEMLKLLEMHYLVKQASTPNADSQRAIYSDSAQVNNGGHNELADTLGFDRRKAHKKIERELTINPEDYAAIDMHNINLIYLRRSVMEDLIDQVAAFSNKIAGAFVRIRISGLGNKEDMYRLVKVLGTHKVAERYTVSKKTTDYALEISNLEKKEIITMDTISNQDFTEEECKRLRQSMKFGLTARLKVVDVYEKAKIFQSLRFKDLQLLNTPEEKERMINEVPEVHVDSRMDPSYESAEEPEYKKAVDWTMHRNGPDLLFPGRKGTELNSVENHTQKSLDTSSLPTEDVDHRSGAGSNINLNNMAPEPASLGILSNDTEPEKVWHYKDPNGNVQGPFTLLQLSKWASFFPRDLRVWLTFESEENSLLLTEVLPKQQKDFIQLSTVTTSDKSMWAGSGQDRVNSNANNSSSPMGYNMVYPSALSSPSAECYDPTKDLKPLGGTSPSRSLKDAHALHEVQNQVNYSFTILSSTGSYAPPGSHDGRVSRDRVDEWNSSQDNGGIWRPTMNSSQKTNAQQHPDGCTGKDLMQTESKCSSHLVSVLTSQHSERDPATSLSTTSWPVFRTRCQQEGSSWTSATNAGAHDLQLSIALAKPETCSPTNPVEDRDSSSASALSCQSGAPVCVPQPDPTSTSNSRKIDATMDQHRTCQPDTSSVSFDLLHEPKSGSLFSLKTQDLEFEYPSPIPKQEGKGISVNQSGSTSVAHENLATKTCVRAPTSKIDSLQPLKERSHSTDRDSITQLEHLFEENVIKRNNKVVNPVSDAEGIAVSDVLESLTEQDCEKCSIHGVAPSQKMVPASAEEDQPQCSSPIALSPWGEPSYYQGEAVDSALWGVQDDPGNDMWSMPSPKPGFQPSSGLGADGKDASCIIEEARADPGDGAFVKTLPTQGEKKMEHGNSSASGSGVSERVKPKGSAASGPSLDGSTKVMGWQLPGSSLEGSAKVSGWKPPVLSLEGIANGSGSQASCPSTQRGTKSSGWQRSSSSPDGSRKASGWQQSSTSPEGSGKAHGWQRSGSFTQGGTKAAGRQPSRSCTDRIAKVDGWQRTSSSPEGSRKASGWHSSGRDSSKIASSASENRKLSSSHQATTPTGRHSLAKRQGSSDKGAAGWDEALGNSSEASKRQQGNSDKNAGSGVALGSNRSWHPSSGNPSRGGQGNHQHDRDSHSGDSRRGSSNYPRRSDNRHDHGSGGSSRPSSRGQSQRGLCKHYESGHCGKGSKCQYLHR

SEQ ID NO: 63623 - protein, 373 aa, Zea Mays
MANSAANRISGDELSRFVSEKRSLSVLKLDGCSSLGFINISSSSLSRLWMSGLSSLTKAVMNCPNLNELSLDFPKQNNDSTDLVALMDSLGRTCPNLRNMHISSDRLCNEAVFALESANLRGMCMLSLVLGSKITDAAVASIVRSYASLELLDLSGSGITDNGLGMISNTFPNTLTRLLLALCPNITPCGIQVAAAQLPLLRLMDCGKSICANPQPEAGRSYSGDLTDGIKFCSKLPVQRKQQATCQKLIIKHSALKKLSLWGCSGIDALYVSCPELVELNLNSCTNLHPERLLIQCPKLEDVHVNGCRDMLVGAIRNQVLNEFAAAAPRVPCKRLADGSKRVHVPHYMVEQLEEHEKWGSRPRKSQCTVHLT

SEQ ID NO: 63624 - protein, 268 aa, Zea Mays
MASRLLLHLHLRRRGRGIPGCPVPALPLHAARLLSSSPPTAAAASSSAAGGGGIEKVLVANRGEIACRVMRTARRLGVATVAVYSDADRGALHVRAADEAVRIGPPPARESYLNARAIIEAALRTGAQAIHPGYGFLSESADFAQLCEAEGLKFIGPPASAIRDMGDKSASKRIMGAAGVPLVPGYHGADQDVELLKLEADKIGYPVLIKPTHGGGGKGMRIVERPDEFVDSVLSAQREAAASFGVNTLLIEKYITQPRHVEVQVRFN

SEQ ID NO: 63625 - protein, 385 aa, Zea Mays
MAAAPARHLAAAFTAAAAHQRVAFRRVQVRAPVSASLSFPPRHPATFRGRASLACPAAASLSVPSGAAPPGSVPFNLLPPDSDPFIEWDPPPGDSAPSPLAGGGAAGGATLVVLLGWLGARQKHLRRYADLYRERGVGAVRFVVPVRELVGLDLGRRVERRVADLSEQVAAWCDADRRRTLLFHTFSNTGWLAYGAVLENLQSRADLTERIRGCIVDSAPVLEIRPEVWAAGFSAAMLKKSSSMTGPTTESLDGPVVNGTLNRVGSNVTQPSWGECFLLSTLRKFFEIVLYVPDVNKRLCKVLSVLSEQQPPCPQFYLYSSADRVIPAECVERFVESQRSLGRSVFAHDFVSSPHVDHYRSFPHVYSAKIDEFLKVCSTVEPHYS

SEQ ID NO: 63626 - protein, 529 aa, Zea Mays
MGTERKRKVSLFDVVDETSVSGKLGRAASNGAAATAAGTNPSVNRWNGRPYTARYFEILEKRRTLPVWQQKEEFLRRLRDNQTLILVGETGSGKTTQIPQFVLETEGLGNRSMVACTQPRRVAAMSVSRRVAEEMDVTIGEEVGYSIRFEDCSSHKTVLKYLTDGMLLREAMADPLLEKYKVIVLDEAHERTLATDVLFGLLKEVLKNRPDLKLVVMSATLEAEKFQGYFSDAPLMKVPGRLHPVEIFYTQEPERDYLEAAIRTVVQIHMCEPAGDILVFLTGEEEIEDACRKINKEINNMGDQVGPVKVVPLYSTLPPAMQQKIFEPAPAPLKERGPPGRKIVVSTNIAETSLTIDGIVYVIDPGFSKQKVYNPRIRVESLLVSPISKASAHQRAGRAGRTQPGKCFRLYTEKSFNEDLQPQTYPEILRSNLANTVLTLKKLGIDDLVHFDFMDPPAPETLMRALEVLNYLAALDDEGNLTQLGEMMSEFPLDPQMSKMLVISPKYNCSNEILSISAMLSGMLIITKG

SEQ ID NO: 63627 - protein, 70 aa, Zea Mays
MFPLTSLEAYTRQHTKWGDRPAAGEHSIVGGTPSPILPVPQREVAPWSPLATRSPQEQEQRLRASQPPVG

SEQ ID NO: 63628 - protein, 117 aa, Zea Mays
MISVYNIHRSPEVWDRADEFIPERFDLEGPVPNESNTDFRFIPFSGGPRKCVGDQFALLEAIVALAVVLQKMDMQLVPDQKINMTTGATIHTTSGLYMNVSLRKVQQEAELALSESK

SEQ ID NO: 63629 - protein, 64 aa, Zea Mays
MHKRNNFVLPLPFSMMNQCELTHVLACTSSQQAYLPMANKQWTYTMIEMTEYSMLDVYECIDKV

SEQ ID NO: 63630 - protein, 340 aa, Zea Mays
MNSIKLLNNISPYMGQELADAFRGNFSQLSSLVKVIVDNNGISEEQAAAAGLVADLPMGDSVLTRRLLQDGAFAAIISKVLRIRQGEIRGGRFVNPFLEGLVRIVSRITFVLDDDPDIIAVARDYNLASLFTDLLQMNGLDVVQIVSAVSLEKLSQQSKHLTKILPAPSPGLCFSIFPCLSQKTVATGVCRVHCGICSARESFCLLEGKAVEKLVACLDNNNEKVVEAALAALSTLLEDGVDIEQGVMVLCDAEGINPILAVLCENRNEALRQRAVWAVERILRTDEIAYEISGNQNVGTALVEAFRHGDSRTRQVAERALKHVDKLPNFSGIFSKMGAQ

SEQ ID NO: 63631 - protein, 684 aa, Zea Mays
MHVNVLNTLFTSLNSPGQLRAWQANGGDPCGQSWQGITCSGSGVTKILLPNLSLTGNLAYNMNNLGSLVELDLSQNNLGGGGQIQYNLPNVKLEKLNLAGNQFGGNLPYSISTMPNLKYLNLNHNQLQGNITDVFSNLYSLSELDLSFNSLTGDLPQSFTGLSSLKRMYLQNNQFTGYINVLANLPLETLNVGNNHFTGWIPSQLKKINNLQTDGNSWSTGPAPPPPPYTAPPPPNHWNGAGQNDDGSSSSGGRPGIGGGGVAGIIISLLIVGSVVAFFLIKRRKHKAIMEEQFEQHQPFTSFPSNEVNDMKPIYESTTVDIESLASPASINLKPPPKIEQNKSFDDDDDFSNKTAANRSNITPMKATVYSVADLQMATDSFSFDNLVGEGTFGRVYRAQFNGGKVLAIKKLDITVMPFQSSDDFAELVSNISKLHHPNLNELVGYCMEHGQHLLVYDFHRNGSLHDLLHLSDEYSKALSWNSRIKIALGSARALEYLHEICSPSIIHKNFKASNILLDSEFNPHLSDTGLASFIPDAEFQAAEQSAGYTAPEVDMTGQYTLKSDVYSFGVVMLELLTGRRPFDSSRPRSEQSLVRWAAPQLHDIDALDRMVDPALKGLYPAKSLSRFADVLALCVQPEPEFRPPMSEVVQALVRLVQRANMTKRMLDGGDTSRGPDDQDQYFI

SEQ ID NO: 63632 - protein, 258 aa, Zea Mays
MNECNINNLTNRATSFAINCGGKQVEYSDLMPIMFSEDSTDLGGSGFHVNATSHWVVSHVGSDPFNESTGIVNTSDIFETNMQELYQTARTSTSSLWYYVVGLANGNYTVQLFFAEIVITHGPGKRLFDIDIQDQNIRKDFDITKEAGGSRKATNITYEVTVDNSILAIHLYWSGRGTCCIPYEGAYGPLVSAIKVTHSQDPKTSPPQAPHSDSARDDVKRRGVVAGIAALSIAAAVISSSVVYLWWKWVSLVKRPMA

SEQ ID NO: 63633 - protein, 585 aa, Zea Mays
MRSPAAPGPSHDSLDSSPPAPGFRSYQQTKLAELDLDSSLSPATAAPGSQPTPSESPLPAPTPTPAPAATGLLIPIPARPVLAPYSQPASSSGSPADKSVAGIAAGSAAAGALLIVLLVAVGLYVASPIWKRRTGRDRRGAGSSGGGGASQHESQKRHSAVQIEVEVTPPPTASSSSWATSRDSHKPDTHGDGAGPRVQVQPVPGAGGGDYEVRFRGAFTYEQLAAATDGFSESSLVGRGGFGDVHVGTVDGAAVAVKRLRAGSQQGDREFQAELRIISRVHHRNLVSLVGYCVGDGGQRLLVYEFVPNLTLHHHLHAFSTTGEVETVLGWPTRWKIAVGAAKGLAYLHEDCHPRIIHRDIKAANILLDPDFNPKVSDFGMAKFVPSRGDTHIATRIVGTIGYLAPEYATSGRLSEKSDVFSFGVVLLELVTGMSAALSSDREEGTLVGWARPLLTKAMELHDYDELVDPLLPSFDAKQMACLVRCAAAAVSTSARHRPRMSQIVKHLEGDASTEPLGQTGSSHGPGGDTSAQFHSYSKIRASRSSDATRGHWVTVLSPMHGTVPSDLVRHGHNSNSATAHKTRI

SEQ ID NO: 63634 - protein, 98 aa, Zea Mays
MDYIMDWIETQLDDEAIFPQRLGAAFPPNFHDVVKTVLKRLFGVYAHIYHSHFHMIVKLKEEVHLNICFKHFVLFTLEFKLIESAELAPLSELSVLNW

SEQ ID NO: 63635 - protein, 518 aa, Zea Mays
MVVMMTRHILLFIQPNFQKRLYEFVVRHFLACCSQPAVGAETTVEIDIAGEQFNASGRVILAKNYLDVYRFDSWGGTLLPTYNIGQQFVPTTLTLDSGVTRPPPLLAEADLLSCMDKAGIGTDATMHDHIKKLLDRCYATKDENTRFSPTNLGEALVMGYDEMGYELWKPYLRSMMEADMKSVSVGTKSKSEVLESCLQQMKACFLDARVKKAKLLDAMGTFFARSNRPINETQNPVEVVRPCGACNGSEMLLKRRASGEFMVGCRSYPQCRNVVWLPGSLSEAAVTNQVCPICAPGPVYKIQFKFRRRDIPPNFDVDHLGCVGGCDDILKDLMEISRFGSRSQAATPARGPTPNGVGQGTPRQDLHTIFRPASQLNNDNPSVMHSQGFRSTHTQNPSNASDAGQVLCTSCGALCISRIANTEANRGRRFYKCQDPGCGFFKWEDEVDNGTGRGRRGRGSSRQASASASAGRRGGGRRGRGRNADGGMFVSATGDTVLGCCFNCGDPSHFANACPNRR

SEQ ID NO: 63636 - protein, 320 aa, Zea Mays
MRRADRKLKLSHNIIGEEDGTDGKGGDPGIEASDMRSIIFGLHLFDPADTATETIDEDITAETFSVEKLAKLKTMSEKVVMMRSHESSEKDERAFEINPNMTDDSGTVIRRASDSIRIDPGLNEAAYLSWVKKFKEASISSEDATVGFGRQRAAPEEKLLKHDVNKQKIEEKRLAKWESLGYQTLAVKEPDITASQNISDAGSIQFVYGDCTNPSKVCPAKPAIIFSCIDNSGTWGHGGMFDALTSLSTCIPDAYHRASEFDDLHMGDLHLIQLDVAYFRGRPGGVVRADSLSHGFRNSLSAFAGKCLFRFIPCEDSTHV

SEQ ID NO: 63637 - protein, 297 aa, Zea Mays
MSGQQDHASKSSSSSISSSTQESEEEAPVRSVTIGSLLAQANSTSGHSLGKRLSHLGSIPYTPRVNGKIPNVGNATLDHERLLERLGTYGLAEFQIEGDGNCQFRALADQIYHNPDYHKHVRKAVMKQLKEFRKQYESYVPMEYKVYLKKMKRSGEWGDHLTLQAAADRFGAKICLLTSFKDTCLIEIVPRDLTPTKGKGLATLLLSYQMLGSISNFSGTSIAASILLLRQFCIQPLQDANHNSIFRFCRNHYHLIPVMVHIFAELWLSFWCEVHYNSLYGIDDLLTRKTKKKHWLF

SEQ ID NO: 63638 - protein, 395 aa, Zea Mays
MAVKSRAEGALTIAAHRFATIDKGHKKSRTQQGLMNNVGLVAFLVMLLFFVDWCSWKIVRLPLDSFYLTRPFLTSAVLSALAGFLFAPVADSLKIHHFRRRGKSVSPSSRKPTPGMGGLFFVPVGIFVAKREVGSNSNGVNGAAMITLIFAMVGLLDDISSLAVDHNYKIPRWIRFLVQIVAGIYFSNWLGSTDISTPYSMKYLVPLPPPFGLALIGKVYMVLAAACSLSMGPAVTLVDGLDGLAGGIAALALIALSVAALPICSEFSVFGASMSGACIGFLFHNRYRASVVMSRVGSFALGGAVATIASCSGMFLPMLIACSLFFVELLFAILQVPFHMAKNSFRGTSRHPLKIRPSHYYLRLLGIKEPYIVAGAYMISCFLTLLAGYLGLVSA

SEQ ID NO: 63639 - protein, 1401 aa, Zea Mays
MDRKRKHNEEAKIAREVEAHEKRIRKELEKQDLLNRKREEQMRREMERHDRERRKEEERLMRERQREEEKFQREQRREHKRMEKFMQKQSIRAEKLRQREELRREKEAARQKAANERATARRIARESMELMEDERLELLELASRSKGLPSMVSLDSDTLQQLDSFRGMLGKFPPETVRLKVPFSIKPWAASEDIIGNLLMAWKFFVTFGDVLGLPSFTLDEFVQALHDYDSRLLGELHVSLLKSVIKDIEDVARTPSVALGVNQSSSANPGGGHPQIVEGAYAWGINILNWQRHLNFLTWPEILRQFGLCAGFGPQLKKSDAEIVHHRDDNEGRNGVDVISILRNGSAAVKAAALMKERGYTNRRRSRHRLTPGTVKFAAFHVLSLEGSKGLTILEVAEKIQKSGLRDLTTSKTPEASISAALSRDTKLFERTAPSTYCVKTPYRKDPDDSEAVLAAAREKIRAFQNALPECEEVEKDVDEAERDDDSECDDADDDADGDDVNIEDKDAKSPLVGAQYGAQITVVGDIKKESNIVMNTSVPPSIQIKSSASVPFHTLDSKASSSTDPEVGDDAKDIEIDESNQGESWVQGLAEGDYCDLSVDERLNALVALIAVANEGNSIRAILEERLEAASALKKQLWAEAQLDKRRIRDDFTSKMQYDSYVSMKVDTDQENNAAEITLTPVHDPIKNNNGNANLMNNGLLVDKQNQLTTGDVYHQRNGASRESSTNAESLSVQQYASSEKTRSQLKSFIGHKAEQLYVYRSLPLGQDRRRNRYWQFSASSSSYDPGSGRIFFESRDGYWRVIDTSEAFEALVASLDTRGIRESHLHSILQSIEPTFKEAVERKRCANLEHPTGRTSENGNIFKIEVGRNEAEKNSISKRASVFLKWIWRECYSHQSTYAMRYGKKRCPELIHSCDYCYQIYLAEERHCSCHKTFKHIHNFLEHSSQCEEKQRTDPNWKMQTVDLSVPVGLRLLRLLLATIEALVPAEALLPFWTDGYRKSWGAKLYSASSAEEVLQMLSVLESAIKRDYLSSNFETTTELLNSSTQDFATQNSAGGSGSATALPWVPDTTAAVALRLLDLDASISYTLHPKLGSNKEQESGDFMKLPPRYPSMNKGKQEIEQFRPIGFDQQDGTLLPNSNGRRGRGRGGRGGSRGGRSRGHGGRVPRGIGSSSRIQFRDDNSMLYGRAPRKNARGGRGRGRGRGRGLRTVRPRQPSELSARSIPKANLLGSFSMLSKTNHTGTTHSPESSGAEEWAFERREYVKDDENNLVSQSDESEENVEPMNEEYGEHISGYPRDNSDSRPVQMMGDGSDDNDEDAEGDEGEEDGEDYEAEDPGDEDDDVEMDGDDDVEVDEDDDIEMDGDDDIEDDDDDDGGDGAANGDEDGGGTSSYSSEYSE

SEQ ID NO: 63640 - protein, 378 aa, Zea Mays
MQDRDLRIYRPAESTTSRHLPCSHELCQSVPGCTNPKQPCPYNIDYFSENTTSSGLLIEDTLHLNYREDHVPVNASVIIGCGQKQSGDYLDGIAPDGLLGLGMADISVPSFLARAGLVQNSFSMCFKEDSSGRIFFGDQGVPSQQSTPFVPLYGKLQTYAVNVDKSCIGHKCLEGTSFKALVDSGTSFTSLPFDVYKAFTMEFDKQMNATRVPYEDTTWKYCYSASPLEMPDVPTITLTFAADKSLQAVNPILPFNDKQGALAGFCLAVLPSTEPIGIIAQNFLVGYHVVFDRESMKLGWYRSECRYVEDSTTVPLGPSQHDSPEDPLPSNEQQTSPAVTPATAGTAPLSCATTNLQMLLASSYPLLLLTMSSVFFVS

SEQ ID NO: 63641 - protein, 379 aa, Zea Mays
MIESSANNRHSTPNEMERSADVLSAGLLEVANPSLSSRFFLKQHWTDGEDDVKDSIKHRPLWESYMPKNNKGRRGTGKKKHGSLYRTYGTRVIPVFVLSLAGVDAELLMEEESLVWTSKDVVIVLEHNNEKIPLSYVSETTRQFALPSIAQRHILAGLASAVGGLSAPYERASRIHERHVVNWLWAAGCHPFGPFSNSSQISQILQDVALRTTIYAQVDAALRKIRDTSEFVQSFASEHLKTPLGELVKGNKNKSTTELWVEKFYKKVTNLPEPFPHDLVEKLEEYLDKLEGQLVDLSSLLYDHRLVDAYQNSTDILQSTIFTQQYVERVLANERDKMKCCSIEYSHPKQSSQAFVYGGILLAGFLVYSLVIFFSSPVR

SEQ ID NO: 63642 - protein, 78 aa, Zea Mays
MDVYRIGTLMELVRELSLSFADDGKRVKPLDTRSVFKAPWGKVHLLASHFNWQEPEKFWNSWTGVTMGRRAPSLILEQ

SEQ ID NO: 63643 - protein, 725 aa, Zea Mays
MDRADGPTQPGTIQCMRTRGPAMDMGFVESQPELTAAPAAGPGTGSRLPGGGGGRKRKHLSSIANHVLRQCSLSVDDLVADFELGLKTAAVDSYSRKLVEFCSLQALQIITSRDIGEKISEGSLGRFTFDMMLAWETPTPSDQQITMESVAKEREDRKETLGEGEAVMGDETSLFYSDIMPLLVNEEPTVGEEAYVWFGSVFPLACDVVNARFTFEALTATTANRLHYPAYDRFLKEMDKSFKFFQDLPTPTGVEFAEDEFILHMEGTAGTQRVVRHIGTTSWPGRVTLTNKALYFEASGKFSYESAIKVDLSDTGVEHQISTASTGPFGVPLFDKAIVFESLPEPVVLEFPEMTSSTRRNTWLALIREVLSIHRFISAYSIVSPVHRWEVHSRTILGVVRLHAAREMLRMSPPPASSFLVFSLYGDMPKGDFVLEQLASNLKRTSTITRLSASYVFKGLSRSSSVPPLSAEVAAEGRGADDDASGREHERPLASLEDKIGRVRDEAREVTAANAAVEGMKDEGISDSLLVLVGLVGPVGKLRPAIQRITSWERPLVTGSILAAASLIIYNEWFSYVLAASLVLAAGVMVWARQRKIGELCSEVIIDASSSSSSDKTTMDSIVEAQRSLQKVHRYIVTANVAILRLWSIALARSPKHTETVIWMLAVSAAVVAVVPFRYILIGLVAGSFALNTRVARAVMNPQGGRRWREWWESIPAVPVRTVHS

SEQ ID NO: 63644 - protein, 121 aa, Zea Mays
MPPGSPSSPTDPTSSKVVPPPSYCSHGSPAIILSFLYCLLPPDREAALVQVLPGEVEPNRIPWRTTLQWIQDVRHQINGERWHSRAGGTSEVEPGRIPWRTTFQLIQGVRHQFSGESVSTS

SEQ ID NO: 63645 - protein, 567 aa, Zea Mays
MSSPLEDVSVGMEEEDQRPLNRALLHRSATTNASQVAMVGSNPCPIESLDYEMIENELFDQNWRTRRKADQVRYVVLKWTFCFAIGILTGIVGFFINLAVENVAGFKHQAVSALMDSASYWTAFWVFAGCNLALLLLASSITAFLSPAAGGSGIPEVKAYLNGVDAPNIFSLRTLAVKVVGNIAAVSSSLHVGKAGPMVHTGACIAAIFGQGGSRKYGLTCRWLRYFKNDRDRRDLVTIGAGAGVAAAFRAPVGGVLFALESLSSWWRSALIWRSFFTTAVVAVVLRLFIELCGTGRCGMFGRGGLIMYDVSTVFDDLMTYHLKDIPTVILIGVTGALLGGLYNFLMIKERWSAQAAVSGHRLHRDVVLRLRPAMAGAVPAVPHDGSTFVAGRDLPRAEPFPAVPLPKGPLQRSRQPVPQHQRRRDPQPLLHRHQRRVPPGFHGHLLRGVLRARRAQLRRCGAVRAFRPHHPHGRHLRPPRGNAARGPLRPRPRPRRHPRLRVIPRRDAPDDGVRVRHHPRAHQQPATAAARHARAAHLQDGRRLLQLQHLRPHPAPQGPAPPRWPR

SEQ ID NO: 63646 - protein, 327 aa, Zea Mays
MAASAAAQRRSAGSRTTYERAELEALRDAPSKEAHARLWADVRATLVASGFSGVAEIGAHRNGDLAVCHEHRFVSAHDHAGTSGVVEESFHQGEDVECEDDSDDDYNGILKPAFAVDGDPDFESGEPLDGFEYLRRVRWEANQIPRVKVAKIYSSAARNEQTPYMPEIPDIPKCLPDLRASKQWEDRFIVDFEETRMVLSELDNSDEPSVSSGTKISTKPGSGTEPQTDPTLTMIRSMDAVSRAATLRNYIDMIQSLDALSRNNCMWLFALCVAVHTPLDAETCASLRSLLRKCASILATKTEMDDEVVMLNILMTISGRYFGQDES

SEQ ID NO: 63647 - protein, 640 aa, Zea Mays
MGTSVQVTPLSGAYGEGPLCYLLAVDGFRFLLDCGWTDLCDTSQLQPLAKVAPTVDAVLLSHPDMMHLGALPYAMKHLGLSAPVYATEPVFRLGLLTMYDHFLSRWQVSDFDLFTLDDVDAAFQNVVRLKYSQNYLLNDKGEGVVIAPHVAGHLLGGTVWKITKDGEDVVYAVDFNHRKERHLNGTVLGSFVRPAVLITDAYNALNNQGYRKKQDQDFIESLIKVLATGGSVLLPVDTAGRVLELLLLLDMYWDERRLQYPIYFLTNVSTSTVDYVKSFLEWMGDQIAKSFESSRANAFLLKKVTLIINKEELEKLGDAPKVVLASMASLEVGFSHDIFVEMANEARNLVLFTEKGQKIFALQFGTLARMLQVDPPPKALKVTMSKRIPLVGNELKAYEEEQERIKKEKSLKASLVKEEELKASHGSNTKASEPMVIDASSSRKSVNASHFGGNNDILIDGFVPPLTSVAPMFPFFENTAEWDDFGEVINPDDYMMKQEEMDNTLMLGPGDGLDGRIDDGSARLLLDSTPSKVISNEMTVQVKCSLVYMDFEGRSDGRSVKSIIAHVAPLKLILVHGSAEATEHLKMHCAKNLDLHVYAPQIEETIDVTSDLCAYKVQLSEKLMSNIISKKLLALNNIEP

SEQ ID NO: 63648 - protein, 125 aa, Zea Mays
MYPRGPDGGRDASSRPMLATPAGNDTREEDEITTAEAHVEKDAARMDAALLMRTTPKMDEFHTGGDLDSSGSGSGISGPSASKRQLQRRGSWRQRVSSNREECGRGCNGSAVSAIFWTTERCCRL

SEQ ID NO: 63649 - protein, 174 aa, Zea Mays
MEFALVESESFSPSCPTLIMPALSIGNVGQLAVDLLISSSRARRVAYLDEPSVLPCAGNDAFGPDAVGDLALALEAYESTSHKLGFIQQRSPVTTGMMVSFAKNVADFINSIGKNHIVIISSLDSGKRRVIDASRCITFQVAMKMVLIQNMRNWGGKSLRIMIHLRNGGIVLLA

SEQ ID NO: 63650 - protein, 73 aa, Zea Mays
MQTRLVERGGEFLTQLKVTWSGMAKEFANWEDADALREQFPATPAWGQAGSEGRGNVNIPHPSEHKDDGEKKG

SEQ ID NO: 63651 - protein, 399 aa, Zea Mays
MKDILSWKGNSLNSNRKLGLNRTAGSSSTVDANVDPTVLPLEPKGGQLPLFSSGDWMSDIDSGYEAAEIAASTQTSSGVTPYLCSAGSVFGSSWMLVNHDQSDGPSTSAGTSSQQKVVPQSEHQRNLNRLPDLQEIPESKNLFADLVPSGDNKSKKTSVPFKGPDHRNNELQKRRENIVPNAGRPHQRLVMKNWSPYNDVSNNKQYNYVEDSFARRNVGNNAAPSSSQMPRPAARSNLNSRLHNDASYHNYDSIMAGTSAMNITSTAETGKVPERVMRGDLDKGQTNYRLEDQHVIVQPPQGRLPWGIPAEGSVPMNRVQSQAKQHLENMDAKQDHKKLLPDPKKSPLDKFMDTSLPSRNMDMRSQRLDFDDVSECEIPWEDLVIGERIGLGTYFATKF

SEQ ID NO: 63652 - protein, 654 aa, Zea Mays
MESRALLHARPAALPHRAGLRLHLPLLRPRAVSRSPAAKPALQSPLLASRGPFLQRHDAVLGNGFVKRRAASAGGDVSFRAQAAASAAVPAPQPEESTKKLLGIDVKTLKKIVPLGLMFFCILFNYTILRDTKDVLVVTAKGSSAEIIPFLKTWVNLPMAIGFMLLYTKLSNVLSRDALFYTVIFPFIAFFGAFAFVLYPLRDVIHPTALADKLLAALGPSFLGPVAILRIWSFCLFYVMAELWGSVVISVLFWGFANQITTVDEAKEFYPLFGLGANIALIFSGRTVKYFSNLRRTLGPGIDGWEVSLKGMMSIVVLLGLVITSIYWGVNKFVLNDPSLPKADRKKKKEKPKLGMKESLKVLLSSRYVRDLATLVVAYGISINLVEVTWKSKLKAQFPSPNEYSSFMGDFSTATGIATFTMMLLGRIILRKFGWGVAAKITPTVLLLTGVGFFSLILFGQPLTPMLATMGMTPLLAAVYVGAMQNIFSKSAKYSLFDPCKEMAYIPLDEDMKVKGKAAIDVVCNPLGKSGGALIQQFMILTFGSLANSTPYLGGILLVIVLAWLGAASSLDKQFSSLAKQDMEREKAAQDQGKLERSLLSKPAEGGTGDVLVEQQTNGSATSKATGTESSPSNSSLPPPPPPPPPPPNSIDRS

SEQ ID NO: 63653 - protein, 1085 aa, Zea Mays
MASDFDETDEAFFDKLVNSDDDDDPPAAAAVGGLAALSLTDQPDAPPPRESEPRDQPAAAAAAAAAPTEDAEREPSPEVYPAAVLLHPPPDLAATVGADPAGDLLPEDGEPFSGAAAVPEDHQGLEPSLSSSLSAGTGDGSAPDRTVSGHTESNASSQLDSSTAAEGSGHQSAKSQLEYTDPRYLESLYPGWKYDDATQQWYQVDTLSAQSYAAQNTGAAVADHRSDGDLQQKFGGSYLQNTSHAGTGLEHRQTASQPETEAGNQPAVAPQKEGEAQCEPKPMHTEVGYGESNATSQFDSRATAEGYGDRSADAQVEYTDPRYLESLYPGWKYDEATHQWYQVDTLNTQTYAARDTGGAVADLASGGSVQQHQQFSGSYIQNTSHPEPALELTEPTSESKPQLEPAAAPPQTDAYPAVASHKEEQKEHGSVPVHTKPEAQEIPANAGDTATVTEGGSPGSEKGIHTAVKQVQWNDFGASTGGADLFGDLLPDGAEDDFFEGTVPVSQDVSSLVGATNVSAPDHSFSAGVYNTAMISAGHSFSDGVDKNANSHFGPSGSSAGYGDQSTNAQLGSTDPKYLESLYPGWKYDEATQQWYQVDTHSAQSYVADNTGAVVAVGSDNTQQHQQQFSASYLQNNLHAALETIAEESSTNAMSWVQGGTNTGPPEYPPNMLFYAEYPGWYFDTNTQQWQTLESYQQSVAHVATTAAASDGFAGTCHNVAHYTEDSYASSYNQQSQWQPDSFGNTMQADVLGGKSLLGSSYGSNQQAGNQIGQQANVDSLNHEPHVNTFMPSTGQSTGSEGNQASYKSFGSFTGNQSWYSGLEHSTSKELRYKGFEPSTGFQTSRKEFQPPKDHQAGHMADEPLTRYGYGSSNGVVNTQNFVPKEGMHKTQMHDDSTAHTYAASNYWGTQTSMGSAQQQLTGTNGPSQQFGFSPHEQRSSAGRPPHTVVSFGFGGKLVVLKETSSMAANFDSGNQGNSGRTVSVLNIPEIVADKIDHSSIANGGAFSYFHALCRHPIPGPLVGGSAASKDLNKWLDDMSGVYESSQTEFQGGDVQKVLISLLKILCQHYGKLRSSFGSDPSQEC

SEQ ID NO: 63654 - protein, 144 aa, Zea Mays
MGSGSGTLKQKKRVKHAKNKYLKPGALAQIRYSRSTSRDIGKKRILLNAKDELELPPQPEVLLESNTLVLSPARLNFEPFGSNTGQVLPKTPRTPNASVSCGDSGLESLPLDLLIKIMCCLHHDELKVVFHVSKRIRKAVSIIS

SEQ ID NO: 63655 - protein, 380 aa, Zea Mays
MAPEVIEMSGVCAASDIWSVGCTVIELLTCAPPYYDLQPMPALFRIVQDVHPPIPEGLSPEVTDFLQQCFQKDAMQRPDAKALLMHTWLQNLRRALPGSLRQPTPLRNIDGDDEGSRGDNSLGFCDTPGDIQTTITSNVDQENGSKEPIMDSTVQSKSEELHDGNLKLTEGSSSNSVALMKDNVVLNKGPTLVLHEKLPVESSSGGADLNGKVMAHELLQGGPPGKVELENKESSSSDVFSFQAGRQNIGFQKVVEPSVVEGPKQLSRFSDKPEDASLEDLFPPNDKWGDNGAEPSTSTTVQELKYNGVQNAFLKGLNARVEKQKENDNESMNGGKLIEFAMQLENIDALGFGEHIPGESLFPVQRSLDMEERMAIWTRV

SEQ ID NO: 63656 - protein, 741 aa, Zea Mays
MGGVGAGSLALLRLLLLLLLRAEASALHATILPSPAPSPSKAPEARSFGPRISPSHPPSALPPGSPGVDARHHSHKHPHHRESNQGPSPSSAPTPEGCSSYICTEPLTATPIGSPCGCVEPISVIVDLDLAPYLLFMSIAELEVEVAAGTFLKQSQVKIMAAVASIQDDQKTRVTIYLVPLREQFDTYTASLISDRFMEKKVQINSSIFGDYKVINISYHGLQSPPSSLPGGSDPSGTEEYPITAEVPDQKKKHNKSDILVIVVVLGSSLGLLMTCAVLLILLVRWKKLGRLHEAMTPATIPAVNRRYGTRPTLSTSMVSSASASVFSTVATCTTSVKTFSLAQLQKATDGFDSRRVLGQGGFGRVYHGTIEDGNEIAVKLLTREDRSGDREFIAEVEMLSRLHHRNLVKLIGICIERSKRCLVYELIRNGSVESHLHGADKAKGKLNWDVRMKIALGAARGLAYLHEDSNPHVIHRDFKASNILLEEDFTPKVTDFGLAREASNATQPISTRVMGTFGYVAPEYAMTGHLLVKSDVYSYGVVLLELISGRKPVNISESKDPENLVTWARPLLSHKEGLEKLIDPSLDGNFNFDNVAKVASIASMCVHTDPSQRPFMGEVVQALKLIYNDPDEACDDSYSPRNSSDQDGDYEGDLVFESGSWGFGASGCLDYRNSLPFVTMDYSSGRIEGPHDPRAALSAGSHAQSPVLQNRSGPLRMKKKLASFYRSRGSISEHGHLPRH

SEQ ID NO: 63657 - protein, 109 aa, Zea Mays
MHRSSCSARSDGAGQSTATDLRARGSGEELVMVLSCFVIGNGTCTCVMCSGGNMDRFFLPARPRPKVGAQSTVWHEKNMGQTITARRGCTGPQILARQVLARPNKAHII

SEQ ID NO: 63658 - protein, 85 aa, Zea Mays
MMRSLGFDCPPVAPPHRTRPWRSNMHFGETNLNVRSSRSHNIFIMPFWRTNEHRGESRRRQILLGHVQASGDAVEMEINIGMEKL

SEQ ID NO: 63659 - protein, 99 aa, Zea Mays
MIQIHFLVQCGLPELEKEVDEKIDQFSAWVEKHPNRRSQTPWLVCQQNRAHLLGAMVHQFASHVPQKIQQVKQLQRADKHPSKCRGGDQHKACCIGGVD

SEQ ID NO: 63660 - protein, 97 aa, Zea Mays
MIRDTAETFGIISEDNRFRVTKSWFSFRTSSRPLEVHTDRRQALAQGEVEGGSASTTCAIANQIVSNVPAVLSQIFCSTEYLLLFRSCHCSMVVLSL

SEQ ID NO: 63661 - protein, 439 aa, Zea Mays
MDASAGGGGNSLPTTGADGSKRRVCYFYDAEVGNYYYGQGHPMKPHRIRMTHALLGRYGLLDQMQVFRPHPARDRDLCRFHADDYVSFLRSVTPETQQDQIRALKRFNVGEDCPVFDGLYSFCQTYAGGSVGGAVKLNHGHDIAINWAGGLHHAKKCEASGFCYVNDIVLAILELLKYHQRVLYVDIDIHHGDGVEEAFYTTDRVMTVSFHKFGDYFPGTGDIRDVGHSKGKYYSLNVPLDDGIDDESYQSLFKPIMGKVMEVFNPGAVVLQCGADSLSGDRLGCFNLSIKGHAECVRFMRSFNVPLLLLGGGGYTIRNVARCWCYETGVALGHELTDKMPPNEYYEYFGPDYTLHVAPSNMENKNTRHQLDDIKSKLLDNLSKLRHAPSVQFQERPPEAELPEQDEDKENPDERHDADSDVEMNDAKPLQDSGRMSIV

SEQ ID NO: 63662 - protein, 125 aa, Zea Mays
MLDINLFRTDKGGNPELIRESQRSRFASVELVDEVIALDKAWRERQFELDKIRQELNATSKKIGKLKASKQEEEAKKLMESTDEIKKRLAAKEVEVQEAKSTLDAKLTTIGNIVHESVPVSEDEG

SEQ ID NO: 63663 - protein, 1179 aa, Zea Mays
MTAEGTACNGAGEALKAEFAPEKVVAVSLEEKPVGEREGEDVGGPFLIVNGGDSDGHSEPGSDLGKAPDEDPASEEDDVPTFNAAPDAAVAGDHGTAEGQVGAQGAALGASSADGGDRASDGSEGSADESRGDPSSDCVAEVAQQEAVGEEDSGAAALASRECEPTITSADSEAHYVDSEVEDKEGTVDGSAVVDAVEAVVHQEASTEQDEDAAVMSSGHDDALTSPKSCSAAVESEVIREDSKEQSITDGVEPQQQGTVGASTLVENEHLCADMMADSFVAANEPDSQEDAAVMSSGHDDALTSPKSCSAAVESEVIREDSKEQSITDGVEPQQQGTVGASALVENEHLCVDMAADSFVAATEPDSQEDAAVESCGHDDLLTFTESGSADIESEVYGEDSEQKESNTVVVEIVVQGVGRADVLMANGHLCADTQAGSSEATTEPENHANGSKLTDVAESVEGDAGSGEQDTMDSSQTNGHIYVALSADSCIVPSESKAHSFETDGQRTDQLQEEAPKLEAEVLEGVLKPTERNCAGSVEKLIGEEVGTDGHASIGGTADAYGEQEAKPMQVEGEVTCGILEFEKVDKDGEEGLCDDYTVGVVSSNEETELPMKEKVDEAVPSVNVGGPEKVTDNTSQDTKTVDFIDEITAESNFKAENMVEVKSAAREVDKTEVKDLAFADEANVAPLHLQRDCESVMETIEHEKVELPGGCQAHEIVYSSELEPKKEFEMGVDGAVPLQGAAASVASVFHHEPMSIDLSENDSGNHSGPTTALESCDHVQNEESISQEISMTTIEQPIAIDQVEPVNLNVDELVVDDDQPGFAPRCESARLDKPGCTSKKDDSNEIVEDSKSLENQLEICNAATMSDECSSRNANEDPSPINMSAECSSRTANEGFSPINEASHLAEESCLSDKSYNAISYENGNGPAKSSEEPDKSCNAIICENENEPAKSSDVVETRCVEALAPSSVGTVVTAEQKDNGHRASGEWHGDNVQVIGQQQKIYIIKVPKFAGDDLWNKIQAAQAHLDHLTQERDAINRRRQKQKAVCDQYREKLEAARREEREARTAHGDKKNDLNNVRSVLGKLHQANSAEELDELIAKKERTMQHETISLKEEKLLIKEINELKAQRKQLSTTMGSKAEINEAFDQKDHIHERHKRKTQERFKSLSKMKEQVSEN

SEQ ID NO: 63664 - protein, 160 aa, Zea Mays
MAGGGAGDDDVVVVSCGGRGGGDPGAYAAVLKRKLDLYCAAVAKSMVNIAEEAVRRLTGITLMLPTAFEKPTSSAPLSSCPSDAASASASAAIEDSVKHFLQAPLENSGIIPNAAVFQTKPASLHRVASLENLQKRIVGDAMYSETASTTFSDPEALADR

SEQ ID NO: 63665 - protein, 105 aa, Zea Mays
MEPVVGIVVSNKMQKSVVVAVDRLFHYKMYNRYVKRTSKFMAHDEADSCNIGDRVVGWGLGSRRAAALGRCRDPGWVARREKIPGDSGFIWEARINWLGWTLLGP

SEQ ID NO: 63666 - protein, 637 aa, Zea Mays
MFKFLKEVVAGSGSGLKDFPYTIGEPYASAWGSWKHHRGTSKDDGSPVSIFSLSGSNPQDRHMVAGRNGVKRLRTVRHPNILSFLHSTEAEAADGPAMKYTIYIVTEPVMPLSEKLKELNLGGTQRDEYFAWGLHQISKAVSFLNNDCKLVHGNVCLASVVVTQTLDWKLHAFDVLSEFDANNEASGSPMLQFEWLVGTQYKPMELSKSDWASIRKSPPWAIDSWGLGCLIYELFSGAKLARTEDLRNTASIPKSLLPDYQRLLNSTPSRRLNPSKLIDNSEFFQNKLVETIQFMEILNLKDTFEKDSFFRKLPNIAEQLPREIVLKKLLPVLASSLEFGSAAAPALTVLLKMGSWLPADQFNIKVLPTIVKLFASNDRAIRACLLHHINQFGESMSAQIVDEQVFPHVATGFSDTDGTIRELTLKSMLVLAPKLSQRTISGSLLKYLSKLQVDEEPGIRTNTTILLGNIAGYMNDGTRKRVLINAFTVRALRDTFPPARAAGIMALSVTSSYYEMTEIATRILPNIVVLTFDPNSDVRTKAFQATDQFLQIAKQHHEKLNTGDNSVAESTGVKLKPGNAGLLGWAMSSVTQKGKPFDHAPISTANANNSQASTTSTATPVLFTLKDLQLSISIRLP

SEQ ID NO: 63667 - protein, 150 aa, Zea Mays
MMKQVALGQLRSKRLASFVSSLSGVKLKSSHKKATISTLSVGLNKAVAVLGKVILFIRHDNVAPLYYLICDLERSYFILSVYGLHNDAIKDGDQVVLFEPYYRILDASCKDKHYQFKSIRVDFPEQILVNERVPAPHHVARASIHAHNKS

SEQ ID NO: 63668 - protein, 110 aa, Zea Mays
MRAGPQFRSVTAVVRSCVGPPASLPLGRGACTHACEPHNSLRRQLASPWAVAMGAGTKGPAPAAPVMLAAAVLSGSSASTSAAYASDPISEGGSGVRAADSSARLLARVP

SEQ ID NO: 63669 - protein, 433 aa, Zea Mays
MVKLSSTILSCLNKHAKKVFVPFLFSRFEWYKATSFSWPLVLFSTNILFGKYCSSGVHLRHRNDLTSLLSIKKYGTNELGKCSLFNGEWIPNPSGPAYTNASCRFIDDHQNCMMNGRPDKEYLHWKWKPYGCDLPPFDAVRFLDSVRNKGWGLIGDSILRNQVQSLLCLLSKAEEPVEVYHDNEFKNRRWHFQSYNFTVSIVWAPFLIKSGIFENEDGVSTSEIQLHLDILDANWTSQYESFDYIIISGGQWFLRTAVYWENGAVVGGHNSQNKNVAELGFEHLYQKTLQNVFNFIVSAKHKPVIFFRTWSPDHFEDGEWFSGGSCRRKLPYNKGEYREGNIERVMRQIELESFNKAVAALRGSADMDRLRLMDTYSLSSLRPDGHVGPYRTPYPFARGSSKSTPVQNDCLHWCVPGPIDAWNDLVMKMALDP

SEQ ID NO: 63670 - protein, 483 aa, Zea Mays
MVRGKGMAAMYSWSCKRSYKNGFVWHDLSEDDLVLPATDGEYVLKGSELVDQSPSGPFYPVTVSNGNQKQQSRPKEGARQPLPRDQSDPSSPPSVTVREAKARRSPSVPSQDEEDDTPSPCRDRSMSQPQELEPQRNERRTQPPASGSASPVELRAHRPTTGCTDAATQTDDLGRRPAGRRALELPRKKSLSTDHDAVVREIAEYRQSHPRRSADLHGISRELLRQCITTPLTVPSTCAKSESLESLIRADNVMTDSFRILEEEDVVARTCPKLRPASVLMQLVTCGSLSVKGHGDAGVVRTCKPRFPNLRFLPSPLISRTMMMGELDYLSENPRLMGMKLEEKEYFSGSLVETKKTQRDGPAERYSALKRSSSYNAERAGEALDCTRREEDKADDVSSRTRCLPRTPILSSFLHPKGDSLRSPVSDCRRSSSARRDYDAASGDGSRRFADASVASATTGAESFRKEEKLVKIEESCRPEPVS

SEQ ID NO: 63671 - protein, 96 aa, Zea Mays
MTSTRHTGLIHHANISPFRHPPRVTIEPKLLIFFHIPSQAPRHSGQGERMARRAGKAPGGWRSVADGHPVPMRPRQALRRRRGRHRGRHRRHKPRW

SEQ ID NO: 63672 - protein, 72 aa, Zea Mays
MEGSALCTQRTNGGGSTPVSNSGDLSGLPRLSRPWLYPVNTCEPARPPHEGNHWCKCGSTTASFSLTEPQLG

SEQ ID NO: 63673 - protein, 882 aa, Zea Mays
MPAGGAIVVVEVVQVVVPGAVAKPPGSKEEAAASTGMKSGLARLVRRTGGAERPTSAWSVAGGRVLWARAAIPLPATQIPMGGGWLDNGGTQIRHGAAPRPGGGGRRAAHWRVHDRGGGEPVEAEDEWRFARVTWRLTVTAVGLNTEWGLLMASISEDNNEETPLQVRLNGVATFIGIAGLSVAAMVLVVLFARYFTGHTTDSDGSVQFVKRHTSVKSAIFGSIKILTVAVTIVVVAVPEGLPLAVTLTLAYSMRKMMADKALVRRLSACETMGSATTICSDKTGTLTLNQMTVMQSIVGEVKLQPPANVDKLSSTVASLLLEGIAQNTSGSVFEAQDGSVEVTGSPTEKAILSWGLDLRMKFAEERSRSSIIHVSPFNSEKKRAGVAVVARDSNVHVHWKGAAEIVLALCTSWLNVDGSTHEMTPDKANQLKKLIEDMAEQSLRCIAFAYRNLDMKDVPSEEQRINWQLPDNELTLIGIIGMKDPCRPEVRDAVELCKKAGVKVRMVTGDNLKTAKAIALECGILDDSEASAQAIIEGRVFRAYDDTERENVADKISVMARSSPNDKLLLVKALKKIGHVVAVTGDGTNDAPALHEADIGLSMGIQGTEVAKESSDIIILDDNFSSVVKVVRWGRSVYANIQKFIQFQLTVNVAALVINVVAAVSSGNVPLNAVQLLWVNLIMDTLGALALATEPPTDQLMRRPPVGRREPLVTNIMWRNLFIQAVFQVAVLLTLNFRGRDLLHLTHDTLGHSSKVKNTLIFNTFVLCQVFNEVNSRKPEELNIFSGVSRNHLFLAVVSITVVMQVIIIEFLGKFTSTVRLNWKLWLVSVVIAFLSWPLAFVGKFIPVPRTELKDLIVRCWPKRGESAAQQTQDDRMEVPV

SEQ ID NO: 63674 - protein, 347 aa, Zea Mays
MAMSFFSPTTTPSSSASLLPIRRQCATGPSVSFPLKPHRFRVHLKPPRSSRTRIHTLSTSSLKIPTESILSSVVSTSTTLLFVLVAGLLSLSGVRSLPALACAPAPTQQPQETEEQESKEKKQQEEAGERKEDVLPQLDEEDAEDDEVRMYSAILSRNSGDVDALKCALYAKMRRADWGGALRFARLLRDAEPSELEWRLMVAQLHELKGDLAEAERHFRELLAEEPLLVRALHLATSERRVPEERNIKLLIAQMHVVMGQLDVASEKLQNLINEDPRDFRSHLCQGIVYALLDRKEDADMQFDVYRSLVPDEFPDKSFISDVILAARTESHDRLQKEFDSEFQAKK

SEQ ID NO: 63675 - protein, 543 aa, Zea Mays
MELLGLREHHARTLLIHYRWDVERIFELLDQKGRDSLFSEAGIPLQYTNNAGPTSSAEVTCNVCYDDVPPSCALEMDCGHSYCSDCWTEYFIVKINEGQSRRVRCMAPKCNAICDEAIIRKLVIARHPDIAERFERFLLESYIEDNDTVKWCPSTPHCGNAIRVKGDIYCEVECTCGCQFCFNCSLQTHSPCSCMMWELWIKKCHDESETVNWITVNTKPCPKCHKPVEKNGGCNLVACICGQAFCWLCGGATGRDHTWSSISGHSCGRFTNDQTKKTEQARRDLYRYMHYHNRYKAHTDSLKQEAKLKNEIQGKISISENKESKIKDYSWVINGLNRLFRSRRVLSYSYPFAFYMFGDEIFKDEMTPQERELKQNLFEDQQQQLEFNVERLSGFLEKDFQLFTDDEVMDTMKHVINLSNVVDRLCKQMYQCIENDLLYPLRTPHNIAPYKSKGLDRASELNISWDPAEQSSQSTKHSQEDEHRNQPASISLGKRTHELHGSSSGNRGDNRGHRSNKRDRVDANGGGDALFDLNVPAELVDKI

SEQ ID NO: 63676 - protein, 201 aa, Zea Mays
MIRVPDWAFEAVGLEMRVGQDTAYHPGLYLTDAQREAVEALIQELPKFRLKAVPTDCSECPICLEEFHVGNEVRGLPCAHNFHVECIDQWLRLNVKCPRCRCSVFPNLDLSALNNLRSTSEPDHPSASASNVTTATAATRYVRSQPAGQSYLVRLQGLLLRPVRHDSVESDGEPAVGNSRLVGTEELPSILVDDGHQLPDR

SEQ ID NO: 63677 - protein, 155 aa, Zea Mays
MGKPAKIGEWGGYAGDRRDLRATPDRLIEVKVTADNSSCIRSISFIYIGADGKPYEEGPWGFGHAGTEYKRWQRIDLCRFDESLTEISGTTGPAYNIDNLVKSLKFVTNKRAYGPYGRDEGTPFRVKVMNNGHVAGFFGRSGDCLDAIGLYVNPN

SEQ ID NO: 63678 - protein, 569 aa, Zea Mays
MTCATRSPGFLREAELRLLRCTLPSLPSSPPPPASPPPAHPLGPAAASAIAAVEAGDYEAALATAAPHFFPAFAPSRPPGSAAQFYADLGAAARAFLLVDGDGAAAGEGFDCRCAVVLSAAVAALLAFTQQNVTGPPRKFPTFPFSMSSFDERCYSNLGDTWDAWASDNLASFGSHVHGKFSLLQFIVFARLLFTSVQSLDLSDCWSVSWWLFRISMLQQNILDELSSSLFDQVQVYKNKMLDHFGELEKVSTYWDCLLSDGEGSYFVSAAFLEAGIVEYKYGRVDASRLHLNSAQEACGLHLSLTGILGFRTIYQVDAKSQMVLVAKTNKSGPDEGQVTEPTVAQNDNAALKNARSFVPVEDDEFCDILRMPRLVQDGSNSASEDATNPSAKISLSAIQQAAVLAQCLYVSRRSRVDEMSGWEMAPYIESIDSQDESYFVVRSLCDILRVRWESTRSRTKQRALLMMENLVEDISKEFPAAPQRVKMVFAVHMPTLPALRKEYGELLISCGIVGEALEIFKDLELWDNLIYCYRLLGKVADAVSLINARLSVTPNDPRLWHSVYLSAQ

SEQ ID NO: 63679 - protein, 645 aa, Zea Mays
MKVMVLTIIGKILHWLLKAQSLTKLMRRQLKRKIMERWRTSIAIMTSGFMKIWVMYAVCVASRRRTNGYGGHSKDADEIDCGTVKLSEDFIVADIAIHPRHARIMKPHQLEGFNFLVKNLIGDKPGGCILAHAPGTGKTFMLISFIQSFMARYPSARPLVVLPKGILGIWKTEIKRWQVQDIPVYDFYSVKAEKRVEQLQILKSWEDKMSILFLGYKQFSTIVTDDGGSNVTAACRDRLLKVPNLLILDEGHTPRNRETNVLESLNRVETPRKVVLSGTLFQNHVEEVFNILNLVRPKFLRMESSRPTARRIMSQVEIVGRSSKGLADGAFTKAVEETLLNDENFKRKAHVIRGLRELTKDVLHYYKGDILDELPGLVDFSVFLKLTPKQKDIIYKLEAHDRFKRNAVGSALYIHPCLSELSEVNAEHRANTFRDDLVDSLVDSITVRDGVKANFFMNILSLANSAGEKVLAFSQYISPMIFFERLLVKKKGWHVGKEIFMISGDTSQEDRELATDHFNNSADAKIMFGSIKACGEGISLVGASRVVILDVHLNPSVTRQAIGRAFRPGQQKKVFVYRLVAADSDEVKVHETAFKKEVIPKLWFEWSEHCTTEDFKLGQIDIDDSGDELLDTKAIRKDIKALYRR

SEQ ID NO: 63680 - protein, 128 aa, Zea Mays
MTSETGKRWSDMDAWRSEAEGDRDLVRSSEMTQTEAPSCPTTGCGIGRRRGLVLREAGMRRSESWRTTMSSRSSARRFGRASAARFFIHVVREATALATVSRGTGCGGCGGDMVAAAREGDQRGLGFG

SEQ ID NO: 63681 - protein, 165 aa, Zea Mays
MFVGLIDLAIKNNCLIGGDDFKSGKTKMKSVLVDFLVGAGIKYVLYVGDSKRAMDEYTSEIFMGSKNTIVLHNTYEDSLLTTPIILDLVLLAELSTRIQLKPEGTDKFHSFHPVATILSYLTKAPLVPPGTLVVNALAKQRAVLENIMRACVGLALENNMILEYK

SEQ ID NO: 63682 - protein, 349 aa, Zea Mays
MILMRTLRNDYAKYAREDDDLESLERDVNEESGWKLVHGDVFRPPRGQVFLSALVGIGTQLAALILLVIVLAIVVMLYVGRGAIITTFIVCYALTSFISGYVSGGLYSRNGGKNWIKAMILTASLFPFLCFSIGLLLNTIAIFYRSLAAIPFGTMVVMFILWAFISFPLVLLGTVVGRNWSGAPNNPCRVKTIPRPIPEKKWYLTPSVISLMGGLLPFGSIFIEMYFVFTSFWNYKVYYVYGFMLLVFVILIIVTICVTIVGTYFLLNAENYHWQWTSFFSAASTALYVYLYSIYYYHVKTKMSGFFQTSFYFGYTLMFCLGLGILCGAVGYLGSTLFVRRIYRNIKCD

SEQ ID NO: 63683 - protein, 922 aa, Zea Mays
MAKTKPMAAAGEKKKSKGKKKGKNGPAKVAMKARGAAAEERNNPFEAIWSRRKFDVLGKKRKGEERRVSRSRSEAIRKRENTLLKEFVESAKSSVFHDRRIGERDDTLPEFDKAILRQQRERLAKLKRESKYNLSDDDEDEINIHNVLLSENDDFDEEVPLDDGSDEEGKMVLSKKRLSLQSDDHPSITDLPQETHQGQKSKKEVMTEIISKSKFYKAQRAKEREEDEHLVDKLDSDFASLAQTRALLSLTESAKVKVNKTDSSTGLTGKEFSNKAKADTYEKLVKEMVMDQRARPSDRTKTPEEIAQEEKERLEKLEEERQKRMLGTADTSDEDDGNENDNHMKLGNSKPISGDDLGDSFSLDESTVKKKGWVDEIYEREGRKIGDDAAASDDGESDDENAGDDEADDEDSDSSDNDFGNMSARDWEQSDDDEVDVGDDEMEDFKEKGQEINDKVVNKDAHNLKGESNVKPQVKDGSIPFVIDAPNDLKDLSSLLDGRSEAEIIEIISRIRACNSIRLAAENRRKMQVFYGVLLQYFAVLATQSPVKFRIIDILVKPLIEMSGETPYFAAICARERLIHTRTRLCEDIKVPGKSSWPNLKTLLLLRLWSLIFPCSDFRHVVTTPLLLLMCEYLMRCPIQSGRDVAVGSFLSSMVLVVTKESKKFCPEAIGFLQSLLVTSLKGKVETHLHNQINDQFMELKTLKLWLSIHDHVHEVNPVNILEIVGMDPDAPYFSSDNFKAGVLLSVAECLRGFVIIHEGLSSFPEIFLPISSLLQEILDRSELPGSLQDIFHEVIDLIKKRSDEHYASREPLRMRKKKPEPIKQLNPKFEENYIKGLDYDPDRERAQMKKLRKRVKSEMKGAKRELQKDNYFLSAVKEKERRKRDEERAEMYGKAMAFLQEQESAFKSGQLGKGKGRKRMR

SEQ ID NO: 63684 - protein, 714 aa, Zea Mays
MTEVNSEIAEQLRKNKEICKVQEGKIYSLSQHNQKLTEGIDSVVRVLHLDHKYESLGQMKLEIIVQLILNEISCLLNNISDAQDVKQKELVEKSLVVTLLEHFGQEVADLRSERNVLRQDQQIKIEELLQLQREKEELMKISDEFLEEVEARNHKVDELKAEAKFLVVRFSELQESRRSLQSEITKLLQSNSFLSNELNDSIEKQKRFEHDFSNLVSEAVSKDILSVIFRSLHEERTLQLKSLHNNFGCLQTAGGELYQEIKMMNKRLGDIEMENKYLGKELSRTMSVYGGSIVQTATGKGNPGRRDANLLNSNRKIQQDCHVNLEVEQEEVCNADFQESNETLQDEVRKLRSEVEMLRSKEKAVFNIKSCDEEIMKLLANMQMAIMNAALFKEKVLELIITCESFEISAMVQKEVLKEEIIQRNSYVDELKDKLNAVEIENRRLKVDLNGDFTMLGSLQTEVSALEEQTLSLANDHLHTNKLRMEENALSPHLVKTTTRSSGEENALRMVKGMELQKLHGTIKALQKVVTDTGVLLEQERLDFNANLKEAKKQIEVLKLKEILDDDIIEMNYEQMLKDIQLDLIQTSSGQKTSPFGQEKKNVAQVDDKMVNSRGSIGPSHGHVADDLRPPQSESFGRENNLMVVKELSIDKQELPRSLAMEPHEEWRNKVVERLASDAQRLSALQSSIQELKTNAETSEEVELGSVRYQITEA

SEQ ID NO: 63685 - protein, 614 aa, Zea Mays
MSQEGANLPQEVVGSHDQATAPHGSIPAPADSNPSSVSNLASAVNNGGSSECASPAVLSAGEDNNAASSKTASPAVLSAGEDNNAASSKTASPAVLHAADDNNAASKIAGPAVLLAGEENKAKLKLASPASLLAGEEKGNNADEFKLASPRMLHDCDDNNAGSHAGVRNCNAAQSKLANPAVLHAGDDKKGGSKIAGPEVPHASVTSTTGSKLNGPAALHAGNDNDSGGSRLPNPAVLHASKDMDNNAGRPKFASPVLLHAGEDNKARTKLAIQAGGGGNAGAGSSRLTRSAALHAGKDNGAGSKPAIQVVPRLHAGGKDNNAGSFKAARPSAADSGESNAKEGKSNVAGEQRAREAGVGCGGGKGNAAAVEDVDHDLHIFTERERRKKMKNMFSTLHALLPQLPDKADKATIVGEAVTYIKTLEGTVQKLEKLKLERKRALAAQQQLMAGAGSNRASSARHPAPAPSSPSSSSREANVADMVHGWHAQQAAANKALAAEAGAGGSSSAAASLPRGAVPFPAPAAGFQTWSGQNVVVSVASNEAYINLHSPRQPAGTLTKALFVLERHRIDVVTTTISTQDGFHMLIRLPLRLAFRRICVLKTGSSWRCRRCCS

SEQ ID NO: 63686 - protein, 722 aa, Zea Mays
MKSPVGYYSGLKACDEPPKQVANKTLILFEDVDTVFDEDRGFISTILKMAETTKWPIILTSNKKDPSLPNLLDQLVLDFKYPSTSELLSHVAMICKSEGVNVTVPQLKHVIDVCLGDIRRVVMFLQFWYQGHQFTERPKECLCGPFSLDLDAVHSTVPKMLPWEFPCKLSETLCMEVDKTILLAEEKKKQMEISDLEGLQLHVTAPLIKGRTSKTRRAKKSKLKRAHSTEHNDISPCKNELDDFHDLPDISLPSDKQIKRNRHRSLLLSESDDDPADVGTEKHNIFTVTEVGFFPQPSEVPPMHGQGISDQFHFPVESRETCEIADSFQNPPESNMYGSISQVCDTFMSQDVSCVPESSLILDGTSASISGDEFLSRAVSNGFSAFCEGTYTTSRMVLEDSDCVKNLMAERQKDVEDVVGETSETYMESFRRNEQASCSAAGFQLMDECSRAESIWLLSGKKSNDSCKVELVQDTWNRLRSCRLEFTSEANHNRATSGALKLVSEVSDLISESDLMLFRCYPLTKDTLDPSLTPCDEPVDSSWYSNQVEMGSVYAQHALRILSRNSQKIDGGSVDLSQELFASTAAVSFGKITCSGFRNDYGSTDLSHMKNPTTCIFKRRERHVHLCETLSPVVPPKLLQSLRGPAFVDYLSSISQISKLENLRLSENKVINKRRRSRQARHYLSSGALQLSHEDVVLLEESGCFSSRRERVEVVEQAPVST

SEQ ID NO: 63687 - protein, 129 aa, Zea Mays
MNCYLVKFNHDNNLASNHFWLNANCRSGSVCLDVINQTWSPMFDLVNVFEVFLPQLLLYPNPSDPLNGDAAALMMRDRPAYEQKVKEYCEKYAKPGDAGVTPEEQSSDEELSEDEDDSGDEEIMGKPDP

SEQ ID NO: 63688 - protein, 580 aa, Zea Mays
MARRDHDDDDEEEVEEEAYDLDEEEDDEDEEDDYEEEARRGKASRGGGKGGGGRKRSREDNFIDDSAIEDEDEDDDDDGGGRPRKKGGGGVRGFFDEEAQVDEDEEEEDEGEGEDDFINDAGADLPDEDVVRGSRRHSIPMRDEEEDIDEIERQVRERYARSTHIEYGEEAAEVEQQALLPSVKDPKLWMVKCAIGHERETAICLMQKFIDRSDLQIKSVVALDHLKNYIYVEAEKEAHVKEACKGLRNIYASAKITLVPIKEMADVLSVESKSVDLSRDSWVRMKLGIYKGDLAKVVDVDNVRQRVDVKLIPRIDLQALASKLEGESVKKKAFVPPPRFFNIDEAREMHIRVERRRDKESGEYFEWVDNLKFKDGFLYKSVSTKSIHTNNIQPNFDELEKFKKPGDDMNGDMASLSTLFANRKKGHFMKGDAVIVIKGDLKNLEGWVEKVEDETVHIRPKISDLPKTLAFNEKELCKYFKPGDHVKVISGVQEGATGMVVKVEGHVLIILSDTTKEHIRVFADHVVESSEITTGITRIGIIGKMEILLLGVAVQLTRNPTSSAIRSPHTWIRVGKHSRS

SEQ ID NO: 63689 - protein, 346 aa, Zea Mays
MFRNSVFPLVLSLLAALGSIQFVSNIAFAYFVLNKTISVKVMVATTFIVFGNIFLVSFGNHQSPVYTPEQLIAKYSNLVFVLYCMSLVFVVAFNHYLYRSGETIISNSSKDAGTYWRTMLPFSYAVVSGAIGSCSVLFAKSLSNMLRLTMSSRYEFHSWFTYSIVLLFLCTAGFWMARLNEGLSLFDAILIVPMFQIAWTFFSICTGFVYFQEYQVFDTLRIIMFVLGMTFVFVGISLLAPDDSKDGSSTADDSIIDIDRNGKMPMEETDTDDSISFVTSVKVNAKRVLSKAKSACSMSLGLGESTISASSVLAMPMVSSRTTGFRGIGNDRPKYVPLRTTDWSNL

SEQ ID NO: 63690 - protein, 179 aa, Zea Mays
MQVENASVLLLLAEIHKKSDNAVLGLPYALASQSFCKSFNLDLLEASATLTLAELWLDLGSSHAKKALSLVYQSLPMILGHGGLELRARAHVVLAKCHLSDLKFSVLEDPEAVLDPLNQATEDLQALEYHEMAAEAYYLKAMAYNHLGKLDEREEAAARFKDHVTALETPHNEEDSLKY

SEQ ID NO: 63691 - protein, 285 aa, Zea Mays
MMLRPPALACCKLYISEARNSGALRAIEHAAAALRPLAVLVNTFADDAYNRVGYTLVSPLAGGAASPPLRCAAFRVVAAAIEAVDLDAHAGAHPRLGVVDHIAFHPLASARLEDVTALARAVAADIGDRLQVPTYLYGAAHRDGRTLASIRRQLGYFTPTSPGGEQWHGAPDSLLPVAPDAGPRTSSASNGVVVVGATPWVDNYNVPLATADVSVARRIARAVSERGGGLACVQAMGLAHGDGATEVACNLLHPDAVGADQVQGYFTDFSREKVVELYLQAAQAA

SEQ ID NO: 63692 - protein, 232 aa, Zea Mays
MVARGDLGAQIPLEQVPSIQQRIVRMCRQLNKPVIVASQLLESMIEYPTPTRAEVADVSEAVRQRADALMLSGESAMGRYPEKALSVLRSVSLRIERWWREEKRQEALELQGVSSSFSDKISEEICNSAAKMANNLGVDAVFVYTKDGYMGSLLSRCRPDCPIFAFTSSTSVRRRLNLQWGLIPFRLSESDDMESNLNRTFSLLKARGMVQSGDLVIALSDMLQSIQVVNVP

SEQ ID NO: 63693 - protein, 77 aa, Zea Mays
MHTTHRWLEKTDTLVPTEKILEPWPPSLMAQQKPRTEHRNPRTNETQRGDFLIKPKKSLMRRIELGSWRCNSKAFNH

SEQ ID NO: 63694 - protein, 148 aa, Zea Mays
MTHSQQASSPPLAYYRGAMGILLVYDVTDESSFNNIRNWIRNIEQHASDNVNKILVGNKVDMDAKRVVSMAQGQKLADEYGIKFFETSAKTNQNVEQVFFAMARDVKRRLTETVAAAAEPPAIQISRPDSGQAGAASSTRWSSSCCST

SEQ ID NO: 63695 - protein, 552 aa, Zea Mays
MHGSPQSDDSSQHSDSGILLRENASNGGLSYTRSRPVDNVIYSQFISTMCSVSKDPDPRIATIGWRALTLIGVEQVAMKSTRFNSGGLHRGETSASTFGMAHSSSWRDMNSGSNSMKFMTPPVSPPQHDYLLLGLRRVCSMEFGQHPINSPDGFANLLLSSATGPSNAELKKLPESTIYNWSCGHFSRPLLTASDDNEETNARREERERIALDFITKCQRSSCKITSQIASWDTRFELGTKAALLLPFSPIVVAADENEKISVWNYDDAQPVNSFHNHKLSDRGLSKLLLINELDECLLLAASSDGNVRIWKNFACKGGQKLVTAFSSVQGHRAAGRSIVIDWQQQSCYLYASGDMSSILVWDLDKEQLLNTIPSSADSAISALSASQVRSGYFAAGFADGSVRIYDVCSPDSRPVYVARPHAPRTEKVVGIGFQPGFDPYEIVSASQAGDIQFLDVRMAAEPYLTIEAHRGSLTALAVHRHAPVVASSAKQMIKVFSLEGEQLRIIRYLPSFMGQRTGSVNCLSFHPYKSLLAAGAGHNALVSIYAEENYK

SEQ ID NO: 63696 - protein, 335 aa, Zea Mays
MVLPKFEVAAYWNESSGFADVFDVDYFIEQTRGYVEVVKDLPAEIASREPFKVDCSKRKGHFDYVETVLPALLEHQYISLTPAMNQRRDRNPAYAKASYCQGCYSALRLNKNVESKAVELLQAIPKPFLSLHLRFEPDMVAYSRCSYTGLSSKSMDSIEAARREGRKVLTGDAARLWRNRGKCPLTPSETAFILQALGIPTNTNIYLAAGDGLMELEGFTSVYKNTYTKSSLLTHEAFENMHGNTKAALDYYVSVNSDAYVATFFGNMDKMVTAMRTMQGLQRTLVLSRRAFANYTAAGLAGQQLAKAMWDAHREEYVRGRGSALPEYCFCEFKL

SEQ ID NO: 63697 - protein, 272 aa, Zea Mays
MDDAGDTFKDLVGSAYYVAPEVLKRHYGAEADIWSAGVILYILLSGVPPFWADLVKKMLRQDPKERLTAAEILNHPWIREDGEAPDKPLDITVISRMKQFRAMNKLKKVALKVVAENLSDEEIMGLKEMFRSLDTDNSGTITLEELRSGLPKLGTKISESEIKQLMEAADVDGNGTIDYAEFISATMHLNRLEKEDRILKAFEYFDKDHSGYITVDELEEALKKYDMGDDKTIKEIIAEVDTDHDGRINYQEFVAMMRNNTPEIVPNRRRMF

SEQ ID NO: 63698 - protein, 553 aa, Zea Mays
MRAAMAAAVLRPTAATLRFLSTPPHQRRRVLVGHLPFARRRRHSSTATAPALEDSSPRSGEGKAVRRRRARESPQGLLRHQLDMCSRNADLTTALRLYDDALSPDNPIPLSLHHYNCLLYLCSNAAATDSDSHISATAAQRGFDIFARMEADGVQPNEATLTSVARLAAATRDPAMAFSVVRRMAAAGTPPRLRTYGPALFAYCDAKDADGAKQVEAHMDASGVVPEEPELAALLRVNADTGKADEVYRLLHRTRVLVRQVCDTTAQVVEAWFRSDAASQAGVDSWDPTKVKEGVVKGGGGWHGQGWLGKGAWSVGWTEMGKDGTCQRCGERLVCIDIDPAETDNFANSLTELAIKLEAREDFLSFQSWLRRHGPFDAVIDAANVGLYKSKDFCFSQVNSVVNAIQRVTKSKKLPLIVLHRSRVNVGPAKAPYNQKILDSWRNAGALYATPPGSNDDWYWLYAAVSCRSLLVTNDEMRDHLFQLLGTSFFPRWKEKHQVRLTFSGHGPTLHLPPPYSIVIQESEDGSWHVPTTTGDDIEKPRQWLCTTRKSLR

SEQ ID NO: 63699 - protein, 312 aa, Zea Mays
MLFLVLIEALKYPFIEPPQNHPRDLYRKGALACVTGINKANIVDGSFKLCAYLAWPKSASKVNSAAPSNAATATEKDKTHTEKILVDIDLQHKFQKGDKSKLTSQTKEAIMKKKKSSKLPNDNDTKLTSQGAAEVPQTSKSSEGKRKVGKNKHASVYQKPLKKAINNRNVDESQLTHRSAAVLQTSNTSKGKRKASENRSLYLNEKALKKARGNSNLGGSSRSKSYASDLEPHAGFISPAIRDNGSDAYNRQRTARYDIHPIDVHPYARAPPSAYSGYKSHAGYEAANTYEYAGNRAPTPPSGSYIPRRGHY

SEQ ID NO: 63700 - protein, 143 aa, Zea Mays
MKSSLRKLRGFALQRHEQRVDRDRGRGHSTTAAEELLAAAQDMTDMRSCYDNLLSVAAAIANSAYEFSEALQDMGACLLKRITPNKDGINDKVLLLLGKSQFELRKLVDSYRVHVLNTITTPSLSLLNELQTVEHLFILPAMG

SEQ ID NO: 63701 - protein, 352 aa, Zea Mays
MEIVEIGILSEAELEQIISSDFNPNRCGFEDKGEIWVENILNLGVSPAKLVENMKERFISSGGAIFEEKSLSSIYVYDDLAAFPAGSGPNDRTTYMFTYVDPTFGGPKLEELLEVFWDLMPAYQDVLLQNLDIRRVIFGIFPTYRDSPLPAAFDRILQVGDASGIQSPVSFGGFGSLTRHLGRLSSGICEAVEGDFLDAHSLQLLNPYMPNLSASWLFQRAMSVRPHVNVSPTFINELLFANFQSMQKLGDSVLRPFLQDVIQFGPLVKTLGLVMITRPQILPSIFKQVGLGVILEWSGHFMMLGYYTFLSTYIDPILRSWVESLPPRDKYQWKRYLEAWRYGAGLDYRQGE

SEQ ID NO: 63702 - protein, 595 aa, Zea Mays
MDLLDARHRHTPDLSSSQDAASNMGLPLAGAAYQPYVSELLSFSIERLHKEPELLRVDAERVRRQMQEVAVENYAAFIAASEALSFVRAQLESFDGHLEAMIEEIPNLTSGCTEFVESAQQILEERKLNQTLLANHTTLLDLLEIPQLMDTCIRNGNYDEALDLEAFVSKIWKLHPDLPVVQGLATEVKKTVQSLVSQLLQKLRSNIQLPECLRIVAHLRRIGVFSESELRLQFLRCREAWLSGILEDLDQRNVYDYLKGMVTCHRVHLFDVVNQYRAIFNNDKSGNDENYDGGLLFSWAMQQVSNHLTTLQVMLPNITEGGSLSNILEQCMYCAMGLGLVGLDFRGLLPPIFENAVLNLFSKNMSTAVENFQVILDSHCWVPMPSVGFVANGVVDETSDDVTPPSVLMEHPPLAVFVNGVSAAMNELRPCAPLSLKVVLAQEVVKGLHAVSDSLVRYKAMRMLRGNESALFLSLCQAFIEVAYPYCAACFGRCYPNGATLISERQGTFDAVRQLLTVPARSNSSSIERRQSGGIERRQSGAIERKQSVESTGIAVTDNGLSADGPGLETNSSAATTTSPVDDGPPATKAKAHGG

SEQ ID NO: 63703 - protein, 487 aa, Zea Mays
MDPIMKLLEDDEDESLHSGADVEAFTAALNREVEASASASASTSTSVPAGSSSQPTDHGAGLLPQEHKSLLNHDPGQWQDPVKNEIVNQESQQQEQTHAFRNDHPSRPEMVSQGSNNCPLPTNTPKECDLLKAKQEPGSTSQQGIVAQHQPMQQMKSEQTPIVSQQQSMQQMKNQQTPVTNQTNSATTTAKAPVVTFHMLIPILSRYLDKARDIEVQSIFAKLRKNEVSKEYFLKTVRNIVGDKLLKQAASQYQMQAQRSPQTNPSNYSLSGQVSGQQTAPSGSVTGDEQKGYPGAHTIPMRQAIASTRPPQFRPSSSGQMRSNTVNQALGSSKVSAGMESQSQQLSAPKPLAATSLSQTQSHGIQEEPKIQIQSSVQAPPAAASKTPQRKASSGQKKPLEVLGSSPPPSSKKQKVSGGFHEQSIDQLNDVTAVSGVNLREEEEHLFSAPKEEGRVSEVARKVVQLEEEKLILQKGPLTQKLAGIMC

SEQ ID NO: 63704 - protein, 509 aa, Zea Mays
MHGHHSYRRPAPAADPDAEVIALSPKTLMATNRFVCEVCNKGFQREQNLQLHRRGHNLPWKLKQKNPKETRRRVYLCPEPTCVHHDPSRALGDLTGIKKHYCRKHGEKKWKCDKCNKRYAVQSDWKAHSKTCGTREYRCDCGTLFSRRDSFITHRAFCDALAQESARVPPMGAGMYGTGGMALGLSGMATSQLQSFQDQTHSSATTAISNNPTAQFEHLMQSSTGSPVFRGAQPTSSSSSPFYLGGAEDGHQSLSGHTSLLHGNKQAYHGLMLLPEQQHQAGSNGLLNLGFFSGGSSGQDARLVFPDQFNGAVGGNVRGDGSEHGNSGANTESAAIFSGNLMGNHQMASSAGFSSSLYNSSETAAPAQMSATALLQKAAQMGATTSSGNVNSLLRGLGSSAGGTLNGRPAGAAAGFMAGESSSARSTSQAENESQFRDLMNTLAASGSGAAGTAFSGGFPGMDDSKLSTRDFLGVGGSVVRSMGGAAGLPLRHGGAAGIGMGSLDTEMK

SEQ ID NO: 63705 - protein, 223 aa, Zea Mays
MLGTVGPPVQHIDVRLESVPEMGYDALSSVPRGEICIRGSVLFSGYYKREDLEQEVMIDGWFHTGDIGEWQPDGSLKVIDRKKNIFKLSQGEYVAVENLENVYGVLQDIDSIWVYGNSFESSLVAVANPNQQALERWAEQNGVTGSFAELCEHPRAREHILAELTKIAKDKKLKGFEAIKAVHLDPLPFDIERDLITPTYKKKRPQMLKHYQGVIDALYKGMK

SEQ ID NO: 63706 - protein, 92 aa, Zea Mays
MPCGLQRGNKSLRGKSTCRKQVCSFIPKGAFLCSPSTQSHHNCWYTVLIVAHVITKVQEYQKSRALMTCRFLHAASSIVHLQNHNGSKCCQQ

SEQ ID NO: 63707 - protein, 183 aa, Zea Mays
MEDGSAPRRSTPPTRRSRSAEFHNFSERRRRDKINEKLKALQELLPNCNKTDKVSMLDEAIDYLKSLQLQLQMLVMGKGMSPVVPLELQQYMHYITADPAQLPPLRPSGQQHRQFQITQANPQRQSNVESDFLSQMQNLHSSEPPQNFLRPPKLQLYTPRGGLPNTSHNTGWISGSSSYNFME

SEQ ID NO: 63708 - protein, 663 aa, Zea Mays
MAAPESECGGSDGYRDLRGVRVDLDTGAARAGGGGGFAVSFWLYLSVSARPSSVILHQITAGDDTKLPFLALGEGNKLLLFPLMRLHREAPAPASSYPWTDTTNLSSTSVCPLEKWFHIGCEVTENVMRLHVDGFLTAEAPLCSLFDEPDSQDDSNQISLVGNDGKLEGYIYNIEVSYVLGAIKEQYTKNPPFKLSIDYSCSDGIEEGDDGIWSIVGGKASCRRNFILEVVLTNAFGEPVKDKEVVSSLVYADDGTVVAKSRDDSEPPLLITCEGLEYAAISRPLPIIRGRALFKLKISQLSSKCDNKLFRIKFSTLHMQRYSFLEAYSKPIRCISRSRTVRPLGPTKRASSATANEIDMLSNGQGFVSTDKVNSRGHSVCLHTPMFPKIEDGMVEVVEAHKIVSQNKNARKVVVSKEAQNVIGTDSSTSNYDSFDSGSSWSGSEGDDDRVSLYSGCSHHRNQILMSKRLLREGADTWNMISKNNERALWSSAIPEIITKFTNIAHSVRRGLSEQDLEVLRGIAGCGEDIGRDEFDRLWCWLYPVAVSLSRERIKKLWDCTAPRWIEGLITTEEAESALRSSRELLKEAGTFVLRFPITRSWPHPDAGSLVVTYIGSDSSIHHRLLSLDSSDASAEKLQDLLLQEPELSQLGRVDRVSITIRR

SEQ ID NO: 63709 - protein, 216 aa, Zea Mays
MCRPNERAHISFVVAVALLHMTCLCQYADCSLYRSYPSIPRCDFADNFFFIPGIAAPVFAGVYTAHSLLSRGNEAPSDEGTNESDTVQEETKPPETGNCEKRKVRVQLYKLQEAESQASLLESCLKSLCTVGLLLGYSVLLLYSPETMAVVELKVGMHCERCIKAIKKAIKTIDDMESYRLETEINKVTVTGSVTPEEVVKALHKIGKTATCWTQD

SEQ ID NO: 63710 - protein, 54 aa, Zea Mays
MARRTGSSPTAPRSPHRAPTQKMQRSAEGKLTVDGSRVDRPWRLDHGGALNSDV

SEQ ID NO: 63711 - protein, 244 aa, Zea Mays
MAILLKKKRQQRLRMPWAGVRACRLVNTNLARLFWNHTSTCRGLSFSCFANATFCFIYCTIYMCVAVVIISHVRSQCRLVIHRGVVLGKASAAGAAAVLWCWFRVLCSLKRSSRSADCSLVSLSFFRVLPSSSSSSAPAQARGNAAVDDARSPSASSTRSLFTPATDSDDTLCAAPPPPDPVAVASSGKLSVSDGSSGCGDGSRTSLLSRRLIPPWRAAPEAPPLPLPRDRPSARPASSRCTSS

SEQ ID NO: 63712 - protein, 61 aa, Zea Mays
MERGFFCFFPIPSLARMLFAGKRPTKTCATGVGRRRREVNGRRKTAKRCECRTRRATVPAS

SEQ ID NO: 63713 - protein, 337 aa, Zea Mays
MAAAAISLPRSPSLLQPTRRRSAPPACTQSERGVSFDPGSAFYRSDSAAGRDLAVLAATLHRRRGRPDPSAPFLCLDAMCGCGVRALRYLAQAGADFVWANDASEALRPIILANLCRFERGSPEAVAGCRRWVVSHNDATRLLAERYLRREYFDVIDVDSFGGDAAYVRAALLALKIGGLLYLTSTDWRSARGYGSRSSLSSYGAYVRPMPYPNEVGLRMVIGGAAREASLLGFHITPLFSYFAYHGPIYRVMVQLCNGKDDGISNYGFICHCKSCGQSQTFGFDELGQISCGCTDTTVGCRFNHCCRPTLDRSSPRCLFPYRNARLGQRMGMGMHN

SEQ ID NO: 63714 - protein, 208 aa, Zea Mays
MPPRFRRCCAHRGSAPRPEKGEFCIDDIDLDEKSNKVKVTGPFDPDKLADKLCCKACKIIKQIEIVEPPPPPPEKPKKEEPAPPPPKKKEEPAPPPPAKVEPPPKEKPPPPAPKEEPKPAPAPAPPPKVVEVPYPWPYPCPYPYPAWPSDCCCHHGHGGCHCCSCGKAPEAPAPPPMPQYVPQPYPCGGGGGYRIVCDEDPSYACAIM

SEQ ID NO: 63715 - protein, 181 aa, Zea Mays
MFWRLQICFFIEEMRKYPVHSNGLLDPPKVLCDIVESLIGAIYLDSNFDQEEVFRTLADPLIGLETLGKHPVSELFEFCQKTHRGVKFLKDEWDKSLKVQVLIDGEVVGSAIYGPKKEIAQNRAAKDALDKLKDTHGHTQSESASVDVSEALDELDNTQSESASVDVSEALDELDIAGTLN

SEQ ID NO: 63716 - protein, 229 aa, Zea Mays
MASPPPTSLSSPHLIHLRLQPLPSVPPLHLTTLPFLRSLPLHLHSLRLNRPHLPPLPLASSGSGSDITGSGGEDDLPPSGGGGGGGGGEGDGEGEGDGSEGDSVNRREALFVLAQLGRKLESLPADLAAAVEGGRIPGEIVRRFVDLEASPVFRWLLQFGGFKERLLADDLFLTKVAIECGVGIFTKTAAEYEKRRENFVKELDFVIADVLQILCLYGFLLQPCLYSHH

SEQ ID NO: 63717 - protein, 214 aa, Zea Mays
MRASDIDIISSLEAGTSTSADAVEWAMSLLLNNPGALAKAQEEIDACVGQPARLIEAADLPKLQYLWCIIMETLRLYPPTPLLLPHESANDCTVSGFHVPMGTMLLVNTFAIHRDPEIWDRPGSFMPERFLGENSEGKMFNPFGMGRRRCPGENLGTQMVGLALGTMIQCFNWERVGDDLVDMTEGAGLTIPKKVPLEAFYEPRASMANLLSKI

SEQ ID NO: 63718 - protein, 171 aa, Zea Mays
MSLRPSEREQMRKGNYKQTVDAEESRRRREGQMVDIRKAKREESLQKKRRDGFPASAAGVPPMGHSTALQQKLDGLPAMVQAVHSNDPSVQLEATTQFRKLLSIERSPPIEEVISTGVVPRFIEFLTREDHPQLQAHQRTLRWWLRVVLCPSLSSYSTPSARMFVNRLYGL

SEQ ID NO: 63719 - protein, 397 aa, Zea Mays
MLLLCVPRTSRSDFIVSVNKYLEAKKQKISVGMRFKMRFEGDDAPERRFSGTIIGIGSLPAMSKSLWADSDWRSLKVQWDEPSSILRPDRISPWEVEPLDAANPQSPQPPLRAKRPRPPASPCMVSELPSGFGLWKSPIESSCTLSFSEPQRARELFPSIPTSTLSSSSNVSFNSKNEPSMLTSQFYWSARHTRADSCAASTNTVVIEKKQEPSSGGCRLFGINICSAEEEVLPEVTAPGVGYEQTAASVELNSDKLSQPSDVNNSDALAASSERSPLESQSRQVRSCTKVIMQGMAVGRAVDLTKLSGYSDLCQKLEEMFDIQGELGSTLKKWRVIFTDDEDDMMLVGDDPWDEFCRMVKRIYIYTYEEAKKLTSKSKLPVSSDSSKLSAANSLSE

SEQ ID NO: 63720 - protein, 170 aa, Zea Mays
MSWVQRPFYCFKILIIIEHSCVVSVACFVSHWQLKSSPPPTAPRQLAPENIRRGSAYQTLPHQGGWLASDGATKGMDGRSGRYHTNEYYASHNDMGLLNFNRTDIPDTETLVKKVERVLSRPDVYAIERAKELLIGQEQSLLDAIAKLDEASDHESDDTLVGSWIHAAIG

SEQ ID NO: 63721 - protein, 143 aa, Zea Mays
MTNWEKFCYRHCFDVPEGFVAADDDSSCANESQKDGISDSDLDLELDSLRRKFGSANKESENLERELSSLERQATFKRRLDSSVSEIEKLFEEEMVQGNLKDLVKAIPVLHQKIIDANQRRTEIRSLVDQQAWNTKRSRDSKP

SEQ ID NO: 63722 - protein, 63 aa, Zea Mays
MGFLDALYRVVMRRNAVYVTFVVAGAFAGERAVDYGVHKIWEMNNLGKRYEDISVLGQRPAEE

SEQ ID NO: 63723 - protein, 189 aa, Zea Mays
MKSSLLERMPVLDEANYLVKRAASIQAAVPSVNSAPAVTSGGPFKLPNGVGKPAAPLADLLDLSSDDAPVTTSAPTTAPNDFLQDLLGIGLTDSSPIGSENIRRDSMLQEIKSAYQILAHKYHPDMNKSPEAEEKFKEISAAYELGSDRCTLCRRLNLRFSSSLFIPWICPVVVQAFDFCYYNIQRRWR

SEQ ID NO: 63724 - protein, 538 aa, Zea Mays
MATAVASQPCHLPLSAGGDPRFICRSIVDVKTHKFHSRISKRKCYLRNSLSECDRTIHSGRWLEFRRHKGVFQRTRRMVHIIPLASDGDGNHISVNGALQVGSTSNIDEIKLKLNKALQSEDISNGLVQSIHDAARSIELALIEHSKLPKSSWFPKTWLGVENNAWIKSLSYQAAVDSLLKAVIDVSSRGNDRDRDINVFVQRSLSRLLTPLESVIKNELSKREPALYEWYSSDQNPLVVRQFVNIFENDPMFYSATAICLEGEPMNTSESDLSLLMLGLICLAAITKFGSAKVSCQQFSSMVPDIIGRFMDMLLEFAPLSKAYNLAKDIGLRREFLYNFGPRAAVPKLGNDHGLEISFWIELVQKQLLWALDREKIWSRLTTSESIEVLEKDLAIFGFFVALGRSTQGYLSFKGLTDLDDSLNGIVRYLIGGSVLYYPQLSSISSYQLYVEVVCEELEWLPFYNDDVLSAKTDTEGREEVPKGEVISRVLNVCSYWMTSFTKYSSWLENPSNVKAAKFLSKGHVMLSDCMKELDISR

SEQ ID NO: 63725 - protein, 361 aa, Zea Mays
MFIVNAGPGFRLLWNTVKSFLDPKTTAKIHVLGNKYQSKLLETIDASELPEFLGGTCTCPEYGGCLKAEKGPWKDPNILKIVQSGGVHCARQIVTISNGEEKFITYAKPKRHAMRGSDTSTAESGSEADDAVSPKALRSYISHPKLTPVREEVKMVRATSFSTRVPEYDVPVVDKAVDATWKREQPRKAPSVPQDSSVKTASKPSGRPWDKIAANLMACLMAIVMLVRSIKDLATMRLSSKGGSEESYCTLYPDSVQKEEFRPPSPFPGFAEADLFAVVLQRLGELEEKVQMLQEKPSEMPCEKEELLNAAVRRVDALEAELIVTKKALHEALIRQEELLANIDSKEIARAQRKKKTMFCY

SEQ ID NO: 63726 - protein, 845 aa, Zea Mays
MSDSDFLVNSFTKPSDNARPSRRKSKKKSKKHRQRCRKPTDGSEAKFREGNGAASAADVGDCEDSTLSPKHVGDIRFEETSPSSSVKEASEEAPESDDDEYHCCSGGSVSSASYCDEMELSKSTTSCPALCGQCPSSNLQYLDNTQNSAPTGPSQETCYAGSKANCNHDTKSLFIFRNERGSDPCEATEFCSSSSGFDENWIEKFDYDSGICSPKSVGTYGGDQAAHLCSDTTGDNDFCLVISRKRARKEKKMSLWKSYGAHASTPALDRNKKYVGHSSMQMTNEFNSNDWSHRQNHVSRIHPQHGNALKSSTKNFMQRPSIGCRETQYGFPAKESKLGASLNHSTGPREKTCGKLTGGFDKTAQQLYLDRDLSNALNSSESIRCETRSISSSEPTTPKSLKGNYTSESGESTDITIGALPMQKRRLQDLVRTDDASETISGRSSPCSESSTTELIAGHSTDSSIEGNHGCQGLCNSRTHLAQMLRVVNDACKVQVGADVLLAAGYPISDLEKFICSATPVIGRAPCMISNTCSLDQVVSDSVCQHDISNVSLRRIWEWYEEPGCYGLEVKALSNLSSKTSSSSSSEFFAYFVPYLSAIQLFGLSRNNMHHSFGVQGRELLISSNTASSMSSHPVHAKAHTLLEESNACLPESSLVVEDPGELIFEYFETEQPSLRPPLFEKIKELVSSANVSDHRVFGDTEKLQNAKLCELHPASWFCVAWYPVYRVPRGNFRAAFLTYHSLGKLVHKKCSMDTNDGHTQVVSPVVGLQSYNDKGEQWFQLRCPDLKQLPIEDSLKTSPAEVHKERLRTLKMGALAMARAVVPKGSGESVNHHPDYEFFLSRCA

SEQ ID NO: 63727 - protein, 127 aa, Zea Mays
MPGGGRCLAPSPTGRRPPDGDSGSDDGSCCSPYSTHMHACAPSSRRESQQRRRRRRRHKGIGITVSLHTDMAARSLGHARVRTAKSPRDTHRAKLPRNVTTSRRNVPGRPAPAPSSAPRAQGPASDT

SEQ ID NO: 63728 - protein, 247 aa, Zea Mays
MTMNAIIALSSLLLETELTPEQRLMVETVLKSSNLLATLINDVLDLSKLEDGSLELEIKAFNLHTVFKEVMGFIKPIASIKRISVSVMLAPDLPLCAIGDEKRLMQTILNISGNAVKFTKEGHITLVASIMKADSLREFRTPEFHPTASDEHFYLKVQVKDTGCGVSPQDLPHVFTKFAHPQSGGNRGVNGSGLGLAICKRFVSLMGGHIWIDNEGTGRGCTATFVIKLGVCDNTNTYQQQLIMKCI

SEQ ID NO: 63729 - protein, 147 aa, Zea Mays
MPRPAAHACAVGVPQHPHRVACLQSRPHPLLLAQRDHQRLDVHRPARVHAVLRPHPGAPRPVLHQGVWYDWAPLLLRRPSSNQGRLALAPRTHDPLLLYPQRRAPPSCFWQRKPSPCGKLPTRWNAQPLVGSTQPLRDVTNSGSQAG

SEQ ID NO: 63730 - protein, 221 aa, Zea Mays
MATASSPIDAQLTQALEHQTRAILAELDKRFSAIDSKWELRVGALESQAKEFARHHEDISSTIRADVEAHLSAADADTLDRIRYWEASTGARVTALESAIHLLDTWRPRMGSSVDAFHTSMDTVHAELSKMEIQWSNGARVDGFSRPSLLDARESAPARSPAPVSFADGSCFGPRLSSTNRDCGFGPYVVDLHFPVKGALPNARFGSSALGSSPTQDAASG

SEQ ID NO: 63731 - protein, 312 aa, Zea Mays
MDQIATPDETAHASAPSVHKLFDAKLGHHSVMDGTLASTSQSSNIKTQLIRSSSLSRSISVNLEKRSPESDPESPQSHVSHPKFAEPMFSNSSTFCTSLFSSSSTTEPCRQMGTLPFLPHPPKCEQQVSAGHSSSSSLLLSGDTGLDVAEQSDDLNDLLNLSGDASDGSFHGENNALAFDEQMEFQFLSEQLEIAITDNEKNPHLDDIYGTPPQLSSLPVSSCSNQNLGSPVKVQLSSSQSSSSSATANKSRLRWTLELHERFVEAVKKLEGPEKATPKGVLKLMKVEGLTIYHVKSHLQIRRLPRRIKKHN

SEQ ID NO: 63732 - protein, 60 aa, Zea Mays
MGANFQAVVKKSPRATVPLCIGGPGVRIVKKIPLGYGAAVYEWGRGSVVFSTCVRRYYSS

SEQ ID NO: 63733 - protein, 118 aa, Zea Mays
MDPRLFRQVGDEACRVGNVQRHGSYCQWQVQEAEAVAVLLWIHVDESLHGLAELLTVVGTGNEVDERSPTPTTPATPPPLASGRLLRFPRRTTRFPPDLGWRSGESPGDPAPHGSGLG

SEQ ID NO: 63734 - protein, 291 aa, Zea Mays
MTCCLPAIPLDGRFIRRCKQGCLQFVILKPILVVITFILYAKGKYEDGNFSVNQSYLYITIIYTISYSMALFALALFYAACRDLLQPYNPVPKFIIIKSVVFLTYWQGVLVFLAAKSGFIKNAEKAAYLQNFVLCVEMLIAAIGHRFSFSYKEYAGSNARPFGGFRGSLLHAMKFNDFYHDTVHQFAPTYHEYVLYSNEGEDEPTKYSPSTMVPTGEHIVELAEVTVVNSKAPGMSRFLMYEPDQAETMPSQVMEANRTASAEPYDLSSFLNVELSDHPDEVPAIPDAREQ

SEQ ID NO: 63735 - protein, 411 aa, Zea Mays
MSAGSTASLLAAVICLALAVLAPVVPGDGATLESVPDLVKAMYLNVESFPCVRLLNLSGEIGCSNPGSEKVIAPIVRLRKGSDQLVQPSTILLSLDQMSDFFLRVSNDPELHQKVAGVLVESNGVNNDLQELSPDRKFPQDDFAPYSNHSHDWNPAGSGIMWNKYNFPVFLLSEESTNTLQKISEKNEKTGNGYKANVAEFDLVMQTTKAQTHDSASCLKEQSCLPLGGHSVWTSLPPLNNGSTEHPKPLILAIASQDSASFFRDRSLGSDSPISGLIALLTAVDALSHIHGLSKLKKQLVFAVFNGEAWGYLGSRKFLQELDEGAASVNGISSLKIDQVSARKINTGRDSLRLQLIIFYFSNIYKSFFSSLFWVLCHDICFLQSLSANSNEFSFRNFTDSFESQAIYISV

SEQ ID NO: 63736 - protein, 608 aa, Zea Mays
MEPRHGRSAFTISFSNPNGFANQCTAIPAVSYSAAGSSQLDVLAPTRGCKRKWTELALGLGDTSSSDSSKQSMGTGCTVSSLKGSDDVSCMDYDISFKLSLGNEDTSKLHKQACGSKRTMEKPRLDLKLSLAPSQSDVTDADLIRSSAPQDMFVQPYLMSSVPTVDEGSTSARHPSGGMVVSFLNQAGISPNQLPPLNSHLVQGPACSAPTVLQLPKSSAATSSGFVRPQQRNGSTKICSEPGCAKGARGSSGRCIAHGGGRRCQKEGCNKGAEGRTIFCKAHGGGKRCERLGCTKSAEGRTDFCIAHGGGRRCSHDGCKRAARGRSGLCIKHGGGKRCQTLNCTKSAEGRSGMCIAHGGGRRCQYAGCGKGAQGSTNFCKAHGGGKRCSADGCTKSVHGGTQFCVAHGGGKRCVVEGCGKSARGRTDRCVGHGGGKRCHSAGCGKSAQGSTDFCKSHGGGRRCSWGHPGSDLGSGGAPCDRLARGKKGLCDRHNPLVHDNSVHGGASFGGFSVVSAAALSEGDGSPSPGTETSMRSFFMHAVEAPRCVAASAHEGRVHGGNFMPIMLDGGVGLGKRPADNADAGASAPPRSWKSMEKACGSAPRSWL

SEQ ID NO: 63737 - protein, 876 aa, Zea Mays
MVLQRNTSHLYLQYQICANACHLFCYLLLNIFLCCNRVSIFYWWRQISKDKIFEEIIKLEQSEVSASIIPCSGWALGNIVNLATNHDDLSNSGCFIQELDFCLYVDVINCISENLLESFEKSKGTSQNVGNITFHADTSVAEEEDTNDDCRMRTLFMDLLKPIYQQWHLRKLLMLAKEDFPCRRATDYDPNLKNIHFRILKLSDVICFYYHMLRIFSSLNPSIGAMPILNMLAFSPGFLVDLWEALEMPIFGPPIQNSQETGHEKQLATSSSGVQVSSMRQRRNAKDTANRWSNVLQKITGKSNDSEEGTLSDSILFSHESNDDALTSWDIEAMRHASEGIGKDLMCIMYLFCAIYGHLLLVLDDIEFYEKQVPFTLEQQRKIASALNTFVYNSFIQNSGSYSNPLVDVAVRCLNLLYERDSRHKFCPISLWLAPARNGRIPIAAAARSHEAAFGIFPGIPHRSSVLTTLPHVYPFEERVQMFREFIESDKASRRVTGEVSGPGPGSIEIVIRRGHIIDDGYRQLNCLRSKLKSCIHVSFVSECGLPEAGLDYGGLSKEFLTDLSKSAFSPEYGLFSQTSASDTSLIPSNSAKLLDNGIDMIEFLGRVVGKALYEGILLDYSFSPVFVQKLLGRYNFLDELSTLDPELYRNLMQLKHYDGDVEDLFLDFTVTEELGGKRIVHELRPGGKNISVTNENKLHYVHAMADFKLNRQILPFANAFYRGLSDLISPYWLSLFNANEFNQLLSGGLQDFDVDDLRNNTKYTGGYTESSRTVKLFWEVIKAFKPTERCLLLKFVTSCSRAPLLGFKYLQPSFTIHKVPCDVTLWASIGGQDVDRLPSASTCYNTLKLPTYKRSSTLRSKLLYAISSNTGFELS

SEQ ID NO: 63738 - protein, 1222 aa, Zea Mays
MASAPFPPVAASAASAPPRLAPRHPFAAAAAARRSSLSFRPAARRPVLPLRSSAVAANTLRCTHRRAVSSRSRRRAQELGAAPALAASTWGVGEEKGGCLSCFPKSRRGRSGLARFAPCALPHASGLSFRSRLSGSKVKPSHILHAAGPDEPHVASPTWSDTSLDTRDMDHAISKEELEDVLNTPLPEHPKLIRGQLKNGLRYLILPNKVPANSKKREKLLGTGARSNAYTDFHHTVFHIHSPTKTKEYGEDLLPSVLDALNEIAFHPKFSSSRVEKERRAILSELQMMNTIEYRVDCQLLQHLHSENKLSNRFPIGLEEQIQKWDPEKIRRFHERWYYPANATLYLVGEIDDIPRAVREIEAVFEHTLSENEGNPVPSTSPFGAMASLFAPKLPSGFTTNLTGEKSPATDKIKPVKRERQAVRPPVEHKWSLPEVAQDAKPPAIFQHELIQSFSINMFCKIPVSKVQTYKDLRSVLMKRIFLSALHFRINTRYKSSNPPFTSVELDHSDSGREGCTVTTLTVTAEPQNWRSAIKVAVHEVRRLKEFGVTMGEMTRYMDALIKDSEQLAMMIDSVPSVDNLDFIMESDALGHTVMDQLQGHESLLAVAETVTLEEVNTVGAEVLEFISDFGKPNAPLPAAIVACVPKKVHVDDIGETEFEIYPEEITEAIKAGLEEPIYPEPELEVPKELITQSKLDELKLQHNPSFVPLTKEENAVKVFDSETGISQRRLSNGISINYKITQNEARVGVMRLIVGGGRATEDSESKGSVIVGVRSLSEGGCVGNFSREQVELFCVNNLINCSLESNEEFIFMEFRFALRDNGMRAAFQLLHMVLEHNVWLEDAFDRAIQLYLSYYRSIPKSLERSTAHKLMLAMLNHDERFVEPSPHSLQKLTLQSVKDAVMNQFVGSNMEVSIVGDFTEEEVESCVLDYLGTVRASSSPTIEERIEKISFRPFPSDVHFQQVYIKDTDERACAYIAGPAPNRWGFATEGNDLFNVIQRSDADAEISEPVSLDLTGKRHINVRSHPLFFGITLSLLAEIINSRLFTTVRDSMGLTYDVSFELNLFDKLDLGWYVIAVTSTPSKVHKAVDACKGVLRGLHSSRIVERELDRAKRTLLMKHEAETKTNAYWLGLLAHLQSSSVPRKDVSCIKELTTLYENATIEDLYIAYEHLKVDDSSLFACIGIAGAESGEDTNDDEPDVDLHGMGPMGGRGLSTMTRPTT

SEQ ID NO: 63739 - protein, 507 aa, Zea Mays
MEVVQQDDEALVKLENAGIERSKAVDSAVLGKYSIWRRENENEKADSRVRLMRDQMIMARIYSVLAKSRDKLDLYQELLARLKESQRSLGEATADAELPKSASDRTKAMGQVLSKARDLLYDCKEITQRLRAMLQSADEQVRSLKKQSTFLSQLAAKTIPNGIHCLSMRLTIDYYLLSPEKRKFPNSENLENPDLYHYALFSDNVLAASVVVNSTIMNAKEPEKHVFHLVTDKLNFGAMNMWFLLNPPGDATIHVENVDDFKWLNSSYCPVLKQLESAAMKEYYFKADRPKTLSAGSSNLKYRNPKYLSMLNHLRFYLPQVYPKLNKILFLDDDIVVQRDLTGLWEVDLNGNVNGAVETCGESFHRFDKYLNFSNPNIAQNFDPNACGWAYGMNMFDLEEWKKKDITGIYHKWQNMNENRLLWKLGTLPPGLLTFYKLTHPLDKSWHVLGLGYNPTIERSEIDNAAVIHYNGNMKPWLEIAMIKYRPYWTKYINYQHSYIHGCKISQ

SEQ ID NO: 63740 - protein, 306 aa, Zea Mays
MASEAESPVVIHAWSAPRSLSTSLMYSFAQRDDMEVLDEPLYANFLRATGVDRPYRQELLSKMDPDGNKVVKEVIFGPGDKKYRYCKHISKQHLPNLSSDLMKKGKHFILIRNPLDILPSFDKVVPPSFMELGIGELVSIYSELCGLGSPPPVIDADDLQQDPEAVLSGLCEDLGIPFQPQMLKWEAGPKEFDGIWAPWWYGSVHKSSGFSKPRQYPLTFPFVFYDLLEQSLPFYNMLKRQIRKIRGPQQPPLSDPPLPVPANKNILVWVGDELLPRNSAKCLIQLYKEEMLFGKVYVYMMEKYSN

SEQ ID NO: 63741 - protein, 888 aa, Zea Mays
MCKEEHLRGDSAEAARATESDARDLLEKEIIELKTQNMSLKQTQNTCKNNDELLRISELEEENRKLIQILGEERKKITSEKKKIEEEKCKTLEMQRIWKSEAQKSEEYRRVADTERKVANDWRASCERLRSEANELRAQLTAQIQKTEEILKRAEAEKQKVAREKKRADSEKSLSEKNRTLVEVEKKKVTEEKCRADNLFAKLEEQKKLNEHLRTSIQVETKNAIEEKKRGDHLFQKLEEMREQTECLQRKANEFSAGRDVISSGKCGRRHIDRISENANVKLLKEKLKLKKEQLKHVKNVSKLDKAKTALIRRELQSLKQDWTQLLGRFNMLDDHLARGVEDIHVLTQAGTVPFGSSIPSEYTSYQLPRESCSRSISGTSSELCPPLGSSHRLLKSKCQHRSSCPTSISDEKFMGSQGKDNLFVSSTDIRKKQDSVVPELAPKIRNDRALPCGTLTDRRETLGGDRKRKHTKMSQDPSAFLPSKNDLLHLKSKVPATTSNVALSFDDDPLCLQQGNNTICVTEGDMDKAPSFSFPSKVSCGGNGCTSSKFASLIPFEEMVRENCLKLLNLDDDADEEKFRKAKERPHSPNLSIIRPRRTKLPTYAEPHSLGRSLNGCPALGSDAIDSKTRSKASEVKEPVIQKSTQNYIQLDPSSNTIECSGIAKPLFVNDKSNAAVNVSCSTSLVVVPASTSFDSLLHEHVAQNSVASSAEALDSISRPMLSGGGHSDSILHLSKEVSNKNNSHLICDKSSPGLQANVRTSETTVTKPNNSVSNSLLRHHHGSENPPLHLVGFTRMKRSKMINIFRYWEILSSQSQKHSDEASVDGPLLDKVSTDTMLPIDEKVSLIFSLLLWDTRFTEETFVDGNFASSAFSSSGRFFLQEGTTS

SEQ ID NO: 63742 - protein, 247 aa, Zea Mays
MLDANLSPESLKAACIMAYEFGVPVLFEPVSVVKCRRIAPVAEYITCTSPNEIELVAMANSLSPSVKYNFHTIEQFKEKADTVEYIFQMLSPAMFFLLEKGIKLLIVTLGSNGVFICCKEHTNFMKDQHKCKQTPFSRQLLEKMDGCFPSNNLVNLCRESSSRTCVFHLPAISASVISLTGAGDCLVGGALSALCAGFDIIQSVAVGVAIAKASVESEANIPDDISAASIADDAQSVLHSAKVLWCK

SEQ ID NO: 63743 - protein, 219 aa, Zea Mays
MSMNDFETCEKFLMDTLTCVEERKKYLLCNHVAPFDPSASDMQQHVDMFALPPAPPHQQEQQGDDLGGAASAFGGDVSWFADGMPTSSIFAASDPILYFRDQVMFDSTSTMRRDSMVAGVDPGMTSVCQMEQQAPSVDWQQAYTSAEFFSTLIPSTPYPLDDQMQNDMAQVLTSPMVPPHEHDKVEVPMSSSNVPTDGDCGTTLAAAQEDGLPGVVNIG

SEQ ID NO: 63744 - protein, 603 aa, Zea Mays
MKQFDNEVNILMELRHKNIVNLLGYCHEVRGTYVQYKGKPVFAETSEQLLCYEYLHCGSIDKYIFGKNHELDWHTRYKMIKGICEGLHYLHENDRAPIIHLNLKPANVLLDAAMEPRITDFGLSRLIGEGNTRIVNTHTPGPIGYMAPEYRYMGEVSRKVDIFSLGILILEIVTGQDNSTKVDFIDHVCEHCMEGPQIKFMYPSLEPELHDQVELCIKIGLECVQTDRKKRPTAGDIIRKLEEGTKLGPTPSRENITTEIGKPQMFSFELLNDITESFSPGRLRGTGGFGYVYEGIPHGNEGAMAVKRLKEKIGISPKQFENEVHNLSRIEHRNIVRLIGYCDEIREILSHGKNKNDPPIREHIQERLLCYEYMPKGSLDKIIYDNLDWHTRYKIIEGICHGLHCLHEGQQDIQIAHLDLKPANILLDSDMVPKLADFGMSRLFSLEQVYILASKPMGTIGYIAPEYLDHKKVSTKADIYSFGIVVLEIVTRKQCPRSYADINAQHFIHHLRQNLTKDNYVKSMYPALEADCLQQVKLCIEIGLNCVEKEPTKRPTAREIISMFNQKKDSSRSGVSNCIVNVIEAWLSRLPWHPWPLTLLRQT

SEQ ID NO: 63745 - protein, 388 aa, Zea Mays
MPCLAFAYLLIEPSEQGETRHRVRPPHPPPLRSSSPPAACLNGSTRQEGGRKETVDQSLRRRPIHHRSDEREEMKIIIDTDPGIDDSVAILMAFQMPGVQVLGLTTIFGNCTTEHATRNALILCEKASHLEVPVAEGSHEPLKGGKPHVADFVHGPDGLGNVDLPDPTIKKVEESATDFLVDKVSRFPGEVSVLALGPLTNIALAIKKDPSFVKNVKKIVVLGGAFFAAGNATPSAEANIHSDPEAADMVFTSGADIYVVGLNITTQVSFTDKDLLELRNSQGKYAQFLCDVCKFYLDWHTESYGAPVIFLHDPVSFAALVRPELFTFKKGVVRVETQGICVGHTSMDMLLKKWNSENPWTGYSPISVAWTVDVPKVVAFVKELVTKP

SEQ ID NO: 63746 - protein, 623 aa, Zea Mays
MEDFARAVEDGLKLSKRLVLPGGVPPPRPPAGMERTVSAASASGPDPRLLPTAPMAYALVTDPAAVDTPDVPSYQPYVYGDLDPPALIPLQMKEVDLAVDCALDAAHVTLRARWWLHCITRSRDSDVRLVVPLGEQGSILGAEVTVGRRSYNTQVIEVEDHTLEKHAKIESGGLLQPHLFFLTIPQVEGGADICATFQWSQKLLYDSGRFSVDIPFRFPYFVNPLPKVFMKKEKIQLTVHSGFSKEILLQGTSHPLKEKSRQGDKLFFHHEAIVENWSIKDFNFSYNVYSGDLSGGVLVQPATLCDYDDRDMFCIFLLPGSGNRKVFGKAVVFIVDTSGSMQGKPLENVKHAVSTALSELVEGDYFNIITFNDELHSFSSCLEQVNDKAIASATEWMNANFVAEGGTDIMHPLSEAMALLSSVHDTLPQIYLITDGSVDDEHNICRTTKTDLSNRGSRSPRISTFGLGSYCNHYFLRMLASIGKGHYDAALGTASIENQILKWFRRASSTIVANISIDALTHLDEFEVDSEYIPDLSANSPLCVSGKYKGKFPDTIKAKGYLADMKEISVELKVQQLKEIPLDKVLVIQQIDFMTSKAWMSADKQVERKVGHLIRQMIALGCV

SEQ ID NO: 63747 - protein, 193 aa, Zea Mays
MMKDAVIEHGESSMAPLVAASVAAGGVGRAVSIADVFLRFLAIVATIGSAVSMGTTNETLPFFTQFIQFEAKYSDLPSFTFFVAANAVVCTYLVLSIPLSIVHIVRPRAHYSRLILVFFDAAMLALLTAGASAAAAIVYLAHKGNVRANWFAICQQFDSFCERISGSLIGSFAAMVLLIALIFLSALALARRH

SEQ ID NO: 63748 - protein, 132 aa, Zea Mays
MSRVRYSLPITLSLTPLMSRKKRTHQWRHEVRRRPLNSRPPLPLSGRLSLFPPALYKRQQSLSPFSCLPSSPHLSSSPVHCSTPSFVAVRRRSSRSPQFVAGATHSPSVVEPCSSPGQNPVESSLSHSRTQG

SEQ ID NO: 63749 - protein, 388 aa, Zea Mays
MRDLSGFVETRQQLLSLKPNHRMNWIGFAVAHHLNSNSSKAVEVLEAYEGTLEDDYPPENERYEHNEMLLYKISLFEECGMLDRALEEMQKKESKIVDKLSFKEQMASVLFKLGRFDESESIYRSLLFMNPDNYKYFIAVQKCLGLYSDNGQYSAADVERLSALYNSLKEKYAWSSAVKRIPLDFLEGEKFQEAADNYVRPLLTKGVPSLFSDLSPLYEHPGKANILEQLFLKLEDSIRDSGCFPGCPQKEPPSTLLWTLFLISQHYDRRGQYDIALNKIDEAISHTPTVIDLYSVKGKILQHAGNFTAAAALADEARSMDLADRYLNSECVMQMLQADQVGLAEKTAVLFTKDGDQHNNLHDMQCMWYELASGESYYRQVSGSFACS

SEQ ID NO: 63750 - protein, 779 aa, Zea Mays
MNLSPPRMSEPSLESDGEQRCLNSELWHACAGPLVSLPVVGSRVVYFPQGHSEQVAASTNKEVDAQIPNYPNLPPQLICQLHNVTMHADAETGEVYAQMTLQPLSPEEQKEPFLPIELGAGSNQPTNYFCKTLTASDTSTHGGFSVPRRAAEKVFPPLDFSQHPPVQELVARDLHDNEWKFRHIFRGQPKRHLLTTGWSVFVSAKRLVAGDSIIFIWNDNNQLLLGIRRANRPQTVMPSSVLSSDSMHIGLLAAAAHAAATNSRFTIFYNPRPSEFVIPLAKYVKAVYHTRVSVGMRFRMLFETEESSVRRYMGTITCISDLDSERWPNSHWRSVKVGWDESTAGDKQPRVSLWEIEPLMAFPMYPTAFPLRLKRPWASGLPMFNGGRSDEFARYSSLMWLRDGNRGAQSLNFQGLGASPWLQPRIDYPLLGLKLDTYQQMAAAALEEIRAGDHLKQISSLLPVQQPQNLSGGLDPLYGNPVLQQMQFQSQQSSLQVVQQGYGPNASDSGFLQNQLQLQKQQEPLPQQQQQALQQQSHQEMQHHLSASCHDIANVASGVSESGSASQTESSLLSGSSYQQIYDGNSGPGLHLHNGFHNCSSQESSNLLNLSRSGQFMASEGWPLKRLAVESLSGHELQPVQHKFEKVNHQSNVSHISSTLPPLSARDSYSAQASGTNDQSHLLSSSFAIHDGLTAVRSGGVGSGTDAITIASLRYNDMNLLPENPIATSSCLGESGTFNSLDDVCGVNPSQGGTFVKVCNLTYAVCSLFIKWHVKLPSW

SEQ ID NO: 63751 - protein, 61 aa, Zea Mays
MIQLILMSIYYTCIYLYNNFLCIWLYCKYYCLFTVSRWGVRMDASSSSKLNSPGLFRDSHA

SEQ ID NO: 63752 - protein, 138 aa, Zea Mays
MERLFPSAPLELQGSAEPSNPPRQTTSSSTKPATPRPPAPRTMRVLGLYEPMSKLASSGSTLLSLPCLSLSLFISNAKALVSLSVARRAAMEIEAGSLWRKGLAEIWCMRVVATASGRSRLSAWPHARASLARREGFA

SEQ ID NO: 63753 - protein, 141 aa, Zea Mays
MTLRGDPEGGEAVRAGGGPVLHGAGVGGGAVAVLLPGRGGRHLLRAHAAGGHPHRRVHPGDGGGGRHLPAREVQQREGRGAGALALGPRVLLLRRVEPGQGQEGEEERGGRRRSGPGSPMIRAPHTQTQWSAPLYSLSVCM

SEQ ID NO: 63754 - protein, 358 aa, Zea Mays
MEQGSGVVAKRLLWASASGSFEKDNIGEDAVLPSQIAVENKVDFLKILKSANSIIPHIVLGSTILALVYPPSFTWFTTRYYAPALGFLMFAVGVNSSAKDFIEAIKRPDAIAAGYIGQFVIKPLFGFLFGTLAVAVLNLPAALGAGIMLVSCVSGAQLSNYATFLTDPHMAPLSIVMTSLSTATAVFVTPTLSYFLIGQKLPVDVKGMMSSIVQIVVAPIAAGLLLNRFLPRLCAAIQPFLPSMSVFVTALCVGSPLAINIKAVLSPFGLTIVLLLFAFHTSSFVAGYHLAGTWFRKSDDVKALQRTISFETGMQSSLLALALANKFFPDPLVGVPPAISVVLMSLMGFALVMIYIFF

SEQ ID NO: 63755 - protein, 142 aa, Zea Mays
MCYGDFYAMAFAMFLIVYGISFPLDEGVAHSLSIAGTLLYIFTFAIGAGPVTGIIIPELSSARTRSKVMGFSFTVHWICNFLVGLFFLELVHKFGVGAVYAGFGGVSLLTALFAYNFIVETKGRSLEEIEMSMSSATPGKQE

SEQ ID NO: 63756 - protein, 325 aa, Zea Mays
MMCLSCSPSGDGVVMTTVAVMEQWADKQQQAASTNAAAAAAQMPFLALLQGAGVVVEAEQQEEQHHDGRKRQAFARAVSDLDLLESCVTQAVAPAAAASAPVAGRTERRRKRQRPRARAAPPPEKRKKPEEAESQRMTHIAVERNRRRLMNDHLASLRSLIPSSYTPRGDQATVVGGAIDYVKQLEQQLVALQAAAAARRGVAGTGAAAVATVASDGVFVSPQYASYSDSRGAGAGVDVEATAAVGGHVRVRVAGRRWPGRLVRVVAALEDLRLAVLHLAVTSVGHDAVVYCFNLKMEEGCEVATADEVATVVHQIFAYAAGACC

SEQ ID NO: 63757 - protein, 126 aa, Zea Mays
MVYGKNREGEKDFRGMYCVVLTASTHVVSAAILKVRVEHAAELVLIATRSECRKKGYFRLLLESIETNLRACNVSLLMAPVDPEMAQIWSDKLGFTILSADEKKSMLESHPLVMFKNLVLVQKPLA

SEQ ID NO: 63758 - protein, 131 aa, Zea Mays
MRRLTAWDFAMGSETRRRTARHDARRREQAWLPWAKWRADGEQQGDDGLQQGAGARLGHQGAGETPASSASCREKGGARWRAHGGHGGRRAGAETCQGRARPAPWRAPPHAHALAVAADCARTARKLKQGS

SEQ ID NO: 63759 - protein, 124 aa, Zea Mays
MPMQPQAPSMTPAAGITTEQIQKYLDENKQLILAILENQNLGKLAECAQYQSQLQKNLLYLAAIADAQPETAVSRPQEINWEACTTFMALSWWKHVYGNDEKAMCQVSEIALKNRAMLACAHVK

SEQ ID NO: 63760 - protein, 813 aa, Zea Mays
MVGSSVEGGADGDGGCCGVGDTSPGTIVWVRRRNGSWWPGRILGPQELPPSQIMSPRSGTPVKLLGREDASVDWYNLEKSKRVKAFRCGEFDACIEKAEATQGTLVKKREKYARREDAILHALELERKQLASKYQTQGFRPGPPACTKHHKDLGSTRYKSKKGKKRKDASVPPDVKKEVGQCFLPAGSKRNFSGSLTQGNLVSNHMGDFSPLGHSHGGATLENKESTVVKKNRSDGSDFEDSLVSKSDRRRPLSQVLQSSENLLPHLKQNDDFGALLIAESNNPSLAASWSRRNKYTYMASDSGETESHSDLPSIKMSSTRTDFENESYLQHPVYFSEEQTSDFIEKQITESSERECSESETEDDAELLQNASVILRTESHAPCPYSIPVSDKFKHVDYDDNEVIYSTYMPQLNEYEEEDGSSELGVSQWHMKGKRNNRNAVKRLVDMRDGNTWLNKYNGSLKGSLHNTNGGNPRKEGMHTSGEQFFEESFYQIKEEPNYDSDETNLFENMSHSETNLYYGKKYPSSLRTTRDLSRGYSYFNDSSNVSPLNKDTERIYHVDRNAYWDRPSFYQRKLTSSFGGMGPMLFNVNLKVQASYQGEHVPLVSLMSRLNGKAIVGHPIQIEIVEDGSTAVFCGDSGMQETTAAPPAWPTGRRTAMQRVPRSNPSGALLDGDNEGGLVYSDYETKPTLRKYSSSSNHQVKVNNKISSNAKRSSAKPPKKSSKKTNLSSQKLRALSSISTAKNHHGEGGQAKANWHNDIFGGLIGSEGAVPLVTCVPTKVVFTRILEAVGRPPLSAARRVRMASPPVRDPP

SEQ ID NO: 63761 - protein, 157 aa, Zea Mays
MARERREIKRIESAAARQVTFSKRRRGLFKKAEELSVLCDADVALIVFSSTGKLSQFASSSMNEIIDKYSTHSKNLGKAEQPSLDLNLEHSKYANLNEQLVEASLRLRQMRGEELEGLSVEELQQLEKNLESGLHRVLQTKDQQFLEQISDLEQKFF

SEQ ID NO: 63762 - protein, 587 aa, Zea Mays
MAVLTKGLDHFRSGILQQKPFMQSPQQFQQLQFLTPQQQQQLLLHAQQNLSSSMSSDVDTRRLRMLLNNRNVVLGQDGQTNSGGDVIPNIGSPGQSGGSRNDIDILIKKKFALLQQQQQQQSHSQQQQLQQPALSGQQSQSSNQLLHQHGKPGVGSLPIDGNLPNSFGFPEQGSKKRKKPVSSSGRANSSGTANTAGPSPSSAPSTPSTHTPGDAMSIPQLQYNGGPSKPLMMFGSDGTGSLTSPANPLGDVERLLEDGSLDENVESFLSQDDMDPRETMGRCMDSSKGLGFTEVAKARASTNKVVCCHFSLDGKLLATGGHDKKVVLWFTDVLKRKSALEEHSSLITDVRFSPGMTRLATSSFDKTVRVWDADNPDYSLRTFTGHSASVMSLDFHPNKEDIVCSCDSDGEVRCWSINNGSCVTCVRVFNGGATRLRFQPRQGKYLAAASEKGISILDAETLQVCRTPLQGHVQIIQSVCWDAAGNYLASVSEDSVRVWSFTSGNYIECIHELICSGNKFHSCVFHPNYPNLLIIGCYESLELWDIREKNTVTISNAHDGMVAALAASSASGLVASVSHDQLVKLWR

SEQ ID NO: 63763 - protein, 279 aa, Zea Mays
MYLFLLFSWKQGVSSQQTTEGTGVFGRFRFLNQRVSSQSEDSLSCHRIDLRTSTIKIDADENDLRFCFRIISPVKAYTLQAESGADQKDWIQKITGVIASLLNSPFPQQLSYGNVAAESNRSTSSVDSLSIEDNKSSEGHDDIFNLLRNIPGNDSCAECRSPDPDWASLNLGILICIECSGAHRNLGVHISKVRSLRLDVKVWEPVIMDLFHALGNDYANSIWEALLPKEDQGMNDSNGAILFIEKPKPSDAFSIKESMWTNCFLPEIPIRIPLIFWKP

SEQ ID NO: 63764 - protein, 289 aa, Zea Mays
MATYYSSPDSERDSQTMYSTESGNASYPVPSALGNFLYLNSASSGPYTEFNGIVQSQQNFMELTGHPSAISHDSSSNEATNIGTSLTEQRSFGPLKDMRNEMLMHLMDGAHSSGSDLIHNDDHSTAQLEFGMLNNHNSTSLPSASGQGLSLSLNTHILAPSYPYWSAKQDLLTPNSYQGDDNRMKNMQSEASQAIRNSKYLKAAQELLDEIVSVWKSVKQKTDKGPSEAGKSDGKETDGGTKSEGVSFDPQESGANTAAELSTAEKQELQNKMVKLMAMLDERNTRGIP

SEQ ID NO: 63765 - protein, 577 aa, Zea Mays
MAKAGLDAVRSKKIEIIPQQYEQDWYRWLENIRDWCVSRQLWWGHRIPAWYVTLEDDLDKNLGSNNDRWIVARNESDAKLEAQKKYVGMKLRLDQDPDVLDTWFSSGLFPLTVLGWPSDTTDLRAFYPTSVLETGLDILFFWVARMVMMGMQLGGDVPFQKVYLHPMIRDAHGRKMSKSLGNVVDPLEVINGMSLDGLLKRLEEGNLDPNELNIARDGKTKDFPDGIAECGTDALRFALISYTSQSDRINLDIKRVVGYRQWCNKLWNAIRFAMGKLGDDYIPPATVDVSLMPPICKWILSVLNKAVGKTVTSLEAYKLSDATSAIYSWWQYELCDVFIEAIKPYFSDSQEFESARAASRDTLWICLETGLRLLHPFMPYVTEELWQRLPQPKDSSRRKDSIMISEYPSLVEEWSNGGVENEMDIVLDAVNKIRSLKPPTDSNERRPAFALCRGQEVAATIQCYQSLIVCLSSISHLKILTESDETPADCATAVVNKDLSVYLQLQGDLNEDAEREKLRKKKDEIQKLQNALAQKMDASGYREKAPQSVQEEDMRKLTALLEQLEVISEAEKKLDSN

SEQ ID NO: 63766 - protein, 886 aa, Zea Mays
MPPGGRRGAKQRSNWTREPQLGDLVLAKIKGYPSWPAKISKPEDWKRKPTPKKFFVCFYGTGEIAFVPLADLEEFTEKKKNDLLDRALKVQRKYVQQFNVAVEQICKAYNELPKTSEAANVALPDQSEKTTEHLVRSPDIGGTPGLGQMEDDPPTDCSSTSGQGSGTEEDVKDGGHEIGDNSLAVPQKKASLQQDPKHPKTKKSAASKSGFDMYTEQEHSPTSLRAERQIEEVKIEEESCHLEGFVLEPNLEVVCALEVPKNFKSNKLLRNAESKENEHVGVGSPTGRIAVEAASDVVLNMSAEEESREFKKSKIMTKQSLTTGSEKRDNKIVHGKPDKQLTGKSSAGFSLNQKSLTGSGQHKMDSSADTRPAKKARLMDRAGETDKTVAKSETKLNINYENHNAVKHEQSTAVETCKNTILKTGIGDDRARKSGGAVSPISKLHSEIMEPASGSSVTQSTVADSLKKGSSRKEDVSRVDRKLVKPKRRACRFDDDEDEGQQTPLHRTSAKSLSTHIVPTEKPGSRGNFASHVGNASGKKPGPAREEKSRSVRMSPVKHEPVFSSPSQDKVHARHQLMGRNLITGSVETPVIGNKMSLVDGKSSAQVKMPACSEVKKLHSTSKPLQVTSGKSHSRNYPASEKIALVPKSEETKAKSKPATSVEHKVATTLSTERTGKRDHLKEERSSSVDKAAYSEPNPDSAKSIKHLIAAAQARRNLMASALAKFDGSSTDNSAITSTSYGLPRLSPSPVFRIPSPPRIAFPESPGQRILKSPMELDNGHGKSPKSRQASGSPSGGSDAAIARDALEGMIETLSRTKDSIGRATRHAIECSKYGIAGEIVELLIQKLENEHNLHRRIDLLFLVDSITQCSHSHRVGHLAAWLCRF

SEQ ID NO: 63767 - protein, 72 aa, Zea Mays
MKLIKHPNVVQLHEVMASRTKIYMVLEFVDGGELFDKIQENLLLDSNGALKVLDFGLSAFAPQTNVRSLVSS

SEQ ID NO: 63768 - protein, 785 aa, Zea Mays
MAMIFQVIGLHGGALLGVTYRTSRRISPLTATAISTVQSMPLSGFGGSGSSFASDDPFSSKEGPPQNFQLYSWETYQPVSGLLAQPEWTVWDQTVEYCAFAYQQYIVISSLRPQFRYLGDVSIPFATGAVWHRRQLFVSTPTTIECVFVDAGVAAIDIETKRIKQEMKAREAQSRAAEEHGDLALITVEAPQVTVSEKVSLRPPMLQVVRLASFQYAPSIPPFIVPKQSKFDGDDSVFQKELDDRRYAEVAVAGGGVSVAVTRFPPEQKRPIGPLVVVGVRDGVLWLVDRYMCAHALSLSHPGIRCRCLAAYGDPVSAVKWATRLGREHHDDLAQFMLGMGYATEALHLPGISKRLEFDLAMQSNDLKRALACLLTMSNSRDVGQETAAADATDVTQILSLAVAKQAKQESLTDAVQGIVKFVKEFFDLIDAADATGQSDIAREVLKRLAAAASVKGALHGQMLRGLALRLGNHGELTRLSGLVSNLITAGHGREAAFAAAVLGDNALMEKAWQDTGMLAEAVLHAQAHGRPSLRNLVITWNKMLQKELDHTPTVKTDAAAAFLASLEDPKLTSLGETEKKPPIEILPPGMPPLSAPPIVIKKAGAKPGLPNAAKASNGPIGAPMAQGAPMAHGTPGPQGVPMNQVTPSQGSHDEARPSDATVADAAAAVAEGTAAPPAAEGTSAPPAAEGTATPSSEEAKAAPGNEEGTSNPINEEATAAAVSVAAGSPDSAAAPAADTSSDAPAVNPTEDTVSAPSTEAPPELTDKPSSAEASLPPPPSVSGV

SEQ ID NO: 63769 - protein, 1953 aa, Zea Mays
MDLAGMKRRELQALCKRHGLPAGGTNADLVGRLDAVLSGPAVVEEEVAGVPARKGCLKQTGGGATEAKKVTFGAEVGKARRLRSRVIWSPVVAKTRGKSARAGTDSAAEDGISADVGADVPVRRSRRNSFNPAEAEEAGEAVAVDRKPKRKNQENDEGVAVIAQARVTRRSNLEWSATVLPPAVEKKRGRQNAAESDVQKSALVEVTARTTRSRSIVPVVVPPTVVENKRRKTGDPQTTVELTMLSDVPRSDFPATRSLRNKIVHVNNSVVDETHTTRQLENKMRPSTRRHQQVASSPEDKGQKIPATSKSPLLRWSRRNYSEANSANSVNIKLAKDSSTAQPLAHHNSHSEDLEKQPAVKEPIKRSTRKSIALAALEKEKDVIEGKNPEAHVRRSTRKSVVQVKDTKSIVEETQYANSEDVAKQPATKGPARGLRRKSVITELHEKEKSLIAEKNMETDEAILTRKPVIPVKNIKAVGEGIQIGKGKDVDKQFVVKQPTRRSSRKSVLPDMLENNSGLLAPKMNAEMNVRRSTRKSVLPDMHNEKQDHHKMARNENLQSGKYQDGEKQQKVKDSIRQSRRSIATVLLEGQNNDEGKKFKNPTRRTTHKSHALNAVEEVSMDHIEVGEEGLKLRKRSRFLLEISSSANVSWKHQNAQISNEKDNTEGSQQASNCTTSKRRSSKKRRTTAPEEVMPFKVANDDIVIMEETKDTLEYNNESSSKVQEICQVNAAREEFSSGPLLVTVAPSDEICTVQSVAVVIPGSESGDDANQSSDKSKQPQEHSVTQTVDDHLSETRSGKLDQSTCITGLVSDNCVVSEDKTLMSEDREEQSPVSGEQRVSLEANANEPEEKNLANVTSTDLHTKSLQHDIDRIAKETDKEHEEKYAVSPIAVEKSVSREASACESAGKPLTVIFSNDLHTKHLQHDCDVLIKETGEDVLAQENCNDQPVPAQTDLEMKLNDELADPEVLAQENCNDQPVLAQTDLETKLNDELADLAMESGCSITERNEGLVAHNLDQEGFLEATPECKQECGLPEETVISSKETGSLLCADQSPIGLESLFSQESIVESVGHCALASATTHTENGFDDSKDCHNKSALENVHVPEPCSHNDTKGGIFKNVDCMHTSQRDDRMEGVPEANTDEEHVLSAFLLDANHLNVVINSEEVVCEGEDSKELLHSEDCKASSEKTDVNDGNVYGISDAVVRCALHAPADDNYEIFLGPNTDVPRQVYNDGCSDVKEDRFASKPWTIDIIEDASVKERSNLKDWQLDSKLEGTEIVESGLYFNKDIGNILHSGSIGEITPSGSGLSKDSSVDYRGEVLDGFSMEASLERSSTRGEQNGCRLDAIENPSITLATSGYKHEGALSEEAVYTKKNYAGTCLSNPRELIMELQSHFSKENINESDPHDSLVFPTAENSADEQLVKVHHGSNLSQLGLTDLLDGPIGCSNTDVLCQCDNHKNQSNEDKVEEVEAVSAAKYIESEVVLLPSQERSNLNNEQLNTKLESPNIMGSCLNCDNDVCNTSDNGSVFVIGKRTPSASGLPEDYPKDSDLQQPVLDSFSVVSSFQDNISGKKTVSGVAGSEILSLSLATPDYKHEDGFSEEAVCRTKNYTGTSSVDPRHLDMEGHSIYSEGDTYQGPCQDLGRHEEQESCMSIPMQAKESGGVLRSSHTKGSVTAAQIDLAGDAHLIVSDNAAAKQVFSEEKEETKSISSSDIDILHEKSYSSGHDDHAACAAETQFYHPQKASISDGLHLGPSSLQVESLDALDSDILYVNTGVLEQHHKEGYYEPSVYQITSGICTMSEAEPFEVLETGKDVKTPSKLDEQLNPGLDGDEAEKHSLDCGTDTSPVMSKRTLSSPGSGICQSSRRRGIDELCGKLQSFKVSSAVKGSYVAMGAPRPKPGDSTSRSAAALLRNIENTTAVKAGRPPVKPNADGKDSSRRALQPISGRPDSR

SEQ ID NO: 63770 - protein, 233 aa, Zea Mays
MVAGSPIMVKLVWYYNNALGRPDKKKFIARSKAYHGSTLISASLTGLPALHQKFDLPAPFVLHTDCPHYWRYHLPGETEEEFATRLATNLENLILKEGPETIAAFIAEPVMGAGGVIPPPKTYFDKVQAVVKKYDILFIADEVITAFGRLGTMFGCDYYNIKPDLVSLAKALSNAYVPIGATLVSPEISEVIHSQSNKLGSFAHGFTYSGHPVACAVAIEALKLYRYAALLVA

SEQ ID NO: 63771 - protein, 195 aa, Zea Mays
MLCAHIYHAAFILLKLALRNSCPICRHEMPTDAALRAAASVGVAERAAGEEQAWDAPHARDFHLPPNLIREFTRTRTSSMICWTIPADTNTIILWQEITILELTTFASTEEFDTHDPKENTLLLPYLRKRSKIIEIVAARDIVFALSQLGVCAAFSSETNQRICFLNGSLDEVIRNLFYNKNNDSFKTVSVYGSE

SEQ ID NO: 63772 - protein, 77 aa, Zea Mays
MGKGGALVAVRPGRRGGWKGKGGARERWEGGGDLVGHGRRRRPRQPTGGGGAGEGRGERENPRSIPYWRRIIQYKKT

SEQ ID NO: 63773 - protein, 906 aa, Zea Mays
MLQPREADLPALFLVFIVLPVVAYFLLGRWHDAASKKARVSVLAQRAAEEAYREETMACPDIILPGSSLRTMPYFRPMPALRQEYHECATCHAPAKTRCSRCKAVRYCSGKCQIVHWRQGHKETCQKWLGSGSSSFGGSSTEATEQMPFLTNLNSPLPGGDIHLRDLNFDTLSEPSFPTTDGYNLDTDPFLADRSNMNKSNQGIHMSENGAVGVSFEKNNYNADDEIHSPENLSRNKVSNNYFGSDAISGNGDAIYPAKSNAQQPSSCAPDMRKQPKASITVYQPDIGVYLTSDMVSSCEGSYASASEPLQRSLSSGRTIGKANAVNKRPPYPSSKVVSAQKPQDRVSTSYQNDGHEKNPCNKNDQRSTPKCESSQSTSSNLQKFGASKVEVLKKPSKFLKTSLVGLINDNKRNKVLFPYEDLVKFFQYEARGISPRGLFNCGNSCYANAVLQCLMCTKPLMIYLLLRLHSKDCSSKKWCLMCELEQYASTLRESGGPLSPSRILSNLRNIGCRLGGGTQEDAHEFLRHLVMSMQAACLDGLGGEKHVEPSLQETTLIQQMFGGRLKSKVKCLRCYHESERYENIMDLTLEIHGWVESLQDALTQFTAPEDLDGDNMYKCGSCAAYVKARKQLSVHEVPNILTVVLKRFQSGKYGKINKCVTFPDMLDMVPFVTGSGDNPPLYFLYAVVVHVDTENASFSGHYISYVKDMQGTWLRIDDSEVQVVSVNQVMSEGAYMLFYMRSFPRPPRIYIEKGPTVPSAKRHTSKYSKGSKHEREQTELLLSANDPAYGVYDFRPDGEGYTQDQQAELRSRDFHRADDAFADSVSADFSEATSSEWSLFTSSDESSFTTESTRDSFSVVDYGDNAGLDPISSIFGPSYAPEHHPGPPGSFAACTRLSPSNPQTR

SEQ ID NO: 63774 - protein, 1058 aa, Zea Mays
MEAASCCRVFSTQRCRFPLRRLSAPPWPQPFCTESSGGLVTPSASKRRSRGPVMAAKKAAEGEKQEDGKYKHTVDLPKTTFGLRANSVQREPELQKLWDDNQVLKRVSERNTGTAFVLHDGPPYANGDLHMGHALNKILKDFINRYKLLQNHKVSFVPGWDCHGLPIELKVLKSMDKETLSALTPIKLRQKAAKFAKATVDAQMKSFKRYGVWADWDNPYLTLSPEYEAAQLEVFGQMVMKGYIYRGRKPVHWSPSSRTALAEAELEYSENHISRSIYAAFKITNPSKSGMLDDFFPNVSLVIWTTTPWTIPANAAVAVNPKLIYAVAEVQSVFESESTSGGKQRKVGNILSSEKGKLFVIVASDLITTLESKWGVKLVVHKSFPGSALEHCRYAHPVNSNECSVILGGDYITTESGTGLVHTAPGHGQEDYITGLKYGLPIISPVDDEGNFTAEAGQFGGLSVLGAGNAAVVKYLDEQYSLILEEPYKHKYPYDWRSKEPTIFRATEQWFASVDGFRDAAMDAIRRVTWVPSQAQNRIVAMTSSRSDWCISRQRTWGVPIPVFYHVDSQEPLITEETIEHIKAIVLKKGSDAWWYMTTEELLPDRYRDKASEYRKGTDTMDVWFDSGSSWAAVLAKRDGLNFPADIYLEGSDQHRGWFQSSLLTSIATTGKAPYSSVITHGFVLDEKGFKMSKSIGNVVDPEKIIVGGKNHREEPGYGADVLRLWVSSVDYTTDVLIGPQILRQMSDMYRKLRGTMRFLLSNLHDWKPDNSVPYNDLPKIDKYALFHLETVMTSMKDSYESYQFYKVYQILQRFATVGLSNFYLDVAKDRLYVGGRVSFTRKSCQTVLMAHLLYLVRAISPIMPHLAEDVWQNLPFQYTLQDGSLANFVFDLKWPEKNEEWLSAPKDDVDFLGVILELRSEVNKILENARTGKLIGSSLDAKVYLHTESSDTVLKLKELSSASNDADALHRLFITSQVDILPILNEEITSSVPYTGKFSNPRTGVIWIGVTRADGAKCERCWNYTQDVGSFHDHPTLCVRCYGVIELQTQPAAAAVS

SEQ ID NO: 63775 - protein, 586 aa, Zea Mays
MALNISIKILPSAAKCVTVDMVHNIGDFISELLSLMESSIVDNDKKIHGAALDITKAAPVFLDETTKLCRAYSEATKVDNCTMSITDEDATVKHNKQGLASDVIRITSSTIQTMCRLGTYAASSGGSQVILLNVSWKGVVSLLQSGKGMIEGKVNVREIIVTLLSLSIESLRVAAETWCAPLLETLGATEARRAFLPIKFFLINAVRICSTYPSEAMIIYKNIINCAVVITSSSILFSKKPQLKAANETLVELLEPTLFVLLDTLMKSSDLTPESKCQLAHHFFENEEDKSPDLMGQANQREINLASLDCIFSMDSDVDHRNRALLPAELLVFLHFLNASSWLTEMVVITLSKKLQTLLNILTSEDIYSYVLGFQIPALNGADQSPAVVWQPVYTSIIQALKAFMISTVASSAAWNELEAFLLENIFHPHFLCLEIITELWCFFIRYAETETSINLVNQVSLLLKTVASPEDVLSPLSALRKVARSLCIILSYASSATVDQIYTCVLNGENSSKSSILHLALLMEGFPLDSLSDGTKELAMKKMFTSFAGYLESYSKNHRVINVPTCKLGVVGLPIHALASALQHR

SEQ ID NO: 63776 - protein, 635 aa, Zea Mays
MEPKGELAQKRILPSRFAHPYAIEEAINSLEIDASTKASNVNLPAKKDASSSDAVSCISSGDAASTAKESEMNRETSFGDQGMYYYGYYYPGSYGGWDENGYFVGYNGVEVHPAVVQTDNGSYLCHLPGYENGYASYSQVVPGGIASVDGQYVSKEPYYSTALPIQDPRTPGIFAQPIAYRTELASAYSWDPSFVLLDGVQGHPVGVHQTNYAARPKYSFNKHVIPSSKATRSAKSAADTVKGSSSALETVTNAVNSSPPSKSANKTPGASITKGYLPYSKSVMHTNNQEKNSVYQSKGINVKESGRSWNSREKLGRSKLNGQGDSESNENNHTDNLKHSLSHRSDVVGLSSAGDANASIPSPVAISKNACNLSDFVTKYEQALFFVIKSYSEDDIHKSVKYNVWASTPNGNKRLDNAYRVAQERIAEKGTKCPVFLFFSVNASGQFCGVAEMVGPVDFNRNMNFWQQDKWNGFFSVKWHIIKDVPNPQFRHIILENNENKPVTNSRDTQEVNFSQGTEMLNIFKNFTCKTSILDDFDFYENRQKVMQDRRGKLLTTSFDHPLPKAEKSPEIKSQTQLISGPEVGRAKSDEGQGNNVGMVLDTTKKNEEQSSNVPEILDAACSNKEQPNKIAIEG

SEQ ID NO: 63777 - protein, 748 aa, Zea Mays
MVRKKRTGPGESSGETSGAPGQGSSQRPQATQQGARGGGQHQVRGGYPGHGVPPSEHPGGGPPEYQPRGYQGRGVPPLLPGGGPPEPQPRGYQGHGGYQGRGGPPSQHPGGGPSPGSQPRGYQGRGGLRPRGGVPQPYRGGHVGGSVGPIVPSGPSRPVPELHQAPDVQHQAPVVAAPSPPGAGSSSQPGMAEVSTGQVQQLVIHDQSSASQVSQVAPASSKAVRFPLRPGKGTHGSRCIVKANHFFAELPDKDLHQYDVSITPVVPSRGVNRAVMKELVNLHRHSHLDGRLPAYDGRKSLYTAGALPFTSKTFEITLQDEENSLGGGQRHQRGQRVFQVVIKFAARADLHHLAMFLAGRQPDAPQEAIQVLDIVLREFPTARYCPVGRSFYSPNLGRRQQLGEGLETWRGFYQSIRPTQMGLSLNIDMSSTAFIEPLPVIDFVAQLLDRDISVRPLSDSDRVKIKKALRGVKVEVTHRGNMRRKYRISGLTSQATRELSFPIDDRGTVKTVVQYFLETYGFNIQHTTLPCLQVGNQQRINYLPMEVCKIVEGQRYSKRLNEKQITALLKVTCQRPQEREKAILQTVHHNAYSEDPYAQEFGIKIDERLASVEARVLPPPRLKYHDSGRERDVLPRVGQWNMMNKKMVNGGRVSSWACINFSRNVQDGAARSFCHDLALMCQVSGMDFALEPVLPPVYARPEHVERALKRLYQDAMSILRPQGRELDLLMGILKGYVRLILDWSPNAV

SEQ ID NO: 63778 - protein, 1442 aa, Zea Mays
MPKVFGTGVFEFRHPRAAEYPLPADAAPATAAAPDKVPASTGGGSITLLDIQRDRLTRVATEHWGTAAAAAAFDADLVRKIYGTELRVEGRGRKTVPLQRVMILEVSQYLENYLWPHFDPVDASFEHVMSIILMVNEKFRENVAAWTCFHDRKDAFKGFLWRVLKLKEEERALNMAEKTNYLLFMINSFQSLEDELVRETILQLVSLKLWNTLSFGRLQWTKIRRREAKEAKKADQPINPSEMLENKFLRNLIEEFVEILNSKVILSNQDGAEESVLNESFSGQIDDSCVLYCERFMEFLIDMLSQLPTRRFLRPLVADVAVVAKCHLSALYTHEKGRLFAQLVDLLQFYEGFEINDHSGTQLGDDDVLQAHYSRFQAFQLLAFKQVPKLRDFALSSIGSLHKRADLTKKLLVLSDVELQDLVCNKLKLISEKDPCSERRDFLIEVLVAFFEKRQSQKDAVNALPLYPNEQIMWDESLVPSINYSGEGCLALPKLNLQFLTLHDYLLRNFNLFRLESTYEIREDIQEAVPHLHAYINNEGETAFRGWSRMAVPIKGFKITEVKQPNIGEVKPSAVTADVTFSISSYRYQIKSEWDALKEHDVLFLLSIRPSFEPLSPEEAEKSTVPERLGLQYVRGCEVIEIRDEEGALMNDFTGRIKREEWKPPKGEIRTVRVALDTAQYHIDVTETAEKGTENVYGTFNILMRRKPKENNFKAILESIRDLMNETCVVPEWLHNIFLGYGNPSAAQWMNMPDLLEVIDFKDTFLDANHVQQSFPDYQVTFINSDGTKNLHPSPPFKIRLSKKMRESSHALPGNMNSNLTVKSRNNMADGEPQKEKLIVETYIPADPGPYPQDKPKQNSVRFTPTQIGAIISGIQPGLTMVVGPPGTGKTDTAVQILNVLYHNCPSQRTLIITHSNQALNDLFEKIMQRDVPARYLLRLGQGEQELATDLDFSRQGRVNAMLVRRLELLGEVSKLARSLRLPEDVGYTCETAAYFWLLHVYARWEQFLAACAQNQDKPSFVKDRFPFSEFFSDTPQPIFTGESFEMDMHAAKGCFKHLSTIFQELEECRAFELLKSTVERANYLMTKQAKIVAMTCTHAALKRRDFLQLGFKFDNLLMEESAQILEIETFIPMLLQRQEDGHARLKRCILIGDHHQLPPVVKNMAFQKYSHMDQSLFTRFVRLGVPYIELNAQGRARPSIAELYNWRYRELGDLPYVREQAIFHKANAGFSFEYQLVDVPDYKGKGESAPSPWFYQNEGEAEYIVSVYIYMRLIGYPANKISILTTYNGQKLLIRDVINKRCKPWNIEPPNKVTTVDKFQGQQNDFILLSLVRTRFVGHLRDVRRLIVAMSRARLGLYVFCRRSLFEQCYKLQPTFQLLLQRSDKLALNLEECTPFTERPLEETGNIHYITGIEDINSSSKVQAGTSSSSAIHAVLCSSGK

SEQ ID NO: 63779 - protein, 277 aa, Zea Mays
MLKYSSWSPGPVTLDGLNEGRRDLTWQKWTYKVGLKGEALSLHSLSGSSSVEWGEPVQKQPLSWYKAFFNAPDGDEPLALDMSSMGKGQIWINGQGIGRYWPGYKASGTCGICDYRGEYDEKKCQTNCGDSSQRWYHVPRSWLNPTGNLLVIFEEWGGDPTGISMVKRIAGSICADVSEWQPSMANWRTKGYEKAKVHLQCDHGRKMTHIKFASFGTPQGSCGSYSEGGCHAHKSYDIFWKSCIGQERCGVSVVPDAFGGDPCPGTMKRAVVEAICG

SEQ ID NO: 63780 - protein, 269 aa, Zea Mays
MKMATMTAYKYQAQALMRDYLLADLLVPYTSVLFGIVLCKVAYDFTRILSSFYFKGYTLLTKIQRIEWNNRGMSSAHAIFITAVSLYIVTSTDLFSDCVKGPITFRNSIISTSALGVSVGYFITDLEMIFWLYPSLGGMEYVLHHTLSLVAIAYTMLSGEGQFYTYMVLISETTTPEINLRWFLDTAGLKKSSAYLVNGILMFVAWLVARIFLFMYVFYHIYLHYSQIMQMHAFGYYLTFVVPSVLFVMNTMWFMKILKGVMKTLAKWS

SEQ ID NO: 63781 - protein, 391 aa, Zea Mays
MDETPTSSGQSEDSSCEPNWWPPDLLEKIESASISRKHDVLGNLRSSSWKASQLLWSTGSYSGLIPNGFYSIIPDKKLKETFPTIPSVDDLQTLEADGLKADIIIVDTERDKKVFMLKQLSAALVKGLSSSPALVIKKIAGLVFDCFKRQNPDASPAKGSIEDTHFFGYKGPQLLGQIRHGSCRPRAILFKVLADAVGLESKLVVGLPDDGAVGFVDSYKHMSVVVSLNSMELLVDLMRFPGQLIPFSAKAIFISHISAAGESDSAENDSCDSPLEPNSPLYGLSDKVETEGIESSSNLSGRSLRNMMLRSRTFSEGKLSTSCSEPNIANAFWRHSQRRGVAEEPRGASSSPEHPLMRARGRSILGGEKQSFQEYTESGAASRWSWGHFNL

SEQ ID NO: 63782 - protein, 567 aa, Zea Mays
MASTKRSSRSFLYDATRPATYAIMSASLSGAPRRRTTHDAGTSPASSSGSLRPHTCMMTRRNTHAQSPTACRGPLGRLPEDGGVLDGRVRQQDGLQLGRGDLEALVLDELLDAVHDEHVAVVVDVPDVARVEPPRGVDGALRLLLLPVVALHHGLAPHADLPRRVLGQRPPRVGVHELHLQVGQDEADRLLLGDLHRRPHVLAAAAGVRQRDAAVLREPVRLLHLHARELALERRQEVRRERRGGRHDGPEGQAGQVELVGHGALHHGQHDRRHDGREHDAVRQQRAQERAQVEAVHHHHRALVPQRGAADAGDAVDVEEGHQAQGDHLPDQLLPDGEHGGAEAGHQVPVAQHHALGHPRRTRRVGERAQVGLLRRLKRHHRRARAVRHGEELVPAYGAGKPRHVPDADHRHASVLHLVVGHRVGDHEPGLGVLHLLLDLGGDGARVHAGEDRSGGHDPEAHHGVHRQVRERDHHDVAPADADGPQRPGEPRHERRLVRVGLGVRQHELRHGDVVWYGHGREPAPEDVLLLRLMQMHGGDGRVAHPQLLLVVVVVGMELKEGRCVGI

SEQ ID NO: 63783 - protein, 585 aa, Zea Mays
MLPLVPQFILDDMIESELGGSCNIVCTQPRRIAAISVAERVSDERCEPSPGSNDSLVGYQVRLDSARNERTKLLFCTTGILLRKLSGNRDLSDVTHVVVDEVHERTILSDFLLIVLKNLVEKRSNQQGRKLKVILMSATVDSSLFARYFGECPVISVEGRTHPVSTHFLEDVYEKMEYCLALDSPASGAYFAQHGEKWKHASSSVNNRRGKKNLVLSSWGDESTLSEGYVNPHYISDYYRSYNERTNQNLKRLNEDVIDFDLLEDLICYIDENCPQGAILVFLPGVAEIDLLIDRLSALVRFGGASSDWILPLHSLLGPSDQRKVFQSPPDNFRKVIIATDIAETSITIDDVVYVVDTGKHKENRYNPHKKMSSIVEDWISRANAKQRRGRAGRVKPGLCFCLYTRHRFENVMRPFQVPEMLRMPLTELCLQIKSLHLDDIKSFLLKAVEPPNEEAISSAVDLLYKVGAFEGHEELSPLGYHLAKLPVDVLIGKMMLYGAIFGCLSPILSVAAFLSYKSPFLSPKDEKQNVEKAKATLLNENLDGSSSVTDNKQSDHLLMVIAYDKWSRILLQVSNKLVFLISEW

SEQ ID NO: 63784 - protein, 56 aa, Zea Mays
MNKMDETCTKLLHRGFNLKLYVMMHARPIRPHNSCQHIVAITFYDGGIPTHSVIEH

SEQ ID NO: 63785 - protein, 890 aa, Zea Mays
MAASALWQPQEQGLREICAHLEAHISPNSDQARIWQQLQQYSQFPDFNNYLLFILARGEGKSIEVRQAAGLLLKNNLRTTYISMQSSSQHYVKSELLPCIGATNRAIRSTVGTVISVLFQIVRVAGWIELFQALHKCLESNDLDHMEGAMDAIYKICEDVPEELDVDVPGLSERPINVFMPRILQFFQSPHASLRKLSLGIINQYIVVMPSALYMSMDQYIQGLFNLAKDSSADVRKLVCSAWVQLIEVRPSILEPHLKNVTELILQANKDSDDEVALEACEFWSAYCDVSMPPEGLQEFLPHLIPTLLSNMVYADGDESLDDAEEDESFPDRDQDLKPRFHDSRLHGSETGDDDDDADAVNVWNLRKCSAAGLDVLSNVFGDSILPTLMPLIEQNLARTDDDSWKERETAVLCLGAIAEGCISGLYPHLPQIVAFLIPLLDDKFPLIRSITCWTLSRYSKFIVQSLDHPNGRGQFDKILMGVLRRILDTNKRVQEAACSAFAILEEEASEELVPHLEVILQHLMCAYRKYQRRNLRILYDALGTLADAVGAELNQAKYLDIFMPPLITKWQQLSNYDKDLFPLLECFTSIAQALGPGFAQFAEPVFQRCINLIHSQQLSKIDPTAAGAVYDREFIVCSLDLLSGLAEGLGAGIESLVAQSNLRDLLLQCCMDEAADVRQSALALLGDLSRVCPIHLHPRLQEFLTVAAKQLNPQSVKDAVSVANNACWAIGELAIKIGKEIAPVVITVVSCLVPILKSPEGSNKSLVENSAITLGRLSWVCPDIVAPHMEHFMQAWCKALCMIRDDFEKEDSFHGLCAMVAANPTGGAGSLAYICQACASWTEIKSEGLHNEVCQILNGYKQLLGNGGWEQCMATLQPDVVQKLARYGV

SEQ ID NO: 63786 - protein, 557 aa, Zea Mays
MSTLNKNIVSSQPPLVSSSADLTIPKTTATPLLLASPHQSTSVSTSLHTGFLRSRSTSGLPRQPSYTTGFGIALNIETLVAVTEQRDTPIETPPPEVQDKILFMINNISISNMEVKAKEFNEVIQEQYYPWFAQYMVMKRASIEPNFHDLYLKFFDKVNSKSLNKEILKATYENCKVLLRSDLIKSSSEERSLLKKPRQLVGKVHHWCTIHFNVNNQMTNTVTNMNRYILSLSDDKQLVPGLISLIEQGTDVLRVKALLFVALLCKNSRRWLPHFFCNAKLISAVDRLGKEKEGFIHHCTEAFVQLVASLVPGILDTVSSDIQQVMVGKRHGPVTALAGRAHPKSTIHLFPVILHLLGSASFKHRVVTGHVLLQLANLIKILEAPFQVLFKNLTVDIKDVKPTSLLKDRLREVEGNPDFSNKDVTASQTPVVAEVPSGTIPSLTHMEQQPEINITSRAMSLPNILNQYAAPVRLPTNNTVEDDKVALMMPEQVPSLTQVSPAQTQSTSPSPFSVNQLMAAIPREEIRFKINPKLGSLGPQLQYSKIMDLALDKENIE

SEQ ID NO: 63787 - protein, 202 aa, Zea Mays
MALEFVKQLGEALHSVNSKSSSHHLELIYVIPAPRMQKLNNQDFGPKDLMHLADTVDGFSLMTYDFSGPQNPGPSAPLKWIHHSLAALLSAKGSSHSNSHSRMIFLGINFYGNDFLLSGGSGGGAITGRDFVHLLEKYKPSLQWDGKSLEHFFIYSDEGVKHAVFYPTLMSLSVRLDEARNWGTGLSIWEIGQGLDYFFDIL

SEQ ID NO: 63788 - protein, 705 aa, Zea Mays
MLLTFGIRLLASWKIARMEAAMQQILDAMAYMELRLTDALVGRGGDRVEDTVSGLQSSNSATSSVATPMYDDVFDSSVAPMYPGDLHATAILDVLSRVHTLDKCMTSQDKLVIDLDPDDMETPLSESALPVVPSANEMETPTTCSTPVLTEHAPAEAAHNCTLRVPRGEPLPRLLHAFLAHDWLDHSADTDDSVLTSMSGCTKLVELQPRGVNLRGCIPDALFDVELETLNVPSHALSGILPLGSTKLAEMLQSLDLSVHQLTYGILTEMSLFFKLRVDLYCAIPVDLCESVTQGVVPAGEDEDDPKQLWHHLHARWPSDQQKQHLRSQTQHTQRHHRATTAEERTNYLSGLIPKLVKPNSVAMVTIASKPTSDSIAAQVVFDEMQQGFRTWIQRQPDTWCQSCCPSSLIDALLGGCSSVGAHCVCYLLKVYALATKLPDWIGRTQSQKLRSYRGNIPGLRPIPWPSFILLSRENKLTKSSVMVTASAIQAFVNLVLTSCDAGYSIVMFTPNYFITYMSFQMTGATDILVGGCDSRTLHYDVDWLEKVLKDKEHVPKLVTVLNSRNPSRAFIPRPMLERISDLCKSVGQHTGLCFHHRITPAVLLAFILVEFPTMRYFCRSTKLAWAVLPYHYYNSLLVGVEFLKHMILGLMYNKELYGHHGSTSHCLHYQRLGGKPHFKRWGMSVHCHVVSCGPLEGGMGYSLL

SEQ ID NO: 63789 - protein, 252 aa, Zea Mays
MDGDGGGAGALHHHTRSPEDVFRDFRARRAGIVKALTTDVEKFYQQCDPEKENLCLYGLPNETWEVTLPAEEVPPELPEPALGINFARDGMVEKDWLSLVAVHSDAWLLSVAFYFGARFGFDKDARRRLFTMINNLPTVYEVVTGVAKKQSKAPNGSSKSSKPNSKPTQKKRRTAAGRTQRRTRRTCVGPVGRAMRTGSSGSAAMCARSGSMASVSASPLPRRSTSSSTSVPAAAPSGAENDGTLGTGPAPS

SEQ ID NO: 63790 - protein, 217 aa, Zea Mays
MSDMVDYQRTLAREIEARLEAKCDALADLFAMDERDSSSLSQISSARLPERVKLIIEEIEKEEAHLLEDLASMDRKFAEHYNVLEQILAVLIQFVKDKKLEHQHQFDDLKKTWLIKRCRTMNAKLSYLEHHLLRDTYTKDTVPALHRIRKYLVEATKEASNSYNEAVSRLREYQGVDPRFDVIARQYHEIVKKLEGMQWTIHQVEMDLKPHHDHAAV

SEQ ID NO: 63791 - protein, 792 aa, Zea Mays
MVKFSKRFEGQLVPEWKDAFVDYWQLKKDVKKLQAAAGEAAVAAPARAPAHWAMRLPFFHPLGQPPAAIQVHRKLATDRSVDGAVAGEVYDTAVADGAGFADAEAAKAFFQRLDQQLNKVNRFYEREEREFLERGESLRRQLQILLELKAAVTQQQQARRGGSAADTDDPSVSWSIQLVTGGQSLRVIAEKEEECEEKLNGGDATAKISSGEGPVSQGLSESGRLCKPNEEMTRTLSGQGRSVRINIPVTTPSRTVTAIRELLFGDMPSQSKKTGAHGTDGSEKLSINKRKVHQAEKMIRGALVELYKGLGYLKTYRSLNMMAFVKILKKFDKVTGKEVQQIYLKAVESSYYNSSDKAVRLMDDVEELFLRHFTEGDRRKAMVYLKPNQREESHCTTFFIGVSTGGFIALFIGYCIMARVAGMYTQQSNKVYMSTSYPVLSMFSLFFLHLFIYGCNIFMWRKTRINHTFIFEFTPTKELKYRDVFLICTASMTIVVGAMFAHLAIIVKGNSSGVVQAIPGSLLLVFLFILVCPFNIVYQSSRYQFLRVIRNIILTPFYKVVMVDFFMADQLCSQVPLLRSLEYLACYYITGSYMTQDYGYCTRVKNFRDLAYAVSFLPYYWRAMQCARRWFDEGDINHIVNLGKYVSAMLAAGTKVAYENNNSTGWMSLVIIVSSIATIYQLYWDFVKDWGLLQFNSKNAWLRNDLILKQKYIYFVSMGLNLVLRLAWLQTVIHPNIGSLDSRVTLFFLAALEVIRRGHWNFYRLENEHLNNAGKFRAVKVVPLPFQEVEEE

SEQ ID NO: 63792 - protein, 60 aa, Zea Mays
MEIRDRTETNLVNLRRTIYLTIMSSVDFEEAGHKLMKIKLEPGQEKSRKLDLKMLRVHVL

SEQ ID NO: 63793 - protein, 445 aa, Zea Mays
MSKSNQEVPIMQALVTSRFVLPTSMYNPCMPAAAVNIYIPQTQSFGLGNVLPPSLHSQVSTGTIDENNSSFNFGDSAIGSMKRKTAVVAGNHHILHGFAGSSSSVHVPQNPVYGPWNASSQSNCLPSSAASNLPEYHNSNGWPFLEESSANASNSFTSVDACPELVPHGNNLYPACHIIQCNTWVPQTASHGVPQWGYGNVMVNPPGTVDMPNGNIQDYQAGHSSIHGPLPHFCQIPLRSMQVPQIQVPHQQFIGNNVVHGLNPSAAGLPLDPRMLAFPFNDEHTFGHQVHPPLINQANNGALRILPYQNATVMDHSRIYEAGHVIDEHRDMRLDVDNMTYEELVALQEQIGDVNTGLTESYIQENLRSTFHVPGAASISDQFCELSLENDACIICQEEYEARELIGALECGHKYHEDCIKQWLMVKNVCPICKTTALSSDRRNG

SEQ ID NO: 63794 - protein, 576 aa, Zea Mays
MKVGQVQKDLSLMLDALGKLAIANPIFTHGQLPSLVNYVEPLLSSPIVSDAAFCTMLRLARCTAPPLCNWALDIAAAIRVISVGDFEMVLDLTPVIMEDDSKKPSSGIFEQIVNGLTIACKAGPLPADSFTFVFPVLYHVLSTVPAYQPSVGPMLNELCLGLRGHELAQALVGVYAKELHVRLACLTAIKCVPVHSVQRDLQVSTSLWIAAHDPEKVVAELAEELWDRFGFDAITDYSGIFNALSHKNYNVRAASAEALAAALDENQDKMQDALSTLFSLYIRDIGTSVEFGDAHWLGRQGIALALHSIADVLASKDLPVVMTFLISRALADPNVDVRGRMINAGILIIDRHGKENVPLLFPIFESYLNKRASDEKTYDLVREGVVIFTGALAKHLSKDDPKVHSVIEKLLDVLNTPSEAVQRAVSDCLSPLMVSKQEEGQALVSRLLDRMMKCEKYGERRGAAFGLAGVVKGFGISSLKKYGIAVTLQKNLEDRMSAKSREGALLGFECLCEKLGKLFEPYVIQMLPFLLVCFSDQVLAVREAAECAARAMMSQLTGPGVKLVLPSLLKVSIYLI

SEQ ID NO: 63795 - protein, 122 aa, Zea Mays
MPQDPGKTDEASSYENMGEELGDLTPQAEEYIIQMQSHLNAMKKELHDLRRKNSALQMQQFVGEEKNDLLDYLRSLTPEKVAELSESTSPGVQETIHSVVHGLLATLSPKNLWRMLPSHFSP

SEQ ID NO: 63796 - protein, 345 aa, Zea Mays
MVKFSREYEASIIPEWKAAFVDYKGLKKLVKRIKIARRDRAARSTSNDHDDATTTTYGFSVLDPVRALASHFNNATPPASPEQEFVERADEELEKVNKFYAAQEADMLARGDALIEQLRILADVKRILADHAAASSRRGRARLARTGGNSSPPSVDGSNSGRHLLSSPFVASSPQSMSDGSVQLQQARVAEGAAVAEEVMAALERNGVSFVGGGLGKAKKDGSGKQLMGARRAAAAAGHGAHRHPAHQPRPGRAQGVGGARQRAPQGRRRPRRRLRPPQEGPARREEHPRRLPRPLPRPRPPQEVQLPQREGFHQNTEEIRQGVGAASERRPVFREGEEVAVQQL

SEQ ID NO: 63797 - protein, 77 aa, Zea Mays
MKRATSWIFVGTFERVLECWDRETREYVAIKVVHSIHKYCDAAMIEIDVLNRLVENEKYRFLLHLGNQRKVKVPCQS

SEQ ID NO: 63798 - protein, 578 aa, Zea Mays
MTPARRMPAMIGRNNGVAFGSSSALSLSQADFLDSHHLQQAFEQQLFEQIPAAAVDSSDNIIHGRSDALVDEFESKSCSENPDGTASGDDGQGDEDPNQRPNKKKRYHRHTQHQIEEMEAFFKECPHPDDKQRKELSRELGLEPLQVKFWFQNKRTQMKNRFAAVFSSIVSRASTHEVLSTGVAGSYNGALQVMSMEFQVPSPLVPTRESYFARYCKNNPDGTWAVVDVSLDSLRPSPALKCRRRPSGCLVQEMPNGYSKVTWVEHVEVDDRSVHNLYRPLVNSGLGFGATRWVGTLDRQCERLASAMASNIPNGDLGVITSIEGRKSMLKLAERMVASFCGGVTASAAHQWTTLSGSGAEDVRVMTRKSVDDPGRPPGIVLNAATSFWLPVPPKRVFDFLRDETSRSEWDILSNGGAVQEMAHIANGRDHGNCVSLLRVNSANSNQSNMLILQESCTDASGSYVVYAPVDVVAMNVVLNGGDPDYVALLPSGFAILPDGPPAPGMAPHHGGEGAAGGGLEELEAAGGSLLTVAFQILVDSVPTAKLSLGSVATVNSLIACTVERIKAAVCGAEGNPQ

SEQ ID NO: 63799 - protein, 267 aa, Zea Mays
MQATAASFLARPLPRLRRWGADAAVVREGVIALPLRLRGPRCSISLSIGAGAGAGAEADHEFSYEHVPVFPRYRIRDPYKLLGVDRDASEEEIRGARNFLIQQYAGHEPSEEAIEGAYEKIIMKSYQQRKKTKINLKTKLKKRVEESPSWVKALLGCFEVPSMDIISRRLFFFAFIAGWSIATSAENGPAFQLAISLFSCIYFLNEKMKNLLRASTTGFGILVGGWIIGSLLVPLVPTFIIPPSWSLELLTSLVAYIFLFLGSTFLK

SEQ ID NO: 63800 - protein, 1048 aa, Zea Mays
MARTSGPPGPPEPGRHDAPMLLRVHVIEARGLPAIYLNGSSDPYVRLQLGRRRPRETTVVKRSLSPVWDEEFGFLVGDVAEDLVVCVLNEDRFLGAEFLGRVRVPLTAIMETDDLSLGTRWYQLQPRSGVKFRKKRRGEICLRVYLSVRATLCDDAHQAPPQLIDDISCSSHRSIETNESPLSATVNSLDMSACASMDRTSLKSSDGFNQSMTEVRGPRSTGPLSCVSIEQSILLEPEEDDGSAIVDTSSVVEVMSRYFRKTADATHSVASDPVSLDQFRSTQMNSECRENEEGCTLPEVSLDELLKNMESKDQACELPGNLPGGVLMDQSYIIAPAELNSLLFSGTSDFWPEVSELQGTSGFNIEPWKHDNNENCLKRTITYTKAASKLVKSVKATEEQKYLKATGSSFAVLSSVSTPDVPCGNCFKVEILYRIISGSQLPLEQTTQITVSWRLNFVQSTMLKGMIENGAKQGLAEGYSHFSEVLSRKVKVAELADANTKDKILASLQTQKESNWKLVARFLGSFAFICSLSTALYITTHLHLAKPNVVLGGLEYFGIDLPDSIGEIVFCIILIIQGHNIMKVGRRFLQAWKQRGSDHGVKAHGDGWLLTIALIEGSGVVSAVFTCNGKRKTSSVKYQTSEPKWNEIFEFDAMDDPPARLDVVVHDSDIPNNETPIGQTEVNFVKNNLSDLGDMWVPLDGRFPQGHQPKLHLRIFLNNSRGTEVVMNYLEKMGKEVGKKMHLRSSQTNSAFRKLFSLPPEEFLIDDFTCHLKRKMPLQVVPPKLATVGSPSLMIILCKDRGLEARHGAKALDPQGRLKFHFQTFVSFNDAHRIIMAIWKLRSSGLEQKGEVIDKEPELKENPYEEGSLLANEDVKMSEVYSAVLSVDVSALMEMFSGGPLEHKVMERAGCVDYLATEWELLNRNVYQRHINFRFDKSLSRYGGEATTTQQKYNLPNQNDWIVEEVMTLQGVQHEDYSSIQLKYHMTSTPLRPNSCRIKVLLGIAWLKGTKHQKKAAKNVMMNSANRLREIFSEVEKEVTSRKVPASG

SEQ ID NO: 63801 - protein, 157 aa, Zea Mays
MELRRPASSPLVDNYVVPGDVVLDLSEMNNQTIKLGAGLRQECDTIQATSAGKLRQLKPNKYWIENSQKRYIPSVEDTVLGIVVDTKPDNFLVDIKGPNLAFLPVLSFEGGTRRNIPKFEIGTLIYARVVKANSIMNPELSCMDGKFFSFQLSVHFP

SEQ ID NO: 63802 - protein, 413 aa, Zea Mays
MLAFEKEKRTPKANQLYQNSEFLLAKDRIPPSDSHVRKKPKHHKKKHRSLESRGADFDAERRLYSHAFKKSSSLLSRLMKHKFGWVFNKPVDPVTLGLHDYFTIIKHPMDLGTIRGRLSRGQYRNPKEFAEDVRLTFHNAMTYNPKGQDVHFMAEQLLGIFEAQWPEIEAEVNYLASCPPLPKKFPPPPIDLRFLERSDSMRHHVALDTNSRPISHTPTYTRTPSMKKPRAKDPNKRDMTIDEKRKLSENLQNLPPVKLDAVVQVIKNKNLSVKQHDDEIEVEIDSMDAETLWELDRFVSNYKKNLSKQKRKAERAMLARQDAELRAQHPIQQPQPTPVPQEPFGEKSPKQVVKDSLEGEQLPASAPEQNGENRQNASSSSNSSSSSSGSGSSSSGSDSDSSSSDGSDAGNSS

SEQ ID NO: 63803 - protein, 251 aa, Zea Mays
MSIEERKISVISKSIALNPNAEEFVPSSLRSVNDSSKRSYATTVVSGISKESSTDKPESILRSNSDEEAHQYWQQQLPDDITPDFKVMGQDESPGPDSLSLTDLSINDGIGTSIFSPNQTLSMQHRASPFIRDKLNTHPKINLSIPTYMDERSQATILSPTAGSMSPNAAPWVKTLRNGGHYNTSIRDASQYNGDSSIGASLHNLTDAYHGSRRSLSSTMDIMNQLECRIDRTYTRIAGSMFRHSVLVAQI

SEQ ID NO: 63804 - protein, 196 aa, Zea Mays
MYPLLNFLRAHNYKGMTMMLNDRIRSLSALQGALRKAEEHLSTLQADTPYSEFHHRFQELGLEKGWGDCAKRAQETIHLLLDLLEAPDPSTLEKFLGTIPMVFNVVILSPHGYFAQANVLGYPDTGGQVVYILDQVRAMENEMLLRIKQCGLDITPKILIVSVMPNVIKKENIAAKLVTLRTLFEFFFCAGHQVAP

SEQ ID NO: 63805 - protein, 56 aa, Zea Mays
MASSSRRALPLLRHVGALDSSAWRAAPFPCFCARGALACRSSSAPPPWSSLPHPSP
